United States Patent Application Publication US 2008/0034453 A1 - sequence listing, part 25

SEQ ID NO: 211482 - DNA, 526 bp, Glycine max
  unsure (1)..(526): unsure at all n locations
attgataatgaccacgatcttgcatatactgatcaatggggaagaagaaactatgaatatatatcacttggatgtgatactttgccggtgctcaagggacgatccccagttcaatgttatgctgatttcatgcgtgctttcagagacactttcaagcacctccttggtgataccattgtggaaatccaagttgggatgggaccagcaggtgagttgcgttacccttcgtacccagagcaaaatgggacatggaaattcccaggaattggtgctttccaatgctatgacaagtatatgttgagtagcttaaaagctgctgctgaagctcacggtaagcctgaatggggaagcacaggccctactgatgctggccactataacaactggccagaagacactcaatttttccgcaagaaagtggtggatgggatggtccatatggtgagttttttctcacttggtactctcagatgctgnttggacatggtgacaggattctctcatcagccacgtcgatcttttgaca

SEQ ID NO: 211483 - DNA, 402 bp, Glycine max
gttgatagggccattgatgtgtttaacgtgttcaacatactaaagccatgctaccatttccccgatgctgccacagccaaatgaaaatggaaccttaccaagagagtttcaagcaattaggagatactgagaggcctaatgccaatgagaaagacactgtgcggtagagcttggcctattagagcaccagtcaaacctggtcttgttccattatggccccaattggctcaaactaggcacgtcgcatgtgtcactgatgaagtagcaagttgatggctaaacaacgttgcagtcaggaaagccatgcatgctgaatcggaaaaagaggcggttgcatgggaattgtgatcgactaggatggaataccgtcaaaatgcctgaagcatgattgcttaccacaag

SEQ ID NO: 211484 - DNA, 437 bp, Glycine max
gatgaagaagcatgattaacaacacaagatttttcacatccacacatttatagaacagaaggaacacgtatccacaaagtacttcatgaataattcttcatttttagatagttacatggactaagtttgagcttaaaacatcgatttgcaaagtttattgcgccaaagcacttgtgttgtagacaagaagtgcaccaccagcaagaagaccaagtagagtcacagcccagatagccaagccagtcgtaccgccagcgtagacatcaccggttggagaccagtccttggtgtcgtagataggactgtaaccatcgacattagcaccgtatttgtctacaaactggtaaacgccctttccctttcctttcctgccagatgcatcaactccttccctaaagccatgccaccattaattccataaggcttgtcagtcttga

SEQ ID NO: 211485 - DNA, 466 bp, Glycine max
tggtcggcctgtcgtctttttttttatttttttattcttatttatattattatataaagatagtctataatcactagaatttctatatatttatacttagtatataataattctagtgattatagctaagccaatctatatcataatataatataccctaatcttattcaaagaatttatggctatgccttatcatttttagtcaaagaaaagaaattatggaattgaaataactcactcagaacgccctttaaaagattacgcggtacgattgaatcaaataagcccttatggaataaatattcagctgcttgtgaaccttcaggtactgccttattcaatgtttgatcaatgactctattaccagcaaatgcaatataagcatttggttcggcaataatgatatcccccaacatgccaaaactagcagatacccccccagtactgggagacgtaagtatggata

SEQ ID NO: 211486 - DNA, 370 bp, Glycine max
cagctcttactttcttccgccatattccacaagaactctccaaggatcctccttaccacgagattctttggtgggaaaaatccaagaggtttgaaatttgaaggcagggaagatggattatttcaatgcaccaggatgaaaccatctgtttgttccagggccggttaacattccggaccagatcatccgggccatgaacagaaacaatgaggactaccgttctccagcaattgcagctatgacaaaaactttgcttgaggatgtcaagaagattttcaagaccactactggaaccccattgctcatacctacaactggtactggtgcttgggagagtgctctgacaaacacactgtctgctgaggatcga

SEQ ID NO: 211487 - DNA, 496 bp, Glycine max
acaggacaataaaagaagcaatgcattaaagctgaaagtagaaagtacgttcatcttcaaaggagtgtaaaagagggtaatatatattttacagaatttctgaaagagcagaaaaaggaagtaaagacaagaatgatttgtgactcaaatcctggaagggatcataggaatagtgttctgtaagtatgcactggcagcagcaactccacttccaagctttacaggataacccacatctttgagtatcatctctacaccagctagacatcccaacagttgcaactcattcaagtggccaagatgtccaattctgaaaaccttcccagcaactttgttcagtccaagacctaagctcaaattgtatctcttccatgccctcctaactatttcagtactatcaatgtaagcaggaacaagaacagcagtcacagtgtcactgtaccactcttccttttgggtgcaattcttcaaaccccatgcctctacagcaagtctg

SEQ ID NO: 211488 - DNA, 293 bp, Glycine max
gtgaggtcactgatccaatctacccaggtggcagcttagacccattgggccttgctgatgacccagaggcttttgctgagcttaaggtgaaggaactcaacaacggacgattggccatgatctctatgttcggcttccttgttcaggccattgtcaacggaaagggtatcattggagaacctcgccgatcaccttgctgaccatgtcaactgcatcacctgggcctatgccaccaacttagatcccggaaagtgatcgtcctataacgaactgacttctgagagttgatagat

SEQ ID NO: 211489 - DNA, 370 bp, Glycine max
gtaaaaagcaagtaacattaagttggattcggatacacaagataattcacattatctgaagtacttcaccaaacacaaatctaaaaactctcaaaagtcatttcgttctttgacgctcactttccggggacgaagttggtggcataggcccaggcgttgttgttgacagggtcagcaaggtgatcggcgaggttctccaatggaccctttccggtgacaatggcctgaacaaagaagccaaacatagagaacatggccaatcgtccgttcttgagttccttcaccttaagctcagcaaaagcctctgggtcatcagcaaggcccaatgggtcgaagctgccacctgggtagattgggtcagtgacctcac

SEQ ID NO: 211490 - DNA, 338 bp, Glycine max
gttctagatcgcgagcggatgaggtgcattcgtattcctaccacatgcgtttggaacgctgaattaattttcgcctaaaaggacaatctaagacttcggtgggatctaggctagcaaccagcgatctgggacttttctttctcccccacaccacacccagattcaaaaactcgctctgctctgctctgcaattccccttacggttcgattcgatctcaggacatgttcttcttcgatcggttctatggcattctagcttccctcggtctctggcagaaagaagccaaaattctcgtgcttggtctagatgatgcatgggagaccacacttcttcacat

SEQ ID NO: 211491 - DNA, 523 bp, Glycine max
cttagccttccctacaactccaaacacatagacatcatcatccatggctgcctccgtctccactgtcggagctgtcaacagagctcttttgaacctgaatggttctggagctggagcttcagctcccagttcagccttctttgggaccagcttgaagaaggttattgcctcaagggtccccaacagcaaggtttccggtggaagcttcaagattgttgctgtagaagagaagaaagagattgaagagacccagcagaccgacaaggacagatggaagggtcttgcctatgatatctcagacgaccaacaagacatcacaagaggaaagggtttggttgactcccttttccaagctccacaggatgctggaactcactatgcagtcatgagctcctacgagtacctcagcactggacttcgccagtacttggacaacaaaatggatggattctacattgctccagcttttatggacaagcttgttgttcacatctccaagaacttcatgaccctgcccaacatc

SEQ ID NO: 211492 - DNA, 570 bp, Glycine max
  unsure (1)..(570): unsure at all n locations
accgaaagaagtgattatgattgcacatcacagcttactgtgccacagatactttcagctgaggtggctagtcatggggaaaaaacttcaaaaacggagcttttcctaatttctggtgctgcatgcttgcctcatccctctaaggcattgacaggtcgagaggatgcttatttcatttctcaccaaaactggctagctgtggctgatggagttggtcagtggtcacttgaagggagcaacgctggactgtatatcagggaactcattgaaaaatgtgaaaatattgtgtcaaattatgaaaacaattcaacgatagaacctgcagaagttatcaccagaggtgctgctgaaacacaatctccaggatcatgttctattttggttactaattntgatggacaggtccttcatgcagccaatgtggggaacactggatttatcattataagagatggttccatctttaaaaaatcaactccaatgtttcatgaattcaactttccattacagatagttaaaggagatgatccctcaaaactcattgagggatacaccatggatctacatgat

SEQ ID NO: 211493 - DNA, 474 bp, Glycine max
aaccaacaaagtaaactcatttggaaatgaacattgttcaagaacaattagatcaaagctcaatgcaacaccaaggatgccacaaaaccctcttattttgaaacctatcctatattaagcctctacaggagcaagagctcgcagctctcattgtaccttaatccactgttggctgaaacccaaccataataataatataaagcacaaacttcaaaggaacgaatgatttttgctcaagcatcatcaagagcaaggacaccagggagttgctttccctcaagaagctctaagctggcaccaccaccagtggagatgtggctcatcttgtctgcaagtccaaccttctccacagcggcaacggagtcacctccttcaatgatggttgtcactcccttcccactcagctctgccagtttcttggctatagcctctgttcctgtggcaaacttatcaaactcaaaaacacccattggt

SEQ ID NO: 211494 - DNA, 493 bp, Glycine max
  unsure (1)..(493): unsure at all n locations
atgagaaggccagcaaggaagtattcaacatctcgggagataagtatgtcacatttgatggattagcaagagcatgtgctaaggctggtgggttcccagagccagagatcattcactacaaccctaaagattttgattttgggaaaaagaaatcatttccattccgtgaccagcatttctttgcatcagttgagaaagcaaagagcgtgcttggattggaacctgaatttggacttgtagagggtctagcagactcgtacaacctggactttggtagaggaacatatcggaaagaggctgatttctcaacagatgacataattcttggcaagagtcttgttagcgtataaacttttctatttcaattttaagtatttcacttgtatttagaaaagctgttcggatttgctacattatgaagtcgtgaaatattcatgagctnttcgttcagtatttttttcaacaaaaaataatggatattggttttgtcttc

SEQ ID NO: 211495 - DNA, 491 bp, Glycine max
cagaagaacaagtagttgagtactaagaaggagaagcaaatggcttcctcaatgatctcttccccagctgttaccactgtcaaccgtgccggtgccggcatggttgctccattcactggcctcaagtccatggctggcttccccaccagaaagaccaacaatgacattacctccattgctagcaacggtggaagagtgcaatgcatgcaggtgtggccaccagttggcaagaagaagtttgagactctttcctacctgccagaccttgatgatgcacaattggcaaaggaagtagaataccttcttaggaagggatggattccttgcttggaattcgagttggagcacgggttcgtgtaccgtgagcacaacaggtcaccaggatactacgatggacgctactggaccatgtggaagctgcctatgtttggttgcactgatgcttctcaagtgttgaaggagcttcaagaggctaagactgcataccccaa

SEQ ID NO: 211496 - DNA, 364 bp, Glycine max
cattagttctcatccattaatttccattgaagtccgaaaacagaaaccaaaaatacaggatgatgaaatctcaaaaagcaaaaacaaatgggaatgtagtttaagtacaaacaaacaaagtggggtggcggctacaaatgctttgcaaatttttcacacttagaagcctgggggcttgtaggcgatgaagctgatgcactgcacttggcgaacgttgtcgaatccgatgatacggatgaagccgttggggtatgcagtcttagcctcttgaagctccttcaacacctgagaagcatcagtgcaaccaaacataggcagctttcacatggtccagtagcgtccatcgtagtatcctggtgacctg

SEQ ID NO: 211497 - DNA, 524 bp, Glycine max
ggagctgcaacaatatacgttgcattaatataattgctattaaactgatttggagcatctgttcaagtataagacgaaacgataagggggttccttcctagtcaaggcaaaatttgcattcttaatttgctatacaagtatttaccaactctgtctacctcccgacaaaagaagcacactaagagcagctggaatttgacgtctcacatttgataacccgggtattgtaagagccacaaaatccacatttgtggtacaaccagtggaagcgtgaagtgcccttccgatcacagtcatggcagagtatgtcctgacaccggtccttgtactcttcaggaagttcctcagcagccaatagggcatcaagcataccaaagtaaaccgccatatctcccaatgacttgctgcagattggacatgtgtagtgactacacgtgtatgcctggaagcaagcagaatgcatatagtggccacaaggtagagctctgactgtggcacttgaagtgaacaggtcatcacaacaa

SEQ ID NO: 211498 - DNA, 310 bp, Glycine max
ggctcgagacaactacaaaggttgctgtatgagataagatcttgaagtaatgctaagtgcctaacacctgcagtgaacaatggcctctgcataagcatcctttctaaagccttcacttgctctagacaagtctgagtgtgtgaagggacatacacttcgtctaccttctgctgcatcaatagagagaagcaaccataccacacgatcaagcctcatcatcagagctggtatctatggtgatgagcttgtttagacctgtaaaacagtggcttaaccactgaagggtattatggccatggaagactaccat

SEQ ID NO: 211499 - DNA, 539 bp, Glycine max
cattgattgccgagattcaaccatgtttgttatatattgagacataatcaatcaagtacaccactcacagcagaaggtttataagctgtaaaggtacatgtaaccataaacaaaaatagtctccaagactataaaaacattacattttagacaaattagtcttcttccacttcatcctccgtcaacacctactataactgctggtgttgctgctgcctaacatgtatcatattcactacatacatcttagtaggagtagcctttgacgaacaactccttcttggcttcctcggattcaccctcaccggtgtacttcccaagctgggcgagcgagttggacttggcacggaaaaggagtgcatcttgtgccgccttcacgttctctgggcggcctccccatgtcttcaaggcagtgttttggagggctctggcatacgagaacgacacgtgccacgggtttggagattggttcatggcattcaagttgagggtagcttcaacctcagactgtccaccagacaaaaacataattccaggga

SEQ ID NO: 211500 - DNA, 446 bp, Glycine max
  unsure (1)..(446): unsure at all n locations
ccgggccccccctcgagatctatgaagcttgatatcgaaggactggtaccatcctgcttgcgtgggcatgactattgaagaagcaaagaaattggaccattttgtttgttcagaatgttcatctgatgatgacatgaagaaaccccaggctacatttcctgtatcaccaggatctgatggcaaggttgagccgaagcggcggaagagatgaccatcatgctgaattaactcatcttgcgaatgcacctcttgctgaatttcacgggctatgtggtagctgctgtgggtgtattgtacagcttctaccagaggctataaacatcattttatgtatttgactccggctatgtatgtattcgtcttagatttatgacagacattgatctgtttcccttgtgtctcaangaaaaattcantngtcatngaagccaacccctcactgacag

SEQ ID NO: 211501 - DNA, 368 bp, Glycine max
gggacccaagggaaacagatcaatgtctggcataaatttaagacgaatccctacatagccggggtcaaattcctaaaatgatgtttatagcctttggtaaaagctgtacaatacacccacaacaggtaccacatagcccgtgaaattcagcaagaggggcattcccaagatgagttaattcagcatgatgggcattttttccgccgttttggcttaaccttgccatcaaatcctggggatacaggaaatgtaccctggggtttcttcatggcatcatcagatgaacattttgaacaaacaaaatgggccaatttctttgcttcttcaatagtcatgcccacgcaagcaggatggtaccaatccttctt

SEQ ID NO: 211502 - DNA, 419 bp, Glycine max
tggggttataatgggacaccgcaaaaggacacgtgtgaacaaaacagcaaaacagtgaaacctgagaatctgaactgagaagaagccatggcagtgagaataaacagctccattcaaaacaccctctgtctcctcaaccctcctctgttttccctccgttacagagcttcttccctgaagttgaaaccccaattgcattttcgtcaaaacccctctcgaggagctttattctgcgcatgcgccaccaccgatatcactgcccaaagtaccgaacactgtgtactcactacccctctgtactacgtcaatgctcctccccacatgggtagcgcttacaccaccatcgctgccgatgccattgctcgcttccagcggctatttgggaagagtcgtatatttattactggcaccgatgaaca

SEQ ID NO: 211503 - DNA, 509 bp, Glycine max
cactcataacacaaagcacatagcaaagctcatccttgagttaaaaaatggcagcagcttcttccatggctctctcatccccatccttggctggcaaggccgtgaagctgggcccatcagccccagaagtgggaagggtgagcatgaggaagaccgtcaccaagcaggtctcctcaggaagcccatggtacggcccagaccgagtcaagtacttgggcccattctctggcgagcccccgtcctacctaaccggtgagttcccaggcgactacggctgggacactgctgggctttccgcagacccagaaaccttcgccaagaaccgtgaactcgaagtgatccactccaggtgggccatgctcggagccttgggctgcgtcttcccggagttgctgtcccgcaacggagtgaagttcggagaagccgtgtggttcaaggccgggtcccagatcttcagcgagggtgggctcgactacttgggcaacccaagcctgatccacgcccagagc

SEQ ID NO: 211504 - DNA, 495 bp, Glycine max
gtaaaaagcaagtaacattaagttggattcggatacacaagataattcacattatctgaagtacttcaccaaacacaaatctaaaaactctcaaaagtcatttcgttctttgacgctcactttccggggacgaagttggtggcataggcccaggcgttgttgttgacagggtcagcaaggtgatcggcgaggttctccaatggaccctttccggtgacaatggcctgaacaaagaagccaaacatagagaacatggccaatcgtccgttcttgagttccttcaccttaagctcagcaaaagcctctgggtcatcagcaaggcccaatgggtcgaagctgccacctgggtagattgggtcagtgacctcaccgagggggccaccagcaatacggtaaccttcaacggcacccattaggataacttgtgtggcccagatggcgaagatgctctgggcgtggatcaggcttgggttgcccaagtagtcgagcccaccc

SEQ ID NO: 211505 - DNA, 576 bp, Glycine max
  unsure (1)..(576): unsure at all n locations
gtagaatgccactataacagtacccgggtccaaagattattcttaacgggtcaaaaacccgaaaccatcttatcgggtaccatctcacccaccctctcaaaactcaaactcctcgatggactctacctcataaacctcatcaacatttcgggtcccttcccaaattttcttttccaacttccaaatctccaatttatctatctagaaaacaacaatctctcgggtcgaatacccgataacatcggtaaccttacccgattagatgtactcagtttaactggtaaccggttcatcggacccgtaccgagttcaataaccaagttgactcagctcactcagctcaaactcggtaacaattttctcaccggaacagttccccaaggaattgccaagctcgttaatttaacctatttgagtctcgaaggaaaccaacttgaaggtaccataccggattttttctcttccttacggatcttcggattcttaattnttcttacaacaaatttttccggaatatccncaactcgatttcttccctggcgccgaaaactgacgtacttggagctggggcacaac

SEQ ID NO: 211506 - DNA, 437 bp, Glycine max
ctcgtataatcatgcttcatttcaaacatttactcggaaaaaaacacagaatcctagctacaacccagccagccatcccatactggcaaatctagccaggccaaaaaaaaaacccgaatgacgcttcacgccctaaacccacgcccagtctacaagcgagcgctctggggctgggtagagccctgcgggtcgaaacggtcggggttcatgaccttggtccacacagcgacaaagtccttgacgaacttgacctgggcgtccgagctgccgtacaccttagcggtggcgcggagctcggggtgcgagccgaggactaggtcggggcggtcggcggaccacttatggccagacttgcggctatggccctcaaaggtctccttgtagctgtcggtcgcgcgccacgagactgaggggtcgaggagggtcacgaagaactc

SEQ ID NO: 211507 - DNA, 379 bp, Glycine max
  unsure (1)..(379): unsure at all n locations
ggtgccttatcgctgtggttttcatcgtcttccttctcttatatttctggattttgtttggcttcgccgcacgcccaaacaatggcccgaaaaggaaaagggcccgctatcggaatcgatctcgggaccacctactcttgtgtcggtgtgtggcaacatgaccgagttgaaatcatcggcaacgaccaagggaacagaacgacgccgtcttacgtcggcttcactgataccgagcggcntatcggggatgccgctaagaaccaagtcgccatgaaccccatcaacaccgtcttcgatgcccagaaggtgattggtcgtagattcagggacttctttgttcagagtgatatcaaattgtggccttttaaggtcattgctg

SEQ ID NO: 211508 - DNA, 517 bp, Glycine max
  unsure (1)..(517): unsure at all n locations
catactctcaacttcaaaaggtggaaactagcctgcagatcaaggcttctgctgaacagttctatgatgttttttgcaacaagccacacactattgccaacatttcaccagaaaatattcagtcagttgaagttcataaaggtgaatggggcaaagagggatcaatcgtctcctggaactatttacatgagggaacagtttgtgtagccaagcaagtgcttgaaggcatagacaaggaaaataacaaaatgacaatgaaggtcatagagggtgacgtgctgggactctacaagagcttcaagtctaatttgcaagttactccaaaaggaaagggcagcgtantgctttgggcaatggaatacgagaaacaagaggaccacattcctgacgctcatacctttgtgcaactggctgttgtggttagcataaaattgatgcttaccttactcaggggcacaactaaatcatcaaattaagctcatggtttactctactaatgctatctaagaaataaaat

SEQ ID NO: 211509 - DNA, 527 bp, Glycine max
  unsure (1)..(527): unsure at all n locations
gaatcctctctttgtgattgtgttctgttctgcttcctaccgcgatagtttctcttctgaagcatggccatggcggtttctgcaattggttttgaaggtttcgagaagaggctggaaatatcctttttccagccgggactttttgctgaccctgagggaatgggtttaagagctcttgcaaagtcccagttggatgagatacttacaccggctgcttgcaccattgtttcatctctcagaaatgatcatgtcgactcctatgttctgtctgagtccagtctctttgtttatgcctacaagatcatcatcaaaacctgtggtactacaaagctactgcttgcaatcccacccatattgaaatttgctgaaatgctttccctcaatgttagatctgtgaattacanccagggaagtttcatctttcccggtgctcagccctatccccatcgcaacttttctgaggaagttgctattcttgatggctacttttgcaagcttagtgcangaaagcatgcttatattttggg

SEQ ID NO: 211510 - DNA, 297 bp, Glycine max
agcacgcatacaaagtgatttattaaaatccattcgatgttcaaatggtaatagtagaacaataaaaggttcaaacgccctaacaatggtctaacataggagggaaaaaacaccaaagaaaaacattcactgtctggaaaaccggacttattttcgcaaggacatactagagacacttaagaaaactactgttcttcatcttgctctttacagcacttcatagttgatctacgtgaaccacagttacaagtcttggcaaaatattggtaaacaagagaaccacccatttcaaggcct

SEQ ID NO: 211511 - DNA, 501 bp, Glycine max
aaaatgcccactttttttcttccaacgctcctcctccttctcatagccttcgccacctctgtctccggccgccgtgacctcgtcggagactttctccggctgccctccgaaactgataacgacgacaacttcaagggcacccggtgggccgtcctcctcgccggttccaatggttactggaattacagacatcaggctgatgtttgtcacgcctatcaaatattgaggaaaggtggtctgaaagaagaaaatattattgtttttatgtatgatgacattgcattcaatggggaaaacccaaggcctggagtcatcattaacaaaccagatggaggtgatgtttataaaggagttccaaaggattacaccggcgaagatgttactgttgataacttttttgctgctttacttggaaataagtcagcactgactggtggcagtgggaaagttgtggacagtggtcctgatgatcatatatttgtatactatactgaccatgga

SEQ ID NO: 211512 - DNA, 522 bp, Glycine max
  unsure (1)..(522): unsure at all n locations
gcgaaactggtttatgggttgaagtctggttcaggatttgtgggggaagagaagagcactcacaccatatccattatcaatggacttggccgcgaagcttcaccacttagacctgaccggcgtggtcattttggacgcccgaaagccctccgcactccgccaccttccgccacgcgttctcagcagaacaaacaccaacaccaatttgatttacacgaaccggttctcgggcccaccgaggcccaattccgcttcctcaacgggcctgtccatgataaccgtcgaggacgatatcgagtctcttttctccgagacgaactcggaggaggagcggcgcgtgaggaagcaacctagcattggggcgtcggggatttcctccggggtgaagctcgaaaacgtggggaaagcctacagnggcgtgacggtgctgaaggacgtgagctgngaggtgaagaaagtggagacagtgggcctggtcggcgtgaacggcgccgggaagacgacgcagatgaggataatcgc

SEQ ID NO: 211513 - DNA, 480 bp, Glycine max
cttatctttttcccttagcttcttcctcttacactcattatttcatcatcaacaacaaggcaactattgcatctgcatgtcttccttcctacatcatcaaaaaaccacttggatttcacccttcaaaccctccacaacaagtgtttctctaagtccaatgcctccacctccactctcacatgcaaggcattatcgtcatcaaccatgatggactttgacttgtatgaccttctgggcattgacagctcttgtgatcagtcacaggtcaaagtggcgtatcgctctcttcagaagcgctgccaccctgacattgctggccctgctggccatgacatggccatcatactcaacgaagcttattccattctctctgacccaaatgcacgccttgcctatgataaggagcaagcaaaaagttcagaattcaaaggcttcactggcagacccatatactcggtctggtgtgggtcagaaagtgag

SEQ ID NO: 211514 - DNA, 485 bp, Glycine max
ctgcttttctttgtttcgcttacgcccttgcctcgttcatgctcagcgcgcgcttccgcggcagcatccaacgactccatcccttcccgcgccgtatgatgcacgtgagcggggccgctgcagcgccataccggaacgcggcgatcgctgcgcagacggaggggatccgcaagccggatctcgatgaccgcagctaccggcacctgctgctgcgcaacggcatggaggcgctcctggtcagcgatccgaccacggatctcgccgctgccgccgtggacgtgaatgtcggccacttctcggaccccgatgactttccgggccttgcgcactttctggagcacatgctctttatggggagcaaaacgtatccggacgaaaacgcgtacagcaagtacctgtcggagaacggcggtcactcgaacgccttcacctctatggagaacaccaactactactttgacgtgaagtgggacatgttcgagggc

SEQ ID NO: 211515 - DNA, 531 bp, Glycine max
gcgaaaacccccaactccaacctctgttcatcgtctaccgcgctttcttttcaaccagaactatgattaagctttttaaagtaaaggaaaagcagagagaacttgcagaaaatgcaagtggcggaccacctgttaagaagcaaagtgctggagagttgcgtcttcacaaagatataagtgagctgaatctaccaaaatcatgtaccatgcaattccccaatggcaaagatgatctgatgaactttgaagtttcaattcgacctgatgatggatattacttaggtggcacatttttgttttcctttcaagtgtctcccatctatccacacgaagcaccaaaggttaagtgtaagacaaaggtctatcatccaaatattgacttggaaggaaatgtttgtctcaacatcttacgagaagattggaaacctgtccttaatataaacactgtcatctatggcttgtatcatcttttcacggaaccaaattacgaggatccactgaatcacgatgccgctgctgtgttgagagaga

SEQ ID NO: 211516 - DNA, 540 bp, Glycine max
  unsure (1)..(540): unsure at all n locations
tgcaattgaagttaaaagccttagccttccctacaactccaaacacaaagacatcatcatccatggctgcctccgtctccactgtcggagctgtcaacagagctcttttgaacctgaatggttctggagctggagcttcagctcccagttcagccttctttgggaccagcttgaagaaggttattgcctcaagggtccccaacagcaaggtttccggtggaagcttcaagattgttgctgtagaagagaagaaagagattgaagagacccagcagaccgacaaggacagatggaagggtcttgcctatatctcagacgaccaacaagacatcacaagaggaaaggggtttggttgactcccttttccaagctccacaggatgctggaactcactatgcagtcatgagctcctacgagtacctcagcactggacttcgncagtacttggacaacaaaatggatggattctacattgctncagcntttatggacaagctngntgttcacatctccaagaacttcatgaccctgcccaacatc

SEQ ID NO: 211517 - DNA, 365 bp, Glycine max
tttttttttttttttttttttttttttttttttttttttttttttttttttttttttgggtttttttttttttttttttttttttttttttttttttaaaggaaaaggccccaaatttaatttaaggggcccttggacctcaaaatttttggggaaaacggtccactttaaaaaattttgggagaccttttaaaacttaaaattttttttttgcccctaaaacattggaaatgctaaaaatgttccccccaagtttcataaaaatttttaacccttgggttagcccaacaccttttacaaacagaaatttttccttgccaaatttgttttgcccccaatttaaaactggaaaaaaatcccccttt

SEQ ID NO: 211518 - DNA, 551 bp, Glycine max
cgcagaagttcttggtatcggaaccggaataattccttgtcattgggatttcagtctcatgtgtggtctgatggcaaggttgattctctttgcaatgatttgagcaatggacctaaaaaaccacgtacacaagtatcatactcagtgccctctgctgggtatgaattcagttcaaggcagagaaaccatcatcagaaagggctttctcataaacgagttagaaaggccaaggagaagaagtcatcagatgttgatagggtccctgaaaagaatatcaaatgcttatcttgtggtgcaaatgtcttgattactcttggtgataagggttggagagaatccggggcccatgttgtactagagctgtttgaccacaatgagtggagactttctgtgaaacttctaggaattactaggtattcatacaaagcacatcagtttctgcagcttggatcaacaaatcggtacacacatgcaatgatgtggaaaggagggaaggattggatcttggattttctgataggagtcagtgggctcttttcaagagatgcatg

SEQ ID NO: 211519 - DNA, 509 bp, Glycine max
caacaatgggtcttcttgacatcgtgcagccaggcgtcctcaacggtggggacgtcatgaaggtgtacaaatatgctcaggagcacaagtttgccatcccggccgtgaacgtgacatcgtcgtcgacgacgaatgccgctctgcaggccgcccgcgacatcaagtcgcccatcatcatccagacatcaaatggcggcgccgccttctacgctggcaaaggtattgacaacaagaaccagaacgcctccgtgctgggtgccatcgctgctgcgtatcacgtgcgtgccatggccaaacactacgggatcccagtgatcttgcactccgaccactgtgccaagaagctgctaccgtggtttgacggcatgctggaggcagacgagaagtactttgcagagcatggtgtccctttgtggagctcacacatgctggacttgtctgaagagccgatggaagagaatgtggctatcagcaaaaagtactttgaacgcatggaccagatgggtctg

SEQ ID NO: 211520 - DNA, 518 bp, Glycine max
aaaaaactttcgaaagattttatccaattgaaattttaaaaatgactgggataaacttaagaattcaattattgaaattgaataagtaaacaatttaattggattggtcgaatggtatcaaaaaaatggagtactaactcccatttcttatttattattgaattaaccgatcaacttgctttgttatcgaacatttctttttgatttcaaaaattttccggaaaaaatttgaatctatttttatatgcgaatcaatcctactacttctggtcctgaggtttctgcgcttgaaaaaaaaaatctgggacgtatcgcccaaataattggtccggtactagatgtagcttttcccccaggtaagatgcctaatatttacaacgctctgatagttaagggtcgagatactgctggtcaacaaattaatgtgacttgtgaagtacagcaattattaggaaataatcgaattagagctgtagctatgagtgcgacagaaggtctaatgagaggaatggaagtga

SEQ ID NO: 211521 - DNA, 541 bp, Glycine max
aagtagttgagaactaagaaggagaagcaaatggcttcctcaatgatctcttccccagctgttaccactgtcaaccgtgccggtgccggcatggttgctccattcactggcctcaagtccatggctggcttccccaccaggaagaccaacaatgacattaccttcattgctagcaacggtggaagagtgcaatgcatgcaggtgtggccaccagttggcaagaagaagtttgagactctttcctacctgccagaccttgatgatgcacaattggcaaaggaagtagaataccttcttaggaagggatggattccttgcttggaattcgagttggagcacggtttcgtgtaccgtgagcacaacaggtcaccaggatactacgatggacgctactggaccatgtggaagctgcctatgtttggttgcactgatgcttctcaggtgttgaaggagcttcaagaggctaagactgcataccccaacggcttcatccgtatcatcggatacgacaacgttcgccaagtgcagtgcatcagcttca

SEQ ID NO: 211522 - DNA, 534 bp, Glycine max
  unsure (1)..(534): unsure at all n locations
gagcgagcgagcgaggtagggttttcgttgttcccccgtctttgaattcagttcgcgacgatggggtccatccccgatccaggcgagttgagcgagttgactcagccgagcttcgacgagttccagcgccaaacttccctcatgaccagctgcaccctcctctggaaggagctctccgaccacttctcctccctcgagcaagacctcaaccacaaatccgaagccctcaaacgcaagattcgcaccctcgacaacactacttccgactccctccgcctcctcgatcgccgcgaaacctccctcgacgccacgctccagatcgccctccgcacgctcgacacgcgccgcaccgctgccctctccgccctcctcaccgacgccgacgacatcatcaacagctcccccgacggtgaggtcgacgacaccaccggcctcatcctcaaactcaagtccttctgcctncgcatggacgcattcgggttcttcgccttcgtcagcgccaagaagaaggagctcgacggcctacgcgccgag

SEQ ID NO: 211523 - DNA, 476 bp, Glycine max
aacgggtgaagcttctcaaaagaaactatcagcatctgctgtagattttcctagggtgaatgagagctacactggaaggaagcagcgatatgtatacggaaccacattagacagcattgcaaaagttactggcattattaaatttgatttgcatgctgaaccggataatggaaaaacaaaacttgaagtaggaggaaatgttcagggtctctatgacttgggaccagggaagtatggctcggaagctgtttatgtccctcgtgtccctggtaccgattctgaagaagatgatggatacttgatttgctctgtacacgatgaaaataccggaaaatcatttgtgcatgtgatcaatgcaaaaacaatgtcagcagatcctgttgcagttgtcgaattgccgcatagagttccatatggtttccatgccttctttgtgacagatgaacaactgcaagagcacggtaaactgtgataat

SEQ ID NO: 211524 - DNA, 463 bp, Glycine max
ccagcatatctctctattcctatttattagcacccctcacattaccttgtgtcaccaactactttgactcctttaccataccattacaataattatcaaacctaaccagtaaaaatggtgaccgaggaggaaatccgtaacgctcagcgttgccatggacccgtcaccatcttggccttcggcaccgccacgccgtgcaactgcgtctcccaagccgattaccctgactactacttacgcattaccaacagcgaacacatgactgatctcaaagaaaagttcaagcgcatgtgtgaaaagtccatgataaagaagcgatacatgcacctgacggaggagtttctgaaagagaacccgaacatgtgcgagtacatggcgccatcgctggacgtgagacaagacgtagtggtgatggacgtgccgaagctgggaaaacacgccggaacgaaagcgattaaggagt

SEQ ID NO: 211525 - DNA, 430 bp, Glycine max
ggtttacgtatgcttgcttgttgggtggcagatccaaacggagatgctactcaagaatcatcttgcacgggatccagattacttatgggcttatgaagatggcatgaccatgcacagttttggtagaccagaatgcgatgctggctttgctgctcaagctgtgcttgccactaacataattgaagaaattggtcctacgattgcacaaggacacgataccatctagaagtctcaggatactgattatccacatggagattataatagtatgcatctgcatatttctaaagggaccttgactttctctgatcaagaacatggatggcacgtttcagattgcactgcctaacgttgaaagtgctgccttcttctatgactgctgccacctgagaatgcgggatataagatggaacctgatagattatacgat

SEQ ID NO: 211526 - DNA, 595 bp, Glycine max
attttatctttattccactgaatagaacatgagcatataaatggataccctttatattatctatctttatattatctataaagggtaaagatatccgatgtgaatctatttgtttagttttctatcggtatgtatataggtgaataatccaacatgcctttttgtgaagtaaaaaaactaccctcgatccatgcctcaaaagggttgataataagtaaaaaaaaaatcaatgaattcatgataaaacccttctgcgtttttttattataaatttttttgtcaataaagggatcaaggggttgggggatcaaatggtaaagttcttttgttggtaaattggaggattagaaacatgactattgctttccaattagctgtttttgcattaattgctatttcatttattttattgattagtgtacctggtgtatttgcttctcctgaaggttggtcgaataacaaaaatgttgcattttccggtacatcattatggattggataatggttctcgtgggtattcttaattctctcatttcttgaagctctatttattctagatcaaaaacgaaatgacccctcccccagaatcctttcg

SEQ ID NO: 211527 - DNA, 496 bp, Glycine max
  unsure (1)..(496): unsure at all n locations
aattgaagttaaaagccttatccttccctacaactccaaacacaaagacatcatcatccatggctgcctccgtctccactgtcggagctgtcaacagagctcttttgaacctgaatggttctggagctggagcttcagctcccagttcagccttctttgggaccagcttgaagaaggttattgcctcaagggtccccaacagcaaggtttccggtggaagcttcaagattgttgctgtagaagagaagaaagagattgaagagacccagcagaccgacaaggacagatggaagggtcttgcctatgatatctcagacgaccaacaagacatcacaagaggaaaggggtttggttgactcccttttccaagctccacaggatgctggaactcactatgcagtcatgagctcctacgagtacctcagcactggacttcgccagtacttggacaacanaatggatggattctacattgctccagcttttatggacaagc

SEQ ID NO: 211528 - DNA, 393 bp, Glycine max
atagaggaagacggtccaatatgaaaaatatagtaagatcatctcaaacttagcatcttctctttgcacctaagacattgagaatgctaagaatgttacacgcaagttccatcacaacttctagcacttggattagtacaacaaccttcacgaacagaaatatttacttgccaagtttgctttgcctccaattcaagactggaagaaagttcccctctgaatagcatcctcgttagcatttccaagagcagcctcgttcaagtacttgtcagccaattggactctcttgacattctcttgttcttggacaagcatgttaccatacagcaagagcttctccagagtcatcttgggctgctcaaaggttggagggccatcttttgagttcacaag

SEQ ID NO: 211529 - DNA, 547 bp, Glycine max
  unsure (1)..(547): unsure at all n locations
tcggtggtgaaggtgttctgcgtccacacggagcctaatttctcgctgccgtggcagaggaagaggcaatacagctcgagcagcagcgggtttgtgattggcgggagaagggttctcaccaatgcgcattcggtagaacactatacacaggtcaagctcaagaaacgtggctctgataccaagtacttggccactgtgctcgccattggaaccgaatgtgacattgccatgcttacagttgatgatgatgagttctggcaagggatgtcacctgtagagtttggggaattgcccacacttcaagacgcagttacagttgtgggctacccaattggtggagacactatctccgtcaccagtggtgttgtatcacgcattgagattctatcttatgtccatggttctacagaacttctaggtttacagatagatgctgctataaattctggcaattctggtggacctgcatttaatgacaaaggaaactgtgtggtgattgcatttcagtccctcaagcatgaagatgcngagaatataggttatgtca

SEQ ID NO: 211530 - DNA, 591 bp, Glycine max
  unsure (1)..(591): unsure at all n locations
tgttgctctgcttcacgacagtcttggaattgctttggatgatgagagggtcaaggttgctaatcaggtgggaagtattccgcttgattgggctttgggagcttttattctgcaaacagcagctgacgcagatataaagaaccataattggatcgccaccattttcagtgatgaatcacatactctcctctcaattattggaatttttatagtgttgttaacggcatggtctatatctaggtggaggaaacctcagttgaagacaatttacgatctagaaaagggacgatatattatcacacgagttggtagataatgcttgatggtagagcagatcgtggttcttggtttacatgtgtggaggcactgttgtgattatgatgaaaatatttagcctttcgtgatggccacatcatactttcgaaggtcatgccagcggtggggctcagattgtaaatcattggattctggatgcagtatatggagttactctcgctgaggaactagtgtagaatagcaacgtttctgtgtttagtggaaatccagngattgagtgtatgtatgcctctcgcttactgatactgatacagt

SEQ ID NO: 211531 - DNA, 524 bp, Glycine max
atgtattcgagcataatttattgttctgtatacttcccacttgcagatcttctaaaaatagttgagagaacagttaggtcagaacatcaacgttcaccaaatagacccatatatcttgttggggaatctttaggagcatgccttgcactggctgttgcggcacttaaccctgatattgatcttgttctaattttggcgaacccagctacatcattcaggaggtcaagcttgcaacttctaacaccattattggaagcgttgcccaatccactctctcctggcctgcctaacattctcaggtcgacagaaggtgaatctctgaggatgctgttggataatgtggtccaaggacttcctctacaaaatacagctggagagctagtgaaggattttactgctttctcattatctctgcctgttcttgctgatatattaccaaaagaaacacttgtgtggaaactaaagatgcttaagtctgcttcggcttatgcccattcacgcctttatgctatcaaagctcagac

SEQ ID NO: 211532 - DNA, 513 bp, Glycine max
tgagggtaagcatattcctgtatctaatattagtgcaggggaaaatcatgtagttcaaatacccctaatggcacaggaggaaattctgtcttctagtgcaagtgatttcagaactgcaatggtgagtaaaaatagcaagcctcaagctactgcaatgcatgtgggagctatagaaattatcattgatagtttcgcaagtcctgactgcaacatagttggtgcaatgcttttggttgatacttatcataccaatcctgaaaatgcagttcgtagtatttttgttgcgcctttcagaggcggaaggcccattcgggtggttacatttccgaataccatcgtgcagattgaaccagacatgaattcaaggtttcagcttttgagtaccactaccaatggtgattttgttcaaggaaaagatctcgcaatggttaaagttaatgtagcatgtgctgctgttggcttgacatcaagttacactccaactccattgttggaatctggtttgcaaaaaga

SEQ ID NO: 211533 - DNA, 439 bp, Glycine max
cagaagactagttcttatcaaagactgaagacgagctttcccttgcgcctaatggccaccgatggttgaatccactatgtacgcagtgactgctgcatatgtggttccacctgcggacactatcgactgagttgccattcctcatgattcctgacactgtgcgatcattgagctgatcatctcattcatgaccagtatatctgcctctgcacacgcatggcctgacctcgtcataggacctggctctaccatcttcatcaaatgtgtgattgataatggtaatgggagcaatgtgaattatgatctggacaataagtctgcgctatccaagatcggccctctgctttactcaatcggatgtgatcatcacagctatgggtttatccatcgtgctatatgggatgactgcgatcctctggatgacgctgctattatgcat

SEQ ID NO: 211534 - DNA, 504 bp, Glycine max
  unsure (1)..(504): unsure at all n locations
cttccataaacgggtggtgcctctcttccatctccccagccaaaacctctctcaggaaggccacattacgcccttccgtcttctcaacccttaacactccttcttcttcttcctcttcatcttccttacgctatctcattcaacacaggcctgttcttgctgcccctgccctcatcatcaccccaactgtgagagaggatatggcccaggaatacgataaagctattgaagaacttcagaaattgttgagggagaagagtgaactcagagcgacagctgctgaaaaagtggagcagatcacagcttctctagggacatcatcatctgatggcatcccatcatcagaagcctcagacaggatcaaagctggtgtcattcacttcaagaaggagacatacgaccagaatccagctttgtctggtgcacttgccaaaggccagagccccaacttcatggcggatgctcgctcagactcaanggtgtgcccatctgatgtgctagatt

SEQ ID NO: 211535 - DNA, 409 bp, Glycine max
caaatgctctgtgttgtgctgtgtacttgtgttaattgtgttgttgatgtaggaaatataagtgaatagacgaatgatgacgacagtctgctatgtgtgcattggtgcttgtggcactggttgcggttgaagcgatgcccatggctgaggctgcttggacttgcaacccaacacatgcgactccttgacttccggcaattaattcaggacctgcaccttctagtgctcgttgccagaaggctgaggagcaatagccatgcttctgtggctacctcagaaaccctagcttgaagccatctgttctctctcctaatgccctcagagccgttagatcatgtggtatcgcctatgcgactcgcgaagcacctattatctatatatatgagaagtgcgaacagtatatatctat

SEQ ID NO: 211536 - DNA, 502 bp, Glycine max
cgggagctcggaatcgaggttggagggtggaggggatcataggaaatcggaagcgattactatactagacagaactagtactaaaaataaagatattactaatataaatataacaagaacaaacacaaagtgaatgtgatcagtcgcggtatttaaaattgaaagtggacgtagacaaatggaaaaggaatggagatgtttgaataataatagttcccgttcatgttcttagagagtgcgaggacatgtcaatgtgaaagtatgctcatgctctatcttcacatgaacatgagaataagatgcagcggctgtgggagtacgtcaacattgctataggcagagagggcaggtccatgcacatgcccaagtacttattgcttcgtgggtggtaattgatcggttataggcatcagccatactaattattcgaaatctagagacgatttccggtataagtcagaagatatggactatgttcatgaattcacttgagacgtgtgca

SEQ ID NO: 211537 - DNA, 526 bp, Glycine max
ttagaatccaatttcggtttggttcggttttggaaaatgttgggtggtctatacggagaccttcctccaccttcctccgccgaggaagacaacaagcccacccccaacgtctggtcctccagcaccaagatggctcccgacacgctccgcaagcccgcctccctcttcgctcccccccaaaccctcctccgggcccagcccaagcccaggcccaccaccacaaccatccccaagcccatcctctcctcctcgcccgcccctccccctgatgacgccctcctccagcccgccctcgttggcgtccagtccaccgtcctcgaagaatacgacccgacccggcccaacgactacgaggactaccgccgcgaccgcaagcgcaaagcccgtgaggccgagatgctgcgcgagctcgagcgccgtcgtcacgaggaggaagaggaggagaaggaaagggaaaaggaaagagaaagagagagagaaagagatcacagcaataacaacgattcgtcgtcgtcgaggcttaatg

SEQ ID NO: 211538 - DNA, 570 bp, Glycine max
  unsure (1)..(570): unsure at all n locations
ctccacttggttggttgattttgtaggcaatggtgcagtgatcctcactggatgtaaagctgagagattcatacttgaaaatggaaagaatggaatgaagaaaaagaagtgcttaggagtgattgctgcagcaagttggaggagtaaggtaacaaagaaactccaaattgaatccaaggtaaccatctcagcatgtggctctctcaacactcctcctctaatgatttctagtggactaaaaaatccaaacattggaaggaatctccatctccaccctgtccaatttgcatggggttacttcccagaagacatgacaacaaacttcagcggcaacaactacgaggggggtatcataacttcgatccacaaggaatatgcagaggattccaccccaaggttcatcatagaaacaccttctctaggaccaggatcttnttcggcgtttgttccgtggctttcagggcaggacatgaaagacagaatggccaagtacgcaagaactgccaacattttcgcattgatacgagaccagtgatcangagaagtgaatgcttgaaggagagtgactta

SEQ ID NO: 211539 - DNA, 392 bp, Glycine max
gagatgaagcacatgtacattcatttttatttttatgaagcttagattgaaacaatacaacttaactatatgttgatgctttgccaagtgattctgcaatcttactggcaatacagtaagatgtagactgaatggttaccatggggttgacaccaactgcactaggctaaacactcgcatcacacacatacaagccttatgcttcccaagtctcaccattctcatcgagtgcaccttcttcttcagaggcacccattctacaacttgacatctgatgtgcataggtaaacactgggcacacttcattacttgaccttggacccctcactattgccacagtgtcaagaaacttctccaatctgtctacgacatgccttacacttgattctttg

SEQ ID NO: 211540 - DNA, 499 bp, Glycine max
caagcctctactatactgcttcaccttctgctctagaaaattcagtgctgaaacatggcttcggctactctctctgtagccaaaccagcccttcaggcaaatgggaaaggcttctctgaattctctggcctacgaagctcatcaggcttccttcccttttctagaaaatcttcagaggatttccattctgtcattgccttccagacctatgcagttggaagcagtggaggatacaagaagggtgtgacagaagcaaaactgaaggttgccataaacgggtttggaaggattggaaggaacttcttgaggtgctggcacggtcgcaaagactcccctcttgatgtcattgccatcaacgacaccggcggcgtgaaacaagcctctcaccttctcaaatacgattccatcctcggaaccttcgatgctgatgtcaagcctgttggcagcaatgtcatctccgtggatggaaaggaaatcaaagttgtttctgaccgcaacc

SEQ ID NO: 211541 - DNA, 509 bp, Glycine max
attgaatctcagaattctctaaaagagatctttttctgctctttgaagaaagaagggtctttgcttgattttggagatgtctctgctctcagatctcatcaaccttaacctctccgataccaccgagaaggtgatcgcagagtacatatggatcggtggatcaggaatggacctgaggagcaaagcaaggactctcccaggaccagttagcgacccttcagagcttcccaagtggaactatgatggttccagcacaggtcaagctcctggtgaagacagtgaagtgattttatacccacaagccattttcagggatccattcagaaggggtaacaatatcttggttatctgtgatgcctacactcctgctggagaacctattcccactaacaagaggcacgctgctgccaaggttttcagccatcctgatgttgctgctgaagtgccatggtacggtattgaacaagaatacaccttgctgcagaaagatatccaatggcctcttgggt

SEQ ID NO: 211542 - DNA, 518 bp, Glycine max
ggcagctgcaacatctagtgctgtgttaaacgggtttggatctcacttcttgtgtggaggaaagaggagccatgcccttcttgctgctagcattggagggaaagttggcgcttctgttagtcctaaaagagttattgtggcagttgctgctgcaccaaagaagtcatggatccccgctgtaaaaggtggtgggagtttcatagacccagaatggcttgatggctcgctaccaggtgactatggttttgacccactaggactaggaaaggacccggcattcctgaaatggtatagagaagctgaactcattcatgggaggtgggcaatggctgcagttgtaggcatcttcattgggcaggcatggagtggagttccatggtttgaggctggagcagatcctaatgcaattgctcctttctcatttggctctctcttaggtacccagttgctcctaatggggtgggttgagagcaagagatgggtggacttcttcaacccagattctcagtcagtggagt

SEQ ID NO: 211543 - DNA, 477 bp, Glycine max
atatagaatgataggatgtagttttctatagccagaaaaagaaatgaaatttgcaggaagtctcttcttacttgaagaaggttggttacaacccagacaagattccctttgttcccatctctggttttgagggtgacaacatgattgagaggtccaccaaccttgactggtacaagggaccaactctccttgaggctcttgaccaaatcaatgagcccaagaggccctccgacaagcctctaaggcttccattgcaggatgtctacaagattggtggtattggtactgtgccagtgggacgtgtagagactggggttgtgaagcctggtatggtggtgacttttggtcccactgggctgacaactgaggttaagtctgttgagatgcaccatgaggctctcacagaggctcttccaggtgacaatgttggatttaatgtgaagaatgttgcagtcaaggatctcaagcgtggttttg

SEQ ID NO: 211544 - DNA, 537 bp, Glycine max
aaaactgaaaacccctggttcgtttttggtggctcatatgctggagcactcagtgcatggttccgtctcaagtttccccatttaacatgtggaagtctggcaagttctgcagttgttcttgctgtttataacttcacagaatatgatcaacagattggtgagtcagcaggtgctgaatgtaaagcagtattacaagaaactactcaactcattgagcacaaacttgcaaccaatggaaaggaactaaaggcatcttttaatgcagatgatctcgaaaaagatggagactttatgtatttaattgctgatgctgctgctgtagcatttcaatatggtaatcctgataaagtatgcaagcctatggttgaagcaaagaatgctggagaggacttggtggatgcttatgccaaatacgtcaaagagtactacattggaacctttggtgttaatgtgcagacttatgaccaggagtacttgaagaaaactgctatcaatgaagacagttctactcgattatggtggtttcaagtttgcact

SEQ ID NO: 211545 - DNA, 476 bp, Glycine max
aaaatgcccactttttttcttccaacgctcctcctacttctcatagccttcgccacctctgtctccggccgccgcgacctcgtcggagactttctacggctggcctccgaaactgatgacgactacaacttcaagggcacccggtgggccgtcctcctcgccggttccaacggttactggaatcacagacatcaggctgatgcttgacacgcctatcagatattgaggaaaggtggcctgaaagaagaaaatgttattgcacatatgtatgatgacattgcattcaatggggaaaacccaaggcctggagtcatcattaacaaaccagatggaggtgatgtttataaaggagctacaaaggattacaccggcgaagatgtcactgctgataactgtgttgctgctctacttggaaataagtcaacactgactggtggcagtgggaacgttgtggactgtggctccgatgatcatat

SEQ ID NO: 211546 - DNA, 548 bp, Glycine max
gcagaagcctatttggatgaggaaacctgaagagatcacaaaagaagaatatgctgctttctacaagagtcttaccaatgattgggaagagcatttggctgttaagcacttttctgttgagggtcagctggagtttaaggctgtcctctttatccccaagagggcaccttttgatctttttgacactaagaagaagcctaacaacatcaaactgtatgtccgccgtgttttcatcatggacaactgtgaggagttgatgccagaatatcttagctttgttaagggtattgtggattctgaggatcttcctctcaacatttctagagaaatgctgcagcagaacaagatcctgaaagtcatcaggaagaacttggtcaagaagtgcattgagatgttctttgaaattgctgagaacaaggaagactataacaagttttatgaagccttctctaagaatctgaaacttggtattcatgaggattctcagaacaagacaaaacttgctgaattgctcaggtatcactccaccaagagtggtgatgagatga

SEQ ID NO: 211547 - DNA, 461 bp, Glycine max
ctgggggtatttcctttgatgtgtggatggtggctcgatgtttgtaccattcagatgtttgggaagacaatggttcacagagttcagttcttctctgcatcccctttagcaagctcattggttcattgggttgttggtattgtgtacatgctactaattagcatatttgtcagccttcttagaggggttatacgtaatggagttatatactttcttcgggaccctgctgatccaaactacaatccattccgtgatctgatagatgatcctgtgcacaaacatgctcgcagggttctggtatctgttgcagtttatgggagtctgattgtgatgctggtattcatgcctgtcaaacttgccatgcggatggcaccttcgattttcccacttgacatatcggtatctgatccattcactgaaattccagctgacatgctgctctatcagatttgtatcccatt

SEQ ID NO: 211548 - DNA, 346 bp, Glycine max
gctcggaattcggctcgagaaaaaaaaaaacattaaaaatttaaaaaaaaaaaactacaaaagaaccatatagaagaaaaaaaagggcatgccgccagaccagacgagcataacacacccggaacttacttccgaaccggtacctgatggcaccccagatttccctatggagactacttttacagatgggggtcatcatgggcatacctgtgacctgtgcgaaatagcactccgatcacagtggcacacgacctatgacccgggaactctacttgaaagcctgcggaggcttatgagtgagcactctcacattgaggactttgcattcactgccagttttataggc

SEQ ID NO: 211549 - DNA, 573 bp, Glycine max
ctcgagccgtctttagagagatagagagaggaagaaagaatggcagcttgcactgtctactcaacacaatctctgagcacaaattgctccatctcaaccccatcaaagacgcaactcagttttttccaccaaaagcaggtagttttctggaggaacagcaagaagggcagctgcagcagcagaagaagctatgtgataacatgtgcagcaggtgactcacagacagtggtgattggcctggctgcagactcagggtgtgggaagagcaccttcatgaggaggctgaccagtgtgtttggaggagcagcagagccaccaaagggtggcaaccctgactccaacactctcatcagtgacaccaccactgtcatatgcttggatgattaccactctttggacagaactggaagaaaggagaagggtgtcactgcccttgaccctagagccaatgattttgatctcatgtatgaacaagttaaagctcttaaggatggaattgctgttgaaaaaccaatctacaaccatgtcactggtctcttggatccccctgagctcattaaccccccaaaatct

SEQ ID NO: 211550 - DNA, 543 bp, Glycine max
  unsure (1)..(543): unsure at all n locations
atatgtcttcctcattgcagattgaattggtaccttgcctgaaggacaattatgcttatctgttacatgatgtggacacgggtacagttggtgttgttgatccttctgaagctgtgcctatcatagatgccttgagcaggaaaaatcgaaatttgacatacatactcaacactcaccatcatcatgatcacacgggtggaaatgtagaattgaaagcaagatatggggcaaaggtgattggttcaggaactgacaaggaaaggattcctggcattgatatccacttgaatgatggagataagtggatgtttgctggccatgaggtgcgtgtaatggacacgcctggtcatacccgaggccatataagcttctattttcctggatctggggcaatttttactggagacactttgtttagcttatcatgtggcaagctctttgaaggaaccccacagcagatgctatcttctcttaaaaagatcatgtctttgtcagatgatacanatatatactgtggacacgagtatacattgaataatataa

SEQ ID NO: 211551 - DNA, 589 bp, Glycine max
tggaagtccttgagagatggagactttgatgaagaagaagtttgggacgttttcaagaacagaagtagtgattatggtacttctggggttagcaagttcaaagacaaagatcaatcctcttctgttcctgttcctgctaggcctagttcagccagaatgatcccaagatctagcaatagcagcagtgctagttcctccaatgaagatacggttcttcagcaatcagcacctgtcaacattcctgactggtcaaagatttataggactaaactccccaagaacagtgctaattcaaggtttgatggtgatggtgttgctaactatggtgggggtagtgatgaggatggagaggaaaatgatgagagtgattccaagcttcctccacatgagtttattgcccgaaggcttgaaaggagtcagatatcctcattttctgttttagaaggtgctgggagaaccctcaaaggtagggatcttagcaaagtgaggaatgctgtactctcaaaaactggtttcctcgaatcactataaagaggtctcttgagtagtgatgtagcttatggtaaaacataatcaattaatttttcat

SEQ ID NO: 211552 - DNA, 529 bp, Glycine max
caacaatgggtcttcttgacatcgtgcagccaggcgtactcaacggtggggacgtcatgaaggtgtacaaatatgctcaggagcacatgtttgccatcccggtcgtgaacgtgacatcgacgtcgacgacgaatgccgttctgcaggccgcccgcgacatcaagtcgaccatcatcatccagacatcaaatggcggcgccgtcttctacgctggcaaaggtattgacaacatgaaccagagcgccttcgtgctgggtgccatcgctgctgcgtatcacgtgcgtgccatggccaaacactacgggatcccagcgatcttgcactccgaccactgtgccaagaagctgctaccgtggttcgacggcatgctggaggcagacgagaagtactttgcagagcatggtgtccctctgtggagctcacacatgctggacttggctgaagagccgatggatgagaatgtggctatcagcatagagtacttcgaacgcatggactagatgggtatgattcagaggttgactgggct

SEQ ID NO: 211553 - DNA, 548 bp, Glycine max
aaaaaactttcgaaagattttatccaattgaaattttaaaaatgactgggataaacttaagaattcaattattgaaattgaatacgtaaacaatttaattggattggtcgaatggtatcaaaaaaatggagtactaactcccatttgttatttattatcgaattaaccgatcaacttgctatgctatcgaacatttctttttgatttcaaaaattttccggaaaaaatttgaatctatttttatatgcgaatcaatcctactacttctggtcctgaggtttctgcgcttgaaaaaaaaaatctgggacgtatcgcccaaataattggtccggtactagatgtagcttttcccccaggtaagatgcctaatatttacaacgctctgatagttaagggatcagatactgctggtcaacagattaatgtgacttgagaagtacagcaattattaggaaataatcgaattagagctgtagctatgagtgcgacagatggtctaatgagaggaatggcagtgattgacacaggagctgccctaagtgtccagt

SEQ ID NO: 211554 - DNA, 393 bp, Glycine max
cgcttgatattcgtagccatacgttgatgcacgcttccctcagccttgagctcggaattagactccagatgctactattaactgagaaggagaagcatgatggctctcatcactgatctctgctgacgctgataccactggttaccgtgccggtgccggcatggctgctacagtcactgacctcaagtccatggatgccactgccatgagtaagaccgacattgacattatcaccattggtagcaacagtgctaaatggcacttcatgcaggcatggccaccagttgacactaataagactgatactgaaaactcactgcctgaccttgctgatgcgccattggcagacgaagtgcacattctgattaggacgggatcgaataccatcttgca

SEQ ID NO: 211555 - DNA, 507 bp, Glycine max
gtcaaacatatagcaccttttattcacaaacttattaagcataaaattcatcatcgcatatccaacattgatacatcaccagaaatagatgctaatatatatgtgtacatcactgcctgaagaaatttgtcaatgatttaccgtccaactctttcgtgaagaaccttgtcataaattcatggaacgtgaagttcctataaagagctggtttctctgttgatgttagctctggtaatggtccaaaatgtttctccctatcacttgggttgaggaaaacggcaatagagactcgtggctcgttagaataattggctaacacccgatgatgagcactcttgtatgtttcattagaaattatctgaaggaaatctccaatgttaataaccaaggcgttaggctgaggcttgacatggatccaaccctgttcagtctcaacctgcaaccccccaatatggtcctgcagcaacaccgtaagagcccctggatccgcatgcgagttaagcccca

SEQ ID NO: 211556 - DNA, 488 bp, Glycine max
  unsure (1)..(488): unsure at all n locations
tcggctcgagctcttcttctcttgcggctagggttttagcgcagcttcttctagatttaaggaagatgggtaaggaaaaggttcacatcagtattgtggttattggccatgttgactctgggaagtccactaccactggccacctgatctacaagcttggaggcattgacaagcgtgttattgagagatttgagaaggaagctgctgagatgaacaagaggtctttcaagtatgcctgggtgcttgataagcttaaggctgagcgtgaaagaggaatcacaattgatattgccttgtggaagtttgaaaccaccaagtactattgcacagtcattgatgcccctggacacagggatttcatcaagaacatgatcactgngacatcccaagctgactgtgctgttcttatcattgattccactactggtggttttgaagctggaatttcaaaggatggacagactcgtgaacatgctctgctttcattc

SEQ ID NO: 211557 - DNA, 553 bp, Glycine max
ctgtttctcctgagttgggttatagggtgcagcgagtgcgtgttcaacttcctggacttagccaagagcttcttcagaaattcagggaaaagaacattgattttgcagctcataatggccaagaagagacaggttctccattagctaacctgattgggaacctggctttccctctgattttgattggaggattgttccttctctcgagacgatcgtcaggagggatgggaggtcccggtgggggctttcctcttgcttttggtcaatctaaagccaagtttcaaatggagcccaatactggagtgacatttgatgatgttgctggagtggatgaagccaagcaggattttatggaggtggtggaatttctgaagaagcctgagagattcactgctgttggggctcgcataccaaaagggtgtcattgttgatggccctcctggaactgggaagacacttttaagcaaggctattgcatgtgaagcaggtgtgccatttttctcaatctcaggttctgagtttggagagatgtttgttggtgttgtgcttctcg

SEQ ID NO: 211558 - DNA, 583 bp, Glycine max
  unsure (1)..(583): unsure at all n locations
ctgcttttctttgtttcgcttacgcccttgcctcgttcatgctcagcgcgcgcttccgcggcagcatccaacgactccatcccttcccgcgccgtatgatgcacgtgagcggggccgctgcagcgccataccggaacgcggcgatcgctgcgcagacggaggggatccgcaagccggatctcgatgaccgcagctaccgccacctgctgctgcgcaacggcatggaggcgctcctggtcagcgatccgaccacggatctcgccgctgccgccgtggacgtgaatgtcggccacttctcggaccccgatgactttccgggccttgcgcactttctggagcacatgctctttatggggagcaaaacgtatccggacgaaaacgcgtacagcaagtacctgtcggagaacggcggtcactcgaacgccttcacctctatggagaacaccaactactactttgacgtgaagtgggacaagttcgagggcgcgctcgatcgctttgcgccctttntcacctgcccgctgctctcggagtccggcacggagcgcgagatgcaggcggtcgacagcgagaaccagaagaa

SEQ ID NO: 211559 - DNA, 567 bp, Glycine max
  unsure (1)..(567): unsure at all n locations
tggagtcgcagacgatcaagcacatgatcgaggacgactgcgccgacagtggaatccctctccccaatgtcaccagcaagattctggcgaaggttatcgagtactgcaagaagcacgttgaggcgaacagtgctgatgagaagcccagtgaggatgtgctcaaggcttgggacgtggatttcgtcaacgttgatcaggccactctcttcgatctcattctggctgcaaactacttgaacatcaagagccttttggaccttacttgccagacagtagcagacatgatcaagggaaagactcctgaggaaattcgcaagacattcaacatcaagaatgacttcacccctgaggaagaggaggaagttcgtagggaaaaccaatgggcgtttgaataagttttatgattctgctgcttttgaaatttcaatgaaaagatatgccctatagtttctagtttatgtttctgactattctgcttgttttatttatggttcgcgtatcaaacttgtcttctntnttgaactcgggcaatctngcaattgtagtaatagttgaatatggtgggag

SEQ ID NO: 211560 - DNA, 580 bp, Glycine max
  unsure (1)..(580): unsure at all n locations
cttatccattgtttgagacaaggagggccaaaggaagggtcatttacacaatcttctctttatcactttttgtgggcattttgttcatctgggtttacagagtgagtcacatacccagagaaggtgaagatgggaaatgggcttggattggtttgctttgtgctgaactatggtttggtctttattggctcctcagacaccctttcagatggaaccctgtgttcagggaacctttcagacacaaactctctcaaagatacgaggagatattgccaagagtagacatctttgtgtgcacggcagatccagggattgagccagcagtgatggtgatgaacacagtgctatcagttatggcttatgactatccaactgagaagctgagtgtgtatctttcagatgatgctgcttcagatattaccttctatgctctcttagaggcttccctctttgccaaacattggcttccattctgcaagaaattcaaggtggaacccacctcaccagctgcatatntcaaaagtattgcctcatgcactcatncannatatcatgtcaatgaatnggtccccatcaagaa

SEQ ID NO: 211561 - DNA, 477 bp, Glycine max
tcggtggtgaaggtgttctgcgtccacacggagcctaatttctcgctgccgtggcagaggaagaggcaatacagctcgagcagcagcgggtttgtgattggcgggagaagggttctcaccaatgcgcattcggtagaacactatacacaggtcaagctcaagaaacgtggctctgataccaagtacttggccactgtgctcgccattggaaccgaatgtgacattgccatgcttacagttgatgatgatgagttctggcaagggatgtcacctgtagagtttggggaattgcccacacttcaagacgcagttacagctgtgggctacccaattggtggagacactatctccgtcaccagtggtgttgcatcacgcattgagattctatcttatgtccatggttctacagaacttctaggtttacagatagatgctgctataaattctggcaattctggtggacctgcatttaatgac

SEQ ID NO: 211562 - DNA, 465 bp, Glycine max
tgttgctctgcttcacgacagtcttggaattgctttggatgatgagagggtcaaggttgctaatcaggtgggaagtattccgcttgattgggcttcgggagcttttattctgcaaacagccgctgacgcagatatcaagaaccataattggatcgccaccattgtcagcgatgaatcacatactctcctctcaattattggaatatttatagtgacgttaacggcatggtctatatctaggtggaggaaacctcagtcgaagacaatttacgatctagaaaagggacgatctatcatcacacgagttggtagataatgcttgatggtagagcagatcgtggttctcgggttacatgtgtggaggcactgttgggattatgatgaaaatctttagcctttcgagatggccacatcatactttcaaaggtcatgccagctgagaggctcagattgctaatcattgga

SEQ ID NO: 211563 - DNA, 360 bp, Glycine max
tgtatatgttctatcatgaccatgacgcacactgccctcgtacttatgctcggtgagggttagcatattcctgtatctaatattagtgcaagggaaaatcatgtattcaaataccgctaatggcacaagatgaaactctgacttctagtgcttgtgaatctagaactgcaatggtgagtaacaatcgctagcctgctgctactgctgtgcatgctgtagctattgacattgtcattgatagttgcgcaagctctgactgcaacatagcaggggcaatgcttgaggctgatacttctcataccgatcctgcaaatgcaggtcgtagtattgctcgtgcaccattcagaagccccatgccca

SEQ ID NO: 211564 - DNA, 498 bp, Glycine max
  unsure (1)..(498): unsure at all n locations
cagcaaacagcaagagagaaatggaagcagcatcggccacaattctgctactgatactaattcttgctctgatatgctcatggaaggttctgaactggttatggctgagaccaaagagactagaaaaactgctaagagagcaaggttttcgtggcaatccatacacccttttctttggagactccaaggagtttctcaagatgagaaaggaagccgtatccaaacccatgaccctctctgatgacatagtgccacgtgtctctgcctatgtccaacatagtgttaacaagcatggtaagaattcttttatctggtttggaccaatgccaagggtgaccatcttagatccggagcaaatcaaagatgtatttaacaagaactatgacttcccaagcctaatttgaatccacttgtcaagttactagcaactggccttgcangctatgaaggagaaaagtggagcaagcacagaagaaatatcaaccctgctttcaattt

SEQ ID NO: 211565 - DNA, 402 bp, Glycine max
ggctatatatttatgaagtcacttttctttctttgtctcttcaataaccaagttacaatttaacaaacactattaacacacaaacatgtaaatgaaagtaaataaacacatttagtacctaagaagttattttgttattacattataagctttactataatcgtgtaatattaaaatcacacaatgaagagcctactaatttatttcatattggcactttacgtagaatgatatgagcaccatactgtggctgagtagtaattgacatagtcggagcatgagcatatgctggagaaagttcaaatgagaaattctgtaaaatcattgaccaagccatctatgcttccaataaggaaaagttttgtccaatgcatattctaggaccccatccaaagggaaaaa

SEQ ID NO: 211566 - DNA, 555 bp, Glycine max
aacgggtgaagcttctcaaaagaaactatcagcatctgctgtagattttcctagggtgaatgagagctacactggaaggaagcagcgatatgtatacggaaccacattagacagcattgcaaaagttactggcattattaaatttgatttgcatgctgaaccggataatggaaaaacaaaacttgaagtaggaggaaatgttcagggtctctatgacttgggaccagggaagtatggctcggaagctgtttatgtccctcgtgtccctggtaccgattctgaagaagatgatggatacttgatttgttttgtacacgatgaaaataccggaaaatcatttgtgcatgtcatcaatgcaaaaacaatgtcagcagatcctgttgcagttgtcgaattgccgcatagagttccatatggtttccatgccttctttgtgacagaggaacaactgcaagagcagggtaaactgtgataattttggcagcctcactgtaccgtcctgcctcagtctttgtatacaacaaataatcgatcgaccatatatatccagtatct

SEQ ID NO: 211567 - DNA, 553 bp, Glycine max
ccagcatatctctctattcctatttattagcacccctcacattaccttgtgtcaccaactactttgactcctttaccataccattacaataattatcaaacctaaccagtaaaaatggtgaccgtggaggaaatccgcaacgctcagcgttcccatggacccgccaccatcttggccttcggcaccggcacgccgtccaactgcgtctcccaagccgattaccctgactactacttccgcattaccaacagcgaacacatgactgatctcaaagaaaagttcaagcgcatgtgtgaaaagtccatgataaagaagcgatacatgcacctgacggaggagtttctgaaagagaacccgaacatgtgcgagtacatggcgccatcgctggacgtgagacaagacgtagtggtgatggaggtgccgaagctgggaaaacaagccgcaacgaaagcgattaaggagtggggtcaaccaaagtcaaagatcacacaccttgtgttctgcaccacttcaggcgtggacatgcccggagcagattaccagctcacgaagc

SEQ ID NO: 211568 - DNA, 580 bp, Glycine max
  unsure (1)..(580): unsure at all n locations
gttttatgtatgcttgcttgttgggtggaagatccaaacggagatgctttcaagaagcatcttgcaagggtcccagattacttatgggtttctgaagatggaatgaccatgcagagttttggtagccaagaatgggatgctggctttgctgttcaagctttgcttgccactaacataattgaagaaattggtcctacgtttgcaaaaggacatgatttcatcaagaagtctcaggtgaaggataatccttttggagattttaaaagtatgcatcgtcatatttctaaagggtcttggacattctctgatcaagaccatggatggcaagtttctgattgcactgcagaaggtttaaagtgttgtctacttctatcaatgttgccaccagagattgtgggagaaaagatggaacctgaaagattatacgattcagtcaatgtcttgttgtcgcttcagagtaaaaaaggtggtttagcagcatgggagcctgcangagctcaagagtggttagaattactcaatcccacagaantttttgcggacattgtagtgaacatgaatantgtgagtgcactgatct

SEQ ID NO: 211569 - DNA, 550 bp, Glycine max
  unsure (1)..(550): unsure at all n locations
atagttttaaataagaaaaaaaaaacagcgactttgtgactagttaagatcaccgtttcttcttcttcttcttcttcttcttcttctactactactactactacttttcctccacaaaatgatgctcaaaatcaagagggttcccactgtcgtttccaactaccaaaaagacgacgctgcagactctcctcgtcccgtcggaggttgtggtcggaattgcctcaaagcttgttgccttccagatgcaaagctgcctttgtatgctttcaagaaggctaatggaaaggatttggccctgcatgcatgcgccggggagcctcccctcacattcctcgactcacttcttcttggagagtgggaagatcgcatgcagagaggactttttcgctatgatgttaccgcctgtgaaaccaaggtgattcctggtgaatatggtttcgttgcccagcttaatgagggtcgtcacctcaagaagagaccaactgagttccgagttgacaaggtccttcaaccctttgatgaaaacaaattcactntaccaaagttgggc

SEQ ID NO: 211570 - DNA, 497 bp, Glycine max
attgaatctcagaattctctaaaagagatctttttctgctctttgaagaaagaagggtctttgcttgattttggagatgtctctgctctcagatctcatcaaccttaacctctccgataccaccgagaaggtgatcgcagagtacatatggatcggtggatcaggaatggacctgaggagcaaagcaaggactctcccaggaccagttagcgacccttcagagcttcccaagtggaactatgacggttccagcacaggtcaagctcctggtgaagacagtgaagtgattttatacccacaagccattttcagggatccattcagaaggggtaacaatatctcggttatctgtgatgcctacactcctgctggagaacctattcccactaacaagaggcacgctgctgccaaggttttcagccatcctgatgttgatgctgaagtgccatggtacggtattgaacatgaatacaccttgttgcagaaagatatccaat

SEQ ID NO: 211571 - DNA, 512 bp, Glycine max
ggcagctgcaacatctagtgctgcgttaaacgggtttggatctcacttgttgtgtggaggaaagaggagccatgcccttcttgctgctagcattggagggaaagctggtgcttctgctagtcctaacagagttattgtggcagctgctgctgcaccaaagaagtcatggatccccgctggaaaaggtggtgggagtttcatagacccagaatggctcgatggctcgctaccctgtgactatggcctagacccactaggactaggaccggacccggcgttcctgaaatgagatacagaacctgaactgattcattggacagtgggcaacggctgcagctgtaggcatgttcattgggcaagcatggagtggagttccatggcttgaggctggagcagagcctaatgcaattgctcctttctcatttggctctgtcttaggtacccagttgctcctaatggtgagagctgagagcaagagacgggtggacttcatcaactcagattctgagtca

SEQ ID NO: 211572 - DNA, 421 bp, Glycine max
agtcgagatctggtgattgtttttactttatagtgataggatgtcgatacctatagccagacatagaaattgaatgtggtggatgtgtacttttacttggcgaaggcctgggttcaactcctgacaatgattgctgttcgtgcccggctctagatcatgacggcggcaacctgatatgtcaggttcaccgacctggactggggctccgggccaactctggttgtggctcttgaccacgtgtctgagctcctgacgggctacggcttgactctactgctgtcattgcgagctgtgctcattaatggtgggattgtgactgtgccactggctacgagctgagactgtgagtagtgaagcctaggatagtattgactttaggtcccactgggctgacatctgatgattagcctgatgctatgca

SEQ ID NO: 211573 - DNA, 466 bp, Glycine max
cgaaaactgaaaacctctggttcgttggcggaggctcatatgctgtagcactcagggcatggctccggctcacgcattccacaattaacatgtggaagtctggcaagttctgcagttgctcttgctgactataactgctcagaacatgatcaacataatggagagtcagctggagctgaatgtgaagcagtattacatgctactactcgactgattgagcacaaactcgctgccaatggactggaactatcggcatatgctaatgctgatgatctcgaaggagactgagactatttgtatgcaattgctgatgctgctgcatgcagcatttcaatatgcggatcctgatgcagtctgcaagcctatggatgaagcgcagaatgctacataggacttgctggatgcttatgccaaatacattactgagtactaccctggaacctaggtgcaatgtgcagacttatga

SEQ ID NO: 211574 - DNA, 509 bp, Glycine max
  unsure (1)..(509): unsure at all n locations
gggaatcaattggggataggtggatgaataaggaaagcttggtctgattagtctatactatatgccttgctattccactttttctgagtttttctctgcactcctttgctagctaccctctcttttgggcttttttgggccttcaaatcttgcttggagaaggctcaattttggtggaaacctctcacacaagaaagcatagtttcttttgggttcattctacttggtgtttagagatggtgagaggaaagactcagctgaggcgcatagagaacgccacaagcaggcaagtcaccttttcaaagcggcgtaatgggttgctgaagaaggcctttgaactttctgttctttgtgatgctgaggttgctctcatcattttctctccaagaggaaagctttatgaatntgcaagctcaagcatgcaggacacaattgaacgataccgcaggcataacaagagtgctcaaacagtgaacagatctgatgacaaaatatgcagcatttgaagc

SEQ ID NO: 211575 - DNA, 405 bp, Glycine max
cagaagaatagtagcaatcagagactgaagacgagcttccccttgcgccgaagggccaccgatggttgaaaccgagatggatgcagaaactgttgcaaatgtggttccaccaaaggagactccaaatagcgtttccatttctcatcattcctcacacccttcccttaatgagaggattatttcatccatgaccaggagatctgttgctgcacacccatggcatgaccttgagatatgacctggggcttcaattatcttcaattgtgtgattgagattgggaaaaggagcaaggtgaaatatgaaccggacaaaaagtccgggcttatcaagatcgaacgtgtgctttactcattagttggttaatcttacaactatgggtttattccttgtactatttgtgaaga

SEQ ID NO: 211576 - DNA, 502 bp, Glycine max
cttccataaacgggtggtgcctctcttccatctccccagccaaaacctctctcaggaaggccacattacgcccttccgtcttcgcaacccttaacactccttcttctccttcctcttcatcttccttcccctctctcattcaagacaggcctgtttttgctgcccctgcccccatcatcaccccaactgtgagagaggatatggcaaaggaatacgagaaagctattgaagaacttcagaaattgctgagggagaagagtgaactcaaagcgacagctgctgaaaaagtggagcagataacagcttctctagggacatcatcatctgatggcatcccatcatcagaagcctcagacaggatcaaagctggtttcattcacttcaagaaggagaaatacgacaagaatccagctttgtatggtgaacttgccaaaggccagagccccaagttcatggtgtctgcttgctcagactcaagggtgtgcccatctcatgtgctaga

SEQ ID NO: 211577 - DNA, 578 bp, Glycine max
caaattctctgtgttgtgttgtgtacttgtgttaattgtgttgttgttgtaggaaatttaagtgaagagagaatgatgatgaagtctgctatgtgtgcattggtgcttgtggcactggttgtggttgaagtggggcccatggctgaggctgcggtgacttgcaacccaacacagttgactccttgtcttccggctattaattcaggttctgcaccttcgagtgcttgttgccagaagctgaaggagcaaaagccatgcttctgtggctacctcaaaaaccctagcttgaagcagtatgttaactctcctaatgccaaaaaaaccgttagttcttgtggtattgcctatccaacttgttaagcacctcttatatgtatatataaactgtgtgaacaatatatatatattgattaaaaaatatagggtaatttatatacacactttgatcctataaaaacatcttgacacaagcattcaatagaatttcagcactttatcatgacattttactattatgatgtggtaatcaagtaaattcttgttgacattttgtataagatgcttatactcatggttct

SEQ ID NO: 211578 - DNA, 515 bp, Glycine max
gttggaggggttcatagatttagggaatcgattactatactagtaataaattgtacaaaaaataaaaatataaataatataaatataaaaagaacaaacacaaattttatgtgattagtcgcggtatttaaaataaaaaatgaaagtagacatataaaaaaggaaaggagatgtttgaataaaaataattccccttcaagttcttattttttgagaggacaggacaatatgaatgttttattatgctctatcaacacattaaaaagattatatgatatatctgctgtggaagtaggtcaacatttctattggcaaatagggagtttccaagtacatgcccaagtacttattacttcttgggttgtaattgctctcttattggtttcagccattctaattattcgaaatctgcaaaccattcccgctttcggtcagaatttctttgaatatgttcttgaattcattcgagacgtgagcaaaactcaaattggagaagaatatggtccgtgggttcc

SEQ ID NO: 211579 - DNA, 556 bp, Glycine max
ctcgagccgtctttagagagatagagagaggaagaaagaatggcagcttgcactgtctactcaacacaatctctgagcacaaattgctccatctcaaccccatcaaagacgcaactcagttttttccaccaaaagcaggtagttttctggaggaacagcaagaagggcagctgcagcagcagaagaagctatgtgataacatgtgcagcaggtgactcacagacagtggtgattggcctggctgcagactcagggtgtgggaagagcaccttcatgaggaggctgaccagtgtgtttggaggagcagcagagccaccaaagggtggcaaccctgactccaacactctcatcagtgacaccaccactgtcatatgcttggatgattaccactctttggacagaactggaagaaaggagaatggtgtcactgcccttgaccctagagccaatgattatgatctcatgtatgaacaagttaaagctcttaaggatggaactgctgctgaaaaaccaatctacaaccatgtcactggtctctggatccccctgagctcat

SEQ ID NO: 211580 - DNA, 499 bp, Glycine max
atatgtcttcctcattgcatattgaattggtaccttgcctgaaggacaattatgcttatctgatacatgatgtggacacgggtacagttggtgttgctgatccttctgaagctgtgcctatcatagatgccttgagcaggaaaaatcgaaatttgacatacatacttaacactcaccatgatcatgatcacacgggtggaaatgtagaatcgaaagcaagatctggggcaaatgtgactggttcaggaactgacaaggaaaggattcctggcattgatatccacttgaatgatggagataagtggatgtccgctggccatgaggtgcgtgcaatggacacgcctggtcataccctatgccatattagcttctattatcctggatctggggcaatgattactggagacactctgattagcttatcatgtggcaagctgtatgaaggaaccccacagtagatgctatcttctgataatgagatcatgtctttgtcagatga

SEQ ID NO: 211581 - DNA, 533 bp, Glycine max
ggacagtaaaacagaaagttgcaatatattcaccaaagacaacagccttgtcctctcaaccaacaaccatgaattcaggtcctagcgaagacggacacacctcatgaaaataaataaaaaattaaagaaaataagtatctttagttcagcagttaagctaaccaacaaaaacaaaccaaagtataatctcacaccaaaatatgtataacattgatccagaaaatgtcttaatattcccatttcttcaactccatgccatcaggagcacttccctctaccttctttgatcccacttctttccagtttgtagacagcactgtcccattagactcaacaaaagactttttcattgccctccttgtatcctcatctgcatcttgatatatttcacggaaaaatttgttcaacgcagcatcgccatcaagcttttcgtctttctcctctttcttgacttgagcttcaatcttgtcccagtctcttggttgttttgaggacgggtaagaaagtctttgaactccagtaactgaagaagc

SEQ ID NO: 211582 - DNA, 553 bp, Glycine max
  unsure (1)..(553): unsure at all n locations
tgaaattgatgctcagcaagtctttggctatgctctgtataaggatggcaaaaataccaaactctcttatcccttggaaaattttggctctgatatttctgggagaagctttcataatggccgtttcatacagagaatgcgagaaaaggcttcatctcttccaaatgtaaaattagaacaaggaactgtcgcatctctacttgaggaaaaaggaaccatcactggggtgcactacaaaaccaaaagtggtgaagagttcacagcaaaggctcccctcaccatagtatgtgatggttgtttttccaacttgagacgttctctttgcaatcctaaggttgaagtaccctctcattctgttggtctggtcttggagaattgtaatcttccatatgcaaatcatggacacgtcatcttaggttcctccagagctgtatgattcatttattgcagctggtgacaaaggaaacataagaaccatgccaaatagaagcatgcctgcctnaccttatcccacaccaggtgcccttctaatgggagatngcctcaatatgcg

SEQ ID NO: 211583 - DNA, 480 bp, Glycine max
acagtggaaatagatatattttctaatttttttcgattaccgaacaacttgagactgtcaacttaataaaaacaaggagagaaaaaaaaaaaaaacaaaaacccgttgacccatattatagagacagagccaactcaaactttctaccttgattcatggattcacttaacatttagtggctccaaagggccatgcacctgctacttaacattatgattatgattattattattattattattatcattaagtacttaatccacgcctagggcaaactttaacatagagcgggttagccattttacacgagagcctcagcacctccgttagatcaaccttcccctcatcagatggtagccattcaaactcgtgcaaaagcctcgacacccagaaagtcacggtgctcaaacccaaagactttccggggcaggttcttctacccgacccgaatggagccagcctcagatccgacccgagaac

SEQ ID NO: 211584 - DNA, 463 bp, Glycine max
aagaataatttttgtatcacgttgaattgatcatgtaaaaaattacaaatgaacatagaagaaacaaaatagaaggaggggaggaggagaagcacacacggagtaagtaagtgacatgaaacaaataatagatatcgtaatggcaacgctcaaaaaactaccagcaaagaacggtggaatgaatggccttaggccttttcccacttgaggggcttgaccacttcccatgtgaagtcagggtcctttctgccaaagtgtccataagcagcagtcttcaagaacctgttattcccaccccttttgagatcaaggttgatggagatcataccgggcctgaaatcaaagttctccttcacaatgttgagaatctccttatcatggatcttcccggggccataggtgtcaacaaagacagacaaaggctcgggcacaccaatggcataagacacttgcacaatgcacc

SEQ ID NO: 211585 - DNA, 620 bp, Glycine max
  unsure (1)..(620): unsure at all n locations
agcacaaattcattggccagaaagctgacacaaattttccatatagaaactaaatacactactaatccaggaaacggcacctaactagccaacattccaaaatttcgaaaattcaaaacataaacatagtaaaagactgttccccaatcattgtttctaaaaacacaaaggcaaatcaataattaagttagatttaatcaacttcttccatcttgctaccctcagcatcggcatcagcatcggcgtcctcgagaggaggcatgtcagcatctgcttcaccagcatcttcatcaatgctcagtccaagcttcagcatcctgtgaatcctgttaccgaaagtgttgggatcatcaaggctgaacccagaagttagaagagcagtctcaaagagtaggagaacgagatccttcacagatttgtcattcttgtcagcatcagctcgcttcctcagttcatccatgatggggttctcagggttaatctccatggtcttcttgctcgacatgtatccagccatgctgctgtccctcaatgcctgtgctttcataatccttntcatggtgggctggcacccatattcaccagtcacgagacagcanggagaaatcacaacacgatca

SEQ ID NO: 211586 - DNA, 459 bp, Glycine max
cataatataagttcttccttggtgagtcttcattatattgaattatattatatatcatatgggataaaatgtactacgggaacgcaaataagggggtgaaccatgctcaaagacataccagacccagattccatatcaaccttttctccttttccatctttaccaattttccaatcaaagcactgcaccatagcagcaactgcagtgttcatcaagctgaatgccagtgctgtccctggacaacctctcctcccacctccaaatggaacaaaattgaacttcattctcttaccatcatcactcaaatcctcatgatcttgttcttgcaagaacctttcagggcaaaactcattaggattgtcccaagaatcagggtctctcattatggcatacaaattgattgccactgctgtctttggtggcacatcgaagctgtttattttgcagtgttggcgacac

SEQ ID NO: 211587 - DNA, 472 bp, Glycine max
catgaatcatggctagggttttggctcattctgttaatgtccctggtctagtgggtgagcataggcatggtcagccaaagggatcaggaaaattaaaaagatcgaccaaaatgatgagtgctttacggacaactggattaacaatgtcaggtttctcagggcttcgtactttcaatcctttggatactatgttgagacctggcatagattttcattctaaggtatccattgcaacggcttcgcggcaagcaagagctaccagatgcgtgcccaaagccatgtttgagcgtttcactgagaaagcaatcaaagtgattatgctagcccatgacgaagcaagacgtgttggtcacaatttttgcggcacagagcacattctattgggtcttatcggcgacggaactcggattgctgctaaggtgctgaagtctatggggatccacctcaaagatgcacgagtggaagtagaaaa

SEQ ID NO: 211588 - DNA, 525 bp, Glycine max
  unsure (1)..(525): unsure at all n locations
gcactctgctggaacctttgtgacatgggtcagatatatctatactatttaccttatttctgcttaatcagtattattgttgttgcaattgttgttcctgctcaatgttatcgtgttctaatttatgttataaacttataatactcttctatgtgtgtgttttggtcataatgtttgtgtgcaatgaatgagttattattgacaaaataaaaatgacatccatgttcgtctgaggctcaaatttcctattatgtcatactgttccttatatgctaattattttttcaacaatatttatcaaagttacatttgacttttctgtgattatgaaaaaagtacacttatcagaatcctgcgatatatcaaattatggtacatatgatcggttggctcaaaacaacatcatccttattttacaaaanaaagtgttaaaaaaatacagtcatgcaggattacattatttttttaaaaaaaattggtgtatatgtacttcccttattgtatgattaaaaaatatcatatcat

SEQ ID NO: 211589 - DNA, 398 bp, Glycine max
gcaaaaaccggtgcctttaatgaaactttcagccaaaatgggacaacggttttcacttccttaaccaaactttggcccgctgggtttcccaaaccttggcctttaaaaaataccttcccttgacaagatttcattacttccccaattcttcccttggaaacccacgctctctgagaacctccccaaacgggttaattttttggccagcagcagctggtgctccggccctggtgagggccttattgccccctaatgggtttcccaaagcgttggcaactcccggcatttccagaacaaatcttacaggcccccctgcgattacccccggaccgggagaaaccgggctaagccttccctttggccggccaaaacttccatcagatttttgggggaaaggg

SEQ ID NO: 211590 - DNA, 497 bp, Glycine max
aatagaatccattatttatatataacaataaactactatatacacatacaatgtattctagtttagtcccctaaaacacgagcaagttattctgggtgtcgtagcccaacttctccaaattcggctggactgcaaattgaatcataggtggtggtccacaagtcaatgccaaggtatcaggagatgcatttggaatatgctccgtcaggatactttcagtgatgaatcccacactgtattcccacccttctcttatgctttcttgtatcacgtaccacaccttcaacctatcatacttcttagcccactcatcaagctcttccttcagcaatatatcatcctcggttcggttcgcgtaaaccacatgcatctcggtgcagtcctctggatcctttagaatggcttgaaccacttggtaaatgggtgtgattcctgtgccaccagccaacatggctagcctcgtggcaaaccttggtttcccatgaacgaggaagttt

SEQ ID NO: 211591 - DNA, 492 bp, Glycine max
gaaaaacaataaaaattcctttcttttccaactaaaaacaccacaagtacattgcttttcatttgaaagctaacatttcaccaaaacaatactacattgtaattgtaaaaaaatccaatcaaaagataaaagcagagactaccttaatatagttaattccatattttgaagaagatgcatgcacttaaagccagtgtagtagatttaatagtatgagagcttggcaatctgcccttgtccttccttaagaaaaggccttggtatattgggaaattgatgagaaccaaaaacccacacaatagaacttgcaatgccattttctcaccagtcaaagcaactttgcaaaggactaactcttttatagtggctagtaagcaaaacaaatggagtaatgcaagtgttgctagtacagtgaaaaatggagaagaggttccaaactccatgacctcgttcttgtaacgttgggaaacatcatcatcttctacaatctta

SEQ ID NO: 211592 - DNA, 516 bp, Glycine max
aaaatacaattacattgtgcttacatatatatagatatatgaatatgaatattgactggttgtaaaaccgtcaacctggtcaagcggccagatacttaataataataatcatcaggataatcagacctataatcatcataatcatcatcatcatcttcttcttcttcttccaactcttcctcatgatcatctaaccaaatattctcctcggcccaaagagggcaagcacatgttgcttttttgtccttccactctgctccacagttatagcaaaattcgtaaccgcatctgcaagtcatgtgatagcaaccttcagcaagttcaatcatatggttacacttcagacactgttgccataggctccttgatgccagaaacttcagcttcaaatcttctgcaggaggaataggattcatccttttgtaagtattacatgtcataccactatgccaagggaccttgcagttaaaacagaataggccacgacattttaggcatatcttgggttcagattgt

SEQ ID NO: 211593 - DNA, 398 bp, Glycine max
atgactctggtgttatttttgattttgcaaattaaattacacaatcacagccgtacatcacacatgagttgggcctcttccaacttaaaagcagaggataacattggcccatgacgcgacacatgcaccacctaataatcataattttacatctttacatacaaaatacaaagactttaaattttaaaaagaagaaaagagataaacagatcatcttaatgaaatgaaaccaaaacccacaaacattggcttgatttttgttgttgttgttgttcccaacttgattaagcatgaaccgtttgattgaatcacttggacttgaagggaatggccctgattacgacctggtggtagagtgctgcaagagctgcaccgatgaatggtcccacccagaagat

SEQ ID NO: 211594 - DNA, 458 bp, Glycine max
gtgaattctctacggggatatatcatcacatgcattccgccaccaaacttttccagtcattatcgtaactcgtctgatgatgcaaagaaaccgtgaaaaggcctttatagccatgaactccgaagaccgcctaaaagaagaagtctatgctcgaaagaagaaagacaaagaagaagactcaggggagcgatccgcttagtcaacctcctcaacggtggggccgtcgtcgccgccagcgccgggggcagcgcctccgggagcgccaccgggcataccgccgggcatgccaccctcaccaccagctccatagaacttcatcatgatggggttggcaacggcctcaagctccttctgctgagactcgtactcgtccttggtggcggtctggttgtcgtccaaccaggtaacggtcttgtcgatctcggccttgagcttctccttgtcaccagcatcaagct

SEQ ID NO: 211595 - DNA, 554 bp, Glycine max
  unsure (1)..(554): unsure at all n locations
gctattaagactgctctcaagagagcaaatgttgatccatcactcgtgcaagaggtgttttttgggaatgttcttagtgccaatttagggcaggctcctgccagacaggctgcattaggtgcaggaattcctacatctgtaatctgcactactattaacaaggtctgtgcatcagggatgaaagctaccatgcttgcagcactcaccatacaattcggtctcaatgatgttgttgtggctggtggtatggaaagcatgtcaaatgcacctaagtacattgcggaggccaggaaagggtctcggtatggacatgataccatcattgatggtatggtcaaagatggcctttgggatgtctataataacttcggcatgggagtatgtgccgaactatgtgcagatcagcatgtcataacaagagatgagcaggactcttatgccattcgaagctttgagagaggaatatctgcccaaaatgctggtcattntgcttgggagatagttcccggtgaagttttcccctggagngagggctttccaaatgtgataagatg

SEQ ID NO: 211596 - DNA, 533 bp, Glycine max
atcccaaattcaggtcatcatacattaattaagaaagaatataataaaccaagaagaagaaaatagaggctgcattcttggctaaattgttcctttcttactaagcagtttgctttgtctagaagataacaaagaaacagttactcatcttagatgatgggaatggggaaaggcataattactacccatgttcaaagtgacgtactagtaatagaactatagaatgatagattccaacccatgtagttaagaaaacatttgggtgtggatctcatcaataagcctaaaaattacacaaacaattacataaactgcaatgtaagttaccatgcacctttaaaaatataaggtaattagcttctgctgctgctcctcagcatctccaagtagaaactgagatgagttctttcctttgccagcatagaacaagtgatgaaggctttctctccacatgaaatcccctcacaggtgccctctgaactagacactcagcttgagcttctgtgaagttgctaaatgtgaatggagagaat

SEQ ID NO: 211597 - DNA, 411 bp, Glycine max
tactagtcggcggccgccctttttttttttttttttttttttttttttttttttttttttttttttttttttttttttaaaggaggggataaaataaagttattttccacaataaaatgctagattcatttaatttcaaagaattatttttggaactgtatattattattctttaatagacctttacgcaaaaagaatgctaaggaatgatggtacaaagcgtaccgtatgggtcccaaacgaaatcctatacccttcgtatccgtatacccgcgggcgtattaaaaacgccccccttgtacaaaacttccaaacacccaaaaaaaaaaaacccgtcctacaaaatctcacacgtgcaatccaaacccaccgaagaaccgacgtgagaagaaccccccgcacgtggttccc

SEQ ID NO: 211598 - DNA, 557 bp, Glycine max
aaagcattgaataaggattgaagtattaaaaaaaataaaactttatgatttattggtttacatagttggataaggaaaaagataacagaacatatctgtgtaagcctactaagtaatctcaaaagcaaataaaaattatggaacatgaaaatgagaaacacatccaaatacagatgccaaaggtagaaaccccaattctcatcaagggaaggctatcccagggacaattaacttggtaaatgagatgaatcaacacggaagcacccctcaaagctatgtcagattgtagataccagcaaatcttctactgagtcaatctaaaagcacttcaccaaaccatcccataacagcacaattgtacacaaacaccccaacatgctccttcacaccaagtacttgccaatctatggttccattcctgactcctgtcctaggacaccatgaattcagtacaacagcttcaccttctggactcctttgtccactcacaaccagaagtttctctccacaagccttgaaagccaggccccatccattagaagaatcgcacgtactgg

SEQ ID NO: 211599 - DNA, 480 bp, Glycine max
gactataaagtaaagcaagtgcctttctcataaagtttagtaaacatgtgtttgttgagctgaacttaatagaagtggaaataggtatgtgtagtaagaaaattaataagggacacgaacaccttggtacctgagaatttccccaatgagctcccctttgccagaaccgacgtacctgccttcaatgttgccatctctgatgaagagaaaggtagggacctggatgacttccatgtccttcaagaactgcatgcagctctcgttctagtccccgttcattcgagcgaacactaccgagtacatctgcctcgagagcttaaccactgtaggataaaccttaacgcagggcccacaatgtttgagacccacattgagcacgatgagcttgagatccagcttgaggtcctctatgagcttctgcacgtcctccacgttgtgcagttgcaccacaccagagtggatgtacccgagtatagcaca

SEQ ID NO: 211600 - DNA, 504 bp, Glycine max
cgtctcggcatcgagcaccaagaaaatcctaataatgggaggcaccaggtttattggtgtgtttttatctaggctccttgttaaagagggtcaccaggtgactttattcacaagaggtaaagcgcctgtcactcaacagttgccaggtgaatcagacaatgattatgctgatttttcttccaagatcttgcatttgaaaggagacaggaaggactttgactttgtaaaatccagtctctcggcagagggatttgatgttgtttatgacataaatggacgtgaggcagatgaagttgagcccatactggatgcgctgcctaatctggaacagtttatttactgctcttctgctggtgtctatctcaaatctgatctattacctcatgcagagacagatgcagttgatcctaagagcagacacaagggaaagcttgagacagagagtttgctgcaagcaaggggtgttaattggacttctataaggccagtctatatctatggacc

SEQ ID NO: 211601 - DNA, 445 bp, Glycine max
accatcaaaacaaaaaacagtacttattaaaaacaaacagcaacgaaaatgttaccggcgatcaagaacccagttttgaaggctacgggtacatgaaatcgggggacacttcaaaatttaactggtaaaacaaacacctaagactctgcaaagataaactactgtaaaggaacaagtttttttgaaaccacgttgatgatcacatgtgctagcaaaattgccaaaatgcaatcacttctttttgggggtagcctttgggaccttggctccggtggggtcttttttcttaacactcttgatgactccaacagtttcggactgacgcatgtccctcacagcaaaacgaccaaggggaggatacttatagaaagtttcaaccaccatgggcttgtgtggaaccatcttaaccataccaggatcaccatttttcaaaaatttgggctcc

SEQ ID NO: 211602 - DNA, 502 bp, Glycine max
aaatcgtgctataataaatgccaaatttacgcaacatattgttaactataataattgtataaagagaacagaaaatatggttgcatccataactatacaggaccataaatggttatttaagaaacaaataacccaaacttgagatatttggcttagatgagagggaagctaacgagaaaaatagctctacttccagctgaagcctttgcttaccacctcacaagaatttttcaatgcttgaggtcaatgttgtcttgggcacagctcctataactgtatctttcttctcaccattcttgaaaataatgacagttgggatacttcgtatcccgtacttagtagcagttgaagggctctcatcagtattgagtttgtagcactttagcttaccagtatattcttttgccagctcgtcaattatcgggtggatcatacggcagggaccacaccatggagcccagaattcaaccagtacaggagactcggattcaatcacaagtga

SEQ ID NO: 211603 - DNA, 517 bp, Glycine max
  unsure (1)..(517): unsure at all n locations
aaaccataaacagtttataaaacttcgttataaattaaatgcaacttaaaacatccctcagcagcaaaggaaatggactaaaaccctatagctgcttgtgaaattcgaaatatctcagactcttcttaccatcaaaacaaaaaacagtactcatcaaaaacaaacagcaatgaaaattgaccaccgccgatcaagaacctagttttgaaagttacggctacatgaaatcggcagaaacttaaaaatataacttaaacaaaacacctaagactctgcaaggataaaactactataaaggagtaaccacgatgatgatcacatgtgctagcaaaattgcccaaatgcaatcacttcttcttggcagcggccttggtgaccttggctccggtggggtctttcttctcaacactcttgatgactccgacagccacagtttgacgcatgtccctcacagcanaacgaccaaggggaggatactcagagaaagtttcaccaccatgggctggttggaatcatc

SEQ ID NO: 211604 - DNA, 481 bp, Glycine max
gcaaactgaaaaagggatttcttactaaagcaaactcaaacaagaacaacttccactcatttggcatctaccgtagtagaacaggatcaaaagcagctctctgatagaacacacgtatgtattatattgaacatcttgcacagtggttcatttctcacagctattgcaacttaaaatacttgcaaagcttctgcaaattccaaactttctttttctcccttctttatggatatgacaaagtgatcagatcatgaaacaataatcaatccattgaatttgaatctgatttttggtttggatcgatgccaccattcttcatcttaggaagggacaacaaataggccaaagcctactaattaagcgcttaaaactgcattagtggttggtttaagtgtgatgttagtaacatcagcttgattattaaagggtgttctttgtacgaagaagcatgccccaataacaatgtagcacagcaggagaa

SEQ ID NO: 211605 - DNA, 555 bp, Glycine max
ggcaaaacgattggagaattattacccggttcttttccgtggagtcaatggaacagttgctcatgaattcatcattgacttgagaggctttaagaatactgctggaattgagcctgaagatgttgcaaagcaaggccgagttagacaggttctgtgatgctcttatttccattagacaagaaattgctgagattgagaaaggaaaggttgacattaacaacaatgtacttaagggcgcccctcatccaccatcactgctcatggctgatgcatggacaaaaccatactccagggaatatgcagccttcccagctccttggctccgtactgcaaagttctggcctaccacaggacgtgttgataatgtgtacggtgaccgcaacctcatttgcacccttctcccagcatcacaggctgttgaagaacaagcagctgccacagcataatgtgttcaaatgacaactattttcatttcccgttgtacataaactcttattcctattcatacagttccggcacttgttgaatattgcttcatcatatgtgacaatgatg

SEQ ID NO: 211606 - DNA, 457 bp, Glycine max
actaaaagaaactaatgctgagtattttttacatgaatcaaatccattttttcacattactgtaacagataggcctaaaatacattcctaaaatccaatagcagcagcaattatacgaattactttttttttttttcctgtgattggatgaaacttaagagcaggggattatcatcattgtcacatatgatgaagcaatattcaacaagtgcaagaactgtatgaataggaataagagtttatgtacaacgggaaatgaaaatagttgtcatttgaacacattatgctgtggcagctgcttgttcttcaacagcctgtgatgctgggagaagggtgcaaatgaggttgcggtcaccgtacacattatcaacacgtcctgtggtaggccagaactttgcagtacggagccaaggagctgggaaggctgcatattccctggagtatggttttggccatg

SEQ ID NO: 211607 - DNA, 578 bp, Glycine max
  unsure (1)..(578): unsure at all n locations
cagagaattgaaagaggtcactggtgctggcttgtctggtggtcgtggggtcaactatggtggctttggtggtggctcccctggctttggtggtggcttccctggctttggtgttggtagcttccctggctttggtggtggcggcggcttccctggctttggtggtggcggcggcttccctggctttggtggcagcggcttccctggctttggtggcggcggcttccctggctttggtggtggcggcggcttccctggctttggtggcggcggcttccctggctttggtggcggcggcttccctggttttggtggcggtggcttcaacaaccctggcttgggcggtggcttcaacaaccctggcttgggcggtggcttcaacaaccctggctttggtggtgatggtggtggcatctgaggaggaggatagccgtaaaggcaagctgttgcgagttgcagtgagagatgttgctttattaatgggctgatgccctagctatcagaggatacataacgtacttatcataataacatatntcatgaatannatcccgtacgtgttatgagaggcacatatg

SEQ ID NO: 211608 - DNA, 525 bp, Glycine max
  unsure (1)..(525): unsure at all n locations
catcttcactcttaactgtagaaaagaaaaaccgaagatgagcttgttgaatgaggagagaaaaccgcacgctgtggttactccatatccagttcaaggacatgtgaaccctttgtttaaactagcgaagctgcttcatctcagaggctttcacataacctttgttcacactgagtacaactacaagcgtttgctcaagtcaaggggtcctaatgcccttgatggcctaccagattttagatttgagagcatcccagatggtcttccgccattggatgatgataatgttactcagcacgttccctctctctgtgactctatcagaaaaaacttcctcaaacccttttgcaaacttgttcatagacttaaccactcttctgccactgagggtctcatacccccagttacttgtttggtctctgacggttgcatgccttttactatacaagctgctcaagagcttggactccctaactntatcttttggcctgctagtgcctgttctttcttggctatcatcaactt

SEQ ID NO: 211609 - DNA, 465 bp, Glycine max
tcgggcttcccttttttttttttttattttaaagtttcacacacttgacacatgagttctacaattaaaagacgtgtggcatacacacaagtcctgaatgcctacctgtcagcaggctaatccgtctggtacaggccgaacgcaaagaggtggtcgttgagcaggctgaggttgtatggcgtgacgtacatgtttgtgtcggtcagtccgataaacatggtgccgttgacgatgccgtcgttggtgttgttgaaaacaacgccaccgggctggatggttgtgccggtgttgttgccagtcacgttgagcggggtgtaggtgacgttgagctggctgatccacgcgacgtacgccggggcggtggtgttgatggcgccgccaatggacgagttgtaggcaccgttggcggaaaggttgccgcgcggcgacttccaggacagctggacctggcggacgggctgggtg

SEQ ID NO: 211610 - DNA, 411 bp, Glycine max
gtacataactatttatcgtaggctacaatgatcgcactctatagtgatcgatgatggccagagatccagtgacgagcttgttctcgagtcgggaaccgtcagggatggtgatcttgttaccgccggtagcaatgatgatgacggtaccggcgaaggtacagttcttgccgatatgcacgtctccgctgacggttcaagtggtcgggctcgacactgttgagacctcccttgacacgacgctcaaagccggagaccttcttgaactggtcgccgagcttgatgacgggggtacccgagaactgcctggccttgttcatggtcaactgtccgtgctacatagtgtggagaccagacttgatcaagagcacgtcggatcacgacttgacgggcaagaatcgggatcgggggacg

SEQ ID NO: 211611 - DNA, 419 bp, Glycine max
gaaatgaatttttccctttgagatattggttttttttttaaagttgattgtgaacaaaccaaattcggtttggtttacattttacaagcaattttaattactacgtggtgtgattgcgagggagagagcgtaaaaacggtttgatatgcgtggttttggtgtctgagctcgaaaggcaagacttggagttcgccacaaaaatcttgagcagatcggagcacatttgtctggacgtgcggcgcacaatggctctgcttgagcaacagaatcttggacaagccattgttatgcggaccggctgctgagccttgcgatcgcggaacaggtaacacacgctccacagcgttgtcaccgcgtgcttcgtagccgcgctcgataccttaagaaccttgattagcaacggcgtgacacacgccgtc

SEQ ID NO: 211612 - DNA, 523 bp, Glycine max
gcattctcaacacctcctccctcactcactcatcaatggcatcaacaatatcagcaatggccatgatcaacgccaaatgcgtcaacccaaagttccccaaccccaccaagctcgtaccatcaaaaccttcccttcaggtcaaccttccaaagggcctaatagcctcacccgaaaacaccaaactttccactgcgacagcaatcgcaggagcaatattcacaaccctcggaacctgcgacgccgctttcgccgttcaacaaatagccgacatagcagaaggcgacaaccgcggtctggcactgttgctgcccataattcctgcaatagggtgggttctgttcaacattctgcagccggcgctgaaccaactgaaccgcatgcgcagcaccaaaggcgtgatcattgggttggggcttggcggcttggctggcttggtggctgcgccgcatgcatcggcggcggcggcttctgaagtggcggcgatggctgaagctgcctcgaactgacacaggggacagcttct

SEQ ID NO: 211613 - DNA, 487 bp, Glycine max
ctcgagccgctcgagccgttcatgtaccgcacctgcctccctcatgctcgggcactctcaagacctttctgcctctcttcgctccttctctcacaggcccattgctagaaccaccttctctctctatcctctcctttggaagccctccaaatggctccacatagagcccaaatccaggacttgccatgccctcgacgccgctttggctgcagaggtccaagtgcccgaaacttgcgacgacacggaggaggacgacggtgctgatggctccaccgacaccaacaccgtccccaccaccaagcctaagaaaggcaaggccgcattgcctctcaagagggacaggacgagatctaagaggttcttggaaattcaacaattgagggagcgtaagacagagtatgactcgaagacaagcatatctttggttaaagaaacagctaataccaagtttggagaaacagtagatgcccattttcgcctcaacatt

SEQ ID NO: 211614 - DNA, 552 bp, Glycine max
  unsure (1)..(552): unsure at all n locations
taattatatttgtgtatcttgtataattatatattctattattttaattattgtgtaattgtaatatcatctttatttatagtaaatatttatgaaagattatattttaattaatataatgataagagtagattggtctgatgagctancggaatttattttaggatcgacctagctcactagactgcggtcggccttttttttttttttttgttttaatttatttttgtattatgtggaatatatagagtatacttaaattatacttgacatgataaggtacatacaaattatgtcataatataatactaggcgtacttatagcagtatatacagaatagaatgcaagtcatgatgacatgatacatgtattagcatggagctaaaatgacatgaaaagtcagatatactagactctgaatcaatgtgagctgtaacacagaaagggacgtaatgttaaaatagaaatgaaacggttgataatggtcaaagtacaaattaaaagagagaataaggtgaaaagtgaatgttttggaaaccattatcatactg

SEQ ID NO: 211615 - DNA, 568 bp, Glycine max
atatgatgtaatttatcatataattctgctgctacatagggctatttcatataagttcaaaatgacccatggacacgaaatgtgtattttcactgcaacattaatggccttattccaatgattactgccatagactcaaaaattccccctaccattctggcagctgagtgacaccaaatcccaggtaactagatatattactctgaactgcctgccttgccctcctcattattattcatggccttctttgctaactcataacctgcaaagctcatagcacctagaggagcaatccaaaagaacctgggtactgctcctttgaacaagccaaggggtccctcatgttttagtatggagaaggctattaaggtcattgacacagatcggtcctgtgcagtcatcattctagttttcatgacatcaaaccgcgttgtaacaacagccgtcaagctcaccagttaaagctccctcagtcattgtttccagggaccgatatcccgctctagtatccgtcttgcaccttttaaattaacctaaagcccatgccgctacctaaatggaaccttac

SEQ ID NO: 211616 - DNA, 502 bp, Glycine max
aagtggacactgtaactcaaaattatagaggaagacggtccaatatgaaaaatatagtaagatcatctcaaacttagcatcttctctttgcacctaagacattgagaatgctaagaatgttacacgcaagttccatcacaacttctagcacttggattagtacaacaaccttcacgaacagaaatatttacttgccaagtttgctttgcctccaattcaagactggaagaaagttcccctctgaatagcatcctcgttagcatttccaagagcagcctagttcaagtacttgtcagccaattggactctcttgacattctcttgttcttggacaagcatgttaccatacagcaagagcttctccagagtcattttgggctgatcaaaggttggaggtccatcttttgagttcacaagcttcttcccaacactgtcaacaccaacaccagaaatccacttcctcacttcatcagtatatactctggccctcagtgcaccaaag

SEQ ID NO: 211617 - DNA, 428 bp, Glycine max
gaggcttcagtgataccattgtagttaggatgaaggtcttgaggttgaaaactttactggaagcggggctattgctggggcctattcaagggcatacaaagaaaccttatacactgaccaatgtaaatggtataactgttggaatcggcgcttagctgtcatggcttgggatgagacgcattccaaggcttgatcaaaccataatacatactggctgttcacaattaaacagactgcttggtacgggaggtatacagatatcacatgcaagttggaggacctaatatgatggcaactcacggagtcctacatcttacagtttacgatgagcttagaagtatttcttctatcttagagtggcttagctacatttcttcttatgtaggtggtgcacttcccattgtaaaatcgctagatcctccaaaaga

SEQ ID NO: 211618 - DNA, 462 bp, Glycine max
accacggcttcatcaccccggtccccctccactacgtccgcaaccacgggccagtgccccgggcccgctgggaggactggaccgtggaagtcacgggcctggtcaccaggcccacatgcttcaccatggagcaactactgcacgatttccccagtcgcgagttcccagccacactcgtctgcgctgggaaccggcggaaggaacagaacatggtgaaacagagcatgggcttcaactggcgggcagtcgccatctgcacttcagtgtggcgcggagtgcccttgcgcaccctgctcaagagctgcgggatctacacccgcaccaagggcgcgctccacgtgtgcttcgaaggggccgaagatctgccacgtggaggtgggtacaagtacggaaccagtatcctgagggaggttgcactggatcccttacgcgacatcattgtacgctacatgctaaacgggg

SEQ ID NO: 211619 - DNA, 489 bp, Glycine max
aatagaatccattatttatatataacaattaactactatatacacatacaatgtattctagtttaggcccctaaaacacgagcaagttattctgggtgtcgtagcccaacttttccaaattcggctggactgcaaattgaatcataggtggtggtccacaagtcaatgccaaggtatcaggagatgcatttggaatatgctccgtcaggatactttcagtgatgaatcccacactgtattcccacccttctcttatgctttcttggatcacgtaccacaccttcaacctatcatacttcttagcccactcatcaagctcttccttcagcaatatatcatcctcggttcggttcgcgtaaaccacatgcatctcggtgcagtcctctggatcctttagaatggcttgaaccacttggtaaatgggtgtgatttctgtgccaccagccaacatggctagcctcgtggcaaaccttggtttcccatgaacga

SEQ ID NO: 211620 - DNA, 501 bp, Glycine max
gctaaactcacttgctcccttcagcctgatctcaaagaatttgctcaaaaatgtgtcgacgctaccaaaattgcaggattcgcccttgccacctctgctctcgttgtttctggagcaagtgcagaaggtgttccaaaaaggctaaccttcgacgaaatccagagcaagacatacttggaagtgaagggaactggaactgctaaccagtgcccaaccattgaaggtggagtggactcattcgccttcaagccagggaaatacaacgcccagaagttgtgcctggaaccaacttacttcacggtgaaggcagagggcgtggccaagaacgccccacccgaattccagaacaccaagctcatgactcgtctcacctacaccctggacgagattgagggtcccttcgaggttacatccgatggaaccgtgaaattcgaggagaaagacggaattgactatgctgctgtcactgttcagcttcccaggggagagcgtgtgccattc

SEQ ID NO: 211621 - DNA, 440 bp, Glycine max
tttttttttttttttttttttttttttttttttttttttttttttttttttttttttttttttttttttttttttttttttgtaaaggggggcattttaaattttaagcattaaaaacgaaggaaaaaaaaaaaacccccgggaaaaccccctggggggttccccaacgggggggggtccaaaaaaggaaaaataccggtttaaaaaaaaggggtttaaaagaaaactgggcaacccaaaagcctggggtttaaaaactcttgggggcgttaccccccaaaacaattataaaagggggaactcttttgaaaaccccaaaaacccccccagttttagggtgggttttggggacccccaaagggaatttggccttggaaaaaaaaacacccttgtgggtttctttaaaaagggtctttttattttctttgccaccaacgggg

SEQ ID NO: 211622 - DNA, 483 bp, Glycine max
gaaagagagggagtaagtgggtataggaaagaaaactaaagaaacaaacctaacacagcacaaatccttgaaacgacgacggaaatggccgtttcgagctcgcacatgcgtttcacctttgagtgccgctccgatcccgatttctcgccccccccgccgtccttcgacaacctccgccgccgaaacttccgctcctccgcaggatccggcgcggcgtttcacggcatctcctccctcatcctccgcttccctcccaacttccagcgccagctaagcaccaaggcgcgccgcaactgcagcaacatcggcgtcgcgcaaatcgtcgccgcttcgtggtcgaacaacagcgacaactctccggccgccggggctccggcgccgtccgcggccaccgtcacggacgccgctacggtgcctctccccgtcgtcgtcgccgacaacgaggacgtagttgtctccgccgcggcagacgagaacggggct

SEQ ID NO: 211623 - DNA, 586 bp, Glycine max
gtatatttaatatatataatttcaaattaataaagaataatatgtatataaattattaatatatataataatcgtagtaattatttaattaatgaatattaaataaagaattattaaatagagtttttgtgtgatgagcaacggaacggaattatatttcgggtagatgagtagtctaaggtcgggctgtttttttttttttttttgtatttatatatttatataatagttagaaaatggtatacagttatttacaggagggaaaaaacaaaaggatcgattataatgtatgaaattacaaagggagaacaaaatagagttagatcttaaaatcttatttggataactatacatgaaagcttttaaggagtcaaatacaccatagaaagtattaacaaacttaaaggcacttagcattttaacattttaagtataaagaattgatcactatacgttggcaagacattcaccaggaattcgaccatgtaagtgaaaggtattggcatggagaaaggttgaatagttgtaagcaaactttcataagttgcattgaaatttattatgaaatgtattgtttgatggatat

SEQ ID NO: 211624 - DNA, 505 bp, Glycine max
ctatctgttcttactgtttcattttccattttttagttattccgatattcggacgcatcaacttggtatgaaatcacattgatagcctctactcgggtcctagctggtctaagagctagatttgcctcaattgtttgtctcttgccttccgccttattcaaattagcttctgctatttcaagagtttgctgtgcttcttgtggatcaatgtcactacccttttccgcatcatttactaaaacagtgatctcattattgcttattctagcaaaaccgcccatcagagccatcggtaaccattggtctataagaagacgtattctcaaaatacctatatctacggctgtggcaataggcgcatgatttggtaatactccaatttgtccgctattagtagataaaatgatttccttcactgtcgaatcccaaacaattcgattggtggtcagttcacacagatttaaagtcattttttcaaattgctctccatttctaagttcgtagc

SEQ ID NO: 211625 - DNA, 520 bp, Glycine max
gtaaaaaataaaaataatttagttttagctattcaaacttttagtacaagaaatctaataatcaaatattacattttacggaagacgtagagatgagttgagatgcttatggggcattgcacagccttcttactacccaaagagctaaacaaaatctcaggacaggattcttatacacgcattggtcactccacaaaacttatgcagtttacaaacaaattacatatttcttggcttttttctcaacgccattgatggccattacgtccagttggtgagccaggttctataggaacaaaacccctgccaccaaaaacaggacgcatgaatgcatcattaaacttacgccacaagcgattaacagtgtgtgttggagtggaaagtaaagcacggatgctgcttggacgatgaatatcatggccatcaatatcgactgcagaatcttgggctctcccaaaaaggggacagtgactgatcttggacttggagtagatggatctgtggatatcgcgatgcttga

SEQ ID NO: 211626 - DNA, 368 bp, Glycine max
agttctaatccattaattttcattgaagggggaaaacagaacccaaaaatgcgggatgatgaaatttaataaagcaaaaacaaatgggaatggtttttaaatacaaacaaactaaggggggtggcgggtacaaatgcttagcaaatttatcacacttagaagcctgggggcttgtaagcatttgaatctgaagtactgtacttggcaaactttgtcttattccattatccggcttaagccgttggggtgttcaataattagccttttgaagttcacttaacaccggctaacgtttagtgcaaccaaactttggcagttttcacataggttcagtagtgttcttcccctaatcctggcgacctggtgtg

SEQ ID NO: 211627 - DNA, 613 bp, Glycine max
ctaaagtattacttctttccttctctctctcaccaaaacaatttgctcacaaaggaggaaaaatggcacctttcgtttccctctctttgtagcttctctttctcaaccaccccctcctttccctctcaaccaaccctgaagggaacgctctgcatgctttgagaagcaggctttctgatcccaacaatatgttgcagagttgggacccaacactggttaatccctgtacttggtttcatgttacctgtgactccaacaatcatgtgattcgcttagacttgggcaactctaacgtttctggaactctgggcccagaacttggccagctacagcatctgcagtacttggagctctacaggaatgagataacaggaaagattcctaaggaacttggtaacttgaaatcacttattagcatggatttgtatgataacaagttggagggtaaaattccaaaatcattcggaaagttgaagtcacttaaattcttgcggctaaacaacaacaagttgacaggatccatcccatgagaactcactcgtctcactgatctcagaatctctgatggttctaatatgatctctgtggaacaataccagttgaaggaaacttt

SEQ ID NO: 211628 - DNA, 481 bp, Glycine max
ggcagaaacttattccatttataatcctagcataacatcttcaatagacaattcacagaatttcctatacagacaaatgacagccaaacataatgcaaagttcctgcacaggatttaaaacagaaaagatgaatacactattatgatgtggcaataatggcatggtttataacacataattttcagaccatctatgagctatataacgaagcaacactgagactatgaactctgcagattatcaaccccttccattcgctgcaagagttccaatatgcttccagcttttctcttagctctatcagttccattttctgacaactcctgcagtgctgcttctgcaccatgttctttcgctagttttaattgcagtggatctccggtgcatagtgaccacaagacagcagcagcattctctcgattgcgtggagagccggttcgtataaccttaacaagaatatgaattggcttggcctgaccg

SEQ ID NO: 211629 - DNA, 400 bp, Glycine max
ggtatcatgaaagtaggctaaaaggccatctaacatgttttataatttgaatataaacgttcacaatttcaaactttaaacgagtctttttttttatgtggtacgtggttgaatcatatttcattaatttataaaaatggtccccacaaattaactaatatttaatgtattttagatggccactctgagcagaacaacaatttcaatggtaagtccatgttcaataccgaacaatacaccccattcaagtcctttacccgtggttttaagcccatcttcaggagatttccgccctcatcctatcctagatgaaaagaaccctatcacttgacatgttcccatattcattaatcacaattgtagcggccttcatcttctcaggcttgagacctaacttttt

SEQ ID NO: 211630 - DNA, 570 bp, Glycine max
  unsure (1)..(570): unsure at all n locations
aaaataacacacacttcacacatcattacgacaattaaaagaggtgtggaaattttcaaataggcagagcatactcaacaagagggtcatgcctaatttcctttattgaattaaacaaacgaacaagtgaaagaaaacacaaattccagatcatgcagaggattccgcattttcagaagatctggcagtagcctgtggaacagaaaaagctggcataagagtattaccagcaatttcaaaatcttgagaaattcccaagagaatatcgaaaactgttgactgtttgggattgtcaattaggaaactcaaatgccatgaagtttgatttgcccactcagaactccacatttcaaaaccattattaggaccacatacctctattgggaagatcaattcccaggaatgtggttctgattttgtccacttacatgcatcaaaatgctctgtactgttgctgtttgttaaaaacacttgtaccaatgaggcccaatcactccttttgactgctgctttcccagacttacaatcttaaccattaaacaagctttcttncaagcagcaacttttaac

SEQ ID NO: 211631 - DNA, 425 bp, Glycine max
atcaaaagattattttcctacatgcataaacttcgttcataggggcgtatatatatacttttaagaatatcatatggcgatgaaggtggctacgcctttttattgaaaatacacacgagctctaagcatggtccctatagctaaaaaagaataatgggggccacatcttttatctatggaaccaagacgatgtctttgttgatggttgatgtacctaccgagaacgaggatgcaaggccaaaatgaaggccccagagctccaaagatcccttgacagagtcataggatcctccttttagcgacattgtcttgttcaccacgccatctttaacaaatgggtatgcaataaggcttccaagggaaacattcacggccttcttctttctgtgttagcacaacgcagcaagaggggcagccccatggtg

SEQ ID NO: 211632 - DNA, 444 bp, Glycine max
catccgatcgactttagattatgctgatctactcctaccgcttctgacacgtcagtgttaggaccacgtgctgctatgaggacctacagattaggggatacagaaatgaacctacaggggataaaggtattggatgactactaggacaagtcgttccaagccgtggtgactgaagtgctaggaggggctaacaggcacactagtacatggttcaactgttgagtcgtaggacgcccatactcatgtctatcgagcatctgatgagcatagtagtcagctacagctttaaagatgctgaggctctgagtgaaagaagctatgatctcgtatctggctgcaccgagaatcacgtgagtttggggaatctgaacaattatgttattgatggctacatagttgatatggaagtacaagcatgtcatacagcagattgatgaccactgt

SEQ ID NO: 211633 - DNA, 544 bp, Glycine max
  unsure (1)..(544): unsure at all n locations
ctcgagccgctcgagccgctcgagccgcaaagctgctgaaggtcgccttcctgtatttttggatggtggtgttcgccgtggaactgatgtcttcaaggcattagcactaggtgcctctggcatatttgtgagtacttcatgaccttttccaaaagcttagtataattcttggcttttttcatattgggataacattttcagatattagttccctattaattgtttgttgttatacacatatattgtcatttattgcaagagccgaccacgaatttggatcccatgtccatgttatttactaccatgaaaatagattgatggaaagtgatgagatagaatagaatgaagtaaaatacaacatcatggaataaaatttccattttattatttgaatatgttatgatggaatgaacaaaattcttattccctgtcattcctaacaaatttaggaaggtaaagaatgaaataagataaaataaggttatattccatcctcattntatcattccanacaatgaaacagaataccatcatattccatttc

SEQ ID NO: 211634 - DNA, 496 bp, Glycine max
gagaatccccgtgtgcccatcatcgtcaccggtaacgatttctccacactctatgcgcctctcatccgtgatgggcgtatggagaagttctactgggcaccaacaagggatgaccgcattggtgtctgcactggaatttttcgcaccgattcaattcctgaacaggacgttgtcaagattgttgacaccttccctggccaatccattgatttctttggtgcactgagggccagagtatatgatgacgaagtgaggaagtggatttctggtgttggtgttgacggcattgggaagaagcttgtgaactcaaaagatggacctccaacctttgagcagcccaagatgactctggagaagctcttgacgtatggtaacatgcttgtccaagaacaagagaatgtcaagagagtccaattggctgacaagtacttgaacgaggctgcacttggaaatgctaacgaggatgctattaacaggggaactttcttccaatctg

SEQ ID NO: 211635 - DNA, 496 bp, Glycine max
aactcaaaattatagaggaagacagtccaatatgaaaaatatagtaaaatcatctcaaacttggcatcttctctttgcacctaagacattgagaattctaagaatgttacacgcaagtcccatcacaacttctagcacttggatcagcacaaccttcaggaacagaaatatttacttgccaagtttgctttgcctccaattcaagattggaagaaagttcccctgttaatagcatcctcgttagcatttccaagtgcagcctcgttcaagtacttgtcagccaattggactctcttgacattctcttgttcttggacaagcatgttaccatacgtcaagagcttctccagagtcatcttgggctgctcaaaggttggaggtccatcttttgagttcacaagcttcttcccaatgccgtcaacaccaacaccagaaatccacttcctcacttcgtcatcatatactctggccctcagtgcaccaaagaaatcaatgg

SEQ ID NO: 211636 - DNA, 442 bp, Glycine max
attaaaaagcgtgaaggacagtgataggtttggtttggaaggaagaagaaaatgaaggccatagtgataacgaggccaggaggtcccgaagtgctccaacttgaggaagtggaagatcccctagtcggagacgacgagcttctcatcggagtccacgccatttcctttacaaagccgatacctttcaaaggaaaggttcctaccttccccctaagggcgccagcccttacctcggtctcgaatgttccggaactgtcctttccctgggtaaaaacgtttccagctggaaaatcggtgatcaaggtgtgtgcttcttctcgccggaggcggatatgccgagaaagttgcagttccggtaggacaagttcttccggttccagccggtgtttctctcacggatgcagctagttttcctgaggttgcttgcactgtctggtcaact

SEQ ID NO: 211637 - DNA, 395 bp, Glycine max
gacgcgaaaaagtgtttgtttcaacaatcatatcaattgataaatacggtgtgattgtttaaatgaacttgccatatcaattcctttagctgttattttaatccgcaaccatattagaatcctgagatcttaacaaagaaacaagtccaaacacaaaggatccagaagtatgtcacgaacttcagtatttacgacaattttcatggcaaaagcaatatcttcccaatatgctggctgctttccataagctggtgagcctccgctgcctcagaaagcgggaaagatttgtagaccacaggcttaacctttccttcggcaattgcaggccaaacattcttctccacttcactaacaatcacagctttattttccagacttctattgcgtaagccagc

SEQ ID NO: 211638 - DNA, 474 bp, Glycine max
aattcggctcgagccagttactaaaaagggctactggcagattgaaatgggagatttttttattggaggtctctcaacaggtgtttgtgagggtggctgtgctgctattgtggattcaggaacatctttgcttgctggtccaactactgttgtaactgaaatcaatcatgctattggagctgaaggagttctaagtgtagaatgtaaggaagttgtttctgaatatggagaattgatatgggatctcttggtatcaggggtacgacctgatgatgtatgctcacaggttggttaatgtttcaaaagggctaaatcagagagcaatggaattgatacggtgaccgaacagggacaaagagagatgtcagttaatgatactgctctgagcacttgctgtcagatgctcgaggtttggattcagaatcaactaacacataagaagacccaggagatagtattcaactatgtagatca

SEQ ID NO: 211639 - DNA, 450 bp, Glycine max
aaaaaaaaaaggggcccttaaaaaacaacacaatacattagggggcatagtttcacaagcccctttttgaaaactataatgaaaacccgggccatagtggttccaaaaagcttttttacaacacactaacaagctttttaaaacacgccctataaaatcccctaaaagttttggtggggaactttgggaaaaccaacttggggggtcccataaaaaaagacggggggatatcccctcaagaaaacatccccaaaaatccaaagaggacctcggggggggggaatgttaaaagcaaaaaaccccctaggggaaacttttggaaggccttttccagttttaaaaaaaaactgctcaggggggagggggaaaggtttttctccaacaaaaaacgggatgtttggcaatccaaaaatggttttacaggttactactggctttccatttggactt

SEQ ID NO: 211640 - DNA, 519 bp, Glycine max
  unsure (1)..(519): unsure at all n locations
caaaaattcttttatttggaatggacagaaaccaagggtgaccctcacagatcccgagctaatcaaagatgtattcaacaagatttatgactttggaaagcctaatatgggcccaaatatcagatcacttattcctggtcttgcaatgcatgacggagaaaagtggagcatgcatagaaagataatcaaccccgcatttaatttagaaacgtagaagaatatgttaccactattcatccaatgttgcgatgatctgattagcaaatgggaggaaatgctgccttcagatggatcaagtgagattgacgtatggccttatgctaagaatttgactgctgatgttatttctcgaacagcatttggaagtcgttatttacaagggagaagaatctttcaacttctaaaagagaaaattgaacttacactgaaaatgagaggacagaggctggcacctaacaggatgatggaaaccgatagagatctaaaagctttacttatggatattattaacangagaga

SEQ ID NO: 211641 - DNA, 385 bp, Glycine max
aagaaaaaaaaaaacttttagccaacacaaccatcatggccacctctgctattcagcaatcagcattcactggtcaaactgctctgaagcagctcaatgagtacgtccgctagaccggaggccccggctaaggtcgcactaacatgcgccgcaccgtctagagcgcttctcagagcatttggtatggccctgaccgtcccaagtacttgagtacatcctcagaccagattccatcatacctgaccggcgaattacctcgtgactaccgatgggacactgctggattatcagctgacccggataccttgctcaggaaccgggaactgcatgtgatccacagcatatggacaatgcttggtgcccttggctgcacctttccagagac

SEQ ID NO: 211642 - DNA, 481 bp, Glycine max
ctggggacccaaatttctaatatataaaaatataatggttctcatacagatttttctgctacacaggtgtagttacattagtgaaaatggagttaaacacaagggaactgcaaaagggagcagaagattgcattgcatgtaggcatcctcattgtccagggacaaagttagtggcataagcccaagcattgttggcaacaggatcagcaacgtggtcgtaaaggttctgaatagggcccttgccagtgacaatagcctgaacaaagaaaccaaacatggagaacatagccaagcgaccgttcttgagttccttgaccttcaactcagcgaatgcatcagggtcatcagccagaccaagagggtcaaaagcaccaccagggtagattgggtcaagtccttcaccaagtggtcctccaccaactctgtaacctttaacaaaccccatgagcacaacctgaacagcccagatagcaaggatgct

SEQ ID NO: 211643 - DNA, 585 bp, Glycine max
  unsure (1)..(585): unsure at all n locations
acaggaatgcttaatttctcttatgctcttcagagtcggcttcattctgtgattcctccctccttttgtcttcgcttggttcaagttgttacagtgttaaatttgagggacatgaagaagtaagaaagggcagcgggtgttggtggctcatataaaacggccaacaacaatgcgtaatttcttttctgctcttcagagtcggcttcattttgtggttgctccctccttttctcttcgcttggcaagtaaatgatgaatgagcgagcgcatagtgcagtgaatttaagaggaaacaacgtcttagggttttagcattgctgttcttgagttgtgttgagtctggagagagatgaataattgtacggcgaagagacgtgagaatgcgaggagcagcagagaggaagatcaactgatagtgactgcattgggcgctggaaatgaagtgggtcgttcatgcgtctacatgtnctacaaaggcaagacggtcttgttcgattgtggaatacacccagcttactctggcatggctgctttgccctatttcgacgagattgacccttccacagtcgatgttcttctcatcac

SEQ ID NO: 211644 - DNA, 536 bp, Glycine max
  unsure (1)..(536): unsure at all n locations
gccatttacaaaaatggtaaccattaaagcatcttacacagtccttccaaatgaaccaactccggagggccttttatggctatctgatattgatcaagtggcacgtctacgccacacacccaccatctacattttccatgcaaaacacaaccatgatacattaattgagaggatgagaaactctcttagcaagattttggttcactactatccaatagccggtcgattgagaaggatagaaggtagtggtcgattggaattggattgcaatgcaaaaggggtggtgttgcttgaagctgaatccacaaacattggatgattatggagactttttacgtgagtccatcaaggacttggttccaacggttgattacacaagccctatagaggaacttccctcgctactagttcaagtaacaacattccatggtggtaaatcctttgccattggagttgccttatgccatatcttgtgtgatggngttggtgccattcagtttatcaactcttggncaaagttagctcgaggagacaca

SEQ ID NO: 211645 - DNA, 564 bp, Glycine max
  unsure (1)..(564): unsure at all n locations
caggaaggccacattacgcccttccgtcttcgcaacccttaacactccttcttctccttcctcttcatcttccttcccctctctcattcaagacaggcctgtttttgctgcccctgcccccatcatcaccccaactgtgagagaggatatggcaaaggaatacgagaaagctattgaagaacttcagaaattgttgagggagaagagtgaactcaaagcgacagctgctgaaaaagtggagcagataacagcttctctagggacatcatcatctgatggcatcccatcatcagaagcctcagacaggatcaaagctggtttcattcacttcaagaaggagaaatacgacaagaatccagctttgtatggtgaacttgccaaaggccagagccccaagttcatggtgtttgcttgctcagactcaagggtgtgcccatctcatgtgctagatttccaaccaggagaggcctttgtggtcagaaatgttgccaacattgtcccaccatatgaccagtcaaaatacgctggaactggngctgcaagtgagtatgctgttttgcatct

SEQ ID NO: 211646 - DNA, 371 bp, Glycine max
aacaagaggatttccaactcttattaaaagaagattttccgacatgcataaacgcagttcatagtttcatatatatctttataaatatcatatggggatgaaggtggctaggcctcttaattgcagattcccacgacctttaagcatggcccctatagcttccaatggagaatggtggccacatctttaacttagggaaccaagatgaggtcattgataatgggtgatgttcataccgagaaagaggatgcaagggcaaactgaaggccccagagctcaaaagatcctttaacaaaggcataggatcccccttttagtgacaatgttttgttcaccaagccatttttaacaaatgggtaagtctgcaggtt

SEQ ID NO: 211647 - DNA, 584 bp, Glycine max
ttttcatgctcctcctttcattaaattaaagtgcagaacagtttctaggtatggaaactctttcatatgggtcagcaccatgctgccaagttgtgaactcaaagtggaaattagttgaaaagagtttgagttcacgtcaatcaagagtttcctctataggaaaacttggagtttattacacaggtactatttctgcatgtgcgcctgtgagattttatgagatgggtactagggtgcagctaagaagctcaaaaagattcaatttcaaggtttgtagtggaagttatgatgatggttatgtgattggtgaagaggaagcaagggatatttcagggttagaggagcctgtaacaaccaaggttctgattccaggtctgcctgatgattcaaaaggtgaatctggtgctccaataagtagttgtttttggggatggaaacctaaactcaatgtgcactatgagaaggccgggtgcgaaaacgtcaatgatttgcctcgtgttctctttttaccacggtttggtgttggctctttccattatgagaagcaacttaaggattttgggcgtgactacgagtgtgggctc

SEQ ID NO: 211648 - DNA, 491 bp, Glycine max
  unsure (1)..(491): unsure at all n locations
ctggcgtggaggcggaggtggttcgggtgatcggggagtgccggcgtgcgttgaagtttgctaggttcgtgagcaggttcgggaagagttaccaaagcgaggaagagatgaaggagaggtacgagatattctcgcagaatctcaggttcatccgctcccacaacaagaagcgtttgccctatactctctctgttaatcattttgctgattggacttgggaggagttcaaaagacacagactaggagctgcccaaaattgctctgccactcttaacggcaaccacaagctcaccgatgctgttcttcctccaacgaaagactggagaaaagaaggtatagtgagttcagttaaagatcaaggcagctgcggatcatgctggacattcagcacaactggggctttagaagcagcctatgcacaagcatttgggaagagtatctctctntctgagcagcagctagtggactgtgctggccctttcacaactttg

SEQ ID NO: 211649 - DNA, 558 bp, Glycine max
gtaactatgaactatcaatatatgatcgttattatgtctgtgatacacacaattaaggccataatatacttatgtgatttacaacaacttctagcttattttatacatcatgccaacccaactaggagcaattttcatcatacaattacacttatctttaatcatcattcatcaatactggcatcagcaatacgctctaaactctgaagcatgacaaggtggtagtcaccagggaccatattgttatgcaatttatgccacaattggataagatgcacaagttgcaacaccacacatgttcttccccaattccatcttgaagtagccattttcaccccagctttctccccatgaattttttatgagccaatatgggacaccattttcaactccatatccaacagcaagaacggcatggttcacatcctgggaagtgctaccacaagtgtcactagtgaaaactccattctcgtagaaatggaacccattcaccacctgaaaggccacactaactggccgaacaaatgcaactgcatgtttagttcatcttcagcaccc

SEQ ID NO: 211650 - DNA, 551 bp, Glycine max
agcgaagtctctatcaattgtgcttgctgcaactgtgagcatccaaggttcgttgttggatacagttccaggagaaggtcctgaatttcctccagaagccactactgttatgtcgttggcaactgcatggaaggaccctattgaagtagcatcttagaaacattccgatgcaatatctgaacccaacgacacctaaatcgcgttaatgccgttacttatggcagcctaaaaagtagccaaaatgtctgcatctaaacatccaccaccgaacgtagctggccaacatgccttaggctgcatgttgtagactacagagctaacctaggattcgaggtctaggacctccatagcagagaagaaggtaaggataaaactgttttattgcctctataagaattacatatcctcatatatgtagatattccagtgcacattctagatacatattctaacagaatttgacattatatgccttggaggaaaataaacattgcgctaatcatggagacagcctctaacgcacaggggaattcctggattctgcttctaga

SEQ ID NO: 211651 - DNA, 451 bp, Glycine max
tgataccattgttggcaaggaggatggccttggggttgaaaacttgagtggaagtggggctattgctggtgcttattcaagggcatacaaggaaacctttacactgacatatgtaactggcagaactgttggaattggtgcttatcttgctaggcttgggatgagatgcatacaaaggcttgatcagcccataattcttactggtttttcagcattaaacaaacttcttggtcgggaggtatacagctctcacatgcaacttggtggacctaaaatcatggcaactaacggagtcgttcatcttacagttaccgatgatcttgaaggtatttcttctattgtgaagcggcttagctacattccttctcatgtaggtggtgcacttcccattgtaaagccgcttgatcctccagagagaccaatggagtatttcccataaaactcgtgtgat

SEQ ID NO: 211652 - DNA, 472 bp, Glycine max
gaccacccaaaattgttatgcattaaaaacaatgttacacattattacaattttattcaaatataccaaaagaatcaatcaaccagcaaataaatagatggaacatggtgatgccggttgtgatcctctaactgcataaattaattaccatccaaactcatgtcatttacactttgaagcaacggatcccttcggcaatgagggatgctacagcctcctttcacttgggtataacaacttaaccaagggaatcaacacaaataaatgtggtacaataataagacacgaaaaaggtcctctaaccaagtaccttgcgaagttcatcggtcaacttcacgcgacccgatggctccaacttgcttaaaagggcagcaagaccttgaggtagagcttgcaaatctagagctgagtcaccaatatttgtcaattgaagcaacactttctgcgcacgcaattcctttagtttattctc

SEQ ID NO: 211653 - DNA, 534 bp, Glycine max
  unsure (1)..(534): unsure at all n locations
aagaaattattaaaaaaaacatttaaaaaaagtcatacaaattttatgttccaaagttggacatcaaacacataatagttaaaagttttataaaaacaatacaactagaatgatttccatgatcttcttcagatgatagtagcttgagggtgatcaactgaatcattaccattaccttcaaaaaaacgagatgacggaacatatagtctgaatcagagtgagcaaaaggagtagaactgcagcagatgtagatgcttttttccatggagtgttgaagtactcatgataaaagatagccttgtacttgttgcgaggattttcatagaatttaaccaagttatcacagagagaaaaacactcttcactgataaatggcagaccaacatttgaacaaagactgttaaacattttagccacagcattggcatcacccaaccaattgataaaaattntgttatcaattagtatgcttgcgtctttgtcggtgttgacaagacaatctaggatgaacaagtactgagtcatgttgggtga

SEQ ID NO: 211654 - DNA, 317 bp, Glycine max
atgaagaaactggtcatgtgctcaaagttccctttcgtcgagttcacctgtctggagaagaaggacactttgatacctatgacactagcggtccccaaaatgtaaacccaaggactggactcccacagttgcgcatagagtgggttgataggagggagaaactgggttatccaagatttactcagatgtactatgctaagcatggaatcatcacggaagagatgctgtactgtgccactcgcgagaactctgacccagagttcgtgaggtcagaagttgctcgtggacgtgctatcattctttacaacaagaaacac

SEQ ID NO: 211655 - DNA, 481 bp, Glycine max
atggtgttaataaaatagcccaaaagataaagatagtattgtacatgaaactagattgccagagcagtttattgctgagaactgtataacagaatacaagttgacataagacggagttcttaaaccaaagacattcacaaacagttcttactctcctattcctaaggcttaataatgcttctccacaccctgataagccagttgggaagctagctccaagttcttccaactgatttgctccatttaagtcctcttggaactaacgtattcttctggcaagtaaatctttccgccagcttcaccatgttgctccccgctgatagttttcttggcagcttgaaattcagcactcatagcatccatcccacgctgcaaagcttcatcagttccatagccatgttcctcagcatactttctcacattctccgttatcttcatagagcaaaatttagggccacacattgagcagaaatgagccact

SEQ ID NO: 211656 - DNA, 528 bp, Glycine max
  unsure (1)..(528): unsure at all n locations
ggggttcatagatttagggaatcgattactatactagtaataaattgtacaaaaaataaaaatataaataatataaatataaaaagaacaaacacaaattttatgtgattagtcgcggtatttaaaataaaaaatgaaagtagacaaataaaaaaggaaaggagatgtttgaataaaaataattccccttcaagttcttattttttgagaggacaggacaatatgaatgttttattatgctctatcaacacattaaaaagattatatgatatatctgctgtggaagtaggtcaacatttctattggcaaatagggagtttccaagtacatgcccaagtacttattacttcttgggttgtaattgctctctctttggtttcagccattctaattattcgaaatctgcaaaccattcccgctttcggtcagaatttctttgaatatgtccttgaattcattcgagacgtgagcaaaactcagatcggagaagaatatggtcncggggttccttttattggaaacttgttc

SEQ ID NO: 211657 - DNA, 369 bp, Glycine max
aagctctcctcccccttttattattaccccatatggatacaatcaatcgaaataaattcgttagatttaattattgtttcatagaaatattggaatttgggtgatctaaatgttattttttgaattctcttttggtcaatcgttgaattgaatgtaactgaaacgggaatctcctttagttctatatagtatctttttatcacacgccgtaaacgtaaatatcatacagaattctaattatggcttttaatttttatatttattatttgtttctttgaatatccaatatatactaatatatgctaatatatgctaatcgaatatctatctatatctatctacctatatctatatagatattggtagata

SEQ ID NO: 211658 - DNA, 545 bp, Glycine max
  unsure (1)..(545): unsure at all n locations
gagttagttgtgtgcgacaagacgctatcgttgcagtacaccaagtatttcccgaacaacgtcattaacagcattacgctgaaggatgctattgttgccgttagtgaccagttgggtgtcccgttgcccagaaacattcgcttctttaggtcgcagatgcagacaattattacaaatgcgtgtaatgagcttcgcataaggcctgttcctagtaaacggtgcgtgtcaataattctatggctagaggagcgctatgagaccgtatataaaaaacatcctggatttcaagaaggatccaaacctcttttggcacttgataatcctttttcccacggaacttcctgacattctttatggggaaagatgggcatttgtccaattaccttactcagctgttcgagaggagatatcgacctttgagagaggagtttgtggttctgggctagatcttgatttattgggtcttgacattgatgacangacattgatcccaggactggtctgtgcgtcttctaattctacagcattggcagctttgataaatg

SEQ ID NO: 211659 - DNA, 527 bp, Glycine max
  unsure (1)..(527): unsure at all n locations
tgcaattgaagttgaagtcttgcccttctctcttcaactccaaacacaagacatcatcatccatggctgcctccgtctccactgtcggagctgtcaacagagctcttttgaacctgaatgggtctggacctggggtttcagctcccagttcatccttctttgggagcagcttgaagaaggttattggctcaagggtccccaacacaaagatttcctctggaagcttcaagattgttgctgtagaagagaagaaagagattgaagagacccagcagaccgacaaggacagatggaagggtcttgcctatgatatctcagacgaccaacaggacatcacaagaggaaagggtttggttgactcccttttccaagctccacaggatgctggaactcactatgctgtcatgagctcctacgagtaccttagcactggacttcgccagtacttggacaacaacatggatggattttacattgctccagctnttatggacaaacttgttgttcacattaccaagaacttcatg

SEQ ID NO: 211660 - DNA, 550 bp, Glycine max
ctttcttcttcttctttatgagccctaactcggggccccatagtcgtcgctgctagctagccatgtcgctgaggaaggtcttccgctcccgcaagttctccaaatcgttcaaagaggtgctgccggcggagggcgccgccgtcgagggcggggtcgccggcaccgtcgaggaggcggcgaatgggaataataatgggtggtctagcatgctgccggagatcctcggcgagatcgtgcggcgcgtggacgccgccgaggagcagtggccgaaccgtcaaaacgtcgtcgcctgcgcgtgcgtctgcaagaggtggcgtgacatcacgcgcgaggtcgtgcgtgtgccctcgcataccgggaaaatcactttcccttcgtgccttaaacagccaggaccacgtgacgttccccaccaatgtcttataaagcggaaccagaagacctcaacgttttatttatatctggcccttacaccatcattcacagattaagggaagtttctgctagcagctaggagatataggtgtggtacccatactgagtatataat

SEQ ID NO: 211661 - DNA, 465 bp, Glycine max
  unsure (1)..(465): unsure at all n locations
gggtaccgggcccacgtacataggctcggataagctggatatgatattcatgggtggttagaaggataaggtgtgaagagagagcaaagaataatgatggagagggagaagaacaagaggcatttggtgttgatataaggtcgctgatttgctgaaatcaagtggacacgaattcacagctctagacatggctgcatatggcatcaatcaaaagcagaagggcgagcttaattcgatcacagaatattttgagccattgatggaatttctgctgtctttggcagaagaagagcaagtaatccttgtgggtcatagctctggtcgtctatgcatatctgtagccatggaattgatccctacccagattgcagctgcagtatttgataaaactccaagaggtatatatattaaccattcttttctgctaaataatttctaactcctagtntcatcatatcatatata

SEQ ID NO: 211662 - DNA, 481 bp, Glycine max
aaaaagtaatctatgattccggtggctattcatctagtcactattacagtaggcaatgctgcaatggccaatacgaccctcatcagcagacaccatttgcttgatcattgttaatgattggcaagaaaataatgtatagttgagtacataaaaggtattctatgattctggtgactactcatttaatctctacactaggaagtgcactgatcaaacagtgaaaatcttcctaaccttcttcatgttcctacgacaaacagggcaagtaccagctgcctcggctatcctagttccacaagcaaagcaagccacacagtgtccacatggaaggaagaagcagtccctcggagcatcaaagcaaatagcacaaagatgccgtgtgttattactggtttcaccatcaactaaagtcttcccatcaatggggccttctggaagaaagccaagatccttctcatcttgtggcaaggactcatacgat

SEQ ID NO: 211663 - DNA, 584 bp, Glycine max
  unsure (1)..(584): unsure at all n locations
gggttttggttgggataggcgatggtgtttcaccatctgctgctactgatctcattgccaggtcaataccattagaagagcgctcacgtgcagtagcattggtttttggtggtttgagtgttggaagtgttatggggcttcttttggctcctccccttatccaaaatcttggttgggaatcagtattctatatatttggtctcttgggaattgcttggtttttggggtttcaagttcttgaaggaggtgaaacacaattaaatgcagaatctctttcatcagcccaagatatcatgacacaatcatggaagacttctctaagagaattgaatggctctttgaaggatgtaccatggaaggcttttttccaaaatcgtgctgtgtgggctatgatatatgctcatttctgtggcagttggggtcactataactgtctatcatggctttccacatttnttagtgaggagctgaatctaaatctgactgaagctgcatgggtctctattccttcgccactggcttcaatatttgtgactagtcttgcagcgtcaatagctgacaacttgatttcaagaggagttgaa

SEQ ID NO: 211664 - DNA, 524 bp, Glycine max
caactctttctcttcttccttcgctcgttgttctccctcgcgtagatcgacaatggcggagacagagacgtttgctttccaggctgagatcaaccagctcctcagtctcatcatcaacaccttctactccaacaaggagattttccttcgtgaactcatcagcaacgcctccgatgctttggacaagattcgatttgagagtttgacagataagagcaagctcgatgctcagccagagttgttcattcatattattccagacaagactaacaatacactgaccattgttgacagtggtattggcatgaccaaagctgatttggtgaacaacttgggtacaattgctagatctggtaccaaggaattcatggaagccttggctgctggtgctgatgttagtatgattggacagtttggtgtggggttctactctgcatatcttgttgctgagaaggtcattgttacaaccaaacacaatgatgatgaacagtatgtttgggagtctcaagctggaggtctttcac

SEQ ID NO: 211665 - DNA, 439 bp, Glycine max
cttctattcacccttcactcgacacaacacttcctgcttcacttctctcacctgcattctatagcaggttgagaaattaatacaactttgtctttaacttttaactttgacaccaccatggcctgcttagaagtcagcaaagaggtaaagttcaaaggtgacacggaagaactcactcttgatggaagtgttgattggcatggtcgccctgcaattagagccaaatctggcagatgggttgctggaaccatcgttctattgaaccaaggtctggcaaccttagcattctttggagtaggggtgaacctagtgctgttcctgacaagagtgatggggcaagataatgctgaagctgcaaacaatgtgagcaagtggactggcacagtttacatcttctctcttgtgggtgctttcctaagtgattcgtattggggaagat

SEQ ID NO: 211666 - DNA, 525 bp, Glycine max
gtttggtgtcttcaccttgttctttaacttgattagcggctcgaggcacaactgtttcttctgatgcttatggcaacttggatatctgtcatcagttagaagtttcagttaatgcagccgctgaaatgatttttgatctgcagaagaaacttgaagctacttattcggaacatgaaataatgtgcacatcatataaagaaatgaattcaaaatgtgatgatctgcttgggaggaatgaattggctgttagtctattgcataagatgtacagtgacctgaggaaacttgtgtttagtaatggtgggactatggatgaagataagatagatttacaaagtgaagtgctgcctgatctgctgaactataatagctatcaacccatcttgaaacatattgggaatatattgaccgagaagctggaacttgagtctgttaccaaggagattaagtcagaattgatgcacagggaaacagaattgaagaattgagatgagtgccttggtttagattctgtagtaagcttat

SEQ ID NO: 211667 - DNA, 419 bp, Glycine max
aagcaaattcaattgcaattctttctcatgtaaggatgtctcaagagtttctgttttgcagttcaattcttctaccttactcctttctatttgcaacattgcatccttgctttctgcaacttcccttagattctccaattctgacaataaagacgtaagcttcttatgaagtatttctttgcattcatgaaccttactgttgctcttcatatcaggatgtatatcatgcaccccatcatgagacacaattgtgtcaacccacatcaagaactcaaagatctcatcagaactctggttgctcatttgtgatgcaagaagagcatcattagtgcatctagtaacctcttgccttaagaaagaaatttcagtatctctttctagcaactgcgattggagctgttcaacctcagaaaggagac

SEQ ID NO: 211668 - DNA, 516 bp, Glycine max
gttatcacagaatatctatcagaaggttccttgaggtcatatttgcataagttggaaagaaaaactattcctctagagaagctaattgcttttgctctggacattgctcgtggaatggagtatatacactctcaaggtgtcattcatcgagaccttaaaccagagaacgtccttattaaagaagactttcaccttaaaattgctgactttggcattgcttgtgaggaagcgtactgtgacttatttgctgatgaccctggtacctaccgctggatggcacctgagatgatcaaacgaaaatcctatgggagaaaggttgatgtatatagttttggacttatcttatgggaaatggtgactggaactataccatatgaggacatgactcccatccaggctgcttttgccgtagtaaataagaatgtaaggccagttattccttcaaactgtccacctgcaatgcgagctttaatcgagcaatgttggtctttgcatcccgacaagaggcccgagttc

SEQ ID NO: 211669 - DNA, 518 bp, Glycine max
  unsure (1)..(518): unsure at all n locations
attgcattctgctatttaatttcactacgtacacgcacattctcctcaaagacaacaatggcaccaacagccaagactctgacttacctggcccaggagaaaaccctagaatcgagcttcgttcgggacgaggaggagcgtcccaaggttgcctacaacgaattcagcgacgagatcccagtgatttctcttgccggaatcgacgaggtggatggacgcagaagagagatttgtgagaagatcgtggaggcttgcgagaattggggtatattccaggttgttgatcacggtgtggatcaacaactcgtggccgagatgacccgtctcgccaaagagttctttgctttgccaccggacgagaagcttcgttntgatatgtccggcgccaaaagggtggattcattgtctccagccatctncaggggaatcggtgcaggactggagagaaatagtgacatacttttcgtacccaaaaagagagagggactattcaagtggccagacacgccagaagggtg

SEQ ID NO: 211670 - DNA, 452 bp, Glycine max
agcacaaaggtaaggactattattaattcatggcccttaaaaaatactaaaaacaccaagggggcatgcaaatgatacatatgtaattattattaattaagcaagaatcttcttcaaaggcttggcctcaagttttgccttctgatcaagttcttgcaaatgcttttcattctcaaggtcctgcaaatgcttttccttagccagcttcttcatccttgcaatctcaatgtccttgctcatcttcctcctgtacatttcagcaaaagtgattggttcctccatcacaggcttctctccttctcttatcttcagagggtaaacagttgcatttggtgctgggttttgaaaagtggctatggacaaacggctatggtttgagttcaccaccgcttggtgatcagcattcttgaaccttccattgctcagataatgagcatgatctccaagattga

SEQ ID NO: 211671 - DNA, 522 bp, Glycine max
  unsure (1)..(522): unsure at all n locations
tcttcttcacgtggtacttcttgaacgtgattttcaacatcctcaacaagaagatctacaattacttcccctatccatacttcgtatcggtaatccatttattcgtgggagtggcgtactgtttggtgagctgggccgtgggccttccaaagcgtgctcctatagactccaacctactgaagttgctcattccagtggctgtgtgtcatgcattaggccatgtgaccagcaatgtctcatttgctgcagttgctgtttctttcactcataccattaaagctcttgaaccattcttcaatgctgctgcttcacagttcatacttggtcaatcaatccccatcactttgtggctgtcactggctcctgttggtattggtgtgtccatggcatctttgactgagctctcgttcaactgggtcggcttcataagtgctatgatttcaaacatctncttcacataccgaagcatctattcaaagaaagccatgactgatatggacagtaccaatatctatgcctaca

SEQ ID NO: 211672 - DNA, 554 bp, Glycine max
attgacttctattatgaaatctaccaacaaattttttttacatgaaataatcctctggtaaatcaaagacagcaacaacagagaaaaaaaaaatggaggcactgttgtgcagaaaactgggtgatccaacggtatctttggaagacaacgatgatagcccaatagttctgtcaaagaatcatccaattccccaactcgattctcccactgcagtaagagtgagaatcaaagccacaagcttgaacttcgccaactacttgcagatactgggcaagtaccaagagaaaccctctttgcccttcattcccggttcggatttttctggcttcgtcgacgccgttggatccaaagtttccaaattccgagtcggcgacgccgtttgctccttcgccggcctcggctccttcgctcagttcatcgtcgttgacgagtcccagttgtttcaagtgccccaaggttgtgatcttgttgctgctggggcacttgctgtggcgtctggcacttctcatgtagcacttgttcatagggcccaattgagctccggtcaggtgttg

SEQ ID NO: 211673 - DNA, 361 bp, Glycine max
attaagtgccgtgtcatacagttgacggcctgattcggaatgacgacgacagttagggccatgatcatagcgaggccagtagatgacgaagagctctaacttgcggaagaggacgatacggttgtctgaaactacaagcttctcatcaaagaccacgctactagcgttgacagagccgctaccttgaagaggaaaggctgctaccctgatcctaaaggcgccagcccttacctagatctcgaatgttccggaactggactgtccctgggtaaaagcgttttcagctagaaaatcggtgatcaggtctgtgctcttgtcgccggatgcagatgtgccgataaagttgcatttccggaaggac

SEQ ID NO: 211674 - DNA, 542 bp, Glycine max
  unsure (1)..(542): unsure at all n locations
gataaagcgtgtgccatggctaaacaggcttttgaggaagcaattgctgagctggacaccttgggagaagaatcttacaaagacagcacgctcataatgcagcttttaagagacaacctcaccctttggacttctgatgttcaggaccagctagatgagccctgatatcccttataggttgatgggtggtattcttcctctcatggaggtgggctttgaatgtcatttatttgtgctaattaagaatcgccctagtttataaaatgattggcaatctgtgatataatgttgtatgaacagagaccaggcttcttttttttgtgtgtcatatggtattggaaaggatactgtataatgggatatccaattaattattatctgttgcaatctttcttgtgttactttcacagtcccacaacacatagggtcctaactcataagtgcccccattttaaaattttgggtcagcatctggtggtcctataggaactagaaatgtcattgtagcaacattattctctaggnaagaacattgttcatta

SEQ ID NO: 211675 - DNA, 537 bp, Glycine max
  unsure (1)..(537): unsure at all n locations
gcctcaatgagaaggtgcttgcaagagggaaacaagaggggcacatgaagcagcaggctgaaagtgaagaagaaacaaaaagattattgcatttgcaggaacaggaaccaccccagaggcttttactggaatcagtttcggagggagaaggatccaaagtctcttctgttgtcgggggttgtaaacaggaagatatcagttcagccaggagtgatattttggattcagatagtccacattacaccgatggagttaactccgcactgctagagcatggtgattcttcttatgtgtttgagcatgatcaatcggatatgtcacaagatgaagaagataacctcagcaaaagtctctacccttcgtacctctttcccaaacttgaagaagatgtggattactccgacccgcctgaaagttcttgtaattttggattttctgaggaagatcacgccctttggacctgggcatactaagttttcttccatgttcatgtgtgtgtttgtgtcatatgttnttttagtaattagtatttagtat

SEQ ID NO: 211676 - DNA, 412 bp, Glycine max
gtaaaatgcaagtaacattaagttggattcggatacacaagataattcacattatctgaagtacttcaccaaacacaaatctaaaaactctcaaaagtcatttcgttctttgacgctcactttccggggacgaagttggtggcataggcccaggcgttgttgttgacagggtcagcaaggtgatcggcgaggttctccaatggaccctttccggtgacaatggcctgaacaaagaagccaaacatagagaacatggccaatcgtccgttcttgagttccttcaccttaagctcagcaaaagcctctgggtcatcagcaaggcccaatgggtcgaagctgccacctgggtagattgggtcagtgacctaaccgagggggccaccagcaatacggtaacctctaacgggaccca

SEQ ID NO: 211677 - DNA, 594 bp, Glycine max
caacttcttccttttcttcaccccgtacattcacaaccctggctctcttcaaatctaagacaaaagccgctcctgctaagactaaggttacaaagccaaagcaaaaggttgaagatggtatctttggcacttctggaggatttggttttactaagcagaacgagctctttgtgggtcgtgttgctatgcttggttttgcagcatcattgttgggtgaaggaataactgggaaaggaatcctagcacaattaaacctggaaactggaattcccatttatgaagcggagcctcttcttctgtttttcatcctcttcaccctgctaggagccattggaggtttaggtgaccgtggaaaatttgtcgatgacgaacctactactggaggtgttattccttcaggcaaaggcttcagggaagcccttgggctcggttcaggtcctttattcggattcacgaaagcgaacgagctatttgtgggaagattggctcaattgggtttcgttttctcattgattgggagaaatattactggaaagggagctctagcccaactcacattgagaacggggtaccaatcaacgaaatcgagcccct

SEQ ID NO: 211678 - DNA, 451 bp, Glycine max
gacagacaacagaggaacacttccaaacaaaccatggacgtgggtcagatgcagagacagaggatcgactacaccaaatccctcttcctcgagggcttcctggatggacagtatctgcaacttcagcagcttcaggatgagaacaaccctgactttgcggtcgaagttgtctctctcttctttgaagattctgaaaggcttctcaaagatctcacctttgccctagatcagaatggcgttgacttcaaaaaagttgatgctcatgtgcaccagataaagggtagcagttcaagcataggtgcacagagggtgaaaaatgcctgcattgctgtccgcaacttctgtgatgagcagaacacagatgcgtgcgtcagatgtctgcaacacgtgaaacacgagtactgccttgtcaagaataagcttgaatcaatgttcaggcttgagcaacaga

SEQ ID NO: 211679 - DNA, 367 bp, Glycine max
taaaccctaaacaactctttctgttcttccttcgctcgttgttctccctcgcgtagatcgacaatggcagagacagagacgtttgctttacaggctgagatcaaccagctcctgcagtctgatcatcaacaccttctactccaacaaggagattttccttcgggaactcatgagcaacgccttcgatgctaaggacaagattcgatgtgagagtttgacagataagagcaagctcgatgctcagccacagatgtgcattcatattattacagacacgactaacaatacactgaccattgttgacagaggaattggcatgaccaacgctgattaggtgaaccacttgagtacaaatgctagagctggt

SEQ ID NO: 211680 - DNA, 439 bp, Glycine max
tctgaccctttttttctcttttggtaatgacttagtgaacttggattcatctatattgcgttatgctttaaaaatagtacttgaaaaactgacattgaagacgttcatgaacagtataaatatcgttatagaaatattacagtggacctcattatttacacaacacatgagggttgatagactagttgcagtacaaattagtgagatgatattccgtgcaagtgaacataaattaatagacttatacattacattgctctgattatttcaattgtctcttgtactacaattcattcaagtgccattttttggcatgtcatatgacaccaatatatggcattcaattacccttttttcattccttttaatccacacattgtcacaaaagtgttaaccttcttcagtaatatccacagctcttctgcatattgagccattc

SEQ ID NO: 211681 - DNA, 578 bp, Glycine max
  unsure (1)..(578): unsure at all n locations
ctcgagccgatatatttgtatactatactgaccatggaggtccaggggtgctcgggatgcctgctggtccttacttatatgcggatgatctgattgaagtcttgaagaaaaaacatgcttctggaacgtataaaaacctagtattttatctggaggcatgtgaatctgggagtatctttgaaggtcttcttcccgaagatatcaatatttatgcaaccacagcttccaatgcagaagaaagtagttggggaacatattgccctggggagtatcctagtcctcccccagaatattcaacctgcttgggtgatctgtacagtgttgcttggatggaagacagtgacagacacaatttacgaacagaactctgcatcaacaatataaattggttaaagagaggactatatctggagattcatactatggctctcacgtgatgcagtatggtgatgtacggcttagcagtgatgttctcttccattatntgggtacagatcctgctaatgataatttcacttttgtggacgaaaactccttatggtcaccttcaaaccagtccaccaacgtgatgctgatct

SEQ ID NO: 211682 - DNA, 607 bp, Glycine max
gattcatcttttgttcattatagttagataatagttctctatatataagattgatgactagtatagaatttaattatgagtatattttagtatagttatatatattatgtaatatatgtttaatgtgtgtagttagtattggtgatgatattgatcgttcggacttatatggcagggtcgacgagctcactaatctgctggcgggctgtcgttctttttttaccacatagaatttattgtcatttatgaattcattatgtcaatagtttatagaaaaacatggctaatgtaaatactgtattatacatataccaaaatatgtaccggttgtggtgaggatatgtttgccattaatatggtgcttaggatatagcctatagaaaactaactggcaatatatcatattatactaacttaaagttatattgtagaaatctttagtccacatgattattaaagcgaataattcattcgatgaaaggcttttcccggaaatagatcacatatgatgacacacagtagtaaataagttcaacagagagatggaggataaatgatggcttgaaactatcttggaccaaaagtacattccttagaaatgagagtg

SEQ ID NO: 211683 - DNA, 513 bp, Glycine max
ctcgagccgatttgatttgattttgaggaattagggttcgtggtttgatttgattctgtgattcgcttgttatatgtaaaatattcccggttcctaattttagggtctgcgatttattttcttttatcacttttgaggaatcagggatcgtggtctgacttattgtgcattatttagttgtatgctgcaaaatctttccttattttttaattagggtttagggtttgcgatttgtcatttttgggaattatggtttgtggtttattgattatgcaattcgggtttgctttctttccggtttttaatcagagttcctgactttgatgtttcttttttgtgattgaacagatgcagatattcgtaaaaactttgaccggcaagaccatcacccttgaggtggaatcctccgacaccattgacaacgtaaaagctaagattcaagacaaggaagggatcccacctgaccagcagagacttatctttgcgggtaaacaacttgaggatggtcgcacc

SEQ ID NO: 211684 - DNA, 347 bp, Glycine max
caagaacagattcacattgccgtcatttttgacattgaagaactttgaaggattggaccttggaaagatggacaaagctgatgactctggacttgcttcatatgtttctggtcaaattgatcgtactttaagctggaaggatgtgaagtggcttcaaacaatcaccaaactgccaattctggtgaagggtgtgctgactgctgaggacacaaggatagctatacaaagtggtgcagctggaattatagtgtccaatcatggagctagacaacttgactatgtttcagccaccatatcagccttaaaaagaggttgtcaaagctgctgaaggtcgcctttctgtattt

SEQ ID NO: 211685 - DNA, 427 bp, Glycine max
aatgtttgaggccggacaagcttgtcccccgttccttgaaaaaattggtgtgggatgcgagtttaaggcttatcctggtctaggccacacgataaacaatgaggagctgctgtatctcgagtcgtggatcaaggcacgcctacaaagttcttcccaataattatttcggcctggaataatataatctaaacataagcttttacttgtggagaccccggatcagtttgttgtttattttcgctttattcataatgtttaacaggaatggaaatgatcttaatgtgtgtttcgtataacgttgcataagtctgaaaattttcacgtcaatttgcgaattcgcgcagaagctatacacgtgcctatttggattcaaaaaaaaataaggaaattaaaacttaaaccttgttgtggtaaatataatgatcag

SEQ ID NO: 211686 - DNA, 544 bp, Glycine max
gaagattccgcaacagagagtagaaaagatggcgcggttgatcacagtggtgtggtgcgcggtggcggtgctactgtgcgccgcggcgggcgcgtcgtgggtggaggaggcggcgaacccgatacgaatggtggcgggggtggaggcggaggtggttcgggtgatagggcagtgccggcgcgcgctgaagtttgctaggttcatgagcaggttcgggaagagttaccgaagcgaggaagagatgagggagaggtacgagatattctcgcaaaacctcaggttcatccgctcccacaacaagaaccgcttgccctacactctctctgttaatcattttgctgattggacttgggaggagttcaaaagacacagactaggcgctgcccaaaattgctctgccactcttaacggcaaccacaagctcactgatgctgttcttcctcccacgaaagactggaagaaagaaggaatagtgagtgatgttaaagatcaaggcagctgccgatcatgctggacattcagcacaactggggctttagaagca

SEQ ID NO: 211687 - DNA, 454 bp, Glycine max
tgggattgatgtgctacttgcttccaatgctggtcaaatacagtggagccttagctgctctcactgtagaccctttactccacttgtcaagagcttctagcattgtgatgttgattgcatatgtagtctacattgtctttcaactgtgtacacacaggcagttatttgaagccgaagattagggtgaggatggcgaggacggtgaagaagaacaagctgtgattggattatggagtggcattgcttggctggtatggatgactgtgttcattgctgcgttgactgaatatgtggtggatacaattgatgatgcatcagattcgacgggttcgtctgcgagctttctcagcataatctcgttaccaatagttggaaatgcagctgaacatgcaggagcaatcatattagctgacaagaacaagctggacatttcattgcgtgttgcattgggttc

SEQ ID NO: 211688 - DNA, 527 bp, Glycine max
aagaagatacaagcattaatagaatttttatttctcacacaataaatacaagagattctgcaaactgaaaaagggatttcttactaaagcaaactcaaacaagaacaacttccactcatttggcatctaccgtagtagaacaggatcaaaagcagctctctgatagaacacacgtatgtattatattgaacatcttgcacagtggttcatttctcacagctattgcaacttaaaatacttgcaaagcttctgcaaattccaaactttctttttctcccttctttatggatatgacaaagtgatcagatcatgaaacaataatcaatccattgaatttgaatctgatttttggtttggatcgatgccaccattcttcatcttaggaagggacaacaaataggccaaagcctactaattaagcgcttaaaactgcattagtggttggtttaagtgtgatgttagtaacatcagcttgattattaaagggtgttctttgtacgaagaagctgccccataacaatgtgcac

SEQ ID NO: 211689 - DNA, 523 bp, Glycine max
ggctggtcatgctgtagtaggttctgcagttgcgaagcttcttcctggacagccacgtgttgagaaactaagtatattgccaaggtcaggaggggctttgggctttacttatattcctccaacaactgaggatagatacttgctatttgtcgatgagttgcatggtcgcctggtgacccttcttggaggacgtgcagctgaagaagttgttttttctggtcgggtgtcaacaggtgcacttgatgacatacgacaagcaactgacatggcatacaaggctatagctgaatatggtcttaatcagaccataggccctgtttcaatagccactctttctagtggtggaattgatgattctgggggagctgctgttccttggggaagggatcagggacatcttgttgatcttgttcaaaaagaggtgcaaacattactgcagtctgcactggctatagcactttccattatccgagccaatcctgctgttttggatggtcttggtgctgatttggaagaaaaggag

SEQ ID NO: 211690 - DNA, 497 bp, Glycine max
cggcgcatcggtgaagcttaacctcgctggacacgatgagtacatcgtaaaaggaggcagggatttgtttcacttgttgcccgatgctttcaagggtatcaagcagattggtgttatcggttggggatctcagggacctgctcaagctcagaatctacgggactctcttgctgaagcaaagtctgatattgtggtcaagattggactcaggaaaggttctcgttcctttgccgaagctcgggcagctgggttttctgaggagaatgggactctaggtgacatatgggaaactgtctcgggcagtgatcttgtgatgctgctaatttctgattccgcgcaggctgataactatgagaagatattgtctcacatgaagccaaacagcatacttgggctttcccatggttttcttcttgggcatttacagtcatcgggacttgactttcctaagaacattagtgtaattgctgtgtgcccaaagggaatgggtccatctg

SEQ ID NO: 211691 - DNA, 501 bp, Glycine max
ccttagttccttgaattgccatttcaaatgtagttacatagacacaaggcaattttcttaatgcaacaaagagtaatccaaggaaaagaaaaagaaagattagatctcagcaggcacacgtttgtacaaatgtgaggggagcctaggagaagccaaagcttgtattggagtcctcatgtatgtgactaaccctggattctctcccatgtcaatttcctcaggcttcattccttcaggtggggtccaacaaaaatggtgcaagaggtggcccaacatggatgttaccaagttgataccaagttgggcacccgggcatacccggcgacccgccccgaatggaagtagcctaaagtcatggcccttcatgtccacatcctccttcaaggaacctctcgggtcggaacttcaacggatccttccacactgccgggttacgggccacggtccacacattcacatgcacattggaccttttggaatatcatagcctcaactttgaca

SEQ ID NO: 211692 - DNA, 318 bp, Glycine max
cagaacaagttgccttttacactggtcccacagtcggaggacttctgaatgctacatgtgggaatgttactgagctcataatagcaatatttgcccttagcagtaacaaaattgctgtggtcaagtattctctgttgggttctattctttcaaaccttcttctggttcttgggacctctctattatgtggtggcattgcaaaccttaaagtggaacaaaaatatgacagatgacaagcagatgtgaactcacttatgctgttgttgggattgttgtgctacttgcttccaatgctgttcaaatacagtggtgccttag

SEQ ID NO: 211693 - DNA, 530 bp, Glycine max
cggtggctattcatctagtcactagtacagggggcattgttttactggtcaatacgaccctcatcagcagacaccatttgcttgatcattgttaatgattggcaagaaaataatgtatagttgagtacataaaaggtattctatgattctggtgactactcatttaatctctacactaggaagtgcactgatcaaacagtgaaaatcttcctaaccttcttcatgttcctacgacaaacagggcaagttccagctgcctcggctatcctagttccacaagcaaagcaagccacacagtgtccacatggaatgaagaagcagtcccttggagcattaaagcatatagcacaaagatgccgtgtgtcattactggtttcaccatcaactaaagtctttccattaatggggcctttaggaaaaagccaagatctctttatcttgggcaggactatacatgaacccacttgaagaacatatcttggaggagcaaaggcttttgactttgttcctaatcaactctgctttttatg

SEQ ID NO: 211694 - DNA, 484 bp, Glycine max
  unsure (1)..(484): unsure at all n locations
taaaaagataagcaaagcgtgaaaaatcgcaaaataccaaatcaaaataacaagcacaattacagtgactccgcttggttcctcttcttcgatcttcggtttgattctgcgtttgttcacatcatggccaccgcttcagtggcatttaagtccagggaggaccaccgcaagcagattgagttggaggaggcgcgtaaagcggggcttgcgccagctgaactcgatgaagatggaaaggaaatcaatcctcacattccccagtatatgtcctctgctccttggtatcttaatgctgagagacctagtttgaaacatcaaaggaaatggaaatctgaccccaattacaccaaatcatggtacgatagaggtgctaaaatctttcaggcagacaagtatcgganaggtgcttgtgagaaactgtgagctatgacacatgattctaagtcatgcatggaaagacctacgagagtgggagcanaatgga

SEQ ID NO: 211695 - DNA, 524 bp, Glycine max
  unsure (1)..(524): unsure at all n locations
caactaggacagaaatcaagctttgggtcgaactcttctttgatgtcaaagtaatagctatgaatagtcatcgactcccggtaaagggtagaagagtacgacctattatgggacatacaatgcattacagacgtatgattattacgcttcaaccgggttattctattccacctcttagaaagaaaaaaacttaaatcaaaatacttaatagcatggcgatacatttatacaaaacttctaccccaagcacacgcaatggagccgtagacagtcaagtaaaatccaatccacgaaatcatttgatctatggacagcatcgttgtggtaaaggccgtaatgccagaggaatcattaccgcagggcatagagggggaggtcataagcgtctataccgtanaattgattttcgacggaatgaaaaaaacatatatggtagaatncgtaccatagaatatgaccctaatcgaaatgcatacatttgnctcatacactatggggatggtgagaaaaaatatattttacac

SEQ ID NO: 211696 - DNA, 432 bp, Glycine max
catatagttaagttgtatcgtttcaatctaagtttcataaaaataaaaataaatgtacatgtgcttcatctctctagttctgtttaaattcagcattttgacccggctatcacggtattgctagtggtagtgtatgaatttccatgggactaatgatattgaatgctatcgacgactttgtcactgaaagttatttatcctgagcaatattcacaaccctcggaacctgcgacgccgctttcgccgttcaacaaatagccgacatagcagaaggcgacaaccgcggtctggcactgttgctgggcataattcctgcaatagggcgggttctcgccaacattatgcaggcggcgctgaaccaactgaaccgcatgcgcagtaccaaaggcgtgatcattgggttggggcttggcggcttggctggcttgctgg

SEQ ID NO: 211697 - DNA, 483 bp, Glycine max
aaaagggcaagcagggttgactcctgaaaatctggcagaagaccttggtccattgtttgaatctatcattagatgcattcctggaccacgtattgacaaagatggtgcccttcaaatgttggttacaaatattgagtatgatgaacataaagggcgcatagcaattgggcgtgtgcaagctggagttttagaaaaaggcttggatgttcgagtatgtacttcagatgattcatgtagatatggaagagttactgagctgtatgtgtatgacaaattcaatagggtccctgcaaataaggtggaagcaggagatatatgtgcagtatgtggaattactgatattcagatcggagagacaattgctgataaagtatctgggaaaccactaccttgaatcaaggtggaagaaccaacagtgaaaatgtctttctccataaacacttgaccttttggtggacgtgaggtaaagtatgttactagtag

SEQ ID NO: 211698 - DNA, 553 bp, Glycine max
  unsure (1)..(553): unsure at all n locations
ggcaatgaatctgatgcaggcggttcgctacgacgcctacgggggaggtcctgccggcctcaagcacgtagaagttgccgtttccagtccaaaggcaaatgaggttttaatcaaactggaagcagttagcattaaccctattgattgtaagattcagaagggtcttctccgtcctttatttctccccagaacctttacccacataccttgcactgatgtggctggagaaatagttgcgatcggaactcaagtcatagatttcaaagttggcgaccaagtccttgctgaactcactcatcaatatggaggtgtggtttgccgagtttgctgtggctagtgagagcttaacagcagccagaccatctgaggtctcagccgctgaagctgcagcattgccaatcgccgggcttacagctcgtgatgccctcactcaaattgcaagagtcaagcttgatgggactggccagctcaagaacattgtagtaactgctgcttcaggtggtgtaggtcactatgcntgtcaactagcanaactaggcaacacccatgtcac

SEQ ID NO: 211699 - DNA, 531 bp, Glycine max
tcttcttcacgtggtacttcttgaacgtgatcatcaacatcctcaacaagaagatctacagttacttcccctatccatacttcgtatcggtaatccatttattcgtgggagtggcgtactgtttggtgagctgggccgtgggccttgcaaagcgtgctcctatagactccaacctactgaagttgctcattccagtggctgtgtgtcatgcattaggccatgtgaccagcaatgtctcatatgctgcaggtgctgtatctttcactcataccattaaagctcttgaaccattcttcaatgctgctgcttcacagttcatacttggtcaatcaatccccatcactttgtggctgtcactggctcctgttgttattggtgtgtccatggcatctttgactgagctctcgttcaactgggtcggcttcataagtgctatgagtttaaacatctacttcacataccgaagcatctattcaaagagagccatgactgatatggacagtaccaatatctatgcctacatgttcatca

SEQ ID NO: 211700 - DNA, 533 bp, Glycine max
  unsure (1)..(533): unsure at all n locations
gagagggagtcagagaaaccctaggtaagaagaaaagatgccggctggtcatggtttgagatcccgcaccagagattccttctctcgtcctttcaggaagaagggaaccatcgccctcaccacatacctgagaacctaccacgtcggcgactatgttgacgtcaaggttaacggtgccgttcacaagggaatgccccacaaattctaccatggccgcaccggacgcgtctggaatgtcaccaaacgtgctgttggcgtcgaagtcaacaagcaggttggcaacagaattataaggaagaggattcatgtgcgggtagagcatgttatgccttcacggtgcactgaggagttccgactcaggaagattaagaatgatcagctgatggccaaagccaaggtcaaaggcgagaacatcccctccttgagacaggctgaccgtttcaaactcggtgagacgatggcagatgcgaccgctcctacacaggccaacatcccatatgatgttgncaatgacctcaagggaggttattagt

SEQ ID NO: 211701 - DNA, 531 bp, Glycine max
  unsure (1)..(531): unsure at all n locations
gaactcaagaaggcaggtctcactgcctataatcacaatcttgacacttcaagggagtattatccaaacatcatcacaacaaggacttatgatgagcgtcttcaaacccttgagtttgttcgtgatgcagggatcaatgtttgttctggaggaattatagggcttggagaagcagaggaggatcgtgtaggtttgttacatacattgtcaacacttcccacccatccagagagtgttcctattaatgcacttgttgctgtaaagggaacccctcttgaggatcagaagcctgttgaaatatgggagatgattcgcatgatagcaactgcacgtatcgtaatgccaaaagcaatggtcaggttatcagctggcagagttcgattctccatgcctgagcaggcattgtgctttcttgctggtgcaaattctatattcactggtgaaaagcttctcactactcctaacaatgattntgatgctgatcaactcatgtntaaagttcttggacttctcccaaaagctccaagctta

SEQ ID NO: 211702 - DNA, 398 bp, Glycine max
gataaaggactcaaaattaataataggcaatgagtgaatgcagcagcagagtagccacagaagtatcatcatattaatgcttagaaattaagcatagagttacccaaatacaagtttaaatgagttgtccaaaaaggaaaagaaaggatgagaagaacaggttcatgaaacatatatagaagtgtttcccccattggaaaaagtttttcataatcttggcaaggcgcgggggatagtgcgtggttggtcccaatcagtgacaatgtgatcacgagtgatatccttgagtgaggtgcaaccactcaaagccatggttagctcaaactcctcacgtagcatccgcagcacatttcttacaccagcctctccttcagcagccaaggagaacaccactgggc

SEQ ID NO: 211703 - DNA, 543 bp, Glycine max
  unsure (1)..(543): unsure at all n locations
gaccaactcatcagccaatagttcatttggcaagcttcagggcaatgccaaacactgtgatgcttcgtccagctgatggtaatgaaactgctggatcatacaaagttgctgtggttaacaggaagagaccctcaattcttgcactttctaggcaaaagttgacccaacttccaggaacttctattgagggagttgaaaagggtggctacaccatttcagacaactcatcaggtaacaagcctgatgttattttgattggaactggttctgagttggaaattgctgctgctgctgctgaggatctaaggaaggaaggaaaagctgttagagttgtttcttttgttagctgggaactttttgatgagcagtcagatgaatacaaggagagtgttctacctgcttcagtaacagctagagttagcattgaggcaggatcaacatttggttggcacaagattgttggaagcaaaggaaaggccataggcatngatcgatttggagcaagtgctccagctggaaaaatatcccaggagtttggtatca

SEQ ID NO: 211704 - DNA, 400 bp, Glycine max
tctaaaggctgcactctcttttatccctcaaaaaccaaaaccctaatggcagagcgcggaggtggcgaccgtggcagcgaccgtggcggtttcggacgcggctttggtgggcgagggcgcggaggtgacaggggccgaggccggcgccgaggtccccgccgcgaggaagaggagaaatgggtcccagtgaccaaactgggccgcctggtgaaagagggaagaatccgaagccttgaacagatctaccttcactcgctcccgatcaaggagcaccagatcatcgacacgctcgtgggtcccaccctcaaagacgaagtgatgaagatcacgccggtccagaagcagacccgggccgggcagaagacccggttcaaggccttcgtcgtcgtcggagacaaca

SEQ ID NO: 211705 - DNA, 470 bp, Glycine max
tgtggattcggctcgagcaatgccttgcaaactcatcattccttctagttttggatctacaactgaacaagcttcatggcactttgccaagtatcttttcaaaggactgtcggctcagaactctggatctcaatggcaaccaactattagaaggtgttttgccagaatctatatccaattgcattcatctggaggttttagatcttggaaacaatcaaataaaggatgtgtttccccattggcttcaaactctaccagaattgaaagtattggctatgcgagccaacaagttgtacggtcccattgccggtttaaagatcaagcatggattccccggtttagtcatctttgatgtctcttccaacaacttcagcggcccaataccaaaagcctacatacaaaaatttgaagcgatgaagacgttgttatagataccgatctgcagtacatggaaattttttttttcttat

SEQ ID NO: 211706 - DNA, 469 bp, Glycine max
ctgttcactgtgcaacaagagcagctgcaaaagaagccaagaagcagcttctatcatggagcaacttagatggaccagattcaacatttcagttgaaggtccctgctaccatgcctgtggtcaaggaactctgcggactggacattgtacaaacttacttgaaatggctaatgggcaacaggtactggaactgatctcactttgaatatcgatcaatgattacattactcacttgggtgaaaaataacttgagtctagatttcacgtatatgagagacacaaaggccattccaagactgtgcagctatattgatcttgaatactggtaggacatagatatgtactgtgattaggataaattcatatatactaggctcaactctggggtatcaatataagtaacattcaactgatcctattatctagaagagaaagactgaattgactatgctgctggcactgttcagct

SEQ ID NO: 211707 - DNA, 493 bp, Glycine max
aaatgcccactttttttattccaacgctcctgctacttctcatagccttcgtcacctctgtctacggccgacgtgacctcgtcggagactttctccggatgaccttcgaaactgataacgacgacaacttcaagggcacccggagggccgtactcctcgacggttacaatggttactggaattacagacatcaggctgatgatcgtcacgcctatcaaatattgacgaaaggtggtctgaaagaagaaaatattattgcgactatgtatgatgacattgcattcaatggggaatacccatggccaggagtcatgattaacaaaccagatggatgtgatgtctataaacgagtctcaaaggactacaccggcgaagatgttactgtggataactattgtgctgctgcacttggaaataagtcagcactgactggtggcagatggatcgttgtggacagttgttcagatgatcatatatgtggatactatactga

SEQ ID NO: 211708 - DNA, 478 bp, Glycine max
  unsure (1)..(478): unsure at all n locations
ctccctccgtcacgcatcttgtctcttccgtcagcccattgtaaagctgccaacacacctgcacactcaacgagcccacttctcccgcaccatccgcaagatggccaccgaatacaagctcaagggcttgaccagcgtcgacctcaagaacggccagaaggctgagtacgaggtcgaaggcatcgagggcggcaaggtcctgctcgtcaaggcccaggatggcctgcacgcaatgtcgcccaactgcacacactacggagctcctatggtcaaaggtgtcgacaccggcgacggacgtatcacttgcccatggcacggcgcctgcttcaagatctncactggtgatgtcgaggacgccccggctctcgaccctctcgccaaagtcaaggtggtgcacaaggatggcaggtgtatacatcgagggcgacgaatccacaatcaaagcctgcaggaggaagttgaacatcaagtgctctgc

SEQ ID NO: 211709 - DNA, 525 bp, Glycine max
gagagatttttagttctgggcatgctgttaatcttctcgaggccccccatagcttccacgtgggactaaactccgtgcagttttccgggcccacagtggagacaccggcaccagcaccagcaccggcaccggcaccagcaccggcaccggtaccggtgattgctccggtgatgaattcaggtagtacggaggggaagaagaagaggggcaggcctaggaagtatggaccggatggcaaggtggcgctgtcaccgatgccgatatcggcgtcgattccgttcaccggagacttctcagcctggaaaaggggcagagggaagccacttgaatcaatcaagaagacttttaagttttatgaagctggaggtgcaggatctggtgatggaattgcatactcggttggtgccaatttcacacctgacatccttacagtaaatgatggcgaggacgttactatgaagattatgtccttctctcacaaggatatcgagcaatttgcattctgtctggcaatggcacaatttc

SEQ ID NO: 211710 - DNA, 506 bp, Glycine max
  unsure (1)..(506): unsure at all n locations
cggctcgagcttcattcaacatttctctctcccttagctagtttttaccaatggctgctgcggttagtgctgcagtctcttttccatccaccaagtctacctctctcccaagcaggacctccatcattaccccagagagagttgtattcaagaaggcttcattgcaatacagagatgtttgtagcagtggaagggtagtttccatcagagctcaagtcaccactgaggctccagccaaggttgaaaaagagtccaagaaacaggatgaaggtgtggttgtgaacaagttcaaacccaagaccccttacgttggtagatgcctgctcaacacanagatcactggggatgatgctccaggagaaacttggcacatggtcttcagcaccgagggagagattccttacagagaaggacaatcaattggggtaattcctgatggtgttgacaagaatggcaaacctcataaactgagattgtattctattgctagcagtgccattggtgat

SEQ ID NO: 211711 - DNA, 455 bp, Glycine max
tgtcgccctttttttttttttttggaaatgacatagtgaacttggattcatctatattgcatcatccctcaaaaatagtacttgtaaaactgacattgaagttgttcatgaacagtataaaaatcgtcaaagaaaaattacagggacgtcatatatctacacaacgcaggagggttgatagacttgttgcagcacaaagtaggagatgatatttgtgcaagtgaacagaaattaatagacttcgacattccattgctctgatttcttcaattgcctcttgtactcagtccaatcaatgccatctttggcagccaatgacaccataatgtcatcaatacccttttccattccttttagtccacacatgtacacaaaagtgttatccttcttcagtaattcccacagctcttctgcatattgagccattcggggtttggatgtacattcttctcttc

SEQ ID NO: 211712 - DNA, 514 bp, Glycine max
  unsure (1)..(514): unsure at all n locations
gcgagaaatggcgatggcaatggcgcttcgcaggctttcatcttcaattgacaagcctctgcgccctctcttcaatgccggttccctctactacaagtcgtctttgcctgatgaagctgtttacgacaaggagcgacccggagttacatggccgaagcagttgaatgctccacttgaggtcgtggatcctgagattgctgatattattgagcttgagaaagctaggcaatggaaggggctagaattgataccgtcagagaatttcacctctgtgtctgtgatgcaagcggttggatcggttatgaccaacaaatacagtgaggggtaccctggtgcaagatattatggtggaaatgagtatattgacatggctgaaacactgtgccaaaagcgtgccctagaagcttttagattggatcccgctaaatggggagtgaacgtgcagcctctgtcagggtctcctgcaaatntccacgtttacactgcattgcttaaacctcatgaaagaatcatg

SEQ ID NO: 211713 - DNA, 433 bp, Glycine max
  unsure (1)..(433): unsure at all n locations
ggctaatctctcactcttgttcttcggtctcctcctattctccgctgccgtagccaccgtcgaacgaatcgacgatgaagacaaccttctgatccgtcaagtggtgccggacgcggaggaccaccacctgctcaacgcggagcaccacttctccgccttcaagacaaagttcgccaagacctacgccacgcaggaggagcacgaccaccgcttccgtatcttcaagaacaacttgctccgcgccaagtcgcaccagaaattggacccctccgccgtccacggcgtcaccaggttctccgatctcactccgtctgagtttcgcggccagttcctcggcctgaagccgctccgncttcccttcgacgctcagaaggctccgatccttccgaccagcgaccttcctaccgatttcgattggcgcgaccatggagct

SEQ ID NO: 211714 - DNA, 242 bp, Glycine max
aaagcataaacatgggcttaacagtttcctcctccataacattatacatcatgtaaattatttacatacacactatactggggcccctaccatgtttaggcatccatccttatatttaatgggtagaaacatgtttagcagctacagttgagaccatcgagtccaccccacatacattgggacctctgcagatcttggaatatccttcttttccccagctctccccccatgaattctttatg

SEQ ID NO: 211715 - DNA, 549 bp, Glycine max
  unsure (1)..(549): unsure at all n locations
cggctcgagcttctccattggttcttcatctgcatgcacacacttgcatagttttggaaaccaagaatttttgaagggtagcatcaacaagaagttctggaaatggagatcaccaatgtcagcgagtatgaagctattgcaaagcagaagttgccaaagatggtgtttgactactacgcatctggtgcagaggaccagtggactctgcaggagaacagaaatgccttttccagaattttgtttcggccacgtattcttattgatgtgagcaagatagacatcacaactactgtcctgggcttcaaaatatccatgccaatcatgcttgccccaacagccatgcagaaaatggctcatcctgagggagaatatgcaacagcaagagctgcatctgctgctggaacaatcatgactttgtcttcatgggctacttcaagtgttgaagaggtagcttcaacaggacctggcattcgctntttccagctatatgtgtacaaggacaggaatgtggttgctcagcttgtgagaagagcctgaaggggctggatc

SEQ ID NO: 211716 - DNA, 445 bp, Glycine max
gataaaggactcaaaattaataatatacaatgagtgaatgcagcagcagagtagccacagaagtatcatcatattaatgcttagaaattaagcatagagttatccaaatacaagtttaaatgagttgtccaaaaaggaaaagaaaggatgagaagaacaggttcatgaaacatatatagaagtgtttcccccattggaaaaagtttttcataatcttggcaaggcgcgggggatagtgcgtggttggtcccaatcagtgacaatgtgatcacgagtgatatccttgagtgaggtgcaaccactcaaagccatggttagctcaaactcctcacgtagcatccgcagcacatttcttacaccagcctctccttcagcagccaaggagaacaccactgggcgtccaataaatatgccagaggcacctattgccaatgccttgaagaca

SEQ ID NO: 211717 - DNA, 505 bp, Glycine max
  unsure (1)..(505): unsure at all n locations
gtgcaacaaaaggtccaagaagagctagacagggtaattgggcttgaaagggtgatgactgaagctgacttctcaagcctgccttatctacaatgtgtgatcaaggaagcaatgaggcttcacccaccaaccccactaatgctcccacaccgtgccaatgccaatgtcaaagttggaggctatgatattccaaaagggtccaatgtgcatgtgaatgtgtgggccgtggcccgtgacccggcagtgtggaaggatccgttggagttccgacccgagaggttccttgaggaggatgtggacatgaagggccatgactntaggctacttccattcggngcgggtcgccgggtatgcccgggtgcccaactnggtatcaacttggtaacatccatgttgggccacctcttgcaccatttttcgtggaccccacctgaaggaatgaagcctgaggaaattgacatcggagagaattcagggttagtcacatacatgaggactccaatac

SEQ ID NO: 211718 - DNA, 490 bp, Glycine max
cggcatcggaggaggaagaagggatattgaagaaattgaagagtaacgaggtgtttgagcaagaagaaggcgcaatcgcgctgaggaagatcacgaggtgcaaagaggaggctagggtttcgctctgcacgccgcgggtgctgttagcgcttcgtggtttactcgcttcccgatacggcgtcgttcaggtcaacgcagtggcgtctttggtcaacctttctcttgagaagcagaacaagttgaagatcgttaggtcagggtttgtgccgtttttaatcgatgttttgaaggggggattgggtgagtcgcaggagcacgctgcgggcgcactttttagtttggctttggacgatgacaacaagatggcgattggcgttctcagcgcgttgcatccgttgatgcacgcgcttcgtgccgagtccgagcggactcggcacgactcagcgctcgcgctgtatcatttgtcactcgtacagagcaacagattgaa

SEQ ID NO: 211719 - DNA, 538 bp, Glycine max
  unsure (1)..(538): unsure at all n locations
aaagcttgaagatattgttccatcatcccacaactgtgatgttccacatgtgaatcgcactgactatcagcttattgatatctctgaagacggctttgtgagtctgttgactgataatggaaataccaaggatgatctgaagcttcctactgatgaggcattgcttgctcagattaaagatggattttctgaaggaaaagatcttgaggtttctgttatgtctgcaatgggagaagaacagatctgttcactgaaggacatcggtcccaaaaattaatatgatgctatggctgtagctatagctgatagcacgctttttcttcttatgttgctaacaggtagtatattctccgatacatgtgtgcaaaataaacttcataagatggaaatttgcctgtgcttgaaactcaaatgctagggatagaagaaattgagctaagtttagcttttgtccattaattaaggaacacaacggtcttgggtggatgaaattctcataaacatctcatattatttgtntttggtgagtttaatatat

SEQ ID NO: 211720 - DNA, 528 bp, Glycine max
tttcgttctttttttttcagtgcattagaacaaatagggttatatattaaactcagcataaacaaataatatgagatgtttatgagagtttcatccacccaagaccgttgcgttccttaattaatggacagaagctaaacttatctaaataatctcctatcccaggcatttgggttctacgcgcaggcatgtcatcatcttatgaagcccatttggcacacatgtatcggacaatattctagctgctagcaacctgtgaggaaagtgcgtgctatcacctatagctacagtcatagcatcatatctaacattgggaccgaagaccttcagtgaacagatctgaagatctcccattgcatacatagcagaaaccacgggatctttttctctaaaaaatccatctttaatctgagcaagcaatgcctcttcagtaggaagcttgagatcatcctgtggatttccattatcaaggaacagacctcacaaagccgacttctgagatatcaataagctgatagtcagtgcgat

SEQ ID NO: 211721 - DNA, 531 bp, Glycine max
  unsure (1)..(531): unsure at all n locations
cgctgctcagctgtcacaccaatatattagtgatcgatttttgcccgacaaagctatagatttaattgatgaagcaggttctcgagtccggcttcaacatgcccagttacctgaagaagcaagagagcttgacaaggaggtcaggcagattgtgaaggagaaagaagaatttgttcgcaatcaagactttgaaaaggctggagagctaagagacagagaaatggatcttaaggcccagatatctgcacttatagaaaaaggcaaggagatgagtaaggcagaaagcgaggcaagagatgaaggtcccatggtgactgaagttgacatacaacatattgtctcctcctggactggtattcctgtggagaaagtctcaactgatgaatctgatcgtctcctcaagatggaagagactttacacaagcgagtcataggtcaggatgaagcagtgaaagccataagcagggccatccgtcgagccagggtttggactgagaaccctaaccgtccaatngccagcttcatcttttc

SEQ ID NO: 211722 - DNA, 532 bp, Glycine max
ataacatccataattccatattatagaccaaaatgatcttacttacaaaatatagccactcgagatttatttcaagttcaaactacaaccactacaagagggaaaagcaacacaacacatccattcctcacaaaaccaggcaggctggcacagatcacctcattcttgtgtagaaagcacacagcgaaggcatcccccttcatgcaaaagatcaaaagccttgttgatctccgaaagtgtcaaagtatgggtaatgtactcatcaaccttgatttccttcttcaagtacttgtctacaagccaaggcacctgtgacctgctcttgaagccaccaaaagctgttcctttccagactcgtccactcaccaactggaaaggacgggttgatatttcctgccctgatgctgcaacacctacaataactgacgtcccccagcccttgtggcagcattccaacgcagctctcatcacggagacatttccaatacactcaaagctataatcaactccaccatctgtgcgatcaattatg

SEQ ID NO: 211723 - DNA, 513 bp, Glycine max
gcggagatagcaatctcatctcattcatttcaatggcaactcaaggtcaagtcattacctgcaaagctgcggtggcctgggaacccaacaagcccttaactgtccaagacgttcaggtggctccgcctcaggccggcgaggtccgtgtccaaatcctcttcaccgctctctgccacaccgatgcttacacttggggcggcaaggatcccgaaggtctcttcccctgtattcttggccatgaagctgcagggattgtggagagtgttggagaaggtgttactaatgttcagcctggggatcatgtcattccctgttatcaggctgagtgtggggagtgcaagacttgcaaatcagggaagacaaacctatgcggcaaggttcgttccgccactggagttggggtcatgctcaatgatgggaagagtcggttctcgattaatgggaagcctatttatcatttcatgggaacatccacttttagtcaatacactgttgttcatgatgtagtgtagc

SEQ ID NO: 211724 - DNA, 452 bp, Glycine max
ggagtaaaacacctgataatgattaattttaaatcctcaaatccacgtaaaaaaatgttaataatacaaccccaaagacacattgtagcatacacaaatcccattaactaagtaaaatgatccacagacccacaattcctacttgaattgatcattatcggactcaggaaggggctgactagcagctgcaagaagctcagcctcgtgctgttgttgggcagctaaatcaatttgaacttctgggggagccaatgcaggagattctacaaagtgcaagttaacatcgccggcaagtttcctggccaagtacaaaaatggcttttcaaaattggagttgctcttagccgatatctcatagtactggaaaatcttcttcctgtggaaagtaacctgctttgccttcacttgcctattcttggcatcaagcttgttaccgcaaagaacaattggga

SEQ ID NO: 211725 - DNA, 504 bp, Glycine max
ctcgagccgaatcggctcgagagaattctaatactagagagcttacttgtggcatctgttttgaaatgtatcctcgtgcacgggttgaatctactgcttgtggccacccttactgctattcatgctgggcaggatattttagcacatcaattaatgatggtccgggatgtttggtgctgagatgtcctgatccctcttgtggtgctgctgttggtcaagatatgattaatcttttagcatctgatgaagataaacagaagtatgaccgttatcttctcagatcttatattgaagacaacaagaagaccaagtggtgtcctgctccaggttgtgaatatgcagttacttttgatgctggcagtggaaattatgatgtatcttgcctctgttcatatagcttttgctggaactgcacagaggaggctcaccgtccagtggactgtggcactgtgtcaaagtggattttgaaaaatagtgcagaatctgaaaacatgaactggatac

SEQ ID NO: 211726 - DNA, 523 bp, Glycine max
aaagatgagacattatatacattaaattgggatgtattcaataggagtgcaaggaggataacccttacgcgacttagccccctttcacagtaagtagccttaaaaaaggagccagcatatgatataactatgagtaaggactccatttcagcttttggtgcattggccttaggcagaagacatggatttctaattaaggatccaagtttcatcgacgctgttgattgcacatttgacatgtggtggcagacttaacattggcataggtacagtgctcacaagaccaatgattatcatcagtcattctgctggatatagttcgaatagtcgcttttcctcttcctcctctccccttgctgctccctgcagcattttttgagctcgttgctttgctggaagcagctccattactatccacatcaactaaaccattctctaatgccctcaccaaattctcaaagtagtttctagttacactggtcattccagctagtttggttcgaaagtcattgaaatctttaga

SEQ ID NO: 211727 - DNA, 492 bp, Glycine max
  unsure (1)..(492): unsure at all n locations
gggttgtgaaagcagagaagtgagatacactaagttatcctcataaatacactctaattaggtggcaagataagtgtctaaccttagtaacattgccacatattgtgttcattttggaattgtgccactaaaattctattcaattcatctatggctgcctcttcttatgctatgcaatcaatcctggcaaaccctttgatccgcatttccagcgggtctagggtgaaccaatttggcgttcctgctttgcacatgagaaggaatgttggcctgagagttaggtccatggctaaggaagaacaaccaagtgagcctgcaaccccagttacaccgncaccatcagtagaacccaagccacagccagtctctgctccttcaccaaaggtgagcactaagttttctgatgtgttggcattcagtgggccagcacctgagaggatcaatggaaggttggccatgattgngtttgtggctgcaatggcagtggaagta

SEQ ID NO: 211728 - DNA, 525 bp, Glycine max
  unsure (1)..(525): unsure at all n locations
cttttgccctcagatcatcgtcattatctggaactaccagctcggtagatgcaacagcaaagctttctgctgctggagctcttgggaaagcagtttttgatagatcagaatcatccatttcaaataattctgatgatgaggtacaccaatactggcgatgtcagctccctgatgatatcacccctgatttcaaggtcatgggagaagatgagtctcgagttcttgatgatctttctttagcaggcttatccatacatgatgacaatgaagcctccaggtttccttcttctaaaggaagtaaatatattataaatgagcaggaggaaatatctcaacagcatgttaatggcaatagcttggcagataaactagggttttccaattcaagctacagggaggacccatcttctggaagctntttgaatgttctggcaaagccttgggaggggccaattgggagtgctgaccagtgtattagcagtggtcaagagggccttacttatgatgacaactctatacatggat

SEQ ID NO: 211729 - DNA, 270 bp, Glycine max
ttttttttttttttttttttttttttttttttttttttttttttttttttggggtttttttttttttttttttttttttttttttttttttttgggaaaaaaaaaaattggggggcccccaaaaaattaaaaacaacccggggggggcccaaaaaaacgagccccccccaaggtttccacaaaatttggttttggggcccctcccgggaaaaaaagggggggcctaaaataaaacccgggggaaaacaaggggggaaatatgggcccccg

SEQ ID NO: 211730 - DNA, 546 bp, Glycine max
atcacagattcttattccttggtgctggagaggctggcactggcatagcagaactcatagcacttgaaacatcaaaacagacaaatgctccactggaggaagtgcgcaagaatatttggctggtggactcaaagggattgattgtcagttctcgcaaagattcgctccaacattttaagaagccctgggctcatgagcatgaacctgttaaaaatcttctagatgctgttaataaaattaagccaacagtgttgattggaacatcgggacaaggaagaacttttactaaagaagtgattgaggcaatggcttctattaacaagagacctattattctttctctttccaaccctacgtcacagtcagaatgcactgctgaagaagcttacaagtggagccagggacgtgccatttttgcaagtgggagtccatttccccctgttgagtacgagggcaaagtgtttgtgcctggccaggccaataatgcatacatattccctggattcggtctcggtttataatgtctgggaccatcgagtgatgatg

SEQ ID NO: 211731 - DNA, 480 bp, Glycine max
gagcgattatactttattaccggatacatttggattttacaaacttacagagaagagagaatctaaataaaatggacagtgaaattaaaacaatttccaagttccatttcacttaatttatggtgcagatttgtgcctgcaaataactctacacctcaagatcatatcctgaacatagaaccctggcaccaccacgatcttaacccggcttggaccttgtgacctctgtctatcagtaaccaaatcttccatgtagtgaggatcaaagcttctattctcttccacccttaaaattcccaatggagggttgaaagaaaatgccaataaatgtagcaaccatatgcactttgctgccacgaagaaagcctgaaggagttgctcaggccaaggcctagtccaattcagtgtagtaatgatgcaactcattttctggtcacaggacttgctaaactcttcactgtatacttagtaccctttctg

SEQ ID NO: 211732 - DNA, 538 bp, Glycine max
attggattttgcagccttctgctagacttcctgggttccatgtctgtgttggaagtggaggggaaaggttgcttcctgagtggtacacagagaaagggatagagttaatacttagcacagaaatagtaaaggtggaccttgcggcagaatctctgatcagtgcgggaggagaaacattcagttatcagattttgattgttgcaactggctcaacagttataaggctgacagattttggtgtagaaggagctgatgcgaaaaacatcttttatttgagggaggttgatgatgctgacaaattgtatgaggcaatcaaggcaaagaagaatgggaaagctgtggttgatgggggaggatacattggtctggagcttagtgcaatggtgaaactcaacaatattgatgttaccatggtctacgccgagccttggtgtatgccacgactctgtacggctggtatagctgaattgtatgaggagtattacaaaaatgagggtgtcaatatcattaaaggaactgctgctgtagattcacttct

SEQ ID NO: 211733 - DNA, 298 bp, Glycine max
tttcgtcctttttttttaaaacacaaagtcaagcatctgtactgcataattcagagttaaatacagccagatcagatccaatcttctatgcaaaccaccaagcatttttatccttccctattaaaaccattatattttactagcaaaggaaaggccttccttagcaagttgatctacatttgcaaccggaggcttgaccttagcaactttagcaatagcctgggtcttttcaagagttccaccttccagaaagaccccaacaactttcccatttttaatcccatatgtcccaaactta

SEQ ID NO: 211734 - DNA, 555 bp, Glycine max
  unsure (1)..(555): unsure at all n locations
gaggaagaccactgcttattgtcgcatggttgctcgaaaagttatggcaatggccacaggagaggcaccagctgaagctaccccaactgaggtgccagagattgtcaagactcttcaagaaacttgggacaaagttgatgataagtatgcagtgagttcacttgccttggttggggtgattgcattgtggggctcagttggattgatctcagcaattgataggcttcctttgattcctgggattcttgagattgtaggcattggatacactgggtggtttgtatacaagaacatagttttcaaacccgacagggaagctttggtacggaaagtaaaagaaacatacaatgaaatactcgggagcaactgaaagtgttaggaaatgctgagatgctgttgacacgaaatagtcatatcttgctgcttcctattgaagatgtcatcatgcttcattntgtcgccataagcttctgaccatactttatcccaagtatggtatatgttcttgaaaaattgtnatcttttatatatctggatccacttttaagacaatct

SEQ ID NO: 211735 - DNA, 477 bp, Glycine max
acatatataactaaagaatcttgtttggttctattatttggtattttatcatattctaatgaatctttattgtcctttttattattagttattagaatattctttattattagaaagaatgaatagaattggcgaaaataagaaaaaaattcaataaaatcaacattatcgcgggcgaatatttactctattattatcaatcaaattcagatgtaatgtagggcacaactgctaaaaaaaaggattgctttttggtttcttccgccatcccacctaatgaatcattcagatttgttattcattgaatcttaagtattcgcaggtttcgtacgtcccatcacttctagagtaatggttaggtctgaattccacaatggagcctttctcatatcttaagaagtataaactgatgtattttcgaatattgatttgattttttgtgaatcaatattctcagtttttattgattcagagctc

SEQ ID NO: 211736 - DNA, 578 bp, Glycine max
  unsure (1)..(578): unsure at all n locations
atttgaaattttgataaaccgcgatcacaggttgccgcaccttaaaaccggaaacaaaagcaatcgttacttgatttcaagaatctctcaatttcttcctacttctttgtgtacggtttcttaagggaaagaaaatcactctctgtgctggccacagacttcgtgaatcattttcttttccactcttagtttatttgctgaacactctcctatttgatataggacttcgtgtcagatttaaacttcttctgtctctttctcagttctctgtttaatttcaagttcaagctggtgaaatcttggattagtgctcccactctcctatctggtataggacttcgtgggtagacttttctatttctctcctttctttcactctcttcttctcactgatccgcattgccgttcaaagtggtcttatttgaaaaacacttgggcgttggtgcaaatgtttgcttcgttaattntctctggggacaacaggctcactgagaaaacaatttttacttgcagagatttggacatcttggatgttattatcaatagcaactcaatttagaaaatttctaccgcattac

SEQ ID NO: 211737 - DNA, 582 bp, Glycine max
aaaataacacacacttcacacatcattacgacaattaaaagaggtgtggaaattttcaaatagacagagcatactcaacaagagggtcatgtctaatttcctttattgaattaaacaaacgaacaaacgaaagaaaacacaaattccagatcatgcagaggattccgcattttcagaagatctggcagtagcctgtggaacagaaaaagctggcataagagtattaccagcaatttcaaaatcttgagaaattcccaagagaatatcaaaaactgtagactgtttgggattgtcaataaggaaactcaagtgccatgaagtttgatttgcccactcagaactccacatttcaaaaccattattaggaccacatacctctattgggaagatcaattcccaggaatgtggatccgattttgtccacttacatgcatcgaaatgctctgtactgatgctgtatgttaaaaacacttgtaccaatgaggcccaatcactcctattgactgctgcattcccagacatcacaattttaaccattaaacagcctttcttacaagcagcaactctcaacatggtactaat

SEQ ID NO: 211738 - DNA, 493 bp, Glycine max
gttccatgttggatcttaaaatttctcaatctaaaattgcacttcccaaaaacacagttggaggaaccattctgcgtagtgatctattggcaaattttttgacagagggcaattttagagcaagtgttgatttgcagcgcactcatcgtattaaaggaatgattaaaatggtggccacagttggtattcctgagaatacaggtatagcattggcctgtgctatgaatagttcttttagggggcgtgccagttctgatatttacaccatctgctctcaagactgtgaattatggaatcctgcttgcacaaaagcaatgactatgtcatttaatccaaacccgtgttctgatgcatggagtttggaatttctgaagcgtaccggatttcattgtgatatcatttgtgtcactggatggactgccactccaatgcaggatgttcaggttacaattgattggtttatttcctctcaggaatgtgttcccaggactta

SEQ ID NO: 211739 - DNA, 521 bp, Glycine max
gaaaactacaaaacaacttgctttcaataaattaaaattgttcacaatgcaacatatcaagggtaggaccaacagaaataatgtcattttttcattccacccaaaccttgctgtgttcattatgttatgggcaaacgtggctgaggccatcagcattcaattaaaagcttgatgtctattggcaacttaaacaaactattgctatgttttcttttaacaaataaaagagagaaaaaaatacaactcaactaactaagacaaccacgttacacaggaagagcttcttctaatgaatctggggcaccactactaccgttgagcacaatcacattaccatcggagtcagcatcaactataactgagtcaccctctttaatctctctagcaagcatcttctcagccatgctgtcctccaaaagtcgcattatagctcttcttagaggcctagccccataactcggattatatccttcgtcaaccaccctctccctaaatctttctggtactgagagatcaatttc

SEQ ID NO: 211740 - DNA, 513 bp, Glycine max
atttggaccaaacctgtcggaaggccgaggctactggtgcgtgtccgagcggtcacgagcgacgacgagtgggggccggagaaggaggaggcgtacggcggcggcgtagcggtggaggagaaaccgacgaagtcggagacggagacggagaagctgaagaaggccttggtggattcgttttatggcaccgatcgtggactgaaagcaacgagcgaaacgagagcggagatcgttgaactcatcacacagctcgaggccaagaaccctaaccctgttcccaccgacgccttgactcttctcaacggaaaatggattctcgcgtatacatcctttgcaggtttattcccattgttgtcaagtggaacactaccattggtcaaggtagaggaaatatcccagattattgactcgctgaattttaccgtccaaaactctgttcagttcgctggtcctttggccaccacctcaattagtactaatgccaaatttgatgttcgaagtccaaaacgtgtg

SEQ ID NO: 211741 - DNA, 532 bp, Glycine max
aattagctaccccaatattgaaatttaagtataaattgagtgccaatctggtgaggaagagtatagattaacaagaatctcactctgttcccaacaaaagcatactggttgtaccacttccgatcctgagaaaatagtcaaacacagaaaacattttatgatgttacttgaagttggttgatgcctttcgattctgctcataaaccatcacattaacaaccaaccaacaattcgcaacacagcattaacaaactgttctacacatgtatcttcaaaatcattgtataaaattcagaccctttacttatttataaacataagcctgatattgaccaccaaagtaaactagttagctttgtttatcttgtcaaaagagagcttccttctttgataagaacaaacacactgccaccatcgccccttgagatacgcaattcttcgtcgaggtatgtggtgagtaaccaggactgagcattgctgttgaaattgggatcttcaagggaggcctactggaaatgtttcactaccgatg

SEQ ID NO: 211742 - DNA, 525 bp, Glycine max
  unsure (1)..(525): unsure at all n locations
agatgacattgattccgggaaccagtgttgaagaggcttacaacaagctaatagttgaacttgagaaaagtgttcctacattggttggcattgaatgtcccaaggatgagaaacttcctcgtcgcaaaatttttgacaaacctaagacgcgctgcttcactattctccctatggagtttaatcttgtggtccgtcaaaagtttttaaattttgtgaggttcattatgaagaaaagggacaagcttagttgtcaagttggaatcaacccatactccatggaatggactggtttggccaatagattactgagtaagggcaacgatattctgtgttgcgattatgctagttttgatggtttgattaccaagcaagttatgagcaagatggcagaaatgataaacagtctttgtggtggtgatgaaaaattgatgcgtgaaaggacacacctgctgttggcttgatgttcaagaaatggcatttgtaagaaagatgttnggagagttgaatgtggaatcccttctggat

SEQ ID NO: 211743 - DNA, 489 bp, Glycine max
  unsure (1)..(489): unsure at all n locations
agcgatccgtaagatgcttccacgtgttctggttttgctgctgctgaatgtgctggctaccaacgtgctggccgactatggcccaggagatgcggtggtgatcctcacggagaaaagctttgcgaaagaggtgctgcaaagtcctgactattggctcgtcgagttctacgctccttggtgtaaacactgcaagaatttcgagccggagtacaaggctgcggccaagaagctcaagaaacacgcgcgtttgggcgttgtggatgccacggtgcaccaggaacttgcccgaaagtactttgtccaagacttcccgacgatcaaagagtttggagccgaaaagaaacgtcctcaggactaccgtggtggacgcaccacgagggaaattgtgaagtacgtgaagaactcgcccgatgcaaagaagctcggngtcagtggtgccaacgtcgtgacgcttacatancgacaggtgtacacattcttgaacaaaga

SEQ ID NO: 211744 - DNA, 528 bp, Glycine max
  unsure (1)..(528): unsure at all n locations
gcagttctgctgtcattgttcttggagcaactaatcgtgcagatgtcttagaccctgcactccgaagaccaggaagatttgatcgggttgttatggtggaaacacctgataggattggaagagaagctatccttaaagttcatgtttccaagaaagaacttcctttagctaaggatgttaaccttggcgacattgcttgtatgaccactggtttcactggagcggatcttgcaaacctagtaaatgaggctgcattattggcaggaagacaaaacaaaattgttgtggagaaaaatgatttcattcaagctgttgaaagatcaatagcaggaatagaaaagaagactgccaagttgaaaggaagtgagaaggctgtagttgcacggcatgaagctggtcatgctgtggtaggtactgcagttgcaaaccttcttcctggacagccacgtgttgagaaactaagcatattgcctaggtcaggaggggctttgggatttacttacacttctnncacaaatgaggacagat

SEQ ID NO: 211745 - DNA, 488 bp, Glycine max
agaatattcaaaatggaatatttctattattttattcttcatccaatgactatacattcattatatttttgtgtaaatagaggaaaaactcgatggaaaaatggtggtttaattctatgttgtttaataggaagttagaatacaggtgtgaattaagtaaatcaatggatagtcttggtcctattgaaaataccagtctaagggaagaccctaaaattttaaccgatatagaaaaaaaaattcacagggatttggattatttagaaatggaaggttttttttctagcgatctgaatactgtttctaagaatgatgatgatcattacatgtatgagactcaatttagttttaacaataatattactagtttcattgatagttgcattgagagtttcaatttaggtgatattgacaaatacaatgatatttatttttatagttacatttttttgaagggcagaaattgtagtgaaagcgataattctagt

SEQ ID NO: 211746 - DNA, 492 bp, Glycine max
atattattatataaagatagtctataatcactagaatttctatatatttatacttagtatataataattctagtgattatagctaagccaatatatatcataatataatatacccttttcttattcaaagaatttatggctatgccttatcatttttagtcaaagaaaagaaattatggaattgaaataactcactcagaacgccctttaaaagattacgcggtacgattgaatcaaataagcccttatggaataaatattcagctgcttgtgaaccttcaggtactgccttattcaatgtttgttcaattactcttttaccagcaaatgcaatataagcatttggttcggcaataatgatatcccccaacatgccaaaactagcagttaccctcccagtagtgggagatgtaagtatggatacatagaataactttttatttttttgataatcatataaagcagaagagatttagccatttggatcaagct

SEQ ID NO: 211747 - DNA, 522 bp, Glycine max
cttacctgctacttactactattgtgtctgattcacaggccagagggcaaagattttgagcacaatggcctcgacacaatgctttttgcaccaccacgccctcaccactccagctagagcttcaacacagcgcctagttgtgagcaccaaaccaaaccacattgtttgcaaggcagcacagaagcaggttactgtccaagagggtgaggacactactactggccttgtctctcgcaggttggccctcactgtgctcattggtgctgctgctgttggctctaaggtggcacctgctgatgcagcctatggagaagctgccaatgtgtttggaaaaccaaagacaaacacagacttcctttcatacaatgggaatggattcaaactctcaattccctcaaagtggaacccaagcaaagaggttgagtacccaggtcaggttcttagatatgaggacaattttgattcaaccagcaatgttgctgtcatggtcactgcaactgacaagaagtccatcactgacta

SEQ ID NO: 211748 - DNA, 554 bp, Glycine max
caaaaaatgaaaaattactcgatttttatttctccaaaatgatcaattttataagattgaatcgactaaaaaatgaaatgaatcatttcatattgatagtattgctatgcttagtgtgcgactcgttagttttttagaacggttccaatttaacaaatttataaaccggttcatcgtataaatgaattaaaaaagaactaataaccaacgcatcgcttcggattatctagatctaaagaactagtcaaaacaaaaaaaaatataaaaaaagatatattatagcaactgaactattgtgaagcataaaagaacaaaaatcttatttagttgtaaagcaataaaaatatacagataaatgaagaggtgaaagaaagagagaaaaaaaatcaatgatatagaattctaatatgtaaaggtctatgggttatctcataaaaggtagtgtaataaagcatcaatctaaatcaattcatatctatttatatatgaattaatttataacgtaaacaaattaagagctctgaaatcaataaaactgagaatattgattcacg

SEQ ID NO: 211749 - DNA, 562 bp, Glycine max
acttgatcggtggtgtatttgatttgaaattcttctaagatggatacttcttataggactggtggagtcaagtacgagtgcttgctttttgatatggatgacactctttacccattgagcttaggtctcaatttgttttgtcgcaagaacatacaagagtatatgttagaactcttgcatattgaagagagtgaagtgccaaaaatgtgtttggatttgtatagggaatacgggacaactatggcaggattaaaggtccttggttatgagtttgacaatgacgagtttcatgcttacgtgcatggaaggttaccatacgagaaactgaagcctgatccagtattaaggaaccttctgctttccatgcctcagcgtaaaataatattcaccaatgcagatcatgcacatgcagttaaagttctcaacagattgggtttggaagattgttttgagggcatcatatgctttgaaacgcttaatccttccaaacaaatcaattgcatggatgtaccaaatgataatcatgtgctcacagatttaacagaaaaatgatgtttcaatt

SEQ ID NO: 211750 - DNA, 573 bp, Glycine max
ataagtcgatatgcatgaccaaacataatggacagaacgataacgaacaatgagacaaacaagataaaaaagacacacagctgtaaaagctatatgagaacaaaataaataatgagataaaaaataagtagaaaggtatgatgagcaaaaaccggatcggagggaaaacccgggacgacgagcacactagatggaggccgccctttaagaaaacaactaaataaaaacaataattatattgatcaactaaatgtggcatatgaaaatttcattctatacttgtaaagagccgaaaataatataacattaaaaaaagaagatgtagaagaataaacagaatcatacaaaatacacgaaataaaaattaaaaatgctgtggacaacacaatgataaatggaacaccagaagctatgcggcagcatacattagataaaacattaatcgaatggagatttacaaagctaatgaccaatttatgtataacaaacgatgaagcaagaaataggacaaaagaaaagtagaaaatagaacacaaagacggaaatacaaaagaaccaaataaatgggagaaa

SEQ ID NO: 211751 - DNA, 502 bp, Glycine max
gtaccccttgctggttccaacgacgagtcatggtgccaaggtcttgatggtcttgcctctcgctcggctgcatactaccagcaaggtgcccgtttcgccaaatggcgtactgttgtgagcatccccaacggtccctctgctctggcagttaaggaagctgcctggggtctggctcgctatgcagcaattgctcaggacaatggattggtcccaattgtggaaccagagatcttgcttgatggggagcatggtattgacagaacctttgaagtagcaaaaaaggtctgggcagaggttttcttctaccttgctgagaacaatgtcctttttgagggtattcttcttaagcctagcatggttacacctggagctgagtccaaggacaaggccagtcctcagacagttgctgattacaccctcaagctccttcacaggagaattccccctgctgtccctggaattatgtttttgtctggtggacagtctgaggttgaagctaccc

SEQ ID NO: 211752 - DNA, 243 bp, Glycine max
tttttattttttttgtttttttttttttcttttttttttttttttgttatttttttgtggtcttttttttttttttaattggttattgtatagctttttatattttaatagcccgaaaagaccccactggggaatattaggtaacaaaaaaaagaacagcccccacggaaacaaaacgggaaaaaaggtggaaagggatctttaaaccaggaacaaaatagctcccaccgaatataaaaccat

SEQ ID NO: 211753 - DNA, 566 bp, Glycine max
agaaccattgaactagacagcatacggattaagttacaaatctgggatactgctggtcaggagcggttccgaactattaccacagcttattaccgtggagccatgggtatcttgctggtttatgatgttactgatgaagcatctttcaataatattaggaattggatccgcaatattgaacaacatgcttctgacaatgtaaacaagatacttgttggcaacaaggctgatatggatgaaagtaaaagggctgtacctacctccaaagggcaagcacttgctgatgagtatggtatcaagttctttgaaactagtgcaaaaaccaacatgaacgtggaagaggtcttcttttcaatagcaagagatattaagcaaaggcttgcagacacagattcaagagctgagcctcagactatcaagattaaccaacctgaccaggcaaccagtggtggtcaacctgcgcaaaagtcggcttgctgtggatcatgataagaatcagtatctgtagaaagaggtgcacaggtttctgcaatagcactcatctgggtgctaatgtattctgatga

SEQ ID NO: 211754 - DNA, 552 bp, Glycine max
gattatggaagtcataattgaaagacgtttcttgagtacaatttggttttggaagcatacaatagaaacggcataaagctaaaatgtacaagccagagcctttcatttcaaaaacctatacatgatatatattatgatagatctttttgtacacctcaagtgcctgaaaaagcaacaagcatcaaattactcaccggtttcgaatatttcagcttcagattttgccacaatttgtaaaattgaaagaacactatgtcacaaggaagctctctttcatccaccttgcctgaagttgcaacccagcatctttgaaagcattccaagcagattggtacagcctctgatctagacttgttccttctgttttcatgtcctgtaagagtttcaccaattcatcaacctgaccgactttagagaacacaccaaccattatgcctgccagggccctatcaataagccccccattcattctatactcattgaaaagctttacacaggtttcaaactctcctgatatactataagcaccaataatgctagtgtaactcacct

SEQ ID NO: 211755 - DNA, 536 bp, Glycine max
gaatcttcttctcttatcagaaacgcgcgttgctcggataaggttgtgctgcgccgactcactggtactttgcttaatatggcggctgagaagtcaaacattgcaaaagatgtgactgaattaattggcaaaactccattggtatatctcaaccacatcgtggatggttgtgttgccaaagttgctgccaagcttgaaatgatggaaccttgctccagtgtcaaagacaggataggatatagcatgattgtagacgctgaggagaaaggactcatcacaccgggtgaaagtgtcctcattgaacctaccagtggaaacactggcataggtttggcattcatggcagctgctaagggttataaacttattataaccatgccttcttcgatgagtcttgaaagaagaaccattcttcgtgcttttggagctgagttagttctcactgatcccgccaagggtatgaaaggagctgttcagaaggcagaagagattagggataagactcccaattcttatatgcttcagcaatttgaaaa

SEQ ID NO: 211756 - DNA, 460 bp, Glycine max
aacaagcaagaccaagtcgacgacgaagagcttctccaactagtcgaactcgaagttcgcgaccttcttacctcctacgaattccccggtgacgatacccgcatcgtctgcggctccgcactcttagccctagaagcccttatggcgaaccctgccatcaaacgcggcgacaacgagtgggtcgacaaaatctacaaactcatggacgaagtcgacgactacattcccatcccccagcgccagaccgaccttccattcctcctcgccggcgaagacgttttctccatcaccggccgtgggaccgtcgccaccggccgcgtagagcgtggcaccgtcaaagtcggggaaactgttgaccttggtggattgagagagacacgaaacacaacggtcacaggtgtggaaatgtaccagaagattctagacgaagtcatgggcggggacaacgtggggctgatgc

SEQ ID NO: 211757 - DNA, 470 bp, Glycine max
  unsure (1)..(470): unsure at all n locations
cacaagcaacaaagaagagagcacgacaaagaacgcacagaagaaaggcaacagacacaataacaacgaacagagaaaacgacaaagaacaaaaaaacgaaaacaaaataaagagaagagcagaaagagaaagaagaaaaggctgacgtacgaaagccantataaaccagggaacgacgaggctcactagaccgagcggaacggccggtacgaccataaaaaaataaaaaaaagaagagacattatatacaataaattgggatgtaaacaaaaggagagcaaggaagaaaaacaaaaagaaaataagcaaaagggaaaaaaaaaaaaaagaaagaaaaaaaagaggaacaaaaaaaaaacaaaaaaaacaaaaaaaaaagggcaaacaaaaagaagaaaaaaacaaaaaaaagggaaagaacaaaaaaaaaaaaaaagaaaggaggcaaaaaaacaaaaaggagggactg

SEQ ID NO: 211758 - DNA, 504 bp, Glycine max
gttctcttcctcacaacacaagccatgaaagctttcgtggctgtggctctgtttgcgttgttgttggtgtttgttgatgcgaggtttgtggtggagaagagcagtataactgttctgtcacctcataagctgagggcgaagcgcgatggcgccatcggaaacttcggtcttccggactacggaggattcatcgttggctctgtgctgtatcccaccaaaggctcccacgggtgtcaggtcttcgagggcgataagcccttcaaaattcactcttatcgtaccactattgttctccttgatcgtggagagtgttactttgccttgaaggtttggcatgccgaacaggctggtgctgcggcagttgtggtgactgacagcattgaggagtctctgataaccatggattctactgaggagagctctgatgcagatggctacatagagaagatcacgattccatccgctctgatagagaaatcctttggtgattcgttgaaagatgct

SEQ ID NO: 211759 - DNA, 361 bp, Glycine max
agcattattgccgaaccaaatgcttatattgcatttgctggtaaaagagtaattgaacaaacattgaataaggcagtacctgaaggttcacaagcagctgaatatttattccataagggcttatttgattcaatcgtaccgcgtaatcttttaaagggcgttctgagtgagttatttcaattccataatttcttttctttgactaaaaatgataaggcatagccataaattctttgaataagaaaagggtatattatattatgatatatattggcttagctataatcactagaattattatatactaagtataaatatatagaaattctagtgattatagactatctttatataataatat

SEQ ID NO: 211760 - DNA, 414 bp, Glycine max
ggggatccttttgggtatggcactaccacatccataaaaaccaacattgacaggggcacgtatattagtttaaatatgcaataactgggacataattagtggcaagttttcccctgttgcaatttgaaacaaccccaccccgccaatttccatagagaggtgcttatcttgcaccatttttaggaccacacatttccttggatttcccacttggatatgtcaagcattcataccgaaattacctactacataaacaacatgggcttaacagtttcctgatcctatacggggataattttaccagttccaaatgataaagtttacaacataaatatttatacaaactccccttagtccagtgttacattacaaccacaatcaggcttatctttgaatttaaaggctggatggata

SEQ ID NO: 211761 - DNA, 511 bp, Glycine max
atttgttcttcatcaagggaaaccacaacgcatttgagtacatacttcagtctgggggagtacagaaagaaaaggactatccatacaccgggagagatggcacctgcaaatttgacaaaaccaaagttgcggctactgtatctaattacagtgtggtttcccttgatgaagaacaaattgctgcaaacctagtaaagaatggccctcttgcagttgctatcaatgcagtttttatgcagacatatgttggtggcgtctcatgcccatacatctgtgggaagcatttggatcatggggttcttctagttggttatggtgaaggtgcatatgctcccattcgttttaagaacaaaccttactggatcattaagaattcatggggcgagagctggggagagaatggatattacaagatctgcagaggtcgaaatgtgtgtggagtagattccatggtctcaactgtagctgctatatatccatccagccattaaatacaaagatatgcctgaat

SEQ ID NO: 211762 - DNA, 500 bp, Glycine max
attcaagcatcaccatgccgtggagacaatttcaaacttattgtaaatttagatagaaacatactgcagaggtagaaactcttgatttgcttgataagtctgctaaaaacattttatcgatgtaaaacttaagctaggaccatggtttcaactgttgggggttgaatcttttgctgttggttgccatcttcaatctcccaaatttcaggtaacgcttctttgatattatgaatgctgttcagggcatgatcagctccagggaccaaatctgaatggcccactaaaacagtgttaagtccagttatttttgcactttcaacatttctaacactgtcatcaaagaaaattgttttctttggatccacattagcaatccgaatagcagcttcaaaggcttccacagatggtttacagaggatttgtgggtgggaatagaaacatccattttctgttaaatctgtgagcacatgattatcatttggtacattcatgcaattgat

SEQ ID NO: 211763 - DNA, 476 bp, Glycine max
ctgactagtcgccctgtcgccctttttctatttctcttttgagataatgtacgttgatctactgatataggacctaagcttaaacatgcaatcattatccatcttgaacgtgaccccaaggcctacaatcataatcaacattcagatctcaaggtaataatttatattgcacaaagagaaggcatagaaaattgagggaactgtcactcagtacaagttttccaatgaaaaatgaaccagcaggcgaacgtagtggaacaagtagccttagtgcccttacagaactacaacggcaatggacatacatataacctttgcattcccaattcggaaaacgagggatctcacttacacttggaggcaaccatgtcagccaaatacacaaccctgttagagatgccccactaattgacataccaagcaatgaccttaaccatgtcatttcccatgaccatggtcaacgatgagacaacggt

SEQ ID NO: 211764 - DNA, 550 bp, Glycine max
tctctctcctctctgcctagagagtagcatagcatattgagagaaacttcttttttccctatggcgtttctgcctcctccaaaccataacttagctgttatcataagaggatcaataaaccccccaccataagagaaatcaaacccaaaagtaaatcaaccagagtcatggggggtggaggaggtgcaattggggtgagaggcctcgatgaagatgatgatgatgatgttggaaagaatgaagaagaaaacaagtggccaccatggcttgggccacttctccaaacaagcttctttgttcaatgcaaagtccatgcagattcccacaaaagtgaatgcaacatgtattgcttggactgtatgaatggagccctttgctctacctgtcttgcttctcacagagaacacagagctattcaggtaaaagcttagttactaataattaattaattctctttgggggatctatgcataactcaatttgatgcaattctgtgggcattcgaaccctcaaaaagccatacttaatgatttggatgcctgtaatctga

SEQ ID NO: 211765 - DNA, 539 bp, Glycine max
ggagattccaaaactgtttctctatgcgtgaaacggctggtgtacacaaatgaaaatggagaaattgtcaagggagtctgctcaaatttcttgtgtgacctgaagccaggagctgaagtaacaataactggacctgttgggaaagaaatgcttatgccaaaagatccaaatgccaccatcatcatgttgggaactggaaccgggattgccccatttcgctcatttttatggaaaatgttctttgagaagcacgaagattacaagttcaatggtttggcatggctcttcttgggtgtccctacaagcagctcattgctttacaaggaggagtttgagaagatgcaagagaaaagtgctgacaacttcaggcttgacttcgctgcgagtcgagagcaaacaaacgagaaaggtgagaagatgtacatgcatacccgaatggctcaatacgcagaagagctttgggaattactgaagaaggataacacttttgtgtacatgtgtggactaaaaggaatggaaaagggaattgatgacattat

SEQ ID NO: 211766 - DNA, 599 bp, Glycine max
  unsure (1)..(599): unsure at all n locations
tgacagaatgaaaatgcaagaaaaaagagaagataatgaaggatagtaatataaagaatagtattgtacaaaatagaaaaggagatatgacggagggaaaagaaagtaagaaggagcagggagatgtgcnanncangattnnnatgnntacagaaaaaagaacggaattaggaatgaggtntagggataatagattaggaaataataactgagacatcagaaattgatgcagaagggggagaggaaggcctggagtcaaggatctttttgatattgatcttaaaaacctgagggttattgatgaatatcttcaaaaaattgatccaaaatcagatggtgcaaagagggattgggtagctatttatgatgaatgtgcctatgtcttatatcaggagattgattacaccaaggaggctgctaatgctgaattgtatgcaagtaactttaagaacatggattatgtgaaagttcctacaatctactgggattataccaacttcacagattctgacaatggagtatgttcctgggattaaaataaacaaaatacaagctttagaccaactgggagatgaccagaaaaggttagggagatatgc

SEQ ID NO: 211767 - DNA, 399 bp, Glycine max
caagatcaaggtacggtgtcgatagtgccggcaacaaagtcgaaggcgacacggagcgaatggagactgtaaagaagaacatcgattcccggggcttcgctgccaaggcggttgtcgtgcgcatcatgacgtaacgcacggaacttgcccacacctgcctgctcaacgagactatcaccctgctatcatcacagttcaagcctgatgtcgccatgatcaagaagaagatcgaatccctgatcgagcgctagtatctagagctcatcaaggaggctgctgttccaagttacagatacttggcttgatctgtcagatctaattgtcatgagctgcgacgggcaccttttatggactttagtttacactactcggagttcggcagttgatatatggatgggt

SEQ ID NO: 211768 - DNA, 501 bp, Glycine max
ctcgagccttaattgtcttaatttccttgtattctggtataatctagctaacccttttttcccattagccatggtcatcaccatcgccaccttctaggtgggatccagggctcaatatataatatcacactcaacacagttgccagctccaaatctcaacaaatggatagcaagttcagaaaaaagaaccgcaacgttaactcatataccagtgaacaagatcaagacactgatatagctcaagaaaaccttgccgagtcccctccttcttccactgtgttcaacatcgatggcttagtcccctgccgcacttcctcatcaaagagaaggagggcaatacagaaaagggtggtgcagatgccaatgaaggagacagaagggtgtatgctaaaaggagagagcaacaccccaccctcggattcatgggcatggagaaagtacggccagaaacccatcaagggttccccttatcccagagggtactacaggtgtagcagttcg

SEQ ID NO: 211769 - DNA, 522 bp, Glycine max
ctcatttttttaggctcataaatctttattatgggtttcagggtcactactactctgtctctgctctccctgatttggctcttgaccctgcaccaagcaagagctgcaaagttccacaatgtgagtggcttgagagggaaaaagccagatgtagcagatgggtgcaatttgttcctgggaagttgggtgggtgacacgtctgatcctctctatgactcttcaacatgcccctgcattgatcccgaatttgattgccaaaagtatggtagacctgacaaacatgcccttaaatacgcttggaaacctgattcatgtgccatacccatgttcgatggtgcggctctcctgaacagtcggaggggtaagaagatcatgtatgacggtgactcactgagtcataacatgttggaatcactgccctgcatgattcacgcgttggtgccaaatgccaagaccggctttttgagaaaacgatcactgtgcactgtgaccctgcatgactatggagcaactatacagcta

SEQ ID NO: 211770 - DNA, 477 bp, Glycine max
gcttccaaagtttctgaaaaccataaaatttatttccgtaccccggaaaagcctgagtcagtaatcaggttcttcagagaccacggtttttctgactcccaaataaacaatatggttagaagggtacctaggctgatttcctgcaacccttgcaaaagggtattgcccaagtttgaatttttactctcgaaaggtgtttctagctctgaaattgttgacctaattagtaagtaccctttaatgttgactcgaagcctgaagaattttatagtgccaacctacgaattggtatatagattcttgcaatctgataagaacactgttgcttgtatgtttgctaattcatctgtctttggtagcggctatcttgtggcacacaacgtcagtgtgatgcttaagaatggattgagtgaatcaaacattgcaagattgcttcggtaccgtagtaaggcggtgttccgtgcaacggatattctt

SEQ ID NO: 211771 - DNA, 474 bp, Glycine max
gtaaatattgatgttactcattgtggcttaaatactgcaaaagatgtactagatttggttttgtccaacgtcaatgatcaatcagttgatcttacgttaattaaatttgatcatttaacttgatcaccacattttaaaggcattttaacttggtgttatatttgtgctctgtatatgccctgtttagtctgctatttctgaatggatctgcccatctgcggttaggttttccgttctttcctctctttctcctgtgatatcttttgggttcaagaagcaaggctgatgggttgaagatagcaaccttgtccacatccgatcagttatcacaaccctcttctattcctcgtttatcagatggaatggaatgtaacaatttctgccattaactgggcccacggtgaaacctgtgtatcctgccatttgaccatgaacagcactttgggcaaggagggtgcatttacattatcagat

SEQ ID NO: 211772 - DNA, 541 bp, Glycine max
cgctgtcggcctgtcgtccttttttttttagtgcttttgaacttatagggttatatattaaactcaacaagaacaaataatatgagatgtttatgagaatttcatccacccaagaccgttgtgatccttaattaatggacaaaagctaaacttagctcaatttcttctatcccaagcatttgagtttcaagcacaggctaatttccatcttatgaagtttattttgcacacatgtattggtgaatatactacctgttagcaacataagaagaaaaagcgtgctatcagctatagctacagccatagcatcatattaatttttgggaccgatgtccttcagtgaacagatctgatcttttcccattgcagacatagcagaaaccacaagatcttttcctttagaaaatccattcttaatctgagcaagcaatgcctcatcagtaggaagccttagatcatcctttggattttccattatcagtcagcagactctcaaagccgtcttcgaagatattaataacctgatagtcagtgcaattca

SEQ ID NO: 211773 - DNA, 318 bp, Glycine max
gcgaatcgtgaattagatcaggaattcatgatttagatcaagaaggatacatgtggataggcctgactattgacgaagtggagaacagtgaagacaggatggccagagaggagctgactgatacactgatcaacccaggattgacagtgacttcctgcttgaggggcatggcttgttcacattcatgatccatgctctgaacgaagagctcaacatggacctagttaggaagcgcatggagcccagcgagaatggttagtggaagagctcgatggacaagatcaccgtacatgatggctgcatgtctaggggatatac

SEQ ID NO: 211774 - DNA, 483 bp, Glycine max
gttgcttggtactattcgcgggtttgagacacctggaccctaatcgcgaagcatcgaagaaggctctcgagcacaagaaagagattgcaaagcgtcttggtcgtccccttattcagactaacccttacgaggatgtaatagcctgtgacgttataaatcctgatcacatcaatgtggagttcaactctattgggggactggaaacaatcaagcaagctttgtttgagcttgttattctgcctctaaaaagaccagacttgttttcacatggcaagcttcttggaccacaaaagggggtcctgttgtatggaccgcccggtactggaaaaaccatgcttgccaaagctattgccaaggagtccagagcagtttctattaacgtgagaatatcaaacctgattagcaagtggtttggggatgcccaaaagcttgatgctgctgcatttagcttggctaataagcctcaacctgccatcatattca

SEQ ID NO: 211775 - DNA, 378 bp, Glycine max
ctggtggctattcatctagtcactatgacagtaggcaatgctgcaatggccaatacgaccctggtcagcagacaccatatggttgatcattggtacagattgtctcgaaaattatgtatcgatgagtacataaaaggtattctatgatactggtgactactcatttaatctctacactaggaagtgcactgatcaaacagtgaaaatcttcctaacctgctgacatgttcctacgacatacatggcatgtgccagctgcctcggatattctagttgcacgagcacagcaagccacacagtggccacatggaaggaagaagcctaccctaggagcatcagagcatatagcacagagatgccgtagtgatttactggctt

SEQ ID NO: 211776 - DNA, 412 bp, Glycine max
aagacgtatcattttatgtatatgtactggggaattatgggacaaaaaatagatccgcttggtttcagacttggtacaactcaaagtcatgattctatttggtttgctcaaccaacaaattattccgagaatatacaagaagataaaaaaatacgagattgtatcaaaaattatataccaaaaaatataagaatatcctgtggtgttgagggaatcggacagatcaagattcaaaaaagaattgttcttattcaagctataatatctatgggatgaccaaagttgttaatagaggggtagtctcaaaaaatcgtataattaccgactaatatgcaaaagatactgaattgcgcgaagcgaaaactgaacattggtattgtgaaacttgcgaatgcatattagcaccctaata

SEQ ID NO: 211777 - DNA, 566 bp, Glycine max
aagagaattaactgtgttgattgacacgataaaagatgatcatgtccaagttagcaaggcatcccctgagtgcaattgttgtcaacactgcagattgaaaattatcatgaattccacaaaacgccataaatccaactaccaaaaaagctactacaaccaacaactcaaaaatagacccgcgaaattatagctaattagctaaatatccattgaacactgtcatcaatccaaaataaaaaaaggagaaaaaaacatagccaaaaaaggcattagagacgctactaacaagaaacgcatcatatttaattttaatcaacctcctccatcttgctgccctcagcatcagcctcggcctcctacagtgggggcatttcagcatcagcttcacctgcatactcgtcaatgctcagtccaagcttcaacattctgtggatcctgtttcaaaagtgttgggctcgtaaggctgaaaccacaatgagaagagcagctaaacagaacagaacaaggtcttacgatttgcatcttgctgcatacaccttctgagtctcatgatggtcttaagtgac

SEQ ID NO: 211778 - DNA, 488 bp, Glycine max
aaagatgagacattatatacattaaattgggatgtattcaataggagtgcaaggaggataacccttacgcgacttagccccctttcacagtaagtagccttaaaaaaggagccagcatatgatataactatgagtaaggactccatttcagcttttggtgcattggccttaggcagaagacatggatttctaattaaggatccaagtttcatcgacgctgttgattgcacatttgacatgtggtggcagacttaacattggcataggtacagtgctcacaagaccaatgattatcatcagtcattctgctggatatagttcgaatagtcgcttttcctctttctcctctccccttgctgctccctgcagcattttttgagctcgttgctttgctggaagcagctccattactatccacatcaactaaaccattctctaatgccctcaccaaattctcaaagtagtttctagttacactggtcaatcca

SEQ ID NO: 211779 - DNA, 483 bp, Glycine max
attatttctgagcacaccctccttctcattttcattatctagctagcgttaccactgggaattggaaattcactctcagaaattagaatggctagccaatcaaacactaaatcagttcacgattgcacagttaaagatgccaggggaaataatgttaatctcgccgattacaaaggaaaggtccttctcattgtcaatgttgcctcacaatgcggcttgactaattcaaactacacagagcttaaccaattgtatgagaaatacaaagggaaaggactcgacattctggcattcccatgcaatcagtttggggctcaggagccaggaactaatgaagagactgaggagaacgctcgtactagtttcagaggtgagcttcccatattcgacaaggtggatgtgaatggtgacacagctgctccactggacaagtttttgacatcaagcaacggaggactctttggtgatagtatcaaatggaac

SEQ ID NO: 211780 - DNA, 437 bp, Glycine max
gtgaattattattaatattttattatatggttaatattataaaaatttattatgtataatattctagattttaatatattattattttataatcttattataatttataaaattatgtatttttctgtcgtacgagaaccggtaaggaattaattgacgggttgactagctgactagtaggctgtcgtccttttttttttagtatattaataaataaaaaattttgaaatggtgattaaattgacaaatgaagtacaagtaaacattggtatgtgtaatcacagaggagattaagttaattgtggtgagcattcatgaatgaattattccaaagtactacacttaaaatactcagtgaaagcaagagcagttaatcctattatagtaaatattgcatttcacagttatgtatttgaggacatgaaccctttggaatt

SEQ ID NO: 211781 - DNA, 304 bp, Glycine max
gaagattctataataatttaattatttaatttatatattattaaatatcagtaatctgttatataaattataaattttatatatatagaattatatataaattaattatatagatctaagttctgtatattcgagaaccggttaggaattaattgacgagttgactagttaactagtcggatgtcgttctttttttttatattaatatatattttatttattttgattataattaattttaagtattaatataatttttacaaaaatattaaatttgaaattaaagagtaaacaaatgttatac

SEQ ID NO: 211782 - DNA, 448 bp, Glycine max
gcgaagaaaagagaagagaagattaagatggaggtgagtttatcctcaacatcatgtgtacccttaagctcgaagttgaagcataagcatggtcttttacactctcaaattcccattcacacagcttcaaccaaaaccggaagaaccaaacctttgtacggtgataacgcctgcagacaaaccttgactttcaatcggctcgcttctccacacgatttttatgcatgcaccgcttccccatggctacccagattcgaagagctcgacgccaccaacatgcttctccgtcaaagaattatctttttgggatctcaggtggatgatatgactgcagattttatcattagtcagcttttgattttggatgctgaagactccaaaaaggatatcaagttatttataaactcacctggtggttctgtaactgctggaatgggaatttatgatg

SEQ ID NO: 211783 - DNA, 519 bp, Glycine max
acagccttgaacttgaactatcgtgtcttcttggctttctctgttcaggatcaacatggatattgtatcacgagctttgctatttccgttggctatacttgtgctcatattaagcacaccttgctcaggtgcttttgggaagagtggaactaatgtgaaaacagctatttttctgtcccccaagtttgaacttggaccaggatcggtagccaataaatatgattatgacgctgattttccaagaggtcatatagcacttaagagtttcaatgctgaagtagttgatgaagcagggaaccctgtgcctcttcatgaaacttatctccaccactgggttgttgtaagatactatcaacctaaatatgtgacgacacacacaaactatgatggacataggatacttcacaactctgaccatatatttgtgaggaacagcggcttatgccagagagatactctaggacaatactatggccttggatctgaaacacgaggaacagctacggatgttcctgatcc

SEQ ID NO: 211784 - DNA, 504 bp, Glycine max
ctctcctttacgaaaaattacagatgaccaggcacttgcaattaaaatggctttggaagcaaagggcatctcttcaaatgtctacgttgggatgcgatactggtacccatttactgaagaagcaattcagcaaattaagagggacagaataacaaggcttgtggtactacccctttatccccagttttctatatccacaactggatcaagcatccgtgttcttgagcatatattcagggaagatgcctacttgtctaagctccctgtttccattataaactcttggtatcaacgagaaggttatattaagtcaatggctaacttaattcagaaagagctccagagtttttctgaaccaaaagaggtaatgatatttttcagtgcccatggtgtacctgtcagttacgttgaggaagctggggatccataccgagaccaaatggaggagtgcatcttcttgatcatgcaagagttgaaagctagaggaattagtaatgagcacac

SEQ ID NO: 211785 - DNA, 498 bp, Glycine max
  unsure (1)..(498): unsure at all n locations
gtagaaaaagtgtaaataaataatatacaaaaatcaataacttgttcggggtttaatatcggagatggagacaatgcctcttggctcctgaatagatcctggtctacaattattattctttgaatcctctttaagccgaggtgcaagttctcattataatcaagtgcgaaaaattgcttccttatagctctgtgctgtatacagtagaggttgaaataagtaaaacaaagacaaaaaatcaaagtatactttgttgctatcaataggcttcatctatatgcttgcagattgaattcagcaagcaggatttaattcttctaaatgacatgattcctgaatgccgtgatcattttgggtgacaagaacaagatgaatgccaagattgaaccaaagaacatcttgataaaatatctaactgggtcatgatcaacatcttcagaggttctggtcggtgcatatatngctgttgctgatgggagagcttctattactgcatct

SEQ ID NO: 211786 - DNA, 515 bp, Glycine max
caaaacactcataacacaaagcacaaagcaaagctcatccttgagttaaaaaatggcagcagcttcttccatggctctctcatccccatccttggctggcaaggccgtgaagctgggcccatcagccccagaagtgggaagggtgagcatgaggaagaccgtcaccaagcaggtctcctcaggaagcccatggtacggcccagaccgagtcaagtacttgggcccattctctggcgagcccccgtcctacctaaccggtgagttcccaggcgactacggctgggacactgctgggctttccgcagacccagaaaccttcgccaagaaccgtgaactcgaagtgatccactccaggtgggccatgctcggagccttgggctgcgtcttcccggagttgctgtcccgcaacggtgtgaagttcggagaagccgtgtggttcaaggccgggtcccagatcttcagcgagggtgggctcgactacttgggcaacccaagcctgatccacgcccagagca

SEQ ID NO: 211787 - DNA, 399 bp, Glycine max
tttaaataacgaatttgtaaaaagcaagtaacattaaggtggatacggatacacaagagaattcacattatctgaagtacttcaccaaacacaaatgtaaaaactgtcaaaagggattacagagttagacgcagagtaggcggggacgaagtaggaggcataggcccaggcgttgttgttgacagggtcagcaaggagatcggcgaggatgttaaaaggaccctgaacggtgacaaaggccggaacaaagaagccaagaagagagaacatgggaaatagaccgttctagagatcattcaccttaagctcagcaaaagcctctgggtcatcaggaagggccaatggggcgaagatggcacatgagtagagaggggcaatgaccggactgaaggggtcacg

SEQ ID NO: 211788 - DNA, 450 bp, Glycine max
aggcttccttgccttttgtagataatcttcagaggatttccattctgtcattgcctttcagacctatgcagttggaagcagtggaggatacaagaagggtgtgacagaagcaaaactgaaggttgccataaacggatttggaaggattggaaggaacttcttgaggtgctggcacggtcgcaaagactcccctcttgatgtcattgccatgaacgacaccggtggcgtgaaacaagcgtctcaccttgtcaagtacgatgcgatcctccgaaccttcgatgctgatgtcaagcctgttggcagggacatcatctctgacgatggaaaggatatcaaagttagtctatgaccgcaaccctgacaaccttccttggaaggatttagggatagacttggagatcgaaggaactgacgtgtttgtcgacagaccaggtgccaggaaacacattc

SEQ ID NO: 211789 - DNA, 509 bp, Glycine max
gagagaatgtacgttgatcttctcatatatgatatttgcttaaacatgcaatcattatccatcttgttcgtgaccccaaggcctaaaatcataatcaacattcatatttcaaggaaagaattttattgcacaatgataaggcctagaaaattgatggttctgtttctcaatccagtttttgactgaaaaatgattcagcatgtgctacgaacccccgaccgatcagtcgtcagcatcctgggctacaaaggcttggttcatacatatattccttgaattaccacttcagaacctgaaggcttttactaacacttggaggcaacaatgtcagccaaattcacagccctttgggagtagccccactcattgttataccaagcaatgaccctaaccatgtcatctcccatgaccatggccaacgattagtcaacggttgaggacacatttatgcaccatgagtcaacatacacaagtggctcatcacacacagtgaggattccctggagctc

SEQ ID NO: 211790 - DNA, 589 bp, Glycine max
gaagcttcagatctggaagatggctctgcaacaagtttctaacttttctggccatcatttccaacctgatgggtacgtacccttcctcacttactttattttaaattctttaattttgacttgtctaatcacactttaatgttcaattttaaagagatcaaattataatcatgtacaaccggtacactatttaaatttataatatgttctaatgtataaattaataagctgccaacaaaattttaattcatataaaatatttgaagtggtaatattactgacaattggacttaatgttatttatttgtgatagtttatttgaactttatgatatatttttttattaatataatttatcagttacactttaatcgatagatttattatcattttaagtttatttaaaaaataatattgtcttttgtacctagatataagactaaggaaagataataattattattgtttttaaaatattattgtttatttgatcttactaacgagcctctctaggacaaaattatattctctataacttttattatataaaaatcttcataatatatactttcttatactggaaatagta

SEQ ID NO: 211791 - DNA, 569 bp, Glycine max
atcctatcgagggaatcatatttgcttcggaagatatgctcttcaagcacttgagccagcttggataacatctagacaaatagaagcgggacggcgggcaatgtcacgaaatgttcgccgaggtggacaaatatgggtacgcatatttccagacaaaccggttacagtaagacctactgaaacacgtatgggttcaggaaaaggttctcccgaatattgggtagctgtcgttaaacctgggaaaatactttatgaaatgggtggggtaccagaaaatatagcaagaaaggctatttcaatagcatcatccaaaatgcctatacgaactcaattcattatttcagggtaataaattagaaccaaaggaaagaggtctttaagatgaaaacaaaaaatgcaaatgtaggttcctttttttgaacacaaaatatttttacttccattttttgactgaaagaataaaaaaatgatatgattcaacctcaaactcatttgaatgtagctgataatagcggagcacgcgaactgatgtgtattcgaatcctaggagctagtaatcgacgatatgc

SEQ ID NO: 211792 - DNA, 478 bp, Glycine max
attaaagttacactgtattatagacgtaaagaaactagtaatttttacacttaattctcttttatatatactctctgttgtcatttgacaacactacaaaaatgaaaaagtaaggtagaaactttaatcattcacaaatatggagcaggctgtaaagggcattctgtattctaagataatacatattaaagatgttacatataggctattcaaacagaggctggtactggagttgaaggagggacacggatggcaactggaatttcagcaaactcagacaatatagcacggaattcatctccggtcagtgtcaccttctccagaaggactttgacaatctcgtcaatcgcctaacggttgaaacttatatggtctagcgcaattacatatgcttgatatgagatcctcttgatggcagcatcgatgtctgctgcaagactctctgacattgaggtccttgacatcattctcatgatga

SEQ ID NO: 211793 - DNA, 520 bp, Glycine max
  unsure (1)..(520): unsure at all n locations
gttatgacagatgggaagagcaaaagcttagtggcatatcatgaagttgggcatgctatttgtggaactttgactcctggtcatgatgctgtgcaaaaggtaacactagttcctcgtggtcaagctcggggtcttacatggttcattcctaatgatgatccaactctgatctccaaacaacaactctttgcaagaattgttggaggactaggtggaagggctgcagaagaaattatttttggtgagcctgaagttacaactggagcagctggtgatttgcagcaaatcaccggtttggcaaaacagatggtaaccacatttggaatgtctgatattggtccttggtcacttatggaagcatcagcacaaagtggggatgtcatcatgagaatgatggcaaggaactcaatgtcagagagacttgcagaagacatcgatgctgccatcaagaggatctcagatgaagcatatgagattgcactagaccatantaggaacaaccgtgaggcgattgacaaga

SEQ ID NO: 211794 - DNA, 595 bp, Glycine max
cactcacgccgctatcatcggccaagacggaagcgtttgggctcagagcaccaacttccctcagttcaaacctgaggaaataactgccatcaataatgactttaatgagcctggatcacttgctccaactggattgtatatcggtggcaccaaatacatggtcatccagggtgagcctggtgctgtcattcgagggaagaagggtcctggtggtgttactgtgaagaagaccggtgcggccttgatcattggcatttatgatgaaccaatgactccaggtcaatgcaacatggtagttgaaaggcttggcgattatctcattgatcagggtctctaatctttgctttatgtcttgttatcgtgcatatttcattggcttctgtacaagtttttgcatcgacctggactggaatgctttgattgcagtgtaataatcttgttgtgagtatgaaaagtcacgggaactgcgtgtagtgaagaaagtgtttgatgcttgagaaatgatgactataatctctaatcttgacttttttaatgggtacctgatacattacagtgttttaaaatttaattgctatgtatatggttgcatatt

SEQ ID NO: 211795 - DNA, 360 bp, Glycine max
aaatatgccaaccattataacatagcattaaaattttaaaaccactgtaatgtatacaggtaccccactaaaaaagtacaaagatagagattatagtcatcatttctcaagcatcaaacactttcttcactacacgcagatcccgtgacttttcatactcacaacaagattattacacttgaatcaaagcattccagtccaggtcgatgcaaaaacttgtacagaagccaatgaaatatgcacgattacaagacataaagcaaagattagagaccctgatcaatgagataatcgccaagcctttcaactaccatgttgcattgacctggagtcattggatcatcataaatgccaatgatc

SEQ ID NO: 211796 - DNA, 485 bp, Glycine max
tgcggctcgagaccaatggaatcataacaagaaaaagataaacactccccagagttcaaagagcaagcactatttcctctgttgtgtcttttttcaatttgttttccctctctgtagcagcagcagcagtgatggaacgtgctcgcaggctagcaaaccgcgccattctgaggcgtctggtttcagaggcaaagcagcatcagaagaatgaatccgtgctgcactcttccaccacccccatgctgctctattcttcctccaggtgcatgtactctgttctgcgaagcaggggatccaaaacagagacccttctgggaaggaacatcaacatgtcacgcggcgttgatgatgctgctgctggtggttttctcggcgttggctcggcccggtccatctcggtcgaagcgcttcgaccgagcgacaccttcccacggcggcacaactctgccaccccggaggagcagagcatgatggcagagtcgtgt

SEQ ID NO: 211797 - DNA, 413 bp, Glycine max
tttcgttctttttttacatgtctttcatatgtatgtatatattgtggattatgtgttatgaaatgataacttaaagcatacaaagtgtgacttgtgtcataatgttggtccatattattatcttaatacaaagatgacatacacatgacatgaatttatatatattttaaaaaaactcaatctcaaaccaccgagcatatactcggttattgtgaaccaaattcatatgtactgcacagcacgcattatcaaaacatggaatgccttttggtctataatgttcttctaccttaggaattcatccagattcgactttaactatatctaaagtatttccaggtttcattgttcccaatacttttcgattaatggtaaatgtctgaacactacattggatcctttactatatctta

SEQ ID NO: 211798 - DNA, 403 bp, Glycine max
ctggccttactagctagctctgacttctcatgcacgcttccctcagccctgaactcggattgagcatcgaggggctggttactcggtttgtgtttatgcaagatggccaacattattggaggggctcagctaccgagaggcctgaaacttgatctatagggggaagatgtgtgctctgtgcgtcaactagcttgatgcaagaacctggtcccattgatcaaaccactcaatacggctgatacaatcagtgggtgaatgccgccctcatgaccattgcatgatatcccgatcaatgagaacttaacatgctatgtataacaaggaagagtattcccgagagctcatcatggaacccggctactagtaatcctcactctacgcgcctcttatccatgatgggagc

SEQ ID NO: 211799 - DNA, 576 bp, Glycine max
aagaaaaaagaaagttctaattattaataaattatatctatatatatatatatacagatagatattctatatcttttatcttaattaatatttgacccctccttataatgtgttatagttctctttatttttaggaacttatccattcctttattaatgtgcccgacaatccgaaagaattctgggggaggggtcactacggttttgatctagaatagatagagcttcaagaaatgagagaattaagaatacccacgagaaacactaatccaatccataatgatgtaccggaaaatacaacatttttgatattcgaccaaccttcatgagaagcatatacaacaggtacactaatcaataaaataaatgaaatagcaattaatgcaaaaacagctcattggaaagcaatagtcatgtttctaatcctccaatttaccatcaaaagaactctaccatttgatccctcaaccccttgatccctttattgacaaataaatttttaataaaaaaacgcagaacggttttatcatgaattcattgattttcttacctattatcaacccttttgaggcatgg

SEQ ID NO: 211800 - DNA, 537 bp, Glycine max
ctccttatggagctctcactctctccaacttcacatcgagttccttccacagttcccactttgaattccgctaaactatcatccactaaggccaccaagtcacaacaacctttgttcttaagattttccaaacacttcaactcaattgggttgcaccatcacagtcacagatgctgctcaaatgctgttcccgagagaccccagagacccagttccataagggcttgcactggagttggagcttctggatctgatcgtccattagctgaaagacttttagatctgaaagatgcttgttggagatttttaaggccacatactatacgtggtacagcactaggttcatttgctttggtggcaagagcattgattgagaacaccaatttgataaagtggtctctttttttcaaagctttctgtggtctttttgctctgatttgtgggaatggttatatagttggcatcaatcaaatctatgacattagcattgacaaggtaaacaaaccttatttacctatagctgcttgagatctttct

SEQ ID NO: 211801 - DNA, 516 bp, Glycine max
tttctttttttttttttaggacacttagtaacgttcctcagtggcagaacacaggcgggtacaaactgtaaaatgacaatacaacttacacactagcatccaatcatgaaaacccaaactaacaagataactgcagttctgagaaatctgaaaaagattcgaagtgaaagccataattgcttttaagttctaattgctagaacgcaactccggacgaacaaagtctgcatctggtggcacagaaatgtctactgtgggtctcagttcagcgcaaactttaatggctccgtgcactgggtctgacaggaagttgctgattaagtccctgttaacaggagttccattgtccacagccaccatggcctgctgggttaggatgtagtcaaatcgtggagcccatttcctcgaacccaacctaagctgtggttgaacaagtatcaaccatgaaagacacaccacgagcatgcatgaaaggattcaaagagtcaactgccttgatgacactctcattaatga

SEQ ID NO: 211802 - DNA, 535 bp, Glycine max
aagaaagcataagccatattttgagtaaactagtgtgcacactatcccatgcctagtggaagtagggatcctctcgttgttgggggagtaattggggatgtattggatccttttgaatattctattcctatgagggttacctacaataacagagatgtcagcaatggatgtgaattcaaaccctcacaagttgtcaaccaaccaagggtaaatatcggtggtgatgacctcaggaacttctatactttgattgcggttgatcccgatgcacctagcccaagtgaccccaatttgagagaatacctccattggttggtgactgatatcccagcaacaacaggggctagtttcgaactcaagtaagaatatatgtagccatccgaattcttaaagtgcatgcatgatcatgtgcaaaaagatgagaagattcattcagttcaagataaaagacacaaagcaactactgtgactaaaggagaatattcctatttgataaactaccttttgttggcaagatagctctaaaaccttcata

SEQ ID NO: 211803 - DNA, 354 bp, Glycine max
atggaaagattgggggttgactaaagatgacggatctcacaagactttcaagaactcataggaaaaagacactacttaaaacgagaacagatggaaaaaaagcacactttagaaccaccgtgaatgcgaacgacgagatgcaaggtggattccttctggatattgcaatctgccaaggtacgaccatctatcaggtgcttcccagcaaaaataagcctctgatgatcatgtggaatgccctccttgatctgaatctttgccttcacattatcaatgggatcagaactttcaacctccaaaggtatggtttttcagtgaaagctttaacatagatttgcatgtaaccaccaatcc

SEQ ID NO: 211804 - DNA, 552 bp, Glycine max
  unsure (1)..(552): unsure at all n locations
ctcaggtgtgcagctgaaacctccgtgtcccacgaaaaccttacaaaattgaattgtggtattacagtatccaacagcaccatgctggattctgccactccccatgacaaaatcaccacagcagcttctggcttcgtacttgaggatgttcctcatctatctgcttacatccctcacctccaaacatatcctgacccgttgcaagacaatccttcctattctgttgttgcgcaatattacgtgaatgtggatgatacaattgcacaacagatagttgtacacaaaaatagtccaagagggacccattttcgtcgtgctgggcctgctcagaaggtatatttcgattcagaggaagtacacgcttgtattgtcacgtgcggtggactttgtcctggtctaaatacagtgataagagaaatagtatgcggcttatatcatatgtatggngtgcacaaagttttgggaatacagggaggatatccaggtttgtattctcgaaatacagntccttngacaccaaatgttgtgaatgatatccacagacgtggtgga

SEQ ID NO: 211805 - DNA, 523 bp, Glycine max
tttcttttttttttttgtaaatatatgatgttactcattgtggcttaaatactgcaaaagatgtactagatttggttttgtccaacgtcaatgatcaatcagttgatcttacgttaattaaatttgatcatttaacttgatcaccacattttaaaggcattttaacttggtgttatatttgtgctctgaatatgccctgtttagtctgctatttctgaatggttctgcccatctgtggtttggtattacgttctttcctctctttctcctgtgataacttttgggttcaagaagcaaggctgatgggttgaagatagcaaccttgcccacatccgatcagttatcacaacccttttctctccctcgtttatcacatggaatggaatgttacaatttttgccattaactgggcccacggtgaaacctgtgtatcctgccattgctccatgaacagcactttgggcaatgagggtgcagcttacattatcagatgcattacttgggatagctcggatcatgttag

SEQ ID NO: 211806 - DNA, 466 bp, Glycine max
cttctgaatccaccgccaccgcagcgtggacggaatcagagtgcagccatagcagcagcagcagcagcagcagcagcagtcattgaagtgctgctctagtttgaggcacaatgagattggagaaatgctggttttgctcttcaaccgtataccctggacatggaatccagtttgttcgtaatgatgcaaagatttttcggttttgtagatcaaaatgccacaagaactttaaaatgaagagaaatcctcgtaaggtaaagtggaccaaggcatatcgtcgagtgcatggaaaggatatgactcaggactcaacctttgagtttgagagaaaacgaaacaggcctgaaagatatgacaggaatcttgcggagaatgtcctgaaggccattcctaagattgataaaattagagtcaccagggaggagagacaccataagaacaggatgaaaggaaaaaaggaaaagct

SEQ ID NO: 211807 - DNA, 522 bp, Glycine max
ctttcttcaccgttcgctctttctttctcccctacacaaaacatggctttgcccaatcagcaaaccgtcgattaccccagcttcaagcttgtcatcgtcggcgacggtggcacaggaaagacaaccttcgtgaagaggcatctcactggtgaattcgagaagaaatatgaaccgaccattggtgtggaggttcatccgttggattttttcacgaactgtggaaagattcgcttctattgttgggatactgctgggcaagagaagtttggtggcctcagagatggatattatatccatgggcaatgtgcgattatcatgtttgatgttactgcccgtctaacatacaaaaatgtccctacctggcaccgtgatctttgccgggtctgtgaaaacatcccaattgttctttgcggtaacaaggttgatgtcaagaataggcaagtgaaggcaaagcaggttactttccacaggaagaagaattgcagtactatgagatatctgcttagagcaactacaattttg

SEQ ID NO: 211808 - DNA, 534 bp, Glycine max
ataaatcttatcaactcgtaatagaatacgtttttgatttatttatgggatgtacatcattatgcttatgtggtaagtatcaaaaatctttcttttgaaattcatcatacatttataaaggacagccttcaaacgggctggttttgcacaaatgattaaatgatagatacaaatattataagcttaaagggaaaacaaaaacaagaagaaaaaaagaaaaagggagaaaatataaagaatctttgacgttggagaaagagttcaatctatccatctatctcttttggaagttaaaggtcttgattgcagcaccaaagattaatgcaaaggcaacggcgatgccagcaaccacaacagcacaaattccaacgaagtcatgtttgaaaccaaaatagtcttctatgaattctttcaccatcttgttatcttcacccggcattctttcagttatatctccaaactgagatgcaatcaatccatacaaggtccaagccacaggacatgcccaatagtaccatctccaccacacgggca

SEQ ID NO: 211809 - DNA, 550 bp, Glycine max
cacaagcaacaataaccgaagaagaatcacctaatgaaggaaccgtagcagaagttgaattacctcgcatagaaagttcaggaagaggtgattctgttgtggagtccagccatggaaagaaaaaaggaatggttcttccttttgagccacattctatcacctttgatgaagtcatatactctgttgacatgccacaggaaatgaaggaacagggtgtacaagaggacagattggtgcttttgaagggtgttagtggtgcattcaggcctggtgttctcacagctttgatgggtgtaagtggagctggtaagactactttgatggatgttctggctggtaggaaaaccggaggatatattgatggaagcatcaaaatttctgggtaccctaagaagcaagaaacatttgctcgtatctctggctactgtgagcaaaatgatatccactcacctcatgttacagtttacgaatccttgctctactctgcatggcttcgtttaccttcaggtgttgattccaaaaccagaaagatgttcattgatgaagtcat

SEQ ID NO: 211810 - DNA, 534 bp, Glycine max
acgttctattatatatatatctatctatattctatatatagatatattgtttaggttatcaagtattaatctgaaataaataagaattgctgcttctaatacttattatcattactacaagttctaatcattactacagcacggatatctgatagatacactggcttcatggatttatttcacataataataatgtatccatagcacagtctcgtctcataatacctcgggcgctaatgaaactactgtagtgcaatttaaccggcgtactacgctgacgaatgcacaaaagattcgagttccctttggatttccttcttgatcaatgaccactgccgcattatcatcatactgaactattataccgttgctacgtatgagctctttacaagtacgtacagttacagttctgatcacttcagaactttctaagatcgtatacggaactgctagcatgactacagcaacaacaacgtcaccaatataagcatatcgtcaagcactagctcctacgattcgcatacacattagctt

SEQ ID NO: 211811 - DNA, 514 bp, Glycine max
  unsure (1)..(514): unsure at all n locations
cacagtgtcggacatgtcgtattcgagtgggattgtggtgtcgggtggacaaggcgcgacgcagttgtgtgggatggatcgggaagcgagggtgctgcgatacagagagaaaaggaagaaccgaaaatttgagaagacgattcgatacgcatcgcgaaaggcttatgcggaaacccggcccaggataaaaggccggttcgcgaaacgaaccgaaattgactcggatgtggagcgtctctatagccctggcgctgcggcgctcatgctggacactccatacggtgtcgtaccaacgttttagttaattaatcaaaaagaagaagagacgatgggtgcatgaatatagtgttgggaaatcttagaataatgattagtgattctgtgggattattaggggaaaaaaggtgaagaatcgaatcggtacgaacgcgattcttagctggagcgcgatgggaagattattgtgaagatttgtctcgatcgaccagaanagcccgtttacttttaaaggggg

SEQ ID NO: 211812 - DNA, 465 bp, Glycine max
catccaggttttcttttcgttcgcatcttctctctctctcagaaagatgaaggtggtcgccgcgtatttgctcgccgtcctcggtggcaacaacagcccctccgccgatgtcatcaaggaaatccttggctccgttggagtagaagcagatgaagataggattgaatcgtttttgtctgaagttaagggtaaggatatagttgagcttattgctgccggtagggaaaagttggccacggttccttctggtggtggtggtgccgatgccgtcgccgcagctcctgggggaggagctgctgctgctgctcctgctgctgacgcaaagaaggaggaaaaggtggacgagaaagaggaatctgatgatgatatgggtttcagtctcttcgattaattggtgtagtctattcagcttttatgttcagaacatattcttaattaacactagagcatgagtttgtcaaagtt

SEQ ID NO: 211813 - DNA, 369 bp, Glycine max
caaaccaaattcatccaacttggttggtcattgatattaaaaaacacagtaaattactccttagaacaaaactttgacaaactcatgctctagtgttaattaagaatatgttctgaacaaaaaagctgaatagactacaccaattaatcgaagagactgaaacccatatcatcatcagattcctgtttcttctccaccttttcctccttctttgcctcaacagcaggagcagcagtagcagcaccttccccaggagctgcggcgacggcaacggtaccaccaccaccagaaggaaccggggccaacttttccctaccggctgaataagctcaactatatccttacccttagacttagacgaagacgatt

SEQ ID NO: 211814 - DNA, 392 bp, Glycine max
tttcgttctttttttatttttttattcttatttatattattatataaagatagtctataatcactagaatttctatatattcatacttagtctataataattctagtgataatagctaagccaatttatgtcataatataatatacccttttcttattcaaagcatttatggctatgccttatcattgttagtcaacgaacagaaatgatggaatagagatgactcactcagaacgccctttaaaagattacgcggcacgatcgaatcaaatccgcccttatggaataaatattcagctgcttgtgaaccgttaggtactgccttattcaatgttaggtcaatcactcttttaccagcaaatgcaatataagcatttggttcggcaataatg

SEQ ID NO: 211815 - DNA, 510 bp, Glycine max
cttctctaaccaaacaaagggttagagtccaaagagaaggcagtgtacaaaaagaaatagataaactgtttcatcaattattttttaatagcgaacataaggcagaaatttgctacgttgtcatcaatgccaataattattacatctaaaatttcttcaatcaagggtcattaatctgtgttgtaagtcaaatcaatgacctgtacacagttatctaatttcttgagtgtcaaaaatgagaaacacgggcataacatggacatctgacactgtcattccatacagatacttgtggaaaatgagtatgaaacattaacaagcaaagtcaattcatggctcaggttgcattttctcgcattcttcccgtattgactggaaaagaatagttgacaaatatctttcaccaaagcttgggaagacaaccccaataagctttcctgcattctcaggcctctttccaaccttctaagcagctgcagctgcagctcctgaagaaattccaccagcaag

SEQ ID NO: 211816 - DNA, 496 bp, Glycine max
atatttcctctcatcagattgaagggtggttagaattagggttctctatctgcaaagcaaaccttatcttttcacctgaaacttgcttttgttcccaattttctcaaattgctttcggttttcgttctgattctgcaaaatcatggagatggagcgcatcgttgaattccctcacacatacatggatcgacccccgagaaagagagcgcgtttgggctgggacatcgctgaggtccccaaggctcaggtaggattgttttgtggacaagaggttgagaatatttcaagctttgctccttcagaacatccccctagttctctgtttaagggagttgctcgaaatggttctcccccatggcgagacgatgacaaagatggccattacatgtttgagcttggagataatttaacttctcgctataagattcatggcaaaatgggcgaaagaacttttgggcaggtcttggagtgctgggacagagaaaggaaggaaatg

SEQ ID NO: 211817 - DNA, 542 bp, Glycine max
ataaaaatcaataaatttattatatatatgctgatttataattaattgatgctgtagaattattctaacacataacatattttctcttaattttggagattgaatttattcataaccatagtttgtcaagagttgttctccagtgaaaaattggacttggttttgtcaatgttcttgcaagaactagttgaatcactccatgatgcttgatcagagtcgattgttgtttcatggggataaaaaacaggctttggaggcatatcaatattttcaacctttccttcaagcatctctacaaccttcttcattgaaggacgatcatttggttttaattgtatacaccaaagggaaactatgaacatctttttcactagaatcttatcctcttccgagaccttttccatgtgaatatccttttcttccataaaatgatcatagatcccaaaggggaagaaatgttggcttgagtgctctgagtgaggaattgagttcctgctcctacttcccatttccatcaaaagcattccaaagctatagacgtc

SEQ ID NO: 211818 - DNA, 574 bp, Glycine max
cctcaacctcgttgaagctcaaacgtcttgcacctggtctcgtggaattgtcatcgcccttgaagagcaaagagattgaaccattttcgagggttgatcttgagggtgaagcccccacggtgcttactccgacccagtttgcgacattgtggcctcttgcttcgcttaatgggtcgaatgctaacttgttggggtttgagaaactcttacattctgtgttgggggctaaggctgagaagaaaggttcctttaggttgttgaaggctgatgtttctgctcagacttacgtgaagatgggttttaaggcggagaagaaggtgaagaaaggggaattggagggttactatccttcgtggaggactaagcccgagactgtgacgacgcactttgaggtgctggctaaggttgatggggagaaagttgtgccggagaaagttatgccggtggagcctgttattgcggtggacagtgtggcgccgaaattgctcacccagaatgtgtccatgtccaagacacagtagttcacccttcacccaacccttttacttgtaatttgtggaaaggaaaagggatg

SEQ ID NO: 211819 - DNA, 482 bp, Glycine max
atgatggacaaataaaacaagtttctcattaattacaatttcaaacaagtatcttaactgttgtgtctatactatataccaaaatcaaaagtgaaacaagaatgttccctcttctctctgttacgaatcctctcggtagagttcagtcaatcccttttcctttccacaaattacaagtaaaaggggttgggtggagggtgaactacttgtgtcttggacatggacacattctgggtgagcaaattcggcgccacactgtccaccgcaataacaggctccaccggcataactttctccggcacaactttctccccatcaaccttagccagcacctcaaagtgcgtcgtcacagtctcgggcttagtcctccacgaaggatagaaaccctccaattcccctttcttcaccttcttctccgccttaaaacccatcttcacgtaagtctgagcagaaacatcagccttcaacaacctaaaggaacc

SEQ ID NO: 211820 - DNA, 538 bp, Glycine max
  unsure (1)..(538): unsure at all n locations
gggagatgaggtgatggtcgtgacaacacatgaaggagtacccaaggaattttatggagccaaattaattggatcccgaagcttcccttgtccctggtatcaaaaggtacccctctctttggcacttagtccaagaataatttctgctgttgctgagtttaagcctgacataatacatgcatcatcaccaggcataatggtttttggtgcccttatcattgcaaagcttctgagtgttcctattgtcatgtcctatcacacccacgtaccagtatacattccaagatacacctttagctggctggtgcaacccatgtggtgggtcataaaatttctgcatagagcagctgatcttacactggtgccatcagctgccattgcaaaagatcttgaagaagctagagtaacagcagcgaacaagatttgtctttggaacaagggtgttgattctgaaagtttccatccgcgattcaagtcccatgaaatgcgattaagactgagcaatggtgaacctgagaagcccnttgatagtcatgtt

SEQ ID NO: 211821 - DNA, 463 bp, Glycine max
  unsure (1)..(463): unsure at all n locations
tgttgccatcaacatttcaagacaagatgaaagaacaggaagcattgagaaggagactcaaggcaagaatagagtatgcaaggttccttcaggatacagtcaaagaaatggcaaaagaagttcagaactcccgcagtggagaactaaagaaaacagctgaagatcttgatgaatttttaaacacgattagaagaggtgcaactgtctccaatgaggaaattttgggctttgctaagttgtttaatgatgaacttactctagataatataagcaggccacgattagtcaatatgtgcaagtacatgggaatcagcccttttggcactgatgcatacttgcgttatatgctaagaaaacatttacggaagattaaggaagatgataaattgattcaagcagaaggtgtggattctctttcagaagatgaacttcgggaagattgtanagagcgaggcatgcttgg

SEQ ID NO: 211822 - DNA, 380 bp, Glycine max
gctttgttatcgaacatttctttccgattctacaaacacaccgacatcatcatgcatggctgccttactgtccactgacggagctgccaacggagctcttgtgaatctgaatggttctggagctggagcttcagttcccagttcagtctttctttgggaccaacttgaataaggctattggctaaagggttcccatcagcaaggtttccggaggaagctttaaaattgctgttgtacaacagaagaatgagactgatgaaacccagcaaaccgtcagggacagatggaagggacttgcctatgagatttcaaccgaccgactagacataccaagaggaaagggttaggctggctccgttttcaaagctccacaggatgct

SEQ ID NO: 211823 - DNA, 515 bp, Glycine max; identical to SEQ ID NO: 211411

SEQ ID NO: 211824 - DNA, 622 bp, Glycine max
  unsure (1)..(622): unsure at all n locations
gctaaaaataaagccaagatagagtatataagtgagggacaactctcactccatgagctagcttaagcgcaacgactatacatttgatgtgcagaaaaaatttatgcatcgttttctgctcaagcaatgtagttctgagctctgctcaaagtatcctagctttcacacgtgtttgctcttgaaaatactcatggatctgttcccaaacttgataggaatgaacacattcaattattcgagataggattgaaacgaaagagtcgattgaagccacaacagaaggatttgatcttgttgttcccaatcagaatatgctggattttcatttccagcttcacaatctgcctctgtgagaaagcgcattggaatctgaggattcatcacaaaacgctggagtttatgggacttgatcacaggttcaacttgttgcctccatagcaagaagttagaatcatctaacttctgagaaatcagatgaaaagtaggagtagcagaagtggaattttgatttgccgccattgatggatctcaagctttgataccatcatagattntgagagagaaaagagaaagataaacaggggttantgttctcttttatagagaaagcagctggggtaca

SEQ ID NO: 211825 - DNA, 490 bp, Glycine max
atgattaacgaaataattttgatatgtagattaaataaacacacgaagtacaaataaacattggtctctctaatcacaaaggagattaagtccattgtggtgtgccttcatgactgaattataccaaagtactacccttaacatactcagtaaaagccagagcaatcaaacccaacatagcaaatctcccattccacagttctgcatctgaggacatgaaccctttggacttagactccacgctgacaccttggaagagtggaatcaaggaagcaagggtaaggaccacacttgtccccaagaaccatgggatgccaccattggatatttgttctaacacaccttgccctttggctacttccactgccattgcagccacaaacccaatcatggccaaccttccattgatcctctcaggtgctggcccactgaatgccaacacatcagaaaacttagtgctcacctttggtgaaggagcagagactggctg

SEQ ID NO: 211826 - DNA, 535 bp, Glycine max
atttcagatcaggatatattatgaatactagcattgctggtcttgaaaaagcggatgcgttcctgttggttggcacccagccacgggtggaagctgccatggttaatgccagaatacgcaaaactgtcagagcaaaccaagccaaagttgggtacattgggcctgccactgatttcaactacgatcacagacatcttggtactggccctcaaacactccttgaaattgctgagggttgccacccatttttcaagacactctcaaatgccaaaaaccctgttatcattgtcggtgctggggtttttgagaggaaggatcaggatgcaatttttgctgctgttgaaaccattgcacaaaaagcaaatgttgtcagacctgactggaatggccttaatgtattgcttctccatgctgcccaggctgctgcgcttgaccttggacttgttccacaatctgagaaaagccttgagtctgcataatttgtatatttgatgggtgctgatgatgttaacttagacaagatcccagatgatgc

SEQ ID NO: 211827 - DNA, 588 bp, Glycine max
gtaagtctgggtggatgactgatgaggaatttgctagagaggtgattgccggtgtaaacccatgtgatccgtcgtcttcaagaattcccaccaaagagcacacttgatcccacactctatggtgatcaaaccagtaccataacaaaagaacaattggagattaacatgggaggggtcacagtagaagaggcacttagtactcagagattattcatattagattaccaagatgcattcatcccatatttgacgaggataaacagcctacctactgcaaaagcttatgccacaaggacaatcctgttcttgaaagatgatggtactttgaagccacttgctattgaattaagcaaaccacatccagatggagataatttgggtcctgagagtatagtggtgttgcctgcaactgaaggtgttgatagtacaatttggctattggccaaggctcatgttattgtgaatgactctggttatcatcagctcgtgagccattggttaaatactcatgcagtgatggaaccatttccatagcaaccaataggcatctagtgtgctctaccctattataacttcttatcctactac

SEQ ID NO: 211828 - DNA, 405 bp, Glycine max
tgtcgtcctttttttgaaagtgagaacacattttcttatatgaaaaccgagagcatgctgatacaatggtgcataagtgcacgttataagctctcattgacgtgcctaatgtatatgtaccatatgagaggagatatgactgggaaaggacaaactctttttaataacatagaaagactggtgggaattttacatgcaagacaccgtctgttgcttgaacgagggactaaaaggaatggcttctgaactggtcgaggccgggtacgcacactggtagaacagttccctagactgctctgaccattaatcccagcctgaatgtatgcacacggatccaagggaattagcgcctaatatgaagcctcccctgtaggggggaaaacctctgcacgtgatagcagaaat

SEQ ID NO: 211829 - DNA, 539 bp, Glycine max
  unsure (1)..(539): unsure at all n locations
caaaactacttcttcaggaagaaagagcttagtttttcgtgtgcaaaacattgaccatagaattgaaccaattcctagtcatttgatggcttcagaaaatgaattctcagaactcaacagaaatctttacccgcaaatagaaccctacagtacaggatttttgaaggtttcagatcttcacacaatttactgggagcaatcaggaaaccccagtggccatcctgttgtgttcattcatggtggtcctggagggggaacttctccaagcaatcggaaattttttgatcctgacttttaccgaattgttctatttgatcagcgaagtgcagggaaaagcacaccacatgcttgcttagagcaaaacaccacatgggacctcattgatgacattgaaaagctaagagaacacttggagattccagaatggcaggtatttggtggatcatggggaagcacacttgcccttgcatacagncaatctcaccacgacaaggttactggcatgatcctcagggggattttccttttaaggaagaaag

SEQ ID NO: 211830 - DNA, 447 bp, Glycine max
ggaataagatgagcagtcatcatttcccatttggtccacgctctagcagctgcatactgagttttgatatcatcagagtttaatctcttgttataggcatcaacaaagcatcctctctcactctctggaataagatctctaaatggctcccaagcatcagggaatatagcagcagcgcctccctcgtaaaaccaatcaatttctttcttccttaaaaggaaaatccccctgaggatcatgccagtaaccttgtccgggtgagattggctgtatgcaagggcaagtgtgcttccccatgatccaccaaatacctgccattctggaatctccaagtgttctcttagcttttcaatgtcatcaatgagagcccatgtggtgttttgctctaagcaagcatgtggtgtgcttttccctgcccttcgctgatcaaatagaacaattcggaaa

SEQ ID NO: 211831 - DNA, 538 bp, Glycine max
tgcggagattcattcttcaccaaaacttcgcaaagaaacactacacatccatggcaactgctggcgtgcaagaagttcgtgttccccctctaacttccacctctgagccaccttctctctttgacggaaccaccaggtgcttcgtttttttctttcatcccgtttttatttccgatgtatatttatttttaattttaaattttttggattttcttttaggttgtacatcagttatatttgtccctatgcgcagcgtgtttggatcactcggaactataagggactacaagacaagatcaaactggttcctattgacctacaaaacaggcctgcttggtataaggagaaagtctaccctgaaaacaaggtgccatcattggagcacaatggaaaggtcttgggtgaaagtctcgatttggtcaaatacatagatgacaactttgaagggcccgctctagttcccagtgatcctgccaagaaagagtttggtgaagagttgatttcccatgttgatacattccccaagagctgtattctg

SEQ ID NO: 211832 - DNA, 499 bp, Glycine max
gaagcattggtggctagctaagcgaagctaaaaccaaactcttcagcagtttgtttttgcttagcttcttcttctgcttttgctttctccaccaccacaaccaccatgtattctgccactgcctccaacactttcttccttctctcttgtttccttctcttctgtctcctctcagctccttcctgtgtttccatgttctctggtattgagacaggagatttagaaaaaagagatgatttgtttccacagattctaagagacgaggcagttgcaaggctttatgagcttgggaaggtgagtgatgctagtggttatttggagaggacattcttgagtcctgcatccatgaaggcaattgatcttattcgtaaatggatggaggatgctggtttgagaacttgggtggaccaaatgggaaatgtacatggacgagttgatggtgcaaatgaaaatgctgaagctttattgattggatctcacatggacactgtttgtgatg

SEQ ID NO: 211833 - DNA, 518 bp, Glycine max
gcataacaacttggagccgtttcctgataacaggataactaaaaccaaaaattcaattacaaaactataagacacaagcaactaaaagaaaagagttaactcatgaattaactcaataaattaacctataattacaagctataatatctattaattgctttacacagttaccgtatcacttatgataggttttccagaaatgacaaggttgctaaaccagctgcccagacatgattatctagcacatgctcttgtggagagtgacttatgcctgcgcgacaacgcacaaacaggattcccacctttgttaagtgagatattgccattgcatcatgccctgctccgctcattaatgttggcacttcatcctgaatgtcaccctccatcttcttgagtgcagaataagctgctgacttgagctgtgaacttagatccgaattacaaatcacagcacctgtatcatgcttgcgctcaataatgcaggaaactgaacgcttgtcacatattttgtaaatttg

SEQ ID NO: 211834 - DNA, 376 bp, Glycine max
gctgatattcgcaagtatcagtcatttgctcagaccttacagcagtcaagagggtttggaagtgaatttaggtttccagagtctggagataggactactactggatctgacccctttgcagcttctgctggcggggctgacgaagatgatctatatagttaggctttattatcacagtgatgtatgaaatcacatgtctacctcacctctcaggagggataactttgaagcctgtcttatatttcgcttttcttgtactcaattatcctgaattgttaccgggttaaccttaaataccatatatggatcgtatcttcattttatggaaagatattgtagaaacatactatgaaaaagagctcacaaataatgaaga

SEQ ID NO: 211835 - DNA, 529 bp, Glycine max
  unsure (1)..(529): unsure at all n locations
caaaatcatcaattttcaattcatggcttccctcatgagcaccatcctcaagcaaaggtcttgttcttcttcttcacatgctgggaggctgttgttctccacaacaacagcagccattgttgattccccttcacttgctcagagaatcagagatttgcctaaggaccttcctggaaccaacatcaagaagcatgtttctcagctcattgggaggactccactggtttatcttaacaaagtcaccgaaggatgtggagcttatgttgctgtcaagcaagagatgatgcaacctactgccagcatcaaagacagaccagcatatgcaatgatcacagatgctgaggaaaagaatctgataactcctggaaagacaactttgatagagcctacatcaggcaatatgggtatcagcatggcatttatggccgcccatgaaggatataagatggttntgaccatgccctcttacacaagctaggaaagaagggtgaccatgagagcgtttggagcttgaataatcctcactgat

SEQ ID NO: 211836 - DNA, 514 bp, Glycine max
ggctcgagggaaaatctttccaatgtgagcttgtctttgccaagatgggaatcaaccccatcatgatgagtgctggagagttggaaagtggaaatgcaggagagccagcaaaactgatcaggcagagataccgtgaagccgcagacttgatcaagaagggaaagatgtgtgctctcttcatcaacgatcttgatgcaggagctggtcgtcttggtggaaccacccaatacactgtcaacaaccagatggtgaatgccaccctcatgaacattgctgataaccccaccaatgtgcagcttcctggtatgtataacaaggaagagaatccccgtgtgcccatcatcgtcaccggtaacgatttctccacactctatgcgcctctcatccgtgatgggcgtatggagaagttctactgggcaccaacaagggatgaccgcattggtgtctgcactggaatttttcgcaccgattcaattcctgaacaggacgttgtcaagattggtgacaccttccc

SEQ ID NO: 211837 - DNA, 543 bp, Glycine max
aggacaaaaggaaaaggcaccaaattcaatttaagtggacactttaactcaaaattatagaggaagacagtccaatatgaaaaatatagtaaaatcatctcaaacttggcatcttctctttgcacctaagacattgagaattctaagaatgttacacgcaagtcccatcacaacttctagcacttggatcagcacaaccttcaggaacagaaatatttacttgccaagtttgctttgcctccaattcaagattggaagaaagttcccctgttaatagcatcctcgttagcatttccaagtgcagcctcgttcaagtacttgtcagccaattggactctcttgacattctcttgttcttggacaagcatgttaccatacgtcaagagcttctccagagtcatcttgggctgctcaaaggttggaggtccatcttttgagttcacaagcttcttcccaatgccgtcaacaccaacaccagaaatccacttcctcacttcgtcatcatatactctggccctcagtgcaccaaagaaatcaatggat

SEQ ID NO: 211838 - DNA, 526 bp, Glycine max
  unsure (1)..(526): unsure at all n locations
agcccatgctggcattgccctcttcatctcgaactgtaaccccaatcagatgcatgaacacctccacctcccccgtcaggacctctctctctaccagcttcgtcgctccttacgccggaatctgcagcgcgtctagccctttctccggccacaagctccgtccctcctccctcaatccggcgtcgtttcttggctccaacgctaaacgaggcgtcgttaccatggttattccttttcaacgaggaagtgcatgggagcaacctccaccggacttagcttcttacttatacaaaaatcgaattgtttatttgggcatgtctcttgttccatctgttactgagttgatactagctgaatttctttaccttcaatatgaagatgatgataagcctatttacctatacataaactccactgggacaactaagggaggtgagaagttgggttatgagactgaggcctttgcaatttatgacgtgatgaggtatgtcaagcctnctatttttactctttgtgttggtaatgc

SEQ ID NO: 211839 - DNA, 539 bp, Glycine max
gaagaaccttcttccaacaccttcatcatccatgttgtggatgttaactttgatgttcagcagcaatattccaagccagaacctgagaacttgaacgagtttttatgtgggatgctcgaggatccaaagaccaaggagcttgcttttgactactaccaaaggttgaaagagaggccagagtttagacccgagaagccaacactgaagcatgtgatcaggtacttggtgagtttgaagagttgggattacattatgtcggtttcagatgactttaaggtttaccatgtgatgcctgatagggctacttgctctaagttggttaaggtttgcattgagcatatgaaattcatggatgctgaggccctgcttgatgtttctaagtctgatagtcagggtgcttacatggctattagatctgccatgagaagttacaacaagctgcatatgtataggaacactgatttggactttgaaagaattaggtcgagtcatgttgctctggattccaaaggttattacacattattgaagcttactct

SEQ ID NO: 211840 - DNA, 534 bp, Glycine max
ggccgcctacgttgctaccctacgtcttggcctgtttcgaggatcagcaagtcggaggagtgggaaccagtcaacgagtgaaaccatgcggaaacaagatgacaatttgggaagtactcgctgctttccgacttaccatccgaaacattgaaatcgcctcttcgacacatatcgatggcggtatcccctgtctatctggtcgaacagccgcttatagaaccgtcatcctcaaagatcccgactttttgcatggtttcaccaacgacctttggctcggcaaatatcacctcaactcgggtgatgacaaattcctcactcgatggatggtctcgcacggctggaatacctatgtgcaagtctgtaaagaggccgagctgctcagtacgatgaagcccaattggcgattcttgaagcaagtgttgcggtggacacgaaatacctggcgatccgatttcaggtcgatcttcaccgaacgttatgtttggacgaaacattcctatgtggcgtacacgatgttggataaattcatcaacc

SEQ ID NO: 211841 - DNA, 510 bp, Glycine max
cccactttctattaacacccctctttccttctctacctctatttaactaattctacaatctgttattacttttgcttgcatctctctgtgttcaatcttcaaagacttgaattcttcttacttaggttctgaatggctggaatttgctgtggtgttgtcggagaaggtgacactccggctccactcgagccaactactcgcccctccaggcgccggagtttggacatcttacccttaaaatacatcgctgacatggcggtgccgccgtcggatggttcacggaaacgtcccaagctggatctcagggaccgcgataacgtagttcaaaattgcgacgaatccactggacacaaggtggtgaaaaaagaagccaaagtggaaatccacgacaatatttccgaaacgaaaaacgtaactgttgcggatgcttcggaagttgaagattctcctaagttcggcgtgacgtcagtttgcggcaggagaagagacatggaagattccgttcggtgc

SEQ ID NO: 211842 - DNA, 445 bp, Glycine max
ccaaagttacaatttccttgctcctttgtttttttaacctaaaatcccattacattacaatcaacatttgataaagcaaaagccacaagcccctcctccctctgatttggtcttcccgttcttaacgaagtcctgaaaacaaagggttttggttatgtttctcgccaacgttaattaattggcgtttgatgatggccgatgatctctcctcaaatcaaccaccaccactctcacattatccgaactatgcctagccaacgctaacttggtaaacaaaattgacgcatcagagcaagcccggtcggaaccgtccggcgccacgtaactctctggagatcccggcggagacggcggattatgcgccttgaggcacatcctcaccacaccacatgcggtttcattcgacaccacattccacaacccatcactcggcagtatcaaacac

SEQ ID NO: 211843 - DNA, 527 bp, Glycine max
  unsure (1)..(527): unsure at all n locations
tgcctgtgcagcacagacaaatgccacttttctgaaattggctggccctcaactggtccagatgttcattggagatggagcaaaacttgttcgtgacgcctttcaactagcaaaagaaaagtcaccatgcattatttttatagatgaaattgatgcaattggaaccaagcgttttgatagtgaagtaagtggagacagagaggtccaacggacaatgttagaattgcttaatcagcttgatggttttagcagtgatgaccggattaaggtgatagcagcaacaaaccgtgcagatattcttgaccctgcccttatgcgttctggtcgattagatcgtaaaattgagtttccacacccaagtgaagaagcaagagctcgaattctacagatccattcgaggaagatgaatgttcacccagatgtcaactntgaagaacttgctcggtccacagatgatttcaatggagctcaacttgaggctgtttgtgttgaggctggcatgttggctctacgccgtgatgcaactg

SEQ ID NO: 211844 - DNA, 555 bp, Glycine max
  unsure (1)..(555): unsure at all n locations
tgagaattatgactatgatgttcgggatgatacagaaaccttcctcaatgggatagttccagagggaccatctgcgccttggaagcatactctagaggggccagatgacatgccggcacatattaaatcgtcgatgtttggttgtgcactcatgatacccatttcaaatggaaagcttaatatggggacatggcaggtacgcccctccgcttcaatgtagaagattggagattccgctaagaatgaggagaaccatacaactcgttaggagcttgtcagaactcagcaggaacatgagtatatctctacatgagattgagttgatgctccatatgattggttttatgtccacaagagattgacgtaacttcttctaagaaggagtatatcgccacataacgatgaatgccatagaatttgatttatttagtgttgtgtacattggttgtgatattatcattgttatatgaaaaacatgtgagatgacattaaaatatcttggtatgaggaaattattnatttcaaatattcatgttatcactagtggtattattg

SEQ ID NO: 211845 - DNA, 555 bp, Glycine max
acaccgcaggatggtcggcggttaccatcccaagtcttcccatcacaagaaacctcccccctccgcctcccaccgcaaatcccgctgggaacccaactcctcctcctccgccaaatccccagccgatcccaagtcatccaccgccccttcccccaaacccaaccccaactccaaccctaaccctagccccaaacacctccccttccccttccccttcccggaccccgcccctgcccctctgggtactccccctcctcccgcctatggcttccacatgctcgaacgccgcaccatcgtcctcgccgacggcagtgtccgctcctacttcgccctcccttccgattaccaagacttcgcccctcgccctctcgacctccctccccgcttccccccgcccctcagccccggacgcttacgactacccgactactcacacgccgtcgacgtcgacgacgtcaagcgaatgtaccgcgactataacggcggtcccagggatgaccttgcgaggcagaaggagcagcttcttcctaacgccaatggctctttcagggagca

SEQ ID NO: 211846 - DNA, 505 bp, Glycine max
tggacatggacatgcaggaggattatgagcagtatgctgagaaagcaaagactttgccaccgactcaatcaaacgaagacttgcttatcctttatggattgtacaaacaggccaccgttggacctgtcaacaccagccgtcctggaatgttcaacatgagggacagagctaaatgggatgcatggaaggctgttgaagggaaatccaaggacgaagcaatgggtgattacatcattaaggtgaaacagctgctggaagcagctggcttgcctgcttgataacattgtcatgccttgctttctgattctgtgctagaagttcacaacagtttggaaataaacaattgcagcgtttgaagcttttattatcataatcatatctatttctaatgatttagacatgttgcttatgagtctagttatctgcatcactgttattggaaatgcctgtagacagatgctgaggaccttgaaaattagcggtacgcccgggagaaacagatgag

SEQ ID NO: 211847 - DNA, 359 bp, Glycine max
atcttaaaaacggaaagaacatgggcgggcttcaatttaatgggcgactattactcgcaacacgctatcaaattttgaactagggccaacctccttaaactgtataattgctgcttgaccccttgtatatgtaacgccccataaaaaaaaccactgactggaaaagtgcctctctagtttgaaacaccataagccttcgaaggacggcgcgattctagtcttgattggcggtgccaaaaagctaactatcctgatcttggtcatttaacccgttggaagccacccacttctccccatttataacggggcatctcccatggagcgatggcggatcactctctcctttaccatagcctttc

SEQ ID NO: 211848 - DNA, 477 bp, Glycine max
ctaacctgtccgcgttctctctctctctctgtatcttgcgaaatccgttcccctatctgcttttcgagttgttgctaaagagtgatggactcaccgcccagcaatcaccacgcggtcgacggagacgccaacgacgtcgttagatccttttcccaccgcgacgacgatgaagacggcaagccccaacccctcaccggggacggcgccagtcctggaaagatattcatagggggtttagcgagagatacgacgattgcgcaattcatcaagcactttggtaaatacggtgagataacggattccgtcatcatgaaggaccggaagaccggccagacgcgtggtttcggcttcataacttacgctgatccctccgtgggtgatacagtgattgaagacactcacattatcaatggcaagcaggtggagattaagcggacgatccgaggtgggctgcttggctcaactcaaggactttcg

SEQ ID NO: 211849 - DNA, 542 bp, Glycine max
aattgtttaaacctaattctcatttcttcatcgttcgattcttctcctcctaaagatgcagatcttcgtgaaaactttgaccggtaagaccatcacccttgaggtggagtcctccgacaccatcgataacgtgaaagctaagattcaagacaaggaagggatcccacctgaccagcagagacttatctttgcgggtaaacagcttgaggatggtcgaacccttgccgactacaacatccaaaaggaatccactctccacctcgtgcttcgcctcaggggtggcatgcaaatctttgtcaagactttgactggcaagaccatcaccctcgaggtcgaatcctcggacaccattgataatgtcaaggccaagatccaggacaaggagggtatccctacagatcagcagaggttgatatttgctggtaaacaacttgaggatggaagaacccttgctgattacaatattcagaaggagtctaccttacacttggttcttcgtttaagaggtggcatgcagattttcgtcaagactttgacgggaa

SEQ ID NO: 211850 - DNA, 479 bp, Glycine max
cgctgaaacgagttcaatacatcattttaaaacataataaacagcagcacttaaaccagagatgcaaagcacaagttcaagggagacactgaacaaacagataagacatatgagaacacttcataaaagggattccccttagcaaccaccacgaaggcgaaggacaagatgcaaagtggattccttctgaatattgtaatctgccaaggtacgaccatcttccaattgcttcccagcaaaaatgagcctctgctgatctggagggataccttccttgtcctgaatcttagctttcacattgtcaatagtatcagagctttccacctccaaggtaatggtcttccctgtcagagtcttcacaaatatctgcataccttcacgaagccttaacaccaaatgcagagtggacttcttctggatattataatcagcaagagtacgaccatcttccagctgctttccagcaaagataagcctct

SEQ ID NO: 211851 - DNA, 555 bp, Glycine max
gtagattctattctcctcaagcaaaacctatagctcccccacactcctccagtacttgaataaaagctaaataaatattaaagcctttccttcatcaaggtactgtttgatctttgaatttcagtcctcaaagattggaacaacaggaacatgtgtactctcacaactgttcctgtgctcccttctaagcttaacaagccttcgctttctccgcaccacaattctctttttccctactgtggaagacgggtcgggaagaagaacaaagcaatggttcctgttgcaaggttgttcgggccagccatatttgaagcctcaaaactgaaggttttgttcttaggagtggacgaaaataaacacccaggaaatctcccaaggacttatacgctaacccatagtgatataaccgctaagctcaccttggcaatctctcaaaccataaataattctcagctgcaggggtggtacaacagatttcaaagggacgaagtggtggcacagtggaaaaaggtgaagggaaggatgtctctgcacgttcactgccacattagtgga

SEQ ID NO: 211852 - DNA, 585 bp, Glycine max
  unsure (1)..(585): unsure at all n locations
cttcgtttctcattctctttttgatcatggacgtcgaggtgcggcagatcttcaacaagttcgacaagaacggcgacggaaaaatctcggtaacggagctgaaggacatgctcgcggccctcggatccaaaacgacggacgaggagttgaaacgcatgatggaggagctcgaccagaacggcgacggtttcatcgacctcaaggagttcgcggattttcactgcaatggcggtgccggaaaggacgactcgaaggagctccgcgacgcgttcgatctctacgacgtcgacaagaacggcctcatctccgcgaaggagttgcacgacgtgctccggaatctaggcgagaagtgctccctcagcgattgccggagaatgatcagcaacgtcgacgctgacggcgacggcaacgttaacttcgaggaattcaagaagatgatgactcgctcttaattaggtttgaatcaataatcaataataagttcatttttaaaaagtacgtacgtacgtntacgcatcttcatgttaggttagaaagaactaagacctgcacataaagtagttattaacatcttttctgacattc

SEQ ID NO: 211853 - DNA, 392 bp, Glycine max
agaaactcgtatttaatgtaccactctgctgaatgcaaccgcaatcgtataggagtaaccactcgtggatagaactggtagatgcgacataggagctcatgccacacttgggaggagacatggaatggaccgtccctaagtgccacacactatcacctttgattactgcatgtgctgtcgcggcatttcccgcgagccataggatacgcctacatctaggacgacatactgaacacaatgagaagtagctaaccaacttctacgagacacataatcgactgccttaatgtctgtagctacgccacccacggtactcaaggaacctaactgagcatgagacatatattgcgcacaacggcgacactgccaatgctgcatgtctatgatcagtc

SEQ ID NO: 211854 - DNA, 454 bp, Glycine max
atattcacagccacaaaggaatctaagccacattagagaaaagcaagttaatcaaacatcagttctattattcctttgcgtattgaaaataaaataattcacatacggtaatgtttttggcttctgccatgcacttaatacccataattacacagacaacagggcatctattatcatgataaaatcagacggagaatctctccagagagcttgaatgatttttctgtttcttccagacagtggtccttttcttcccgagtccaaggttcagcaaccttattcaacttgtccctcacattctgcaacaactggggaaggtcaccgtcccatttgtagaactccaatgccttgttgttaagtaacttttcagcaacctgtgagataaagtaaggataaagtaacaaactaacaatcattcagtattagttttaactcacagtaagacaccacagat

SEQ ID NO: 211855 - DNA, 501 bp, Glycine max
  unsure (1)..(501): unsure at all n locations
gacccatgagccacaccaatcaatttgcaaacatattcacaatcacgccaacatagcaacaacatcacccacgagcacaacaacacgcagcacatgtacctgaatcatcatcgacaacaactcctcgatgtccatttcggttcattactgcattcgccttttcaacaattcccctttctgggtaaaagacgacacaccccagaggccaaaacataacaaagaagcaagcaaataactaaaatatctcagtcctgaaacaagaattaacaaaaacaactacaaaggaacgacaattagcatgggagtcttggttgttcttcaagcgagtgtaggattctctgcaggagaagtcctccacacgatatctttaagagctggacgaagctccttgctacagaactggttatactccaaggtgtcanccgtgtccttcttaacctccaccaccaaaaacgacggcgtcacggcgtacaagtccgcagcaatagcgagattaccttt

SEQ ID NO: 211856 - DNA, 587 bp, Glycine max
  unsure (1)..(587): unsure at all n locations
attctaaaaaaattcatagaatttgaagaactgtttttcttagatgacatgttaaaggaatgtccggaaacacatctacaaaacctgcgtactggaatctataaagaaacaatccaattaatcaaaacgcacaacgaagatcgtatgaatacgattttgcacttctcgacaaatataatttgtttctttattctaagcggttattctattcttggtaatcaagaacttgttcttattaactctttggttcgagaatttatatataatttaagtgacacaataaaagctttttctattcttctattaactgatttatgtataggattccattcaacccatggttgggaactagtgattggtttcgtctataaagattttggatttgctcaaaatgatcaaattatatctggtcttgtttccacttttccagtcattttagatacaattttaaaatattggatttttcgttatttaaatcgcgtatctccatcacttgtagtgatttatcattcaatgaatgattgactgacaaaatgattcacttatcaaattntaatttaaagtttttagctaaaaagaaaataact

SEQ ID NO: 211857 - DNA, 542 bp, Glycine max
  unsure (1)..(542): unsure at all n locations
ctttgaggaaactctctaccaatccacaactgatggcaggaagattgttgacgtgctcctcgagcaaaacattgttcccggtattaaagtcgacaagggtttggtaccccttgctggttccaacgatgagtcatggtgccaaggtcttgatggtcttgcctctcgctcggctgcatactaccagcaaggtgcccgtttcgccaaatggcgtactgttgtgagcatccccaacggtccctctgctctggcagttaaggaagcagcctggggtctggctcgctatgccgcaattgctcaggacaatggattggtcccaattgtggagccagagatcttgcttgatggggagcatggtattgacagaacttttgaagtagcaaaaaaggtctgggcagaggttttcttctaccttgctgagaacaatgtcctttntgagggtattcttcttaagcctagcatggttacacctggagctgagtccaaggacaaggccagtcctcagacagttgctgattacaccctcagctccttcacaggagaat

SEQ ID NO: 211858 - DNA, 520 bp, Glycine max
aagctgtaaaggtacatgtaaccataaacaaaaatagtctccaagactataaaaacattacattttagacaaattagtcttcttccacttcatcctccgtcaacacctactacaactgctggtgttgctgctgcctaacatgtatcatattcactacaaacatcttagtaggagtagcctttgacgaacaactccttcttggcttcctcagattcaccctcaccggtgtacttcccaagctgggcgagcgagttggacttggcacggaaaagaagtgcatcttgtgccgccttcacattctctgggcggcctccccatgtcttcaaggcagtgttttggagggctctggcatacgagaacgacacgtgccacgggtttggagattggttcatggcattcaagttgagggtagcttcaacctcagactgtccaccagacaaaaacataattccagggacagcagggggaattctcctgtgaggagcttgagggtgtaatcagcaactgtctgaggactggc

SEQ ID NO: 211859 - DNA, 543 bp, Glycine max
atcgcatcctatgggtagcagtagaggacacacgctcatggaggttggacccgacggggttgccgtcatcaccatcgtcaaccctcccgttaattcactttcctttgatgtattgcgcagtttaaaggagagttttgatcaggcgatacagagagatgatgtcaaggcaattgttgttacaggtgcaaagggaaaattttctggaggttttgatatttctgcatttggtggtattcaagaggcaaaagagcgtccaaaacctggttggatatcagtagaaatcatcactgatactattgaagcggctaggaaaccatcagtcgctgccattgatggccttgccttgggtggaggattagaagttgcaatggcatgcaatgctcggttatcaactccaactgctcagctaggctagcctgaacttcagcttggaataattcctggatttggaggaacacagcgacttcctcgtcttggtggtttgacaaagggacttgagatgatactggcttcaaaaccagttaaagggaatgaagctttagt

SEQ ID NO: 211860 - DNA, 379 bp, Glycine max
aaactaaaattacttttattttttaaataattatgctgttcaaatgttttctcatcgtacattataagctatttctcaagtcaccactatattcctaccatctgaaaggagatataacggggaaaggaaaattcaatccagtaaacacgtaatgagctgtttttttcttacatgcgagactttgcctgctgctccaaagaggcactcagaggaattcctttggcagcttttgcagccaagggggcacagggcttgaagaattccccatacaactctgaccatttctccaatcttgaatatatgaacttggatccaagagaatcagcccagaatatgatgcctcccctgtaaggggggaaacccatgcccctgatagcgg

SEQ ID NO: 211861 - DNA, 568 bp, Glycine max
  unsure (1)..(568): unsure at all n locations
ttggaacaacaactcctctttaaccgttggagctagaggtccaattctgctggaggattatcatcttgtggagaagcttgcaaattttgatagggaacgtatcccagaacgtgttgtccatgccaggggcgctagtgcaaagggtttctttgaggtcacccatgacatttctcacctgacatgtgcagatttccttcgagcccctggagttcagacgcctgtaattgttcgtttctcaactgtcattcatgagcgtggtagccctgaaaccttgagggaccctcgaggttttgccgtgaagttttacaccagagagggtaactttgaccttgttggaaacaaccttcccgtcttctttgtacgtgatggcatgaagtttccagatatggttcatgctcttaaacccaatcccaagaaccacatccaggagaattggaggatccttgacttcttctctcactttccagaaagccttcacatgttcacctttttatttgatgatttgggtgttccacangattacaggcatattgatggttttggagtaacacataacactgatcacaac

SEQ ID NO: 211862 - DNA, 393 bp, Glycine max
attgagataggtcaacgagttgcattcatggagatctgggtacacacaacataatattgcaagaaaaggattaattcttttaggtaatccaaaatcacatcctaatcctactctttgcacgtgtgcaactctaacaattattctggagttggcaacaacattaaatatttggcctctggctgaaatgagaagctatcttttggcctagagaacggacagcctgagaccagcttgatatccagacactgcggatctcatgggtgacccgtgggtcagataaagcatcaacccatcggcgagcaaatctatcttgcctgtcaggtgcccaagaccggtatatttctccgggctgcgttgaagacgctctccttatcaattgcacactttacacgc

SEQ ID NO: 211863 - DNA, 456 bp, Glycine max
aaagaactggccacttaaatgccattcattttccattaaaataaagacaatctagagagcaggttccaaaagttacatgttacacttaaaatgaaggagctggaaacaatagcacagactatctccctaatgtggaaatgctattagaacaagggatattagcccccaacttagcataaattttcttcaatttgaagtgaaaacatctattaaatcctcctacaagttgctcccagaagcagatacctcagtactacaaactgggcaaaccttgtttattttcaaccaattgttaatgcactcaggatggtacagatgtttgcaggaaagaactgtcaaggactcatcatcctcatagtccacccggcaaatgacacacgaatcattgcttccatgttgatcactcccagtcttgtagttgactgaaggcaaacaggcaatagtatcagttgaaag

SEQ ID NO: 211864 - DNA, 569 bp, Glycine max
gcaggagggacaaattttgtgagtgctatgtctgcaatattctccttggttttaattatatctactaccttataattaactatcaggtgcgaacactggatcccaaagctgtcaatgatgaaaattgcactggaaatactagtgatggtggcaacaacacatggtgaagtgcaggctcggagaagaacaagatgaaagtgaggaggaagctaagagagccacggttttgtttccaaacaagaaatgatgtagatgtgcttgatgattgttacaaatgtaagaagtatggttagaaagttgtgaagaatagccttcacccaagcaaaatgaaaagaaagatgactccaatgaagtgccaagtagcaattatacagggattgagacagaaaaggatttttaggttgacacaataagccttagtgaggactcatctatacaataatgtatactagtggaactactggtgaaatgacattatgcaactttggctattcatagtaagtggtggtcttgtaatagtttctttagtaaggttaaatgatgacatacttgccatgaactatcatgga

SEQ ID NO: 211865 - DNA, 492 bp, Glycine max
ctcgcttacgttgccctcgactttgagcaggaaatgcaaaccgctgcctcttcctccgctttggagaagtcttacgagcttcccgacggacaagtcatcaccatcggaaacgagagattcagaggacccgaggccctcttccagccctcattcttgggtatggaggctgctggagtccacgagaccacctacaactccatcatgaagtgcgacgtcgacatcagaaaggacctctacggaaacgtcgtcctctctggaggtaccaccatgttccccggtattgccgacagaatgcaaaaggagctcactgccctcgctccctccaccatgaagatcaagatcatcgctccccccgagagaaagtactccgtctggatcggaggatctatccttgcttccctctccaccttccaacagatgtggatctccaaggaggagtacgacgagtctggaccttccatcgtccacagaaagtgcttctaaatgcattac

SEQ ID NO: 211866 - DNA, 553 bp, Glycine max
gaagaatagttgctcaatatactagtgctggaacttacacttttgtcagtttgggaataaatagaagggtatattcaattttctagctgtgatttctttgcctgaatatgtatgcaaggacaaaacagaagaagcaagtaaaatcaaatatatttgactgctgaattgtctatatgacttatgaactaatcaacaaaatgattggataggtaaactattttctcctcttgaaatcctcatccgaatccacactcttgagtcttcttcgttccacaatccagaagaatgaagtgaaatttattgtattaaacttcaattgttttctgattgagagctgtgtatctccatctctccttctccacaaaatcagcatcaaggaacctggcaacaaaagtccatagtttatatacatcttcaaaattagccaggaagcttaatgcagcagtaaccacagttactcctagctcatctctatctttcttcttgatggtgggtactccttggactcttccttcttaggtctgtagaactttccccttgacttctgcatact

SEQ ID NO: 211867 - DNA, 531 bp, Glycine max
  unsure (1)..(531): unsure at all n locations
aattcggctcgaggagaaatggaagaagcatcatgtgtatgcttagttgtcatactgatacttgctctaacattggcatggagggtgctgaactggttatggctaaggccaaagaggttagagaggctcctaagagagcaaggccttcaaggaaatccctacaggcttttggttggggatttaaaggagattatgaatatgcaaaaggaagtcacatccaaacccatgaatctctcccatgatatagtgcctcgtgtcttttcctttctccaacacactctcaacacacatggcaagaattcttttatttggattgggcgaaaaccaaaggtgatcatcacagagcctgagttaatcaaagatgtacttaataagatgcatgatttcccaaagcctgacacgagtccgcttgtcaagttacttgctactggtcttttaaaccatgagggagaaaaatggaacaagcacagaagaataattagccctgcattcaatntagaaacattgaagaatatgttaccaatattctac

SEQ ID NO: 211868 - DNA, 461 bp, Glycine max
gcatgaattggtagcaaactgctattatcattgctttataaaattagcaattctgaaatgcaaatcaaacaaggcttgttactattattttttatatttcaactttacggaaaatgacatgagcaccatattggggctgaagagtaaatactgtaacaggagcatgagcataagctggagaaagttcaaatgagaaatgttgtaaaatcgccgacaaagccatctttgcctccaacaaggaaaagttgtgaccaatgcatattctaggaccccatccaaatggaaaaaatgaaactctgccatttggggccttcagaactccttcagaaaatctctcagggatgaatacattcacatcatcaccccagagttcgcggtcatggagaaccatatttgttggtaaggaaacttgcacttcatcaggtaatgatacgcttccgagcttcatatctctgtcaaca

SEQ ID NO: 211869 - DNA, 546 bp, Glycine max
  unsure (1)..(546): unsure at all n locations
ccttaaacaatttccgttctcggttcattcacccacgtcaacaaaacaatatcaaccgaaccatccaaatcccgagaaaacaaaaaaagaaacaaaagccatttgcatgagatagatagatagaacgaaaccgaatcgatgatggggtgggtggcgaatcggtggacgggcgtcgccgccgccatatggatccagtggagctgcggcgcatcgtacaccttcagcatctactcctccgtgctcaagtccacgcagggctacgaccaatccacgctcgacaccgtctctgtcttcaaggacatcggcgccaacttcggcgttctctccggcctcctctactccgccgtcgccccctacacaacccaccgcgcctccccctccaagtccatatggacctcgctcagcgggccctgggtcgtcgtcgcggccggcgccgtccagtgcttcgctggcttcatcttcatctgggccttcgtcgtgggcctcgtgagcccgnctgccgtgccggtcatgtgcttcttcgcgtggctcgcgtctaacggtcag

SEQ ID NO: 211870 - DNA, 536 bp, Glycine max
  unsure (1)..(536): unsure at all n locations
atgctcataatcaaacataatggtgattataaatgaatggactacatatctgtttttaaaattctgtgtacatttctcttataacaaataaaatacaattcaaataatcctcatagacaacccatagaaaactgcattaactatatttatgccaaacagaccagagaaaacaagactggtttcctcagcctttacctagtgttgaaatgcaggcaaatgcaatctccatcatcttgcataatgttttaatcttctaagcacaacttgcttatagaacctccgggtccggaagaataatgccaaaccaaccaaaaacgcaagaaaagcaacagctgccaggataaaaaatgacggcatgaaacagttgatgccaaagcacgaatgatcttctttatcggcttgcttgtcgtaaatatatccaacaactctcacagaaagtatatacgatccaagtggacttgctgcagcaatagtattgaaaatggtacccatatgctntacaccaaatatctcagaagtgattgtgggcatcaagg

SEQ ID NO: 211871 - DNA, 531 bp, Glycine max
  unsure (1)..(531): unsure at all n locations
caaaaaaatggagtactaactcccatttcttatttattattgaattaaccgatcaacttgctttgttatcgaacatttctttttgatttcaaaaattttccggaaaaaatttgaatctatttttatatgcgaatcaatcctactacttctggtcctgaggtttctgcgcttgaaaaaaaaaatctgggacgtatcgcccaaataattggtccggtactagatgtagcttttcccccaggtaagatgcctaatatttacaacgctctgatagttaagggtcgagatactgttggtcaacaaattaatgtgacttgtgaagtacagcaattattaggaaataatcgaattagagctgtagctatgagtgcgacagaaggtctaatgagaggaatggaagtgattgacacaggagctgccctaagtgttccagtaggtggagcaactctaggacgaattttcaacgtgcttggagagcccattgataatttaggtcctgtagatactcgcacaacatctnccattcatagatct

SEQ ID NO: 211872 - DNA, 470 bp, Glycine max
attccgatattcggacgcatcaacttgttatgaaatcacattgatagcctctactcgtgtcctagctcgtctaagagctagatttgcctcaattgcttgtctcttgccttccgccttattcaaattagcttctgctatttcaagagtttgctgtgcttcttgtggatcaatgtcactacccttttccgcatcatttactaaaacagcgatctcattattgtttattctagcaaaaccgtccatcagagccatcgataaccattggtctttaagaagacgtattctcaaaatacctatatctacggctgtggcaataggcgcatgatttggtaatactccaatttggccgctattagtagataaaatgatttccttcacttccgaatcccaaacaattcgattgggggtcagtacacaaagattaaagtcattttttcaaatggctctccatttctaagttcgtagctttc

SEQ ID NO: 211873 - DNA, 539 bp, Glycine max
gtgagaagtgagggagagatgcagtagtagtagtgggtggtaacagagaagaaaatagggggtttggtttggtgagttacccaagagaaaggatgaagagggaacgcgagcagcttggttccatcgcagggacctcaagctgcggttattcaagcggaaaatcgaatctttgggaggaagaaggaggcatggacgagcttcttgcggtggtgggttacaaggttaggtcatcggacatggcggaagtggcgcagaagcttgagcgtctcgaagaagccatgggaaatgtccaagatgacctcccggagatttcaaacgacgtcgttcattacaacccttccgacatcttcaactggctcgaaaccatgctttctaattttgaccctctcccctccgaagagccggaaaaggactccgcctcgtcggactacgatcttaaggctattccggggaaagcaatttatggagctagcgacgcgctaccaaaccctaagcgcgtgaaagccgacgagtcaaggcgcgcggtggtggtcgatgac

SEQ ID NO: 211874 - DNA, 505 bp, Glycine max
tcggctcgctctttctccaacctcaaggttctctctgctcttgtcgccgacggattctccaacactctcaccaggcgtgggtacgcagtagcgacacaaagcgcaacaagaggaggagcagcctccatcagcggcaagtcaggggaagacaaggtactaggaggaggtgctgaaaaggtttcgtgggtcccagaccctgtcactggttactacaaaccggagaacatcaaagagattgatgttgctgagctgagagccacggttatgggcaaaaaattcaaccactaggctctacttaatttcaataattaacctttttggtctcacgtgaatatgttatatgatatatgaagttcacagaaccttcggggattattcagcatggggtttttttcttgtatttctctcttgagaatttggactagcatatgaccaaattaatgtttactagtgtgattggatctcccgatgaaaactcaaagctatgctgctgttgaattcactt

SEQ ID NO: 211875 - DNA, 393 bp, Glycine max
cctcggggaattccaattccacattttcaagatataaggaggcaaaaatgttcatatatgaattggaattatttgttttcttattaggcctatcctgaagccaaaggaaatgagatcggaattcctcggggaattccaattccacattttcaagaaataaggaggcaaaaatgttcatatatgaattggaattatttgttttcttattaggcctatcctgaagccaaaggaaatgagatcggaattcctcggggaattccaattccacattttcaagaaataaggaggcaaaaatgttcatatatgaattggaattatttgatttcttattaggcctatcctgaagccaaaggaaatgagatcggaattcctcgggggtaccgagctcgaatt

SEQ ID NO: 211876 - DNA, 532 bp, Glycine max
  unsure (1)..(532): unsure at all n locations
ccaccaataagctccataccttctaattctctactctctctcacttctctctatcacatttttcttacaagatggcagcatcatcagcatgccttgtagggaatggtttatctacacggggtaatagaataactcttaagaaggacttcaatggaagaagatatctctactcatcttggagattttcattattgaacaacaataaggcatcaaaagcattttccataaaggcatctttggagcaaaggcaagaagaagggagaagggggtttctgaaactgttgcttggaaatctgggagttggtttgcctgcactattgggaagtggcaaagcttatgctgatgaacaaggggtttcatcctccagaatgtcttactccaggtttctggagtatttggacaaggacagagttaaaaaagtggatctttatgacaatggaaacactgctgttgatgaggctgtttcgcccgagttggggaaccggtcacagtatgttagagttcaactccctggacttaactncagagctct

SEQ ID NO: 211877 - DNA, 514 bp, Glycine max
acactaaaaacagtttctcttttatacatactctctgttgtcatttgtcaacactacaaaaaatgaaaaagtaaggtagaatctttaatcattcacaaatatggagcaggctgcagagggcattctgtattctaagataatacatatgaaagatgttacatatataggctattcaaacagtggctggtactggagttgaaggagcaacacggttttcagctggaatttcaacaaactcagacaatatagcacggaattcatctccgctcagagtctccttctccagaaggacttccacaatcttgtcaatggcctcacggttgttccttatatgctccagtgcaatttcatatgcttcatctgagatcctcttgatggcagcatcaatgtcttctgcaagcctctctgacattgagttccttgccatcattctcatgatgacatccccaccttgtgctgatggttgcataagtgaccaaggaccaatatcagacattccaaatgtggtcaccat

SEQ ID NO: 211878 - DNA, 535 bp, Glycine max
attttgtggggcaaatacggggagagggggtgcccaaataactttgtgatgggatctgccacaacttcagagcatcaggaaaaattcttacatttttttgcctattgtaattattgtctaggttgttgcaatcagggatatagtgccaccacctcaaagggagatattcaatgatgtttacattgcatatgagttgatggacactgaccttcaccaaatcattcgttcaaatcaagcattatcagaggagcactgtcagtattttctgtatcaaatcctccgtgggttgaagtacatacattctgctaatgttctgcatagggacttaaaaccgagcaaccttctcctaaatgccaactgcgacttaaaaatttgtgattttggactggctcgtgtcacctctgaaactgattttatgactgaatatgttgttacgagatggtaccgtgcaccggagcttctggtgaactcttctgactacactgcagcaattgatgtatggtctggtggttgtattttcatggaactgatggat

SEQ ID NO: 211879 - DNA, 539 bp, Glycine max
gttcccaaattcattttaatcctaattctgcacttcttgatcattcgatttttctcctcaagatgcagatattcgtaaaaactttgaccggcaagaccatcacccttgaggtggaatcctccgacaccattgacaacgtaaaagctaagattcaagacaaggaagggatcccacctgaccagcagagacttatctttgcgggtaaacaacttgaggatggtcgcacccttgccgattacaacatccaaaaggaatcaaccctccatctcgtgcttcgcctcaggggtggcatgcaaatctttgtcaagactttgaccgggaagaccatcacccttgaggtggaatcctcggacaccattgataatgttaaggccaagatccaggacaaagagggcatccccccagatcagcagaggctgatttttgccggtaaacaacttgaggatggaagaacccttgctgattacaacattcagaaggaatccacccttcacttggtgcttcgtttgagaggtggtatgcagaatttcgttaaaact

SEQ ID NO: 211880 - DNA, 516 bp, Glycine max
gatgtgaagctatgggctggaaaatgtggatgtaggagatttcgggacgaaaggcctcaaaacgcttcgtcgtttgtggttactgagtcctgagtgatcttgtcatccgacctttgccatgacaggtgcgcttgcttggcaggtcaaaatatgttaataaaaaaagttttattggtttagggagagatcgcacgggagttgcccggggtctctctctcgtgtggtgtgtggtgtttgctgtgctctccttttcgatatgccttttattattacctatctgtcgctccactccgtattacgactctggatcagagggatacatcagaggattcgctccaactcctatcgaataaggtattatctgtcaatttacattggaaagggttaggatattcaattttacataattaaagataaaatcaacgatagctatagttttaaaataaccatcgatttagttgcaactggaacacaggtttctttcaatgaaataatattaatattcaattaataagc

SEQ ID NO: 211881 - DNA, 559 bp, Glycine max
aattcggctcgaggatcaaactagtacaataaccatagaacacttagagatcaaccttggtggactctctgtggaacaggcactgagtggtaacagattgttcatattagatcaccatgatgcattcatcgcatatctgaggaagatcaatgaccttcccactgcaaagtcttatgccacaaggaccatccttttcttgaaagatgatggcaccttaaagccattggccatcgaattaagtttgccacatcctaagggagatgagtttggtgccgatagtagagtcgtcttgcccgcagaccaaggtgctgaaagtacaatttggctaattgccaaggcatatgttgttgtcaatgactcctgctatcatcaactcatgagccactggataaatactcatgctgagattgaaccatttgtcatagcaacaaacaggcatcttagtgtgctccaccctatttagtaacttttgatgcctcactatcgtgacaccatgaacatcaatggactcgcatgacaatcactcatcaatgcacgtggcattattgagcaatcattt

SEQ ID NO: 211882 - DNA, 473 bp, Glycine max
acgggtatcaaatccaagttggtgacatagagaaatttgatttgacattcatagatcagaatatcagacttacatacgggtgaacatgatacgggtgaacatgataggagcacaatactatacataaaaactgacacaacaccctattagatatgaaaaactagatagcatccaattacaaaacttaagcatacataagagaattatgcacacataagttcgcacgtttatttgtcaatgagaggtacgttggacggaaagaaaaccacacaccacacaccacacactctcattagatagagatgctgttgggaattcctctgaaagtaaggccttccccactggtaggaagaagcacagtgtagggcatctgcgccggtccattacgggtcctaaggcttgaattcttgttcctccctgagattttgtcctcaatttccttcagctgggttccaaacttcttaaaggcttga

SEQ ID NO: 211883 - DNA, 529 bp, Glycine max
aaacttttatcttattccttttgtttggatgatcgatcaagggagagtataaaaaaagggagagcatttgaattgacactgggggtgatgaaatacgtgtctgaacattgagaccacttctctgaagtcattttgatcttaattgcgttttttggtggcttcttgaggagattaaaggactcaggtgaaagagtaacgtatctattgtgttggtggtggtgtttttttcaagggtaagcagatccaagacagagagaaaggttcctttcttagaaaaccggggtgcttaatttatgtttgagggtttgtgcttgaaaatggagaaaagagggaatgtgttgatggagaagtatgagtttgggaagctattaggtcaaggaaactttgcgaaggtttaccatgcaagggacgtcagaactggtgagagtgttgccgttaaggtgattgacaaggagaaaattctaaaaattggactagtggatcagacgaagcgagagatatcgattatgagactggttaaacatcccaa

SEQ ID NO: 211884 - DNA, 403 bp, Glycine max
agaaccaaaacctttgaaaaacattacaaatcctgatttcgaatttacatattggcataaaaaaaaagctttttctagcaatgatatgatgtaatgacctctcaaaattcagccggcattctcaaccaaaaccctgcctaatatagtataaacatcaacaattcaattaccatagtaactcaactgtgattaattcataacatgaaaaatcaatgaatcttttaaggggtacacaagcttgctagggcagatgctgctcaccttgccaaacaccgacaatattttttagagctgggcttaagtcttccttcaatatcttctgggattctaatgcatcaccgcaggactttttcaactcgaccaaatggaaagatggggcaacctcaaatatttcagcatcaat

SEQ ID NO: 211885 - DNA, 533 bp, Glycine max
  unsure (1)..(533): unsure at all n locations
attggcttcaaaaatcagagggaaactatgagcaatctgagaaccctatgtagacctcagacggtgttctctttcattacttgcagacaccaatttcgttctagggtttcgtttcgaaaccctaattgcaagccccgtttgccatctccgtttctttattctacaatcggttcctgggtttcgaatccctggtttcgcgtgaaccagaggagaaccgtggccaaggcaacaaactgggctgaacaaaaatccccatatgaaactcttgaattggaaggagatgctgatgaggagcagataaagaatgcttacagacgcttggccaaattctatcatccagatgtctatgatggcagaggaacacttgaagaaggtgaaacagcagaagctagattcatcaagattcaagctgcttatgaattgcttatagatggagagaggcgaagacagtatgatatggataactgggtcaaccccatgaaggcatctcangcatggatggagtggcttattaaaaagcgaanagctttcga

SEQ ID NO: 211886 - DNA, 545 bp, Glycine max
  unsure (1)..(545): unsure at all n locations
gctttgttatcgaacatttctttttgatttcaaaaattttccggaaaaaatttgaatctatttttatatgcgaatcaatcctactacttctggtcctgaggtttctgcgcttgaaaaaaaaaatctgggacgtatcgcccaaataattggtccggtactagatgtagcttttcccccaggtaagatgcctaatatttacaacgctctgatagttaagggtcgagatactgttggtcaacaaattaatgtgacttgtgaagtacagcaattattaggaaataatcgaattagagctgtagctatgagtgcgacagaaggtctaatgagaggaatggaagtgattgacacaggagctgccctaagtgttccagtaggtggagcaactctaggacgaattttcaacgtgcttggagagcccattgataatttaggtcctgtagatactcgcacaacatctnccattcatagatctgcgcctgcctttatacaattagatacaaaattagccatttttgaaacaggaataaaagtagtagatcttttag

SEQ ID NO: 211887 - DNA, 500 bp, Glycine max
  unsure (1)..(500): unsure at all n locations
agttattccgatattcggacgcatcaacttgttatgaaatcacattgatagcctctactcgtgtcctagctcgtctaagagctagatttgcctcaattgtttgtctcttgccttccgccttattcaaattagcttctgctatttcaagagtttgctgtgcttcttgtggatcaatgtcactacccttttccgcatcatttactaaaacagngatctcattattgtttattctagcaaaaccgcccatcagagccatcgttaaccattggtctttaagaagacgtattctcaaaatacctatatctacggctgtggcaataggcgcatgatttggtaatactccaatttgtccgctattagtagataaaatgatttccttcacttccgaatcccaaacaattcgattgggggtcagtacacaaagatttaaagtcatttcttcaaattgctcttcatttctaagttcgtagctttcgcagnagcttcatcgatattaccta

SEQ ID NO: 211888 - DNA, 561 bp, Glycine max
gaaaaagatggaatgttccttatagaagttgaccgtgttcttaaacctggaggatactttgtgttaacctcacccacaagcaggtcacagggaagttcatcacaaatgaaaaggaggaacatgttgatgccaatggaacagctgacccagaaactctgttggactcctctagctcagcaagatgagacattcatctggcagaagactgctgatgttaattgctatgaatctcgaaagaagcatgctataccattatgcaaagaagatgatgatgctcagtcgtattatcggcctcttcaaccatgtataagtgggacctctagcaagcgctggattgcaatacagaatagatcctctggatacgaattgagttcagctgagcttaaaatgaatggtgttcagcctgaagatttttttgaagacttgcaattctggagatcagctctcaagaactatcggtctttgcttacaccactaagtatctctgatcatccaaagagaccaggagatgaagatccattacctccatgtaacatgatgcgtaatgtgatggacatgagt

SEQ ID NO: 211889 - DNA, 502 bp, Glycine max
ccgggatcagcattttcaacttctggtacttcaaccccattccctgatggaccccctactcttgaattcccctttcccaaaggggaaacaccaaggatcttgggttttgaacacttctccactcgaagatggggttcaagactaggatctgggtcgttgacgccagacggtgcatggcaaggttcaagactaggctcgggatcgttgactgctgatggtattgggcttgcttcacgattaggctctgggtgtgcgacacctgatggtctggggctggaatccaggttaggttctggctgtttgacacctgacagtgctgggccaatcaatcaaaacaacatctctgtgcaaaaccagatatctaaagaagcaactcttgcagatactgacaatggacattcaggtcatgcaacattgattgatcacagagtttcatttgaattaaccggggaagatgatgcccgctgtcttgctaataaaaccggggtattgcttcgaaaca

SEQ ID NO: 211890 - DNA, 580 bp, Glycine max
  unsure (1)..(580): unsure at all n locations
gcttttgtctttcagttcttgcactgttggctgttgcctctgttttcccttgcttgctttacttcagtctctctctgtctcactttacgttcgagcttcttgctacgatgaacgcacccatcattgaccccttacagggagattttccagaagtgatagaggagtatttggaacatgggtgtatgaaatgtattgcctttaatcgtcgtggtacacttcttgctgctgggtgcaacaacggaagttgcgttatctgggattttgaaacccggggcattgctaaagagctacgagataatgaatgttcatctccaataaccagtgtctgttggtcaaagtgtggtcatcgaattcttgtatctgctgctgacaagtcattgttgctgtgggatgttatgagtggtaagaggataacaagaatagttttacaacaaacccctctacaagctcgtcttcatccgggttcctctaaaccatctctttgcttggcatgccctctctcatgtcctccaatgattggtgacttgaacacaggagacacaacttcgcttaaagttctatcttggagatatnccataat

SEQ ID NO: 211891 - DNA, 511 bp, Glycine max
  unsure (1)..(511): unsure at all n locations
ctctaacagccaaagcatggcttctctctcttgctccgccaacgaccttgccccactcttcaacgacaccgccgccgccaactacctctgcgcccaattcgattccatttctagaaagctcgccgaaacaacctacgccgtcgacaacacctaccttctgttttcagcgtatcttgtcttcgccatgcagctcggcttcgccatgctctgcgccggctccgtcagagccaaaaacaccatgaacatcatgctcaccaacgtcctcgacgccgccgccggcggtctctcctactacctattcggctttgcattcgccttcggcggcccctccaacggcttcatcggccgccacttcttcggcctacgagattacccgatgggctcctctccctccggcgactacagcttcttcctctaccagtgggccttcgccatcgccgncgcaggaatcaccagcggctccatcgccgagagaacacagttcgtggcttaccttatctactcttctttc

SEQ ID NO: 211892 - DNA, 423 bp, Glycine max
agatatccgatgtgaatctatttgtttacccttcatagataatgtatatatggatattatccaacatgcctttttgtgaagtaaaaaaactaccctcgatccatgcctcaaaagggtagataataagtaaaaaatatcaatgaattcatgatgaaaccctcctgcgtgattttattataaattattgtgtcaataaagggatcaaggggttgcgggatcaaatggtcaagttcttttggacgtaaattgtaggattagaaacatgactattgttcgacaatgagcagataatgcattaattgctatttcatttattttattgattagtgtacctgaagtatgtgcttctcctgaaggatggtcgaataacaaaaatgatgtattttccggtacatcattatggattggataaatgtctctaga

SEQ ID NO: 211893 - DNA, 506 bp, Glycine max
aattcggctcgagctcgagccgaatcggctcgagcaaccagaacatcaccgacgacaccagaatccgcgccgccattcccaccatcaaacatctcatccaaaacggcgccaaagtcattctctccagccacttggggcggccgaagggtgtcactcccaaatacagcttggcgcctcttgtaccccggctttctgagctcattggtatccagattgtcaaggccgaggacagtattggtccagaagtagaaaagttggtggcttctcttccagatggaggtgttctccttctagaaaatgtgaggttttacaaggaggaagaaaagaatgaccccgagcatgcaaaaaagcttgcctctctggcagatctgtatgtgaatgatgcatttggtactgctcacagggcacatgcatcaacagagggtgtaactaaatacctgaagccatctgttgctggatttcttttgcaaaggaacttgattaccttgatggggcagtatcaaacc

SEQ ID NO: 211894 - DNA, 571 bp, Glycine max
  unsure (1)..(571): unsure at all n locations
gctattcagcatcaggtctctgaagattaaaaacttttgagagaaaaggtgctgcacctgagtggagatgctggaattgagcgtatggaatctgcattatctgaaacaagatctagatactttggagtgaaggatgacggaagtccagtggggtctccaatgattccatctatgcccgcaagcccaactccactttctactgctgccagctcaagtgaaagaaatatttctgatgagagtaatgatagggcaagccgagtagttcgctccctctttaaggaaacaaacacttcccctggagagtctagcttctctgcacccagaaccagttcagatagtcagcttggcacatcctctgagaagttgctagcagagaatgaggttcttgtaaatgaatttcttcacgagcatcactatagtgttactgatgaatttgatgtctctgatcacattcaaaacagtgttgaggggaaaataaagcagacaatggagaaggcctttngggatggtatcatggaaatctgtgaggtggaccatcccactatgacctgatngtcacttatgggagagg

SEQ ID NO: 211895 - DNA, 528 bp, Glycine max
  unsure (1)..(528): unsure at all n locations
caacatcaaggttcctctcattcttggtatctggggaggcaagggacaaggaaaatctttccaatgtgagcttgtctttgccaagatgggaatcaaccccatcatgatgagtgctggagagttggaaagtggaaatgcaggagagccagcaaaactgatcaggcagagataccgtgaagctgcagacatgatcaagaagggaaagatgtgcgctctcttcatcaacgatcttgatgcaggagctggtcgtcttggtggaaccacacaatacactgtgaacaaccagatggtgaatgccactctcatgaacattgctgataaccccaccaatgtgcagcttccaggtatgtacaacaaggaagagaacccccgtgttcccatcattgtcaccggtaacgatttctcaacactctatgcacctctcatccgtgatgggcgtatggagaagttctactgggcaccaacaagggaagaccgcattggtgtttgcaccggaattntccgcactgatggtattctgaacaggac

SEQ ID NO: 211896 - DNA, 516 bp, Glycine max
aggacaaaaggaaaaggcaccaaattcaatttaagtggacactgtaactcaaaattatagaggaagacggtccaatatgaaaaatatagtaagatcatctcaaacttagcatcttctctttgcacctaagacattgagaatgctaagaatgttacacgcaagttccatcacaacttctagcacttggattagtacaacaaccttcacgaacagaaatatttacttgccaagtttgctttgcctccaattcaagactggaagaaagttcccctctgaatagcatcctcgttagcatttccaagagcagcctcgttcaagtacttgtcagccaattggactctcttgacattctcttgttcttggacaagcatgttaccatacagcaagagcttctccagagtcatcttgggctgctcaaaggttggaggtccatcttttgagttcacaagcttcttcccaacactgtcaacaccaacaccagaaatccacttcctcacttcatcatcatatactctg

SEQ ID NO: 211897 - DNA, 522 bp, Glycine max
  unsure (1)..(522): unsure at all n locations
attgaagttaaaagccttagccttccctacaactccaaacacaaagacatcatcatccatggctgcctccgtctccactgtcggagctgtcaacagagctcttttgaacctgaatggttctggagctggagcttcagctcccagttcagccttctttgggaccagcttgaagaaggttattgcctcaagggtccccaacagcaaggtttccggtggaagcttcaagattgttgctgtagaagagaagaaagagattgaagagacccagcagaccgacaaggacagatggaagggtcttgcctatgatatctcagacgaccaacaagacatcacaagaggaaagggtttggttgactcccttttccaagctccacaggatgctggaactcactatgcagtcatgagctcctacgagtacctcagcactggacttcgccagtacttggacaacanaatggatggattctacattgctccagctnttatggacaagcttgntgntcacatctncaagaacttcat

SEQ ID NO: 211898 - DNA, 513 bp, Glycine max
tttcttttttttttttttttttttttttatttttaggacaaaaggaaaaggcaccaaattcaatttaagtggcccctgtaactcaaaattatacaggaagacgggtcaatttgaaaaatatagtaagatcatgtcaaacttagcatattttttttgcacctaagacatttagaatgctaagaatagtacacccaaggtccatcacaacttatagcacttggattagtacaacaacctttacgaacagaaatatttacttgccaagcttgctttgtcttcaattcaagaattgaaaaaagatcccctttgaatagcattcttggtagcatttcaagagcctgctcttataagtacttgccagaccattggactttcttgacattctcttgatcttggacaagcatggtaccatacaagcagagcttcttcaaagacatcttgggctgctcaaaggttggaggttcatcttttgagttcacaagcttctttccaacactgctacacccacaccag

SEQ ID NO: 211899 - DNA, 517 bp, Glycine max
  unsure (1)..(517): unsure at all n locations
ggnttgacgtcgcgacgcggtacgactgtcgccgggctactagctagctgccggccgtcgccctttttttttgtttttgtttatgcttttaaccaaacatactgatgattatagatgaatggactacatctctgttaataaaattttgagtcccttcgtgttataacaaatgaaatactattcatggaattctcacagacatgccatagaaaactgcatacactatatttatgccgaacagaccagagaatacgagactggtgtcctcaccctttacctagtgttgaaatgcaggcaaatgcaatcttcatcatcttgcataatgttttaatcttctaagcacaactcgcttatagaacctccgggtccggaagaataatgccaaaccaaccaaaaacgcgagaaaagcaacagctgccatgataaaaaatgacggcctgaaacagttgatgccaaagcacgaatgatcttctttatcggctagcttgacgtatatatatccaacaactttcacaga

SEQ ID NO: 211900 - DNA, 480 bp, Glycine max
gtttcttacaaggctctactctactgcttcaccttctgctctagaaaattcagtggtgatacatggcttcggctactctctctgtagccaaaccagcccttcaggcaaatgggaaaggcttctctgaattctctggcctccgcagctcatcaggcttccttcccttttctagaaaatcttcagaggatttccattctgtcattgccttccagacctatgcagttggaagcagtggaggatacaagaagggtgagacagaagcaaaactgaaggttgccataaacggatttggaaggattggaaggaacttcttgaggtgctggcacggtcgcaaagactcccctcttgatgtcattgccatcaacgacaccggtggcgtgaaacatgcctctcaccttctcaagtacgattcgatcctcggaaccttcgatgctgatgtcaagcctgttggcagcgacatcatctctgtccatggaaagg

SEQ ID NO: 211901 - DNA, 527 bp, Glycine max
cagggttagaattttattgcacaatgagaaggcagagaaaattgatggttctgtttctcagtacaagttttagaatgaaaaatgaagcaacaagtgtttgtagtggtagtagtagtagtagtaagcatacaaaactacaatggcgtggtacatacatataataattgaattaccaattcagaatttgatggctctcacttccacttgttggcaacaatgtcagccaaatccacaaccctttgggagtagccccactcattgtcataccaagcaatcaccttaaccatgtcatctcccatgaccatggtcaacgatgagtcaacggttgaggacacatcagtgcacctgaagtcaacagacacaagtggctcatcacacacagagaggattccctggagctcattgtctgcactctctctgaatgctgcattcacttcttctgcaaaggtcttctttgagacctgaacaacgaggtccaccactgagacgtttggtgttggcacacggagtgcaatgccattgagttt

SEQ ID NO: 211902 - DNA, 486 bp, Glycine max
  unsure (1)..(486): unsure at all n locations
tgcaaccccaccaccctatcaggcctcaccatcagagctggttcctatgctgatgagctcgttaagaccgcgaaaacagtggcttcaccagggaggggtattttggccatggatgagtccaatgctacctgtgggaagcgtttggcttcaattgggctagagaacactgaagctaaccgccaggcataccgtaccctcctcgtgacagttccaggccttggtcagtacatctctggtgccattctctttgaggaaacactctaccaatccacaactgatggcaggaagattgttgacgtgctgcttgagcaaaacattgttcctggtattaaagtcgacaagggtttggtgccccttgcaggttccaacgacgagtcatggtgccaaggtttggatggtctagcctctcgctcagctgcatactacgagcaaggtgcccgtatcgccaaatggcgtactggtgtgagcatccncaacggtacctct

SEQ ID NO: 211903 - DNA, 516 bp, Glycine max
aagtacacaactcatagcaaaaggtttattaagctgtaaaggtgcatttaaccataaacaaaaatagtctccaagactataaaaacattacattttagacaaattagtcttccacttcatcgtccgtcaacacctactgtaactgctggtgttgctgcctaacaagtatcatattcactgcaaacatcttagtaggagtagcttttgacgaacaactccttcttggcttcctcggattcaccctcaccagtgtacttcccaagctgagcgagtgagttggacttggcacggaatgcgagtgcatcttgtgctgccttcacgttctctgggcggcctccccatgtcttcaaggcagcgttttggagggctctggcatacaagaatgacacgtgccacgggtttggagattggttcatggcattcaaattgagggtagcttcaacctcagactgtccaccagacaaaaacataattccagggacagcagggggaattttcctgtgaaggagcttgagg

SEQ ID NO: 211904 - DNA, 544 bp, Glycine max
gagagagagaggtgtgaagttggtgaaggtttttgagaagaaagatggaacgaagtggcggaatggtaactgggtcgcatgaaaggaacgaacttgttagagttagacacggctctgatagtaggtctaaacccttgaagaatttgaatggtcagagttgtcaaatatgtggtgataccattggattaacggctactggagatgtctttgtcgcttgtcatgagtgtggcttcccactttgtcattcttgttacgagtatgagctgaaacatatgagccagtcttgtccccagtgcaagactgcattcacaagtcaccaaggttagcttgtgcataaatgttaaattttttggtctttccctcatcagaatttacgttgaacaagatgaatgtggatatcagagggtgctgaagtggatggagatgatgatgatgaagacgatgctgatgatctagataatgagatcaactatggccaaggaaacagttccaaggcggtgatgctatgggaagaagatgctgacctctcttcatcttctggaca

SEQ ID NO: 211905 - DNA, 399 bp, Glycine max
aaccataagtaatcaagtagtttaataattattaattaaaatgagactacaaattgtttgtatgataattacattactcattaacaatggaatatcagatcacactattttaggataaagcatgtcttaaggttcatcctttacttcattgtattccaaacgcacacctagaaagaatcatcaactaatgtccaatttttttttctctttctggctaatgtattctctctttctaaatctattccatctataagttttctctgccatcttttgacattatgttcactcagcattattggtaccattattgctccctctcctgcttgctgttgtgttcttcaatatttgtctaagcatttggttctcattctgcaaagtggaaagtctttctttgagctc

SEQ ID NO: 211906 - DNA, 523 bp, Glycine max
  unsure (1)..(523): unsure at all n locations
gcgcactcatcgtattaaaggaatgattaaaatggtggccacagttggtattcctgagaatacaggtatagcattggcctgtgctatgaatagttcttttagggggcgtgccagttctgatatttacaccatctgctctcaagactgtgaattatggaatcctgcttgcacaaaagcaatgactatgtcatttaatccaaacccgtgttctgatgcatggagtttggaatttctgaagcgtaccggatttcattgagatatcatttgtgtcactggatggactgccactccaatgcaggatgttcaggttacaattgattggtttatttcctctcaggaatgtgttcccaggacttattgtgttttaaatccacaaaatccttttgtgttgaataggtggatggggaaactgactttcccccagggcacttcccgaagtgttaagagaatgcctctttctatagggggaggagctggtgcanagatgctattctcatgaatatgccaaatgctgctctttcat

SEQ ID NO: 211907 - DNA, 547 bp, Glycine max
aaaataacacacacttcacacatcattacgacaattaaaagaggtgtggaaattttcaaatagacagagcatactcaacaagagggtcatgtctaatttcctttattgaattaaacaaacgaacaaacgaaagaaaacacaaattccagatcatgcagaggattccgcattttcagaagatctggcagtagcctgtggaacagaaaaagctggcataagagtattaccagcaatttcaaaatcttgagaaattcccaagagaatatcaaaaactgtagactgtttgggattgtcaataaggaaactcaagtgccatgaagtttgatttgcccactcagaactccacatttcaaaaccattattaggaccacatacctctattgggaagatcaattcccaggaatgtggttccgattttgtccacttacatgcatcgaaatgctctgtactgttgctgtttgttaaaaacacttgtaccaatgaggcccaatcactccttttgactgctgcattccagacatcacaatttaaccataaacagcctttt

SEQ ID NO: 211908 - DNA, 584 bp, Glycine max
  unsure (1)..(584): unsure at all n locations
gaagaggaccaggatacaaaagaatgtaaaaagctctttaaaaatatgaaattcttcataagcagggaggtaccgagggaatcaatgttttttgttattcctgcttttggtggcattgtttcctgggagggagaaggggcaccttttggggaatctgaccagagcatttctcatcagattgttgacagggaagcacaaggacatcggttcctctcaagagaatatgttcaaccacagtgggtatatgactgtgtgaatgcacggattattttgccaactgagaattatttggtgggaaggactcctccaccacacttgtcaccttttattaactacgatgaagaaggagcatacattcctgattatgcaaagaccattaaacacttgcaagctgctgccagaaaggaaatccttccacttcctggtgttgggaaggaagatctggaagatcctcaaaatcttctggttgaagtatcattgatcgagcagaggctaatgatgcagctcagagaaagcagaagatgatgatttggagcagcaataccgtgatgatttganaaaagaactttcaagtgttacatata

SEQ ID NO: 211909 - DNA, 535 bp, Glycine max
  unsure (1)..(535): unsure at all n locations
caaccacatgccatggcaacagcgtcaatgtgtatgagcttcaacctggcaacagcattcaagggtctctctttatcttcttcttcatcgttcttcggtggaagtagtggttctctccgcgcgggtcctgcctcggtggtgtcgctgccccggcgctgcccgctgaccatagagaacgcgcacaagaagggggcgggcagcaccaagaacggccgcgactcgcagggcaagcgcctcggagtcaagatttacggcgaccaggtcgccaagcccggctccatcatcgttcgccagcgcggaaccaagtttcatgcaggaaagaatgtggggcttggcaaagactataccattttctccttgattgatggagtcgtaaaatttgagaaatatggacctgacaggaaaaaggtgagtgtttaccctcgagaagtacagcctgagaaccccaacagctatagagccaggaagagagagtacttcanggtgaggcgtgaacgcataaaagctagaccaggagcaatacttagattcccac

SEQ ID NO: 211910 - DNA, 513 bp, Glycine max
  unsure (1)..(513): unsure at all n locations
gactttgggttgggtttcgtctcaactcaacaaacgtcgtcgttctcccatttccaatctttctccaatggcttcttctgcttccttaatcaactcgttgacttgctcttcgcctgcacccactcagcactgtttcgccttcacccgcaccaccgccaccgctaccgccacgtcactgagacaattcaacagccaccgtccgcccccactcaccacgaggatctcctcgtcgccttccaccgttgtctgcaaagctgtctccgttaagccccaaaccgaaaccgaaggtctcaacattgctgacgatgtcacacagctcatagggaaaacgccgatggtttacctcaacaatatcgtgaagggttctgtggccaatattgctgcgaagcttgagattatggagccctgttgtagtgtcaaggacaggattggttttagtatgataaatgatgctgagcagagaggagctataacacctgngaagagtatatnggtggaacctactagtgggaa

SEQ ID NO: 211911 - DNA, 190 bp, Glycine max
aggacgtccttttttttttttttttttttattttttttttttttttttttttttattattttatttttatttttttttaagggataaattttctttctataaaaaatataaaaaattttttaaaattgggttttattttttatatttaatatattttagaaatctatgaatatttcttttaatttttatt

SEQ ID NO: 211912 - DNA, 455 bp, Glycine max
aattcggctcgagcaaaaagaatgacagctattgaggaaatggcagggatggatgtcctatgcagtgacaaaactgggactctcaccttaaataagttgagtgttgacaggaacttgattgaggtgtttgctaagggtgttgagaaagagtatgttatccttcttgcagcaagagcttctaggactgaaaatcaagatgccatagatgctgcaattgttggcatgcttgctgacccaaaggaggcacgtagtggtgttagggaggtacatttacttccattcaattctgtagacaagaggactgcactgacctacattgattctgatggaaattggcatagagctagcaaaggggctcctgagcagataatcaccctttgcaactgcaaagaggatgtcagaagaaaggtccatgctgtaattgataagtttgctgagcgtggactttggtcttt

SEQ ID NO: 211913 - DNA, 526 bp, Glycine max
cacaggactcatttttttatgtaacttaaagacaaattgaacatggtctttcttcgtctttatatgtgattttttctcaaaaaagcacggttcttcttgaaacttgtccaagctccttaaactgtatagtgctgctgaatcgtgtcaatgtcaagccccttcagcttcaccactgactcgacatgtccctttagagtatgaagctccctaagccttgcaacttcagcacgtctcttggcttgttctgcaatctctgaaagctccctgtagctatttttgtcattgaaaaggttggaagtttccggaggctgaagaccgtgaagtgtcctctgtgcagccgcccattgagcttccctctcttctttaccatagtctttctttgtagtgaaggcagtcttgttctccaaaagattatcccaagccttcccacttagaatatagcggatagcaaatttgagtaaatcaagagggatataggttaccacactgtacagccagattacaccagcccaaccccatcccattc

SEQ ID NO: 211914 - DNA, 532 bp, Glycine max
  unsure (1)..(532): unsure at all n locations
tgagagaacaccaaatcaaacgcaactcgagatattaataagcttcttcttcgtcagttattaccattcgtggaagagaaaaagaaaaaagtaactaaaaaaataaactgtaataaagagtccaaaatgaaagccaaaacggtgaaaggaaattggagcttgaggacgaacaagctcagcttcccttacgtcttcctcgtctgcatcttcttcttcctcgctggattcttcggtttcactctcttctctcactctcagggcgatggagatggcttgaggccgaggcagaggctgcttgaaccggggaacgaggcggagtacaatttgatgcctgttagagatcttggcgatgattccattacatcgattccttttcaggttttgagctggagacctcgagcactatattttcctaattntgcaactgcagaacaatgtgaaaacattattgatgtggcaaaggatggcctcaaaccatcaaccttggcgttacgccagggagaaacagaggagaataccaagggaattagaa

SEQ ID NO: 211915 - DNA, 458 bp, Glycine max
ggaagggtaatgactaatgggggtctcaatttaatggtcagctagtagtgcgttcatgctatcaaattttgtactagggttacataatttcagcatctaattgaatttagcccttgattattcatctgaccatataaaaataaactgtttggaagatgacgaccttgcttatgaaacaaaattgctacgatggatgtcggaattcgaatctcgattgcgggggccaatcatttaatcatcctgttcttgatctcttatccactttggagccacccacttctccccttttatcacggggcagctcccatggagtgatgtcggatcaattgtcccattagggagcaatgaataaaatagaagaccctccccttggcgtggctttacttttaaaccaatgcaggcctcatacccatagttaccatccatgttcaagccattctcaaatggaaacatagttt

SEQ ID NO: 211916 - DNA, 546 bp, Glycine max
catcattgtaatgctagcaactttggacttcaggtaaaatgaaattatagccctcaagcttgcacatttacttaccctttaaaaaagtatacaatgctttcttataatagaagtaatttgtatcaacacactgaacttgtgtagggatgtgtcttcacaaaggatgtcaacaaagcaataatgatcagtgatgcaatggaaacgggaacagttcagataaattctgccccagctcgtgggccagatcattttccctttcagggtataaaggacagtggcattggatctcaagggattaccaacagcataaacatgatgaccaaggtcaaaacgactgtgatcaacttacccagcccttcctatactatgggctagtagtgtaatacacacatgcatgggggaacatcattatatagcatgttccataaatcatagtgaacgtacaaccgtgtgagttcagcattgcattgtcttttgcagctgggaatcacagagatgaataacgagtttgattgatatgtcgcatagctactttatatgtgacta

SEQ ID NO: 211917 - DNA, 512 bp, Glycine max
gaagccaatgtttttccccctcatttcattgatttgacattcaatttaattggaacacaatgatattccttaatgataaggcacaagataaaattcagtttcatatcatcctaaatacgagtacaacaagtagtcacatatgaagtagctatgcgacatatcaatcaaactcgttattcatctctgtgattcccagctgcaaaagacaatgcaatgctgaactcacacggttgtacgttcactatgatttatggaacatgctatataatgatgttcccccatgcatgtgtgtattacactactagcccatagtataggaagggctgggtaagttgatcacagtcgttttgaccttggtcatcatgtttatgctgttggtaatcccttgagatccaatgccactgtcctttataccctgaaagggaaaatgatctggcccacgagctggggcagaatttatctgaactgttcccgttttcattgcatcactgatcattattgctttgttgaca

SEQ ID NO: 211918 - DNA, 523 bp, Glycine max
aatgcctccatatacaaccaccttaaaactctcacccgcagaccccatgtcgcaggttccaaagccaacgctgaagctgcctcatacgttgtctcagtcttcacctcctcatacataccatcacacatagtttcctacgaggtttctctcacgtaccctttgtcacgttcgttggttctaataacgaacccttctacaaccttcactctccaccaagaaacctacgagggtgatccttatgctgacgtggcagatgaggttgtccccactttccacgcgtatgccaagtcaggcactgtggctgctcctgtgtgttatgtgaactatggaagagtggaggactatttgactctgaaggataaaaatggtgtgaatgtttcaggcactgttgtgttggcaaggcatgggaagatatatagaggggacattgtgaagaatgcttatgaggaaggtgctgttggcgtggtgatatattcagataggaaggactatggtggtgaggaaaaagtggttcctgatgaga

SEQ ID NO: 211919 - DNA, 557 bp, Glycine max
  unsure (1)..(557): unsure at all n locations
gaaaaaaatatattttgcaacttgttattcgaattgcgaagtgaatttgacagatgagagaagcggggaaaaacaaaatcctaaatctcttcttgagttattgagatttatgaatcatcacacatatatacatatttattcttacggagatataatttaccatgaatcgaaatatacaactaaattgatattcatgatagtagaccgaataaaactagcgaggcttgtttgatgactcttgagactctccaaacttcgtgctgtacacgatgccacgattctgcagtatgtagatttttggccattttaacagcatcatcgattccagggaaagattgagagccgtagtcattatgttttgatggtccataaatcaaatgcttataccatgacattccaaagaggccatctctgtcagtgaatgcacgctcagccatcatcaatctatcattcagctctctcactctcaagtggnccttcttcccttgtatccaacctttaccagcttctatntcctttctctggctatctatcttgattgctgctttctcaagccc

SEQ ID NO: 211920 - DNA, 547 bp, Glycine max
  unsure (1)..(547): unsure at all n locations
gcgagaaaaagaagaaaatgatggtgcagtaccactactaccctttcccttctctggcgtatggttgcagctactgttatgcttatgcgactactaaattaaaacctactcactcactctctctaacactctccaaccaccgtcgcatttctgcgtcacaacctcactcttccaccttctccatcatcaccaacctcttcttcttccaaaaccctaatttcatcacggggaacactctcttcctcaggatgcagagattttgctcagtaagtggcttaagtaagaacaaagcactggtggagaggttgcagcgctatggagtgatcacatcaagtaaggtggctgaagtgatggagacagttgatagagccttgtttgtaccagatggagctgcaccttatgatgacagccccatggccatagggtacaatgccactatctctgcgccgcatatgcatgccatgtgtcttcagttgcttgaggagaatttgcagcctgngatgcatgctctggatgttggctctggaacgggtacctgactgcatgc

SEQ ID NO: 211921 - DNA, 427 bp, Glycine max
acaaaaaatgcccattatgaaaacgaattaattcactaagcagaatatgaacttaatactatacaaattctaccagcataggagggcattcatggtccaactactgatatttgggactggaaacatgaaccttacaaaattcagggaactttatttatacaacttttaacggggtgggcacaagcaagatccaaacactaacatttgaagcattagccttccaaaattcaggattttggctttattttaataacctcgcagaagagcttctcgactggggagggggacataacgaacagatgtttcaggggggacactgatagaaccatcaaaatttttatccaccacctttaaatcttggaatatgttttcgacaggaataaccattctccctccagggttaaactggtcaataagaggttgggga

SEQ ID NO: 211922 - DNA, 429 bp, Glycine max
cctcggggaattccaattccacattttcaagatttaaggaggcacaaatgttcctatatgaattggaattatctgttctcttattaggcctatcctgaagccaacggaaatgagatcggaattactcggggaattccaattccacattttcaagaggtaaggaggcaaaaatgttcatatatgaattggcattatcagttcgcttattaggcctatcctgaagtcaaaggaaatgagatcggaattcctcggcgaattccaactccacattttcaagaaatcaggcggcacacctgttcatatatgaatggcaatcatttgacgtcttattaggcctatgctgaagcctaaggaaatgagatcggaatacctcggaggtaccgagctcgaaatgcctataatgagttgtctcaggtgctgccttatgtg

SEQ ID NO: 211923 - DNA, 468 bp, Glycine max
tggcctaccgatgctgaaacgctaattacgaactgattcgacttagcctactggataggcctcgaccgaaaacaaattattcctattcattttgaacattcatgcctccttatttcttgaaaatggggaattggaatcccccaatggatttcgaactcatttgctttgccttcatgatgggcctactaagaaaacaaataaatccgcctcatatgtgagcattttggcctccttattaatcgaaaatgcggcatgggatttcccagatggattcccatcttgtggactaaggctactagccttgtcccattagataacaaaaacagccaactcatatatggacatttttgcctacccatcccttgaaaacgtggaatagcaattgcccttagggaaactctttagtaaacctccttgcattgccgcttgggcctccttcacgagggactaccccagcggccttttaca

SEQ ID NO: 211924 - DNA, 580 bp, Glycine max
  unsure (1)..(580): unsure at all n locations
ctcttgtcctttttcctcgcttaagatcacccaagagagaacctaagacacacaacacagactcacacaaagagttacaagagaaatcatcatggcatcagcagcatctgggtttgtgttgtcacttaatgttgcagctgccaccacaaactcaagggtggtcatgttcaacaccaagaacaacacttctaggtttgttgtaaaggcttcagatgagcctgcagcggcggcacccgccaccgccacacccccagctgaagctgaagctaaaccaaagccaccacctattggccccaagagaggtgctaaggtgaagattcttaggaaggaatcttactggtacaaaggcaccggttcagtggttgctgttgatcaggaccccaacactcgctaccctgttgtggttcgattcaacaaagtcaactatgccaatgtatcaacaaacaactatgctttggatgagatcgtggaagtcgaatgaatccaacttaatngtaattntgatacttgtcatgctatcgcagttactactagcctaaggatttttcatgtcacataanaagaatcctgatattctctc

SEQ ID NO: 211925 - DNA, 407 bp, Glycine max
gcctaataactgatttgaataaaataagatgtctttagtcgaagaataagattatgagcaactgcacacaggatatagttcatagagaatagagatcaaaggggtcgataacagagagaatatacagattctttttttgtgacatgaaaaatccttaggctagtagtaactgcgatagcatgacaagtatcaaaattacaattaagttggattcattcgacttccacgatctcatccaaagcatagttgtttgttgatacattggcatagttgactttgttgaatcgaaccacaacagggtagcgagtgttggggtcctgatcaacagcaaccactgaaccggtgcctttgtaccaagaagattccttcctaagaatctttaccttagcacctctcttggggccaat

SEQ ID NO: 211926 - DNA, 529 bp, Glycine max
gtttgttgtaggaagaggaatcttgagaaatggcaggggacagcaagagcaagattctgttcatcggagggactggttacatcggaaaattcatcgtggaagccagcgccaaagctggccacccaactttccttttggtgagggagtccactctctccaaccccgcaaaatcacccctcatcgacaatttcaaaggcctcggtgtcaatcttgttttaggagatctatacgatcaccaaagtttggtgagtgctataaagcaggtcgatgtggtaatttctactgtaggacacctgcagctagctgatcaagataagatcatttctgcaattaaagaagcaggaaatgttaagaagttctatccatctgagtttggaaatgatgtggaccggactcatgcagttgaaccagccaagtctgcatttgcaacaaaggccaaagttcgccgagctattgaggctgaaggaattcccttcacttatgtgtcaagcaacttctttgctggttacttcctgcccaacttgtcaca

SEQ ID NO: 211927 - DNA, 557 bp, Glycine max
gaacaagtagttgagaactaagaaggagaagcaaatggcttcctcaatgatctcttgcccagctgttaccactgtcaaccgtgccggtgccggcatggttgctccattcactggcctcaagtccatggctggcttccccaccagaaagaccaacaatgacattacctccattgctagcaacggtggaagagtgcaatgcatgcaggtgtggccaccagttggcaagaagaagtttgagactctttcctacctgccagaccttgatgatgcacaattggcaaaggaagtagaataccttcttaggaagggatggattccttgcttggaattcgagttggagcacggtttcgtgtaccgtgagcacaacaggtcaccaggatactacgatggacgctactggaccatgtggaagctgcctatgtttggttgcactgatgcttctcaggtgttgaaggagcttcaagaggctaagactgcataccccaacggcttcatccgtatcatcggattcgacaacgtttcgcaagtgcagtgcatcagcttcatcgcctacaagc

SEQ ID NO: 211928 - DNA, 612 bp, Glycine max
  unsure (1)..(612): unsure at all n locations
gacattgcattcaatggggaaaacccaaggcctggagtcatcattaacaaaccagatggaggtgatgtttataaaggagttccaaaggattacaccggcgaagatgttactgttgataacttttttgctgctttacttggaaataagtcagcactgactggtggcagtgggaaggttgtggacagtggtcctgatgatcatatatttgtatactatactgaccatggaggtcctggggtgctcgggatgcctgctggtccttacttatacgcggatgatctgattgaagtcttgaagaaaaagcatgcttctggaacatataaaaacctagtattttatctggaggcatgtgaatctgggagtatctttgaaggtcttcttcctgaagatatcaatatttatgcaaccactgcttccaatgcagaagaaagtagttggggaacatattgccccggngagtatcctagtccttccccagaatatacaacctgtttgggtgacttgtacagntgtgcttggatggaagacagtgacagacaccatttgcgaacagaaactctgcaccatacatataaattggttaaagagaggactatatctggagaatcatac

SEQ ID NO: 211929 - DNA, 558 bp, Glycine max
  unsure (1)..(558): unsure at all n locations
gaataaaaacacacatcatattactatgtgttgtcatacatgcattgtaatgagtggatattccaaagcaattggtccctttatccctccttaatccttatgccgtaaatggcaccatcccttgtaaattgtaattgcttcttcagaaatagaattatacaaaggtagttgcaatatctatttgccaaactataaatgtaaagacccttcttcccaatcctagtagtgtcccaattgtatttacaaaggtgggacaagatatgtatatacaagtacaaccatgtaacataatgtaacaataatcatactttggtctttactagtgcacattacagggagttattatgcactgaaacccctttgcagagaactccagggattggaaggaatactgacacaagcttgtgctgaagcctcagccatttgttcattctttatccctacattgcagatgtttgcaaaggacctcatgtgtttcatcccgtattgagacaaggatccacaatgtgtctcaaaagtcctcaccatggttntcaggcagtgccagtcatcaacaag

SEQ ID NO: 211930 - DNA, 526 bp, Glycine max
tagacttcctgataacccaattatatttgcatctgatagctttcttgaacttacggaatatacacgagaagaaattttgggacgaaattgtcggtttcttcaaggaccagaaacagatcaggcaactgtttccaggataagagatgctatcagagaacaaagggaaatcactgtacagttgataaactatactaagagtggaaaaaagttctggaatttgtttcacttgcaacctatgcgtgaccaaaagggtgaacttcaatacttcattggtgttcaactagatggaagtgatcatgtagaacccttaaaaaaccgcctgtctgagacaactgagcaacaaagtgctaagttggtgaaagccacagcagataatgttgatgaagctgtccgagaacttccggatgccaacttggtaagagaccagaagatttgtgggcaatttattcccaacccgtcttttcacgacctcacaagaaggaaaatccttcttggatagcgatacataaggtagctgcaagaggtg

SEQ ID NO: 211931 - DNA, 517 bp, Glycine max
gagcatataactaggatgcttgtttctatcggaaaatgactttattcaatgtacattctacttttctgctaatcctacataacttagaatttgtttgaagttggctattggcagatcacatgatggtagtattggaccataaccaaatcaacagacactattacacttgaatgacttagaccccgtgatcgttgcagcatgaaatcagataagatgctgaccaaagatcctgagtgaacagtgcaaaccgtcaaaaaatatccatatcaatagagctaactagcactccatcatcttcccactttatatcctttgccacgggatcgtttcctatcaatttaagaggaacatctaatgggggtcgagtcatgttgcggataagaggccaattgattccacggaagaaaggatgttgcttgatttcattggcaccagtggttgaacctatacgacttgttgggtctctttggagtagtgcattaatcaactgcctggctgcaagactagccgggatgct

SEQ ID NO: 211932 - DNA, 548 bp, Glycine max
  unsure (1)..(548): unsure at all n locations
gatcaattaatttccaatggccgatcagctcaccgacgaacagatctctgagttcaaggaagcctttagcctcttcgacaaggacggcgatggttgtattaccaccaaggaacttgggactgtgatgcggtcgcttgggcagaacccaactgaggctgagctgcaggacatgataaatgaggttgatgctgatgggaatggtaccattgatttcccagaattcctcaatctcatggcgcgcaagatgaaagacactgattcagaggaagagctgaaggaggctttccgtgtgtttgacaaggatcagaatggtttcatctctgccgcagagctccgtcacgtaatgaccaatctcggtgagaagctgaccgatgaggaagtcgatgagatgattcgtgaggctgacgttgatggtgttgggcagatcaactacgaggagtttgtcatagtcatgatggccaagtgaggaccaatcaaccataacanaaacatttgaaagcacatgaacagaaaaggacagggcagataagtttgatgaaaatctattt

SEQ ID NO: 211933 - DNA, 512 bp, Glycine max
aacagtataagtcacccatatgtaaaagcactaattgcaaccaattgttccagtttcatagtagtaacccaaaaaacatgaaaagtgaagtacaaatgcatggtgagacacagctaatccaagctactaaaacaagggacagagcaaacaagtagaaaatactaatgagcaataccaataaataaaagcaaacacaaatccgaccaacaaaaactaatgaccccaaatgaagattgtcctaatgaaaatagaattttcatcaaaacttatctgccctgtcccttttctgttcatgtgctttcaaatgtttttgttatggttgattggtcctcacttggccatcatgactttgacaaactcctcgtagttgatctgcccaacaccatcaacgtcagcctcacgaatcatctcatcgacttcctcatcggtcagcttcttaccgagattggtcattacgtggcggagctctgcggcagagatgaaaccattctgatccttgtcaaacacacgga

SEQ ID NO: 211934 - DNA, 499 bp, Glycine max
aagtccgaagaaaatgaacagcctttgttggtaacggagcctaaagaagaaaagaaggatgaccccaacgcgatttccaacttcaggatttcggaaccattgagggagaaattgaaggagaagggtatcgaatcgctgtttcccattcaggccatgaccttcgacaccgttctcgatggttctgatttggttggccgtgctcgcactggtcagggtaaaactctggcatttgtgttgcccatattagagtctttaataaatggtccagcaaaatctgcgagaaagactggctacgggaggactccgagtgttctcgtgcttgtacctactagggaattggcttgccaggtgcatgctgattttgaagtgtatggtggggcgatgggatcgagttcatgttgattatactgtggagctccatatcaaggtcaagagcttaagctgaagagaggtgctgatattgtcattggcacaccaggccgtgtgaaggatcatattg

SEQ ID NO: 211935 - DNA, 555 bp, Glycine max
acgaaagcattcaaatgcagagtatgtattcatgatgtaaatacaacacaataacaagtcatccataagcatataggatttctgagaggtacatgtaaagccagaagaaaaatatacaagatactcttcatccacaatgtctagtaaaaggaccctaaaaaaataaaatatgacatgatagggttttaactgatgatgaatctaaatttaacaggacattcatgaaaccccactaaaacatatttgtcagaatctagtgccacttcaatctttctttttatctttcaaaggtcctctgggtatcttgctcaacaccttcgcatcaaacactgcatattgcttcttaatctcggcaattgccttcccaccaaaagagtctacatgatcttcatatttctcataaagcacaggcacagtgtgcagcaaaacaaaagctatgtagaacagggtcaagaagttggcccagctacccaaaatagagaaaacccataatccagcaatcactgataagaacttcttgagatcccttccagatgcaatatcccttaacaacgc

SEQ ID NO: 211936 - DNA, 426 bp, Glycine max
  unsure (1)..(426): unsure at all n locations
atgccttgcggcggtagtttaatttccaacaaagaatatatgtacagccctttcattacaaataaaataaatctatcacatacaacaattaagtacacgaatgataatcctattcattttgaaaggggccgggggcgccggacgcacaagcgcttagaagcacttgcggaggacaatagaaggtccagactcgtcgtactcctccttagagatccacatctgtaggaaggtagagagggaggcaagaatggatccaccaatccacacggagtatttgcgctcagggggggcaatgatcttgatcttcatggttgaaggagcaagggcagtcaactccttttgcatacgatcagcaattccggggaacatggntgcacctccagagagaacgacgtttccgtacaagtccttacggatatcaacatc

SEQ ID NO: 211937 - DNA, 567 bp, Glycine max
  unsure (1)..(567): unsure at all n locations
gagaagtttgacaacctctgcaaggtgatcaaggatgttttgggtgacaaggttgagaaggttgtggtctctgaccgcgttgtagattcaccatgctgtcttgtgactggcgaatacggttggaccgcaaacatggaaaggataatgaaggcccaagctctaagggacaacagcatggcagggtacatgtcaagcaagaagaccatggagatcaaccctgagaacccaatcatggaggagctcaggaagcgtgctgatgcagacaagaatgacaaatccgtgaaggaccttgttctgttgctgtttgagactgctcttctcacttctggtttcagccttgacgagcccaacacttttggaaacaggatccacagaatgttgaagcttggactgagcattgacgaggatgcaggtgaagctgatgctgaaatgcccccactggaggaagccgangctgatgctgagggcagcaagatggaggaggttgattaaaattaaatatgatgcgtttcttggtagtagcgtctctaatggcctttttggctatgtntntttctccttttttat

SEQ ID NO: 211938 - DNA, 498 bp, Glycine max
tttttagtaggagtcctgggaagactggttctcactttgaccccagcagtgacttgttcgttcccaatgaaagaaaagatgttattacttccacagcttgttgggctgctatgttgggattgcttgttggattggggtttgtaatgggtccaattcaacttcttaagctttatggtgttccctatgttatattcgttatgtggttggatttggtgacttatttgcaccatcatggccatgaagacaaattaccttggtaccgtggaaaggaatggagctacctcatgggtggtctaactactcttgatcgtgattatggatggatcaataacattcaccatgacattggcactcatgtcattcatcacctatttactcaaattccacactatcacttagttgaggctactgacgctgctaagccagtgtttggaaaatattatagagaaccaaagatatcagcagcacctcttccttttcaccttattggggaaataa

SEQ ID NO: 211939 - DNA, 577 bp, Glycine max
cctactaaacaaaatctattttaaatttctatttaatcgagatctttcagttttgatcaaacacattgacaatttgatcatgcctcaaggtatcacttcaatataatcaatttatattgaggaattcactattcaagaaagataaaactacatataacctaaacattctatcatgcagttacaattgaaattatatgatccatccatccctttattaatgaaggattcaactccaagtaagtgcagtaactttcggagaaactcaagacaatctttaaagcaataagaattgtgtataagcctctcttgtctatatagaaaagaattttaatattcactctaatttggaagagccattaatcttagagtcggtttgatagtacacaacatcccccgtgtcactaacaaaatggtcagtcttgaagctccttattatttccccaataaggtgaaaaggaagaggtgctgctgatttctttggttctctataatattttccaaacactggcttagcagcctcagtagcctcaactaagtgatagtgtggaatttgaggaaataggtgatgaatgacatg

SEQ ID NO: 211940 - DNA, 495 bp, Glycine max
gggatataggtggtggttttgatatcttcaataaaaaagggaaaaaggtacgttttgttcgttggggatttcctggaaaaaatcgtcgtattattctcgaaatacctatgaacgagcttcactccatcagaataataacagaagttaaagaagagggtattatcactcgtaccagtacttttgagagtatcgtttatctggaaaccatctaacaggggtttattcccttgactcgtattgaagataattcgaatgggacacaaattgcacataaagctggcgaattatctgtatttttgggtgtaccacttttttactgatgagaattgaacttaatttgaaattaaattgcacaaaaagcttcagaattggcctattgattgtgtgtaccttttgaaatattacgaaaaaaaaaaaacgttcttttttggcaaaatatttccattcttatagatgaggcgttatctgattccgaaatccgattattatattcct

SEQ ID NO: 211941 - DNA, 606 bp, Glycine max
acaagttaattgaagaaattcaatttgtttaatcaaattccccaaccccctctctttttatttgttcactacgtattatatgcaataaaatattatatggcagaaatattctaagttggaaaaaatagaaactaagatataggatttttcaggaaggggttaaaaaagattattttattgatatttttagaatatttctatttcgacacaaacaagaaggaataggaatcggactctaggaaaagacaaaaaatcccccctagagtaccttttccatattttaattgattttgtttcaaattatctatctatatagatatctattttatgtttagtatcgaatccaattttattgtattttacaatcgaaatttctataatagaactctctattatagaaaaatgaaatctgaaaaaaacagtgtcataaccataatattcgaatttattggggggttgaaaaaacaaagtcaaatagtcttcctgacaatatccatactcgagtttatttgtattacgttacaagtaactctttaaatatagtataaaaagactatacagaaccaaagatcttttcataatatattattctatatactgatatat

SEQ ID NO: 211942 - DNA, 553 bp, Glycine max
  unsure (1)..(553): unsure at all n locations
atttgatagcttgcttaggtggtgaggagaaaacaattcaatttatggagaacatgagcctaacagaatccagcattcctcttctgaaagaagcctatgcatatggagttgtagagcacccatttcccttaaatatcttcttggaggattggaatctaggccctgagttctatcaatctgtgaaaattggcattgtacaatatatgatactgaagatgatctgtgcattactggcaataattcttgaatcttttggggtttatggagaggggaagtttgaatggaaatatgggtatccatacttggcactagttcttaactttagtcagacatgggccctatattgccttgtacagttctatgctgttattaaagataagttgaaacccatcaaaccattggcaaagtttctaacttttaagtcaattgtcttcctgacatggtggcanagtgtggcttgtgcatttctttnttatatgggagcctttagggggtcattggctcangagttgaatacacgtatacaagactacatcatctgtatagaaatggg

SEQ ID NO: 211943 - DNA, 535 bp, Glycine max
  unsure (1)..(535): unsure at all n locations
gtcccaacattgataattcagatatggattttaaaaaaaaaaatcaggccaattaaaacaaatagatcacgaattgtccaaaacacaagtgcccaacctataatcatccttcaacatctacttccagaagcactacgcatgatgcatactcctcgatatacctatgcgggtattattctatgtgtgtctcaatatactttccttacctcacgttatatatacacttatatttcagcaaattcactaaaatataacgatgtattttaaaaacccacatcgattcatgtgtgactatatacattgaaatgttaaggaaaacactatcttctacttctggtggttgcttgcttctttggattggaaatggtgtcgctttccactggacatgccactatcactgacacttccttcacccataatatcatgaacatcagaaaattctgacattcgtgatctcaagggaacaagatcacaatcatccttggtgtttcgtgtccgctgctcctcatggcgtttcacattntctgatatctga

SEQ ID NO: 211944 - DNA, 599 bp, Glycine max
caaaagttcagggacttgagaatgcaacaaaagacggggagactcaatagttttccaaaaagagatgccgctatattgaagagacatttagctcatttggaaacatatcttggcggcattaaatatatgacggggttacctgatattgtaataatcgtcgatcaacaagaagaatatacggctcttcgagaatgtataactttggaaattccaacaatttgtttaatcgatacaaattgtgacccggacctcgccgatatttcaattccagctaatgatgatgctatagcctcaattcgattaattcttaacaaattagtatttgcaatttgtgagggccgttctagctatatacgaaattcttgattaataataaaataaaaaaattattggatttagttggaggggttcatagatttagggaatcgattactatactagtaataaattgtacaaaaaataaaaatataaataatataaatataaaaagaacaaacacaaattttatgtgattagtcgcggtatttaaaataaaaaatgaaagtagacaaataaaaaaggaaaggagatgtttgaataaaaataattccccttcaagt

SEQ ID NO: 211945 - DNA, 529 bp, Glycine max; identical to SEQ ID NO: 205930

SEQ ID NO: 211946 - DNA, 557 bp, Glycine max
aagaaaataaacaaataagacgtatcattttatgtatagtagtggggaattatgggacaaaaaataaatccgcttggtttcagacttggtacaactcaaagtcatgattctatttggtttgctcaaccaacaaattattccgagaatatacaagaagataaaaaaatacgagattgtatcaaaaattatatacaaaaaaatataagaatatcctctggtgttgagggaattggacagataaagattcaaaaaagaattgatcttattcaagttataatatatatgggatttccaaagtttttaatagagggtaagtctcaaaaaatcgaagaattacagacgaatatgcaaaaaaaactgaattgtgtgaatcgaaaactaaacattgctattgtaaaagttgcaaatgcttataaacaccctaatattattgcagaatttatagctggacaattaaagaatagagtttcgtttcgtaaagcaatgaaaaaagctattgaattaacttgacaggcgggtacaaaaggagttcaagtacaaattgcatgacgtatcga

SEQ ID NO: 211947 - DNA, 468 bp, Glycine max
aaaataaagcttcaatgatcagcacatagccatcatttgtaaatatccaggatccagcattaaaaatgtatgagctgtgaccaaatagaaaattcctttccaatcatcagattagtatccaaagaaaaaaaaaccatgttaaaaaaggaaattctgattgaaagtacaagcactggccactcagtcatgtaccagcattgggcagggctgccataaaggaattgtaagaagactcaagatcaaagtgaagctgccgcgcctgttgttcagtcaactcatcagctgcacccatctaggataacctcgcaatccactccttcattttagttttcccctcaaaatcaggtggcaggatagtcaacttattgagagaagcataaaggtccgagagcaacgggtgcacctgatccacagccaccatgttaagtttcaaagaatccatagaagtaataaaattctggacgcact

SEQ ID NO: 211948 - DNA, 446 bp, Glycine max
atgcaattgcatgtacattagtggaaaaggtaatacgaaatatatttattagaatatacatatttttctttatttgcacagaactggattaacatctttgtttttccactctatcaaatgttgaaattcgactagaaaggatatcagaaattttctaagagctggctttggctctctttactggggcctgaagggaatttagataaatggcatcctttttgtccagtccatcaaacagataactatacggtggcattaggatgtatctcccagttccaggagtgacctttagttcattattttcccaaacaactcttcctcccacaatagtcacttcaatttttccctttcctcttcttccctcatagacatttgtgtccagtctggagtggtgggactttgcactcatctcaaagctcgaatttggattaaggatgataatatct

SEQ ID NO: 211949 - DNA, 420 bp, Glycine max
tgaccctttgagcttttccggcactatcaacagatggatcacacgtgcccggtacccagaagctcgaaacgattgaaattggctgagataaagcatgccaagattgctatgttggccatgctgattttctactttgaagctggtcaagggaagaccccccttggtgctctcggcttgtaaactaaacatttcatgtagataattgaattgagaggctagacagttgcaaatcaacctttgtcccgtttgtgttacttcatgacaaattcaaattctatgctctattattggatgcattcactttatgtctgtactctaatgtagccatcgtataaatacttgcatttttacttttctttcccaaaccaggagtagttgaagtcatatggtagacttgaaaaatattattatctgtgtgcc

SEQ ID NO: 211950 - DNA, 418 bp, Glycine max
ggcacacagataataatatttttcaagtctaccatatgacttcaactactcctggtttgggaaagaaaagtaaaaatgcaagtatttatacgatggctacattagagtacagacataaagtgaatgcatccaataatagagcatagaatttgaatttgtcatgaagtaacacaaacgggacaaaggttgatttgcaactgtctagcctctcaattcaattatctacatgaaatgtttagtttacaagccgagagcaccaaggggggtcttcccttgaccagcctcaaagtagaaaatcagcatggccaacatagcaatcctggcatgctttatctcagccaatttcaatctttcgagcttctcggtatccggaatgtaaactccatccttgatagtgccggccaagctcaaagggtca

SEQ ID NO: 211951 - DNA, 488 bp, Glycine max
ccttcaaacacaaggttcccatccaaggcctctcactctttcccaacccaatgcgccttaaagagacttgaggtgacagaattctctgggcttagatccacttcatgtgtcacatatgctaacagtgctagagaatcttccttttttgatcttgtagcttcccaactcactcccaagaccaatggatcaactcctgtgaggggagagacagtggccaagttgaaggtggcaatcaatggtttcggacgcattggtagaaacttccttcgctgctggcacggccgaaaagactcaccccttgaagtcgttgttgtcaacgacagtggtggtgtcaagaatgcttcgcacctgctgaaatatgattctatgctgggaacctttaaggcagatgtgaaaatactagacaatgaaaccatcactgttgatggtaagtccatcaaggttgtttcaagcagggaccctctaaagcttccatgggctgagcttgg

SEQ ID NO: 211952 - DNA, 583 bp, Glycine max
  unsure (1)..(583): unsure at all n locations
atgattaaaagattcgaagaattgcaaatcagttacaagaattcagaaattcaatatcaatcaatatatgggtgatattcattcagtcacgccaaaacttattattggctgcaaataaatataaactttgaaaatctctcctcagatagactgtctgaacaatttccttctttttcacatgatacgttagaaaaggagctctcctctattcataaactttgcattcctcatcagcagggtttgtctcgcagaaatcctccaatgggtctccactccccgctttaggtgcccctggccacttgcttgctactagatgtgccaaatcgaccactctttggctgtaaccccattcattgtcataccaagcaaccactttaaccatatcatctcccatgaccatagtcaaggaggagtcaatagtagaggaaacatcagagcagcggaagtcgatagacacaagtggaacatcacacacgttcaatacacctttgagcggcccctcagctgcctttctgaatgctgcattcacatcttcagcagtaagacccttcttctcaacattcacaacagggtnncacactga

SEQ ID NO: 211953 - DNA, 581 bp, Glycine max
gggacattgttgacaaatataaggtgacaatattctacactgctccgacattggtgcggtctctcatgcgtgatggtgatgcgtttgttactcgctactcaaggaaatctttacgagtcctaggaagtgtaggtgagcccataaatccaagtgcatggaggtggttttacaatgtagttggagattcaaggtgccctatctctgacacttggtggcaaacagaaacaggtggcttcatgataactccactaccaggtgcttggccccagaaacctggttctgcaactttccctttctttggagttcagcctgtcatactggatgagaaaggtgttgaaatagaaggggagtgcaatggatatttgtgtgtgaagaaatcatggcctggggcattcagaactctgtatggtgatcatgaaagatatgaaacaacatatttcaagccatttgccggatactatttcagtggtgatggttgcagcagggataaagatggataccatcggctcattggaagaagtgacgatgtcatcaatgttagtgggcatcgaatcggcactgcagaagtggaatcagcttta

SEQ ID NO: 211954 - DNA, 528 bp, Glycine max
atcacatgcactaagattcccataaaaatacagatacacaaggcaaaatttgtcctcacttctcattggctattatacctttacaaggaatactaacaacactttctctaatatattctttctaattcactctactaaagtttaaaatttattagaaactacaaaatcacgaataaggatcattaaataagtagtgatgtccataaattattgtaatttccaataaactttaactaataatgaagagtgcgttaaaaaaaagtacactggagtgtgttactagcatttctcatacctataataatacaaagtttggggcttcaagaatctgcaagttctataagttgattgaccacatttggatctgcaagggtacttgtatctccaagttcatccagctgccgagacgcaatttttctcagaattcttcgcattatctttccactccttgattttggaaggccaagtgcccaatgaattttatcaagtgctgcaaaggctcctatctgctttcgaactatgagtaca

SEQ ID NO: 211955 - DNA, 590 bp, Glycine max
  unsure (1)..(590): unsure at all n locations
ggacatttcacaaacacctactctaccctccattttccatttccattcttctgtccactataaattctccttctctgtctttctcgtaatcttcgcctcccttcaactccaccctctctccttcttacctccttgaccatgatgagtttcgccatggattcagcttcagtgttaaaccctaaactctcccactcccattcctctctcccattcagcaggttcccccattccctcaacttacaccccttactcaaaccccgcgcagtttacgccgtcgtcccccctaacgggctagccgtctgcttgctcacccttcaccgacggaaaccgttaaccgtcgctttcacagcttctcaccaagactcggaacacagagagattgaagtggagaaggagcgtgacgtccatgcatgctctgaagaatctcaggaagcgtggaagcaggttctggagacgtttagggaacaggcagagaagcttcagggcgtttctcaagatgctcatgaggtgtattctaagaggcttgctgcattctgacagatgccacggagcaagntaaggtgctggcagattagacaaagaacgagttg

SEQ ID NO: 211956 - DNA, 451 bp, Glycine max
  unsure (1)..(451): unsure at all n locations
cacacttaaaccagccactaatgcagttttaagcgcttaattagtaggctttggcctatttcttgtcctttcctgagatgaagaatggtggtatcgatccaaacccaaaatcagattcaaattcaatggattggttattgtttcattctgatcacattgtcatatccataaagaagggggggaaaaaaagttagcactttgcagaagcattgcaattattttaagttgcaatagctagctgttagaaatgaaccactactgtgaaagatgttgaatcatacgtacgtgtgttctatcagagaagctgcttttgatcttgtgttactacggtagatgccaaatgagtggaagttgttcttgtttgagtttgctttagtaagaatccctttttcagtttgcaaaanaaaaagtcttgtaacacttacccccccatcgactttcaaaacataaa

SEQ ID NO: 211957 - DNA, 611 bp, Glycine max
gcagcttgctctccgtagacaacgaatcaaagtcttcttcttcttctttctattcctcactcaagggttagggatgcgtcggaacagccctgcatactacagtcctccgcggcgaggatacggcggtggtggccgaggaggaggaggaggaggaggaggaggagggtccggcaggagggggttcggtggaggcaggcgcagggacagcaatgggagcctcttggttcgtaacattcccctcgattgcagacccgaggagcttcgcgtccctttcgagcgatttggacctgttcgtgacgtttacatacccaaggattattactctggagaacctcgaggctttgcctttgtgcagtttgtggatccttatgatgcctcagaggcacagtaccatatgaacagacagatttttgctggaagggaaatatctgtagttgtggctgaagagacgagaaaaagaccagaggagatgcgccacaggactagtaggttaagaggaccagcgggctatggagggcaaaggtcttctcgttacgggcgttctcgatctcgctcagttaccagatcacgctcaccaccttatcactctggttctaggaatcgatatcgct

SEQ ID NO: 211958 - DNA, 535 bp, Glycine max
tgctggctttctgttagccttaatgaagagtgtgtagtgtactgtgtacctattagtttctgcgctagagatttgggttgcgtgttcttcattattgaagggttaatttgatgcatttgagttatgtgcaaagtggacttaagtttttatggacattgacttttacatattctgttgaatttgtctcaggcccttcaatggatctggagggaatggctaaaatctccatcttgttggtggggctatggctactagttaactggtcagggttgttggatgcaaaatacatgaagtacaagaaccctaaactgtcaattgatactcgggttgaggatcttgttaagaggatgactcttgaggagaaaattggccaaatgttgcaggttgagcgcaagtatgtgcctgctgatttgcttaagaagtattttattggtaatcaccagacccttttctttgtttgtggttatgtttactcaattggctaataatggaaattatttcttcttctgagtagggagtgtattgagtgagggga

SEQ ID NO: 211959 - DNA, 509 bp, Glycine max
ctctcttaacatttttcttctcttccaattgctctcttccttttcagccatctcatctcacacaccttacgacacaaaacattattgatatcaaattatcaatatacctggtagctccaaggccaatattgtgaggaaaaatagtagcattgtgaatcgtgttgtgtccatgaacggcatcaatcccataaaacattggaattccgagccgggttgataaagcacccttctgaaattcattcaccatatcaatccaggtttcagcagaagcctgtggagccggaatactccctccctcactcaatacactccctactcagaagaaaaaataatttccattattagccaattgagtaaacataaccacaaacaaagaaaagggtctggtgattaccaataaaatacttcttaagcaaatcagcaggcacatacttgcgctcaacctgcaacatttggccaattttctcctcaagagtcatcctcttaacaagatcctcaacccgagtatc

SEQ ID NO: 211960 - DNA, 547 bp, Glycine max
gagtgtgaagagggtggcatcaaaggagaggaaaagtactgtgccacttcgcttgaatccatgattgatttcagcacttccaagcttggaaaaaatgttgaggttgtgtccacggaagtagtggaggacaaggaaacgggattgcagaaatacaccgtagcaccgggagtgaacaagttatcaggggacaaggctgttgtgtgccacaagcagaactacccttatgctgttttttactgtcacaaaactgagaccacaagagcttactctgtgcctttggagggtgctaatggggttagggttaaagcggtagcagtgtgccacactcacacgtcggaatggaaccctaaacatttggcctttcaagtgctcaaagttaagccaggaaccgttcctgtctgccacttactacctgaggatcatgttgtttgggttcccaagtagatttgctttaatttcaagtccttctttcctgttcttgaataacttagcttcagtagcactacagaactctatatatatgcatgtatttgcactgtgtagttct

SEQ ID NO: 211961 - DNA, 510 bp, Glycine max
actattcaaacacacaataagtcatataatgcatcatagtttatacataagaagccacgcatagcatctaaataaacagcaaaaaattattaatatctagagaactacacagtgcaaatacatgcatatatatagagttctgtagtgctactgaagctaagttattcaagaacaggaaagaaggacttgaaattaaagcaaatctacttgggaacccaaacaacatgatcctcaggtaggaagtggcagacaggaacggttcctggcttaactttgagcacttgaaaggccaaatgtttagggttccattccgacgtgtgagtgtggcacactgctaccgctttaaccctaaccccattagcaccctccaaaggcacagagtaagctcttgtggtctcagttttgtgacagtaaaaaacagcataagggtagttctgcttgtggcacacaacagccttgtcccctgataacttgttcactcccggtgctacggtgtatttctgcaatccc

SEQ ID NO: 211962 - DNA, 545 bp, Glycine max
  unsure (1)..(545): unsure at all n locations
cggctcgagtgaagttgaagtcttgcccttctctcttcaactccaaacacaagacatcatcatccatggctgcctccgtctccactgtcggagctgtcaacagagctcttttgaacctgaatgggtctggacctggggtttcagctcccagttcatccttctttgggagcagcttgaagaaggttattggctcaagggtccccaacacaaagatttcctctggaagcttcaagattgttgctgtagaagagaagaaagagattgaagagacccagcagaccgacaaggacagatggaagggtcttgcctatgatatctcagacgaccaacaggacatcacaagaggaaagggtttggttgactcccttttccaagctccacaggatgctggaactcactatgctgtcatgagctcctacgagtaccttagcactggacttcgccagtacttggacaacaacatggatggattttacattgctccagctnttatggacaaacttgttgttcacattaccaagaacttcatgaccctgcccaacatc

SEQ ID NO: 211963 - DNA, 560 bp, Glycine max
  unsure (1)..(560): unsure at all n locations
aagtggacactttaactcaaaattatagaggaagacagtccaatatgaaaaatatagtaaaatcatctcaaacttggcatcttctctttgcacctaagacattgagaattctaagaatgttacacgcaagtcccatcacaacttctagcacttggatcagcacaaccttcaggaacagaaatatttacttgccaagtttgctttgcctccaattcaagattggaagaaagttcccctgttaatagcatcctcgttagcatttccaagtgcagcctcgttcaagtacttgtcagccaattggactctcttgacattctcttgttcttggacaagcatgttaccatacgtcaagagcttctccagagtcatcttgggctgctcaaaggttggaggtccatcttttgagttcacaagcttcttcccaatgccgtcaacaccaacaccagaaatccacttcctcacttcgtcatcatatactctggccctcagtgcaccaaagaaatcaatggattggccagggaggtgtcaacantcttgacaacgcctgttaggaattgatc

SEQ ID NO: 211964 - DNA, 590 bp, Glycine max
  unsure (1)..(590): unsure at all n locations
ttccatcttgcaatctatccttcacaagtatggggacataggagcaaactgccacttggaatcagttgctatgcgctcatattacattgagtgtgtatgctttgtggtgcaagagttacataattcctcctcagtaatgcaattaagcaagtccaaagtcaaagaattgttggctattcttaaggatgtagaatctgctcaacttagtgtggcttggttggctagcgccctcgatgaactagctcagaatatcgaactcattaataggtaccaggaggtagaagcacaaaaggataactctggtggccaagtggagtcactgagagaagagctagaatcagagttggaaagtttggctcagaaagaacaggaggttgctaatattaaaacacgaattcctgagatcagaggtcgtttgagccagctcgagctcgagtcagaagaactcaacaaaagcatgctatctatcaactccaaggttgataatttgcatatcaaatctttgctagacgaactattataactgttcagcanattcgntaataaagtttaatgcttaanaatagaataggttacttgataaatgcatg

SEQ ID NO: 211965 - DNA, 471 bp, Glycine max
aatctcttcatctctgtctatggacaaacagtagattttacagaaaagagacaggatgtgttgggttcaacctaccaatgaaggttgaaactagcagcctgcataagcgggtgtgcaaagtaagcacctaacgttattgcagtaactgtcaagtatggcagtcgaataaactccttgtagaaatcttttggtaactcttgtcggccatcgaggattgctgcaaaagggacaacacttgttcgactcttaactaattcaaaatcctccccatatcttatggccagtcgcctgtctccattccagacaccaaatagatgatgtgcaatcaagccaattgaagctgcaacagccacggaatttccgatccaaatcgtatgagcaagacaccagataacctgcccaaccatctgtggatgcctggttattcttatgatcccagtttcccatagatgcaatttaggcttgtcaaca

SEQ ID NO: 211966 - DNA, 504 bp, Glycine max
  unsure (1)..(504): unsure at all n locations
ctttgcataaattagtaaataactttgaaggggagcttcttgatggaaaccatattattaattgatctttgttattttacagttttatcctgtaaaagattggttgacaggatcatccttgccttctaaatttagcccaagtgttatccaaatggtactagatcagctttctccaaacaatgttcggtaggtgtactaaaattaaaactgtaaatttatgtataagaagcatgtgaaggactaactctcctaaaagcttagctgttatttcactcaacatagaaaaaactattaaggtgtttgagaatttgtattagtggggctgtttgttataattaaatttaagctaactcattctcgagcagaatcttttgggagtctaaaaaatttgaagggcttacggataaggtagagccatggtatggaactgcatattcccttgaaaaaatcactggctctgcaattcangggtgggtgctttctgctccagatgaaaatatgcat

SEQ ID NO: 211967 - DNA, 561 bp, Glycine max
  unsure (1)..(561): unsure at all n locations
ctggtgccgctcgagccgaatcggctcgagtgaacaatggcgtctctctctcacctcaacaaactcctctgcatgccgccgctcaactcttcaccctctacttcgccaccgcgcagcagcgtcggagtttcgaccaaatctgtcggaaggccgaggatggtcgccgatttcgcgaggccggtggggcgtgtccgagcggtgacgagcgacgacgagtggggcccggagaaggaggaggaggcatacggcggaggagtggcggtggaggagaaaccgacggagacggaaacggagaagctgaagaaggctttggtggattcgttttatggcacggatcttggactgaaagcaacgagtgaaacgagagcagagatcgttgaactcatcactcagctagaggccaagaaccctaaccctgctcccactgacgccttgactctcctcaacggaaaatggattctcgcgtatacgtcctttgcaggtttattcccattgttgtcaagtggaacactaccatnggtcaaggtagaggaaatatctcagactatggacacgctgaat

SEQ ID NO: 211968 - DNA, 566 bp, Glycine max
cttgggcgcttaggataaccggaagggtgttggaagatggtaaggattctgtggcggaagggatttcgacgaaggaatatccaaaattctcggcttttttcaagaagattaccatatacttggatcagggtttgtaccaggataaccatgttgttgtgtgggatagtgcccgttctgcggctgcacagcagcgcgatggttttgaagtgaagaggaaaggagacaaggaattcactgcggtggttaggatggcgatgaattattcgcctgacaagtttgtggtttctccgcaactggctagagttttaggggttgagtttgactcgcgagctaggatcatagctgctctttggcactatgtgaaggctaagaaactgcagagcccgaatgacccttcgttcttcatgtgtgacacttctctccagaaggtgtttggggaagacaagatgaaattctctgtggcttcgcagaagatatcgcagcatttgtcacagccacgggctatacacctggagcataaaatcaagctttctggaatggtccagccggtagtacgtgttatgatg

SEQ ID NO: 211969 - DNA, 541 bp, Glycine max
ccaagttagaagacctcaatcttcacccaaacctcatcacctttgtccccatcaatgttcctcacgttgatggtcttccttatgatgcagaaaccacttcagatgttccctcctctttgttcccactcattgccactgccatggacctcacagagaaaaacattgaacttctcctccttgatctcaaaccacacatcgttttgttcgatttttccacatattggctaccaaacttggctcgtagaataggaataaagtctcttcagtactggattattagccctgcaacagtagggtacatggcatccccagctagacaaagagaagatgacatgagaaaaccaccttcagggttccctgattgttccatcaagctgcatgcacatgaagttcggttccttgctgcagcaaggaaactagagtttggcaatggtgttcttttctatgatcgtatctcagttggtgcagatttgtctgatgctattggattcaaaggttgtagagaaattgaagggccttatgtggactatctagagacaca

SEQ ID NO: 211970 - DNA, 553 bp, Glycine max
gattattacaaaataataaacatttctttaagattatcaagactaggttttgtacatatattctttctcaacccatgatttaatgcatcaatcataaaggacgctttttagttcttacacgaccaaataaccctactggattcagtgtcaataatatagaacttatacagtgatttaattaaactggggctgaacttagactaaatcctgaagcctgtggctgaaagcatctacacaagatgtctcgaaattgttacttagcaagaggctcctcactttgttgtgatttgctctgacttctctgccaagctgatcaatctcatcatccataacagttttcacagctttacacacactttcctttgtgaacaaaccatcttcttcccctttctcaacttccacaccaaccctcaattttccccccatggttcttgcattgatgatgaaatcggaaccaagtcgtggcaacagcaccaactgacaccggttcacaagtgcctcagttagagaagctccaccacagtgagttatgaagcacccaacagaaaggtgt

SEQ ID NO: 211971 - DNA, 563 bp, Glycine max
  unsure (1)..(563): unsure at all n locations
ttcactccctctctcttgtcttttcctctacgttcctgcattgctcgtctcaaacgctaaccatggccggcggaggtttcaccagcggcggcggcgccggagatttcgaggccaaaatcactcccatcgtcatcatttcatgtatcatggctgccaccggaggtctcatgttcggctacgacgtcggcgtttcaggtggtgtgacgtctatgcccccgttcttgaagaagttttttccgacggtatacagaaagacagtggaagagaaaggactggacagtaattactgcaaatacgacaaccaaggattacagcttttcacgtcgtctctgtatctggctggtttgacttcgacgttctttgcttcatacacgactcgtaggttgggaagaaggctgaccatgttgattgctggggtattcttcatctgtggagttgtccttaatgctgctgctcaagaccttgccatgctcatcgntggcagaatcttacttggctgtggtgttggcttttgctatcaggccgtgccagtgttcctctctgagatagcaccttcaagaata

SEQ ID NO: 211972 - DNA, 583 bp, Glycine max
aaattggaaatcaatatatattattcctttcaaagaaacaatttacaaaaagaaaagggtgggtggaaaaaactgtatcttatatggcttgcaaaacaggataatcaatgttggattaactgattagaatgttgttgcaggcctaggccaccaacatggatggggtgggggaaataaaaaaataacttgcttaatttgttactaacccacataagcatgtactgtacttactctagagtctaaaatactcaatgcaaatgatttacaacctggaggttggatcaaatccattaccattagagacatgggctactttctcatccgcggcatcatcgataaacctcttccagaaccaatgctgcttccacactctctcggtcatctcttcgatggggacattcttagtctcgggcaacaggaaaagcacgaagacagacatgacgaggacccagccagagaagaacaagaagataccaaacttgaagtggcagagcatagagaggaaggcttgtgcaatgaccaatgtgaagagcaggttaacacaaactgtgacactctgaccagccggacgagtctccaatgg

SEQ ID NO: 211973 - DNA, 194 bp, Glycine max
tgctgatccaagtgctagaagttgtgatgggacttgcgtgtaacattcttagaattctcaatgtcttaggtgcaaagagaagatgccaagtttgagatgattttactatatttttcatattggactgtcttcctctataattttgagttaaagtgtccacttaaattgaatttggtgccttttccttttgtcct

SEQ ID NO: 211974 - DNA, 194 bp, Glycine max
aggacaaaaggaaaaggcaccaaattcaatttaagtggacactttaactcaaaattatagaggaagacagtccaatatgaaaaatatagtaaaatcatctcaaacttggcatcttctctttgcacctaagacattgagaattctaagaatgttacacgcaagtcccatcacaacttctagcacttggatcagca

SEQ ID NO: 211975 - DNA, 491 bp, Glycine max
aagatgtgggatattcttgttgagcacgcaaagacctgtgttctcagtggaaaactttacgtatactatcctgaagatgcaagaaatgtgggtgttgttttcaataatatttatgaattaagtggcttaattgccaacgaccaatattactcagctgattctctctctgagaatcaaaaggtttatgtagacacattggtgaagaaggcatatgataattggatgcatgttattgagtatgatgggaagtctctgataaatgacaacgaggataaggctttggataccactcattcttaggctccaatgacttcccatgaatattcaaactcacttcagcagatatccatcccagctttgccacttgcagtacatcctggccagccttcaatggattcaggagtaacagttggaggttatcatgatgggacaggttctagattcttcttgcaaccacatcctaatcttaattcttccattcagtttgatga

SEQ ID NO: 211976 - DNA, 483 bp, Glycine max
ctgtcacgaggaaatttgggtgctgttagggttcttcaagagttatttccagaacctggaaggcttcaatttatatatgctgacttgggagataaagaatctgtaaataaaatatttttggagaataaatttgatgctgtgatgcactttgctgctgttgcatatgtgggagagagcacactggaccctcttaagtattatcacaatattacgtcgaataccttgttggtattggagtctatggctaaatatggtgtgaagacattaatatattctagtacatgtgcaacgtatggggaacctgaaaagatgcctattatagaaatgacagaacagaaaccaattaatccatactgaaaagccaagaagatggcagaagatatcatctttgatttttccaaaaattctaagatggcagtaatgattctgagatacttcaatgtgattggatcagacccagagggcatactaagtgaggctcca

SEQ ID NO: 211977 - DNA, 520 bp, Glycine max
accaaccacaggcttggcattttattattattgactcattgtatgttgaatacacatgtaagtataacgaatcaactaccaaactccctaaggaccaaaaagaaaaaggaaaaaaatcctgagccccatgtaagagagcagttgaaggccaactgctttgctgaatggctagaaactcagattgcagataaaatgccataaccattacgatgagatttttgccatttccatgcaacctgcaaactcttctcaaggtcagtgtattgtgcagtccaattcagttcccggttgatcttagaagggtcactatacacctcggcataatcaccgggtcgacgtggaaggtagtctactttgatgtccacccctgtggcctttttacaagcattcacaaactccttcactgatctaccctttccagtgccaacattgtagatccctactttaccaggttgtgccttttcaagagccttcacatgagcatcaaccaaatcagttacatcaatgtagtctcgtatgc

SEQ ID NO: 211978 - DNA, 466 bp, Glycine max
aaatattactataaatatttatagtaaaataaaagtgatttgtgcggttccgcttgggagtcggtggcccttaccttgttgctcatgtccagtgtctctagcagagattccgtgtgattcgcagattgatcttcttactcgcttcgccgagatagaggatagagccggactcgtaccctctctcgttctctgctccgacccatgccggttgttaagaccggggctctcatccactcagtcatctgtccataagctaatttatctcttatctctatcccactgacttgttcatgagcacataaatggttacccatcgtgttatcaaccattatagtatctgtcatgggttgagatcttcgctgtgaatctattctgtctagccgtctatcggtctgtatatcggcgagcaatccagcgtgccttcgttgtgactctcaatactcccctcgatccatgcccccctagg

SEQ ID NO: 211979 - DNA, 524 bp, Glycine max
cctggacgtgcaggcaacatctccggtggacccgcgcgtgctcgacgcgatgctccctttctacctctctcgctacggaaaccctcactcccgcacccacttctacggctgggaatccgacgaggccgtggaacacgcgcgcgctcaggtagcgtccctcatcggcgcgtcccccaaggagatagtcttcacctccggcgccaccgagtccaataacatctccgtcaagggcgtcatgcatttctacaaggacaagaagcgccacgtcataaccacgcaaacggagcacaagtgcgtcctcgattcctgccgccacctccagcaggagggtttcgatgtcacttatcttcccgttgagtccgacgggttgattgatttggatgagcttcgggcttcgattaggcctgacaccgggctcgtttcggttatggcggtgaacaatgaaattggagtggttcagcccatggaggaaattgggaggatttgcaaggagtttaatgtgcctttccacactgatgcagctc

SEQ ID NO: 211980 - DNA, 588 bp, Glycine max
aataaaacacaccaacatttgttagtccatacagtaccaaactgccaatgcatgtctttcttcttcataaacatcgctgacaagcacaactaacaatcattgaaacaaacggtgtatacctaataaatagctctgccagggtaaatttttaattgtaatgtaacctcaacatacaaattactaaataatcagcaagttctaagaaaccgcaattgcaagagtggcagctacgtctggagttcaatcacaattgcttccccatcacttgcattgcaatctgagagcttgataataatcagtgctgtgcccattgaatgtccttgatgttgataccttccttgaccatttcataaagcggactcatttccctcaacttctccacctgttgaacagtgagttcaaccgccctatcaatctcagcctcggtagtgaacctaccaattccaaacctaatagaagtgtgagccatgtcctcttcaactcccaacgccctcaacacataagaaggctccaaactagcactagtgcaggcactgccactggacacagtcaccttcttaacccctaagcagactctccccttaacgt

SEQ ID NO: 211981 - DNA, 615 bp, Glycine max
  unsure (1)..(615): unsure at all n locations
gtaaaaacaacaaatcataatcagtcatagcttcggcgacttctcgatattattttttctgacagagccaccgacagagccggcggttcccgtggcggtttgagaatggccgacaagtacaacctgaagaaccccgccgtgaagcggatcctccaggaggttaaggagatgcagtccaacccttccgacgatttcatgagcctccctctcgaggaaaatatatttgagtggcaatttgcgattagagggcctcgtgatacggaatttgagggtggtatttatcatggaaggatccagttgccttcagagtatccattcaaacccccttcattcatgttgttgacacctaatggtcgtttcgagactcaaaccaagatttgcttgagcatatcaaatcatcaccctgagcattggcaaccatcatggagcgtgaggactgctttagttgcactgattgcgttcatgcctaccaacccatatggtgcattgngatctttagactacaagaaagaagagaggcatacactggccattaagtctcgtgaagctccttcaaaattcgggactcctgaacgtcaaaagctgattgatgagatacacgagtacatgctaagc

SEQ ID NO: 211982 - DNA, 563 bp, Glycine max
gagggctgcatttccatctctgctttcgttgcaaagcctgaatcctttagagatgctagaattcctgactttcttccagtgctaagtgataaccacttttatttgcgagtacaggtaaaagattcaggatcaggaattaatccactagatatcccaaagatattcactaagtttgcacaaaaccaatcgttaacaacaagaaatcctgctggaagtggacttggcctggcaatttgtaggaggtttgtaaatcttatggaaggacatatttgggttgaaagcgaaggtattgataaaggatgtacagtcacttttattgtaaaacttggaatcccagaccgatcaaatgaatttaagctaccttttgtacctaaagtaccgggaaatcatggatctacaaactttgctgggctcaaagttcttgtcacggatgacaatggggttagcaggacagtaacaaagggacttcttatgcatttaggatgtgatgtaaccacagcaagctcaagtgaagaatgtctgcgtgttggttctcttggaacatgaagtggtctttcatggat

SEQ ID NO: 211983 - DNA, 563 bp, Glycine max
aatgtcaattgcctcatgttttcataagtttgtgtttctccaaatttgatttagctatatacaacaatctaacaggttaaacagtttcgaacagaactcggcactccaatagttctgataaaacacccctcattttgtcaacagaaacaggtttcaatataaggccatccataccaaccctcatacagttttcttttgttacctttttggtgtttccagtaagagcaactattagtggtctatcttgatgtttagtaaacttttcatgtatacggattgcaagttcataaccatctaaccctgcacaaacatccatgaagaccacttcatgttccagagaaacaacacgcagacattcttcacttgagcttgctgtggttacatcacatcctaaatgcataagaagtccctttgttactgtcctgctaaccccattgtcatccgtgacaagaactttgagcccagcaaagtttgtagatccatgatttcccggtactttaggtacaaaaggtagcttaaattcatttgatcggtctgggattcaagtttacaataaagtgact

SEQ ID NO: 211984 - DNA, 519 bp, Glycine max
cacacacgcacaatcctttctctctctgaaaccgtacgttacgtaaccgtaggcgatatcacaaattcacagcacacacagtccccactctctacaatgaccggtcaacgcagctcctacggcaagcgctcccactcgcactccgattccgacgccggctccaaaaacaagcgccgcaaccccgccgccgacgagtcctcctcctccctcatcaccgctgacgacaccgtcttccgctacctctgccccgtccgcaagatcggcagcgtcattggccgcggcggcgacatcgtcaagcagctccgcgccgacaccaaggccaagattcgcatcggtgacgcgctacccggctgcgacgagcgcgttgtcaccatccacagttactccgaggagaccaaccatttcgacgagaccgatgatctcgtttcgcccgcgcatgacgcgccttttagggttcaccagcgcgtgattgctgaggacgcacgtgaggatgatgacgaggagaggaatcatgtgact

SEQ ID NO: 211985 - DNA, 604 bp, Glycine max
cgattacgctagaggtcgagtcctctgacaccatcgataacgtgaaagctaagatccaggacaaggaaggcattccaccagaccagcagcgcttgatcttcgccggaaaacagctcgaagacggcagaaccctcgccgattacaatattcagaaagaatcgacgcttcatctggtgcttcgactccgcggagggatgcagatcttcgtgaagacgctcaccgggaaaactattactctggaggtggagagttctgatacgatcgataacgtgaaggcgaagattcaggataaggaagggattccaccggatcagcagcgtcttatcttcgctgggaagcagctcgaagacggacgcactctcgccgattacaatattcagaaggaatccacgcttcaccttgttcttaggctccgtggtggcgatttctagtttcagttgaatcttgctattgagattttctcttccttgaatgtgtatgatataacaaaatttctatgtctatgttgtccttaggcttcgtggtggccttctctagtttggttgaatcttaataatcatgtgcacttcaattgaatgaatccaataatagttcttcgtttggt

SEQ ID NO: 211986 - DNA, 534 bp, Glycine max
acaaaacgaagaaactattattggaattcattcaaattgaagtgcacatgattaataagattcaaccaaactagagaaggccaccacggagcctaaggacaacatagacatagaaattttgttatatcatacacattcaaggaagagaaaatctcaatagcaagattcaactgaaactagaaatcgccaccacggagcctaagaacaaggtgaagcgtggattccttctgaatattgtaatcggcgagagtgcgtccgtcttcgagctgcttcccagcgaagataagacgctgctgatccggtggaatcccttccttatcctgaatcttcgccttcacgttatcgatcgtatcagaactctccacctccagagtaatagttttcccggtgagcgtcttcacgaagatctgcatccctccgcggagtcgaagcaccagatgaagcgtcgattctttctgaatattgtaatcggcgagggttctgccgtcttcgagctgttttcctgcgaagatcaagcgctgctggtctggtgga

SEQ ID NO: 211987 - DNA, 558 bp, Glycine max
gccatgcaccttaaacaggttgaagaagagcaagatggtatacttttcgccatgaacatgatgtctaccatggtgtatccgtttgtggttcggaccgcgattgagttagggatctttgacatcatagcgaaagccggtgaaggtgcgaagctatcagcagaggagattatagagcaacttggcacaaagaaccctgaagctcccacgatgttggaccggcttctcaggttattggctagtcactccatgctatcttcctctcttgatactgaagatctccaacatggccaaaactctcctaagaggctctatagtcttacctatgcttccaagtattttgtcactgatgctgatggtgtctcgttcggagctaccttgaacttacttcttgacaaggtcttcttggaaagctggactgaactgaaaggagccatcttggaagggggtgtagcattcaacagggttcattccatgcactcatttgagtacccagcagttgattctaggttcaatgatgttttcaacatagctatgttcaaccttactactatagtcatg

SEQ ID NO: 211988 - DNA, 508 bp, Glycine max
atgggaaaaccttcacaatacgaggtaagatctttattggctaatatcttttatatatatatatatataaataacaacaacaaagattgaacatatgtccttagataattggtaaataatgttcgagcatgatactattttttcaagcaacaagcaaggataatagaagaacaatttgagcaacactcgataagtgtgtttacttataaaattccataacccagaagccagagacactgcaaacgattttgatgccactgaatccagaacttaatgccaattccatgaattcatgttgggttctctcttttcctcctgagttttgagtcatcattaagaggtcagcttggaaaccactcttagcagtaactgtgctctcgggcaaaatgggaagaattaagtccacaacaatcacttttccatcactaggaatagctttatgacaattcttcaacaacttcaagcattgttcatcactccaatcgtgaagtatccacttcataaaaat

SEQ ID NO: 211989 - DNA, 547 bp, Glycine max
cctgggtagactttaccggcgtatcaaagatgcttatgatgaagatattgatgctccctatttgaactttgtgactggcgatataccgtatgataaagatcttgaagttccaggatctgctgattttattgctgatgcgtgggagcaaaaatgctcatatgatggccaattgagtgggctacttggacaatacaaagtgaaaagagaagaggaagttgttactggacagatttggtctatgccaaaatacaacagtaggaagcaaggggagcttaaagagaggctgaagcactcttacagtgccctgaaaaaagaatttaggcacacttttgagaaattgaattcagatgttggagaattaagcgaggaagaaaaaaatttgttctatgagcagaaagcttcggcctggtatcaggtgacatatcatcctgagtgggtgaaaaaatcccttgatctgcaagataaatcctcagagaaccaagaggctgatagtttgggaagtaccggtgatgttgagtttccttggattgcagtgattacctagctc

SEQ ID NO: 211990 - DNA, 544 bp, Glycine max
  unsure (1)..(544): unsure at all n locations
atcggcatagcgtagccatggccatgggattgacctcacaactcctcctttctttgttcatcagtacccttcttcttcttcttccctcttccctttcacaatctaaccagttttgtgacgctggaacttcatccaagctgttgatcaagggcggcaccgttgtgaatgctcaccaccaacaggttgccgatgtctatgtcgaagatggtatcattgttgccatcaatcccactattacggttggagatgaggtgacggtcatagatgccactggcaagtttgtcatgccagggggcattgaccctcacacccacctagagtttgagtttatggatacggaaactgtagatgacttcttcagtggtcaggctgcagcattagctggtgggacaacaatgcacattgactttgttataccacataaaggaagtttaacggctggttttgaagcctatgaaaagaaggcanagaagtcttgcatggattatggtttccatatggctattaccaaatgggatgaaactgtgtcaagagaaatggagct

SEQ ID NO: 211991 - DNA, 563 bp, Glycine max
aaaaaaaaatgtcatcacatgatattctatgctcatctttctaagtttataaatagctgaaagtgaaacttaacattctcaaaattctattgctagttaatagcattaattaaaatgcattttatagaggtcaagagtggaatcaaccaagaaagagttgtagtggagaacttgaaccattagctgggtcaacatatccagcaggtctacctccagcagcaaacatagtgaacaaagtgttgaagaacatgaagaatcaagtttatctacttgacataacacttctgtcacaactaagaaaagatgcacatccttctgtctatggagtggatcacaccggtaatgattgcagccattggtgcctaccaggactacctgatacttggaatgaactcctatatgcagctctgtactagctgttgggcagcctgtatttgtgaagcagtaccacttatctcaacagtcatctctcctggcacacccctggtctcctgaattgaatacttgctccactagctcgacggatgtagctgatgtttgcccctgatgctccaataacagca

SEQ ID NO: 211992 - DNA, 461 bp, Glycine max
tcctaggagaatccccaagaatcgcatccgcagcagcacttttcgactacggactaatccctcagatcttcagcttacgctgtaaacttccacattcaaaaattcctccaagcccagagcatagtggctccaagcgcatacatttcaacagccacgttgatggtccatcttgcgttgagctattgtgctgtgtacgaggtggggcttggtctgtcgggtgcgtcgctggtgtagagtgtatcgtagtggatcattgtgactgcacaggttgcgtacattgccaagagggaaaagtgtaaacacacttggagagggttcagttgtcaagcgctgtcgggcttgccagagcttctcaagctgactgctgattcgacggtgatgctctgactagaaacccggtactgccaaatgagggatctgcttgcaaggatgcttgctgaaccagagtcggtctggattct

SEQ ID NO: 211993 - DNA, 485 bp, Glycine max
agaccaacaaattggtagtgaaattatgaattgcctcatcttacaatttatttacaacaaaaagctatgagatctaaagcccgatttgtgttattgtataattgtgggctaggctacattgagaaacaaagagcctcagttattgacaagtggctccgttttgtcctcccacttgttcaacctctttgctgcttcttcaacctctttattccaatccgttccaaatgtgacccacactaaaataattgtttgcaaaaccgtgccacctagcattcccaaccatattcccttagcactgagtttgaaatagaaaccgagaaccgaacccaatggtatgccaattccataataacaaccaacgttcacatacgcaacaaaagtttgccatccacatccaacagccaccccagattagacaggttgaatgccgttgagaataatagaaagagcaagtagaggacaaagatctgagacagcagcagcca

SEQ ID NO: 211994 - DNA, 534 bp, Glycine max
  unsure (1)..(534): unsure at all n locations
ttggagaatcgctaagagtggcctccaaatcaacaataaaggtttcaaagacaaagaatacttcactcgtgaccagatgtgaaattggtgacagtctcgaagaattcctcacaaaagcaacaccagataaggggttgatcaggttgttggtgtccatgggagaagcattgagaacaatttccttcaaagtgaagacggcttcatgtggtggaacacaatgtgttaatacttttggggatgagcagcttgcagtggatttgctagctaatcagcttctttttgaggccttaaattactctcatttctgcaagtatgcttgctctgaagaaaatcctgagctcttggacatgggaggtccagttgaaggtggatttagtgttgcatttgatccccttgatggctccagcattgtggacacaaatttcacagtaggcaccatctttggtgtgtggcctggagataagttgaccggcatcaccggaagagatcaagttgctgcagccatggnggttcttggtcctagaacaacatatg

SEQ ID NO: 211995 - DNA, 487 bp, Glycine max
ttttttttttttttttttttttttttttttttttttttttttttttttttttttttttttttttttttttttttttttttttttttttttttttaaaaaacaaaaaaaacccaaaaaagggaatcccacccccaaattaaggctaaaacccccctttattacccccaaaagggaaattggggaccccaaaaaaacccctggaccggggggtaaaaaacccccccaaagggggggacccaaaaaacatatttgggcaaaaaaaacccccaaaaataaaaaaaaacagggggccgccctgccaaaaaaaaaagcaaaaggggagggggcccccattaaaagggccccaaattttcttcccggggggccccaagcaacccccgccccttgaaaaggccccgggggccctccccaaagggtttcccggccaaaggccccatggaagcttttgggcccgaaaaacccttgcccagctccacaaacgggtttt

SEQ ID NO: 211996 - DNA, 580 bp, Glycine max
  unsure (1)..(580): unsure at all n locations
gtttcagttgttgaccttgttgtgaatgttgagaagaagggtcttactgctgaagatgtgaatgcagcattcagaaaggcagctgaggggccgctcaaaggtgtattggacgtgtgtgatgttccacttgtgtctatcgacttccgctgctctgatgtttcctctactattgactcctccttgactatggtcatgggagatgatatggttaaagtggttgcttggtatgacaatgaatggggttacagccaaagagtggtcgatttggcacatctagtagcaagcaagtggccaggggcacctaaagcggggagtggagacccattggaggatttctgcgagacaaaccctgctgatgaggaatgcaaagtttatgaatagaggagagctccttttctaacgtatcatgtgaaaaagaaggaaattgttcagacagtctatctgaggagagattntcaaagtttatatttatttgcagccaataataagttttggcgtgactgaatgaatatcacccatatattgattgatattgaatntctgaaattctgtactggattgcattcttcgatcnttaatc

SEQ ID NO: 211997 - DNA, 579 bp, Glycine max
gattaaaagattcgaagaattgcaaatcagttacaagaattcagaaattcaatatcaatcaatatatgggtgatattcattcagtcacgccaaaacttattattggctgcaaataaatataaactttgaaaatctctcctcagatagactgtctgaacaatttccttctttttcacatgatacgttagaaaaggagctctcctctattcataaactttgcattcctcatcagcagggtttgtctcgcagaaatcctccaatgggtctccactccccgctttaggtgcccctggccacttgcttgctactagatgtgccaaatcgaccactctttggctgtaaccccattcattgtcataccaagcaaccactttaaccatatcatctcccatgaccatagtcaaggaggagtcaatagtagaggaaacatcagagcagcggaagtcgatagacacaagtggaacatcacacacgtccaatacacctttgagcggcccctcagctgcctttctgaatgctgcattcacatcttcagcagtaagacccttctcctcacattcacaacaaggtcaacaactg

SEQ ID NO: 211998 - DNA, 570 bp, Glycine max
  unsure (1)..(570): unsure at all n locations
aaacaaacgaaacctcatccatggcttctcttctccgttgcaacggagtcttcctctcccccttacctccccaacccagacgcgaccccatccttcccaaattctttctcccccaatccccaaatcctaaaccgtcacgcctcctgacggtgcgcgcggaggtgaaagagacctcctccgccgccgccaccaccaccaccaccacttcctccgacgacaagatccgcgaaatcctccgcaaccgcgactacgacaagaaattcgggttcagcgtggacatcgagtctttgacaatcccaaaagggctctcgaaagaaaccatccgtctgatctcgtccctgaaagaggagccccagtggatgctcgaattccgcctcaaggccttcgagaaattcctgtccatgaaggaacccacctggtctgataacacttacccccccatcgacttccagaacatctgctactactccgctcccaagaataaaccctcactccaatccctcgacgacgccgaccccgagcttctncgctacttcgacaagctcggtgtccctctcaacgagcagaagc

SEQ ID NO: 211999 - DNA, 580 bp, Glycine max
aggattgcaatgatcatttattaaggttcaaaactggctatgtttcaggccacttttgcagggtgcagttgaagacagcatctatatacaaacatatacacatccttccgaatacactacctataaggactttgacaatttcaggaacaaatggcctgagcaaattccatataatgatatgcttaacaagctgtttaagtttaacctactgatccctcaagcttcaagctcatgagttggttcacctcagaaccaaattcatcaggaagctcattaaagacatcacggcaaaatccagagatcatagcagccattgctttttcatagtctattcccctttgctgaaaataaaacaattgatcttcaccaattttggacgtactagcttcatgttcgattcttgctgttggatttttcacctgaatgtaaggataggtatttgcagctgcattgtcaccaatgagcatagagtcacactgcgaggagtttcgggcattctcggccttggacagaacctgaaccagccctctataacagtttctggaatgccccaccgatatcccctttgatataatcctac

SEQ ID NO: 212000 - DNA, 581 bp, Glycine max
ctaattctcatttcttcatcgttcgattcttctcctcctaaagatgcagatcttcgtgaaaactttgaccggtaagaccatcacccttgaggtggagtcctccgacaccatcgataacgtgaaagctaagattcaagacaaggaagggatcccacctgaccagcagagacttatctttgcgggtaaacagcttgaggatggtcgaacccttgccgactacaacatccaaaaggaatccactctccacctcgtgcttcgcctcaggggtggcatgcaaatctttgtcaagactttgactggcaagaccatcaccctcgaggtcgaatcctcggacaccattgataatgtcaaggccaagatccaggacaaggagggtatccctccagatcagcagaggttgatatttgctggtaaacaacttgaggatggaagaacccttgctgattacaatattcagaaggagtctaccttacacttggttcttcgtttaagaggtggcatgcagaatttcgtcaagactttgacgggaaagaccatcaccttggagggtgagagttcagataccatagacaatgtgaaag

SEQ ID NO: 212001 - DNA, 498 bp, Glycine max
aactgggaaacgatattgatatttaaaataaaaacataaacaacatactttcgctgaaacgagttcaatacatcattttaaaacataataaacagcagcacttaaaccagagatgcaaagcacaagttcaagggagacactgaacaaacagataagacatatgagaacacttcataaaagggattccccttagcaaccaccacgaaggcgaaggacaagatgcaaaggggattccttctgaatattggaatctgccaaggtacgaccatcttccaattgctttccagcaaaaatgagcctttgctgatctggagggataccttccttggcctgaatcttagctttcacattggcaatagtatcagagctttccacctccaaggtaatgggcttccctgtcagagtcttcacaaatatctgcataccttcacgaagcctcaacaccaaatgcagagtggactccttctggatttataatcagcaagagttcgaccattt

SEQ ID NO: 212002 - DNA, 591 bp, Glycine max
  unsure (1)..(591): unsure at all n locations
gcagaaagcaagctcatcctatagttttaaaaatggcagcagcctcctccatggctctctcttccccatccttggctggcaaggccgtgaagctgggcccatcagcccccgaagtcgggagggtcagcatgaggaagaccgtcaccaagcaggcctcctccggaagcccatggtacggcccagaccgcgtcaagtacttgggcccattctctggcgagcccccgtcctacctcactggcgagttcccaggtgactacggctgggacactgctgggctttcggccgacccagaaaccttcgccagaaaccgtgagctcgaagtgatccactccaggtgggccatgctcggggccttgggctgcgtcttccccgaactgttgtcccgcaacggggtcaagtttggagaagctgtgtggttcaaggccgggtcccagatcttcagcgagggtgggctggactacttgggcaacccaagccttgtccacgctcagagcatnctcgccatctgggccacccaagttatcctaatgggtgcttgtgagggttatcgtattgctggtgggccccctcgtgaggtcactgacccaatct

SEQ ID NO: 212003 - DNA, 448 bp, Glycine max
gtaaaaagcaagtaacattaagttggattgggatacccaagataattcacattatctgaagtacattgcaataacatatactttaccaaacacaaatttaaaaacttttaaaagtccacaagtcatccttttctttcatgctcacttgccggggaccaaattgggggcgtaggcccaggcattgttgttgactgggtccccaaggggaccagcaagggtttccaatggacccttaccggggacaatggcctgaacaaaaaacccaaacattgaaaacatggccaatctcccgttcttgagttccttcaccttaagctcaacaaaagcctttggggcattaacaaggcccaatgggtcaaagcttccaccagggtaaattgggtcaatgaccttaccgaggggcccaccagcaattcgataacccttaaagcacccattaggataactt

SEQ ID NO: 212004 - DNA, 482 bp, Glycine max
gggaagaagcttgtgaactcaaaagatggacctccaacctttgagcagcccaagatgactctggagaagctcttgctgtatggtaacatgcttgtccaagaacaagagaatgtcaagagagtccaattggctgacaagtacttgaacgaggctgctcttggaaatgctaacgaggatgctattcagaggggaactttcttccagtcttgaattggaggcaaagcaaacttggcaagtaaatatttctgttcgtgaaggttgctgtactaatccaagtgctagaagttgtgatggaacttgcgtgtaacattcttagcattctcaatgtcttaagtgcaaagagaagatgctaagtttgagatgatcttactatatttttcatattggaccgtcttcctctataattttgagttacagtgtccacttaaattgaatttaaaaaaaaaaatatgtggcgataaaaatatgttgctatagtaatc

SEQ ID NO: 212005 - DNA, 440 bp, Glycine max
aaattcaatttaagtggacactgtaactcaaaattatagaggaagacgggccaatttgaaaaatatagtaagatcatttcaaacttagcatcttctttttgcacctaaaacattgagaatgctaaaaatgttacacccaagttccattacaacttttagcacttggattagtacaacaacctttacgaacagaaatatttacttgccaagtttgctttgcctccaattcaagactggaagaaagttcccctttgaatagcatcctcgttagcatttccaagagcagcctcgttcaagtacttgtcagccaattggactcttttgacattctcttgttcttggacaagcatgttaccatacagcaagagcttctccagagtcattttgggctgctcaaaggttggaggtccatcttttgagttcacaagcttcttcccctt

SEQ ID NO: 212006 - DNA, 590 bp, Glycine max
  unsure (1)..(590): unsure at all n locations
gtgatgatttagcagcagaagcaagggaagagcaagttgtgccagtaagtataaatgcctttgatataatctccctttcaccaggttttaatctttgtggattctttgaagacagtattcagaaaagggaagcaaggtttacttcaagacaaccggcatcagtcatcatctccaggctggaagaaatcgcgaagcagatgaggatgaaaataaagaaaagggctgcaggtttgttgaaattggagggccttcatgaaggtaggaaggggattttatccattgatacagagatctttgaggttactccacttttgcatttggtggaggtgaagaaatcaaatggagatacattggaatatgagaaaatactgaaggaggacattaggcctgctcttaaagacgttgtttgggtttggcaaggtgaccaacaagagcaatcacaacagttggagcaacagaagcagcaacaacaattaccacagtcataagtacaacattatcttagttnntaatgtctcatgccttatattngtgcattacataatatgaaatttttgtttgataatgctgtctcttatcttctgtttaca

SEQ ID NO: 212007 - DNA, 523 bp, Glycine max
  unsure (1)..(523): unsure at all n locations
aagaaactaaaccatttatatatagtttttcttcataggcaactacattctcgttattcagtcatgtccttaaaaacacgaggagccactagaaacggttgctaaccactaaacattaaaactaaagaaacatctgccaacagaatttgagacacaggacgtaatacaataaggtcatggcattgtaaaacagaagataagagacagcattattcaaaacaaaatttcatattatgtaatgcacaaatataaggcatgagacattaaaaactaagataatgttgtacttatgactgtggtaattgttgttgctgcttctgttgctccaactgttgtgattgctcttgttggtcaccttgccaaacccaaacaacgtctttaagagcaggcctaatgtcctccttcagtattttctcatattccaatgtatctccatttgatttcttcaccttcaccaaatgcaaaagtggagtaacctcaaagatctctgtatcaatggataaaantccctttctaccttcat

SEQ ID NO: 212008 - DNA, 535 bp, Glycine max
ctttttcttctctcgtttgtttcctcatcctccagtagtgtgcaagaatttttatccaaattaagatttattatctctttctcaagccaaaaatgataatacaaatgaaagttaattggattaaaaattaacttctcacatttccattaaaatataagattttcatcctttattgtggaaataaaaacaaatcgaaacacgacaatattacatttctcgaaatatttttaatagcttataacaaataaacacagatatagaggatcaaatatgtcgtcatgagttttgccaaatatagagttttgcctaattgaacagtttttaagagacaaataagaacaaattaaaaaaaccttaaaaataaaaatattcttagtcaataatagttgcaaaatagatcaaatactacttaatttgccaattttcatgacatttgatcaacttgtaattttgattttcacaatcaagtcattaattaaatgcatattgatttgacctctaagcaagagaaagaacgaaatgattttttttgcat

SEQ ID NO: 212009 - DNA, 401 bp, Glycine max
tcgcgatctatgattaagtatttccaatatcatcatctcaaatcaccatccatatttcgctcgtgtcaggatagattcaaatatttcaagaaataggatatctcggttagttagcagttactatacattgtacatttgttgtctcctatttactcgctaaaagggccgttcccatcatttatttcgaatctatctatttctctcttgtagcctgcttcgacaaaggggaagcctacaaagctgcactagaggaaacatcatattggttcattgttcttagatatgaaacataaagaaacgaaacttgctgagctgcgctgtaagggcatgcttaccatagctgaaacactagcgaattatggatggtgatctgagatgatgatattggaaatacttacctt

SEQ ID NO: 212010 - DNA, 530 bp, Glycine max
cggctcgagctcgagccgcgttaacttcgagatcaccgttcacaacgtggcggcgctgcactgcgccgccgtgttcctccagatgaccgacgagtattgcgacggaaaccttgccggaaggacggaggacttcctctctcaggtcggcctctccacgctccatagcgccgtcgcggttctcaagtcctgccaaaagctcctccccttcgccgtcgaggtcaacatcgttgaccgatgcgttgagttcatcagctccaaggcttgcagcgaggcgaatttcccaagccagtcgccgccgaactggtggacggaggagctcgccgtgctcgacgtggattcctttgcaaaggtgatcaccgcgatgaagcagcgtggcgcaaagtacttgaccgtcgccggagcgttgattacgtacaccgaacgcgcgctgaaggagctcgtcagggatcagaccggcggtggaaaaggaaatccgtcaccggaatccggagactcggattcggagtcgaaaagaagcgaacagcgcgagc

SEQ ID NO: 212011 - DNA, 516 bp, Glycine max
ataacttccatgacataattttattgatgtcaacttcgtttcactttcgtagaactttattaccgtctttaaattgaaagcaattcataactttctccaggatcaacagtgcagttataagttattttagagtgcattacgaagttgttgcgggaccgggctcccttggaaaccacaattaactggcaatgagcaacagctgcctcaactagatcgacagagaattcttggaaaccttcttcgggattggtaaacttgctaagattttgagcacaaccaatcaccttcttagcagccctagcttcaaatgctcccagcactgcattaggcttcaacccatcctccgctttctgaaaatcagaatgatattgcatcagctgttccactcgtccaatataagatgttgtaccaacaggctttttcctggagcccaactgagaaatagtcttgatgagatgcctagccacctggtaaagcagcacagtgttggctccttcgtatgtgcaggaaggaatg

SEQ ID NO: 212012 - DNA, 310 bp, Glycine max
agccctttttctttttttttagttttttttttttttttttttttttttttattttcttttttttttttttttgacacttttttttttctttttacttttttttttttttatttttatctttttctcaatcttttatataaaaaaaaaaaaaacacaacataatacaccatcccaaaccccaaccattttccacacaaacattcaggataacaacccccctagaacaacaaaccctagctaacctgctcacaacaatctcccaaacaaagagttaaagcccaaaccctcacaaaaaatcccaccccccccc

SEQ ID NO: 212013 - DNA, 120 bp, Glycine max
agccctttttttttttttttttttttttttttttttttttttttttttttttttttttttttttttttttttttttttttttttttttttttttttttttttttattttttttttttttt

SEQ ID NO: 212014 - DNA, 378 bp, Glycine max
agatgacaattgcaaccactacaatatatgtaaagtattaccaatgacagtatcacattgaaaacatttaattatataattgaaccaactcaatttttttttttgagagggaaccaactcaatttattatatgcaaaatttagaatgtagcaacaagttaataacagcatattttaagggacatattttttagtttaatagacctactacagagttaattaatcagaaatcactttaacataatttttaaggtaattatttatcaagttaatactagtaataactattatacatggagatttatagttgaattaatgatagtaattgacggtttgtaattcgaaaatttcaaattaaaagagtcatgcaagacttacg

SEQ ID NO: 212015 - DNA, 453 bp, Glycine max
agatgacaatagcaaccactacaatatatgtaaagaataaccaatgacagaatcacattgaaaacatttaataatataattgaaccaactcaatttttttttttgagagggaaccaactcaatttattatatgcaaaatttagaatgtagcaacaagttaataacagcatattttaagggacatattttttagtttaatagacctactacagagttaattaatcagaaatcactttaacataatttttaaggtaattatttatcaagttaatactagtaataactattatacatggagatttatagttgaattaatgatagtaattgacggtttgtaattcgaaaatttcaaattaaaagagtcatgcaagactaacgcattgatcaataatgcctttataatggtggatactataagaatgggaaacttaccaaatggtgaaatgtccatgg

SEQ ID NO: 212016 - DNA, 567 bp, Glycine max
  unsure (1)..(567): unsure at all n locations
caatagctctttatgggaatcaagggtacgacattttccagtcaacacgagaagactgataatcagcagcgagacattgttttctgaatgaagagagaaaaaggaaaaaaaggaataagaaaatatttgacaaaaatagaaggaaaaataaaagggcgctatcacaaggatagtacaacactgaaccagtcactcaattattttgaaggaaatttgtggtgatttacagtgcaagacatcctccaggttgacgactttcctcttatgctgcttttgcttgtcgcttttcttcctccattctggctttgatgaacgagtagagtgccacaccagcaattgcaatggctgttccaataccagtttgggtgctaatcttgttaccgaagactataatagagaatccaatgacaaatacacgtttcagtacgttcccaactgcatgagtgagaggagccactctctccagtgtgtnggtagccacctggttgtagagatggtaaaacataccaacccagaagagatctgagacgaacttgaccaaacctactttagcaatagcatcattga

SEQ ID NO: 212017 - DNA, 496 bp, Glycine max
aacagaaaattaaaattataaacactagttacaaggcaaatccaagattacagatcattttattaggaaaaacaaggttttccaaacatatgcaacggataaacgacatacaaccacaagaaacataagttaacagagattttgtccaagcatcatttcagttgggggcaaaatatggagcaaaaccagaaccaaaaccccttctttttcttctttgatggcacaagttttgcatccctcttggtgacaaaatcagccatatactgcacaacttcctgagaacccaacttgaccaattctcttggtggcaaatcaaggggggtctcatcagccctaaaaactctcaactttgacaagaacctgaaagactctggtagagcttttatttgatcatcacttatgtccaactcctcaagcatttcaagatttccaattgatgctggcaaggctcttaggtccgcgaagttctttcccaagttcaatttcttcaaaatag

SEQ ID NO: 212018 - DNA, 458 bp, Glycine max
gcataaacgcagttcatagtttcatatatatatatttttataaatatcatatggggatgaagggggctaggcctcttcattgcagatacacacgacctctaagcatggcccctatagcttccaatgcaaaatgggggccacatctttaacttagggaaccaagatgaggtcattgataatgggtgatgttcatacggggaaagaggatgcaaggccaaactgaaggccccagagctcaaaagatcccttaacaaagtcatagtatcctccttttagtgacaatgtcttggtcaccaagccatctctaacaaatgggtatgttagaagggttccaagggaaacattcacaggttccttctcacagggtgagcacaactcagcaaaaggtgcatccccatgttgtgtcttcacctttgcctttgcaggcaagccaattttgacccactcctcaataaaat

SEQ ID NO: 212019 - DNA, 422 bp, Glycine max
caaattcaattgatttttttattcatcaaagttgctcttcgaatctgggtttgagaacagcccgaggatcaaattggcaacaaaagttttcctatagccaaaaaaaaaaaaaaacaattgcagttcaagcccgagatcaaaagatgaactatgttttaagacagcactttctccacttcaactgtcacctcttagggaggtttctcagcatgaagattagcaacaaggcccttctttgaatagtaatcaataaccggttcggtttgctagtgaaatgcctccagtcttaacttaagaacagctgcagtgtcatccttgcgctggataagaggttcaccagtaacatcatcaacaccaagaaccttaggaggagcaaattttgtatggaagagtctgccactggatgggtgtatccagcgacc

SEQ ID NO: 212020 - DNA, 498 bp, Glycine max
aaaaggaggaagcaacctttatgagcattatcatccgcaccattcatttacataaaccctattttctacatggattagttacacagtcttgccaagtctttactaacttaaaagtttttctagtcacaaccaccacatgccccacaatgtcacaacccataaaacaaggtcactcaaaagcaaattttttgaagaagtaaagctcaatttaatcagaatcagatgattctgatctctgttcctcagaggctgcattatctcctttcaagttagcctctccctgcttgaatgccttggctatctcttcaatgggaatcaaaggtagatacccaacgaaactgtaacccttttgagtcatggccttgatcacatgattgtacttctctgaccagtgagcaacagtgggaattgccatttctgacagtgcatggaatggtggatagtggttgagtccattccacaactttactgaatttatcaacacaaaatgctttgatt

SEQ ID NO: 212021 - DNA, 515 bp, Glycine max
gagaaaaatgatatagaattgtttacgacgaactcaatgcattttatgatagatgaggaaacgagtattttaaacacaagcaaacaaaagggttagtgtctaatcatcctccccgtcatctgtaacgaatttgccagttccaggattcaaagcagcaatgaagaagaaaagaacgttgaacaacactaggggctcgatttcgttgattggtacccccgtctcaatgttgagttgggctagagctccctttccagtaataatttctccaatcaatgagaaaacgaaacccaattgagccaatcttcccacaaatagctcgttcgctttcgtgaatccgaataaaggacctgaaccgagcccaagggcttccctgaagcctttgcctgaaggaataacacctccagtagtaggttcgtcatcgacaaattttccacggtcacctaaacctacaatggctcctagcatggcgaagaggatgaaaaacagaagaagaggctccgcttcataaatgggaa

SEQ ID NO: 212022 - DNA, 348 bp, Glycine max
ctaggtgatagcgaatgaattttgagtatctatctttgccaattaccacaccggtagcgattgtattacagaatagagtgaataccaacagcgacctcgcctagtagctaggtgcgttgaggaacaagcccatagtgataccaccgatgagaccagcaatggggatggtcatgacccaggagaagaacaggagacccacacgttgccaattgacagctttgaaggtaccattgcacaaacccactccgacggtagcgccagagatgcacatcgaggtggacactgggagcttgtactgggagaagatgaggatggtgatggcggcacccatctccatggatgagccac

SEQ ID NO: 212023 - DNA, 486 bp, Glycine max
agtcattgaatattcaattcacaattcgagatgaaacggaaaggctttgttttttaatccctatcgaaatttacagtagtagcggggcaattttagatataaaatattagttattttatataatatatatggatatgggtagttcatatataactaggtcatatagaatatcctatcacatatacgtgggtttcttctatcctgtaaaccaattcttttgggttttaaattcaatcgaattcgaaaattattctttgaaacctcaaaagaaagagttgtcttatagcgatccgattatatacacccagtttgaccccccggacttatactttatttggtatctggttattttaagctcttctgccccttttattataaccccatatggatacaatctatcgaaataaattcggtggatttaattattggttcatagaaatattggaatttgggtgatctacatgttactttttgaattcttttttg

SEQ ID NO: 212024 - DNA, 406 bp, Glycine max
ttttcgtcctttttttctgttattttttgatctcttgttcttgtaatatatttataaaaatttttcttattaacatgaattttttctgggtatttgtgataaatttttcgtttattcttttgaattaatgaaagacctatggtttgatacataaaaaattgtttatcgctttttctacacaggcgaactggttcgataacaaatgtttcttttttcataaatccgatatttggctttttccttaagcctacaagaattaaattcttctgattttgaatcatcataatatctagacctagttctcctctttgaatagaggctattgtaatttctcttaaagtgcttaacccaatctggagacaatatgctttgacattgttaaatattctttgacctaacaaatatt

SEQ ID NO: 212025 - DNA, 465 bp, Glycine max
aaagtgaacagttgaaaaataagcattatgcctgcttttcgaagcatccaatgatttcagtgtatacaagtctccttttttttttttatgaaaaaggcaaccagcattgtgtcaagtaaggctgcaaatcctgcatacttgattactttcgtattgtaccattacaaagccgccacataggtgctcgtttctattcgcagagcaggtgtgcaccatttaggttgcgccatatcttcttttaaacaagaaatgtctcttcgctggatctttcggcttgctcttgatctgtccttggcctttgttacgcccagtactgtactccatataaaccatcccttttgcgcctgacattgcactcatggatccttgagaacgacgggcactctgaaaggctatgtcatctgcctctttatctaattgctctaatccaacttgatcgtcatcagcacttaacaccttttcaag

SEQ ID NO: 212026 - DNA, 491 bp, Glycine max
atagaaactagtatgtctcattcataacaaagaaaaagtaaaaccaccattaaagtatatccaatttacatgagcagagatacgctaatgtggagactacattagcatgaggataataaagagcaaacacttgttctctatttaatgtactgagagagccactgaaagccttcaccataccccatcttgcggacaatactgcacatgaaaacctccaaaggacgaacattggagtcaaccaaattaaccttgcctttgcctgtggtgaagttagtgaggcccatatgataacgtagttcatcctctgaagcagcataaggtatatcaatcttgtttcccaagatgaggaaaggcacatttgctagtgactcgtcagagagaagagcatccaactccttctttgattctgaaaacctttccttgtcaaatgcatcaaccaggtacactacagcatccacctgagcgtaataatcctttcagaccctacgagc

SEQ ID NO: 212027 - DNA, 291 bp, Glycine max
ctcttggcagaaattttgccagattgatcaattttatttccaatttgaaacttgttcaaagctatactaaattcttgttcaaactgatatgaagattgttggcttcacttttttctttgcacagaaggacgagtggggaggggggttttaaaagaattcttccttaaaacccgattaggttgctttggaagttgtgatcgggcatagcatttcttcacacagcaaacctctcgcgttagcttatcgtgtaagccacgtactttaacaccttctttacctcttcaacgctcc

SEQ ID NO: 212028 - DNA, 422 bp, Glycine max
  unsure (1)..(422): unsure at all n locations
acaaaaaataaactttattaactaaaacgaacaggtagcataacattaatatcgtgtcaaggaaaaaattaaatgtagaaaagcaacaaatgcgcaagcggaaagagaaagacatcaagactttaacattgcacacattgtaaaatgtagacaatgtaactcaaaattatacaggataacaatccaatatgaacaagataacttattttattatctcaactcttagcttctctccaagtggagaatgcttaggttctcagggcgtgtataagcagggtccatcatcacttcttgcagcagggtcgaagttagaggcattaggatcagtacaaccttcaggaacgggaatgtttacttgctgagctgctttgccatagaaagttcctcagntgatggaatcttgattagcatcaccaagagca

SEQ ID NO: 212029 - DNA, 532 bp, Glycine max
aaccatccattgctttatttattttaaagaagagaaaggttagtaatcaacaaccttgcatcccattattcattcttcaacttcaacttctctctcatgttctaaacataccaataagaagaaacacataccagtaaaatagaattcccatatgtgctaatactaaaagggaaaacaggaaggtctatgtaattaagattcatgatatagcaccatccactattatttaagacggatgaaaggaccagttactactattcagaaatagatgattggaggcatcacctttgaaaagctgattggtgcaataacagaaataccaacataagtctagtacaagattatgaaaagaaagcgcatatataaagcctctgaaggtgagctagattaagcactagctgaagccacatgtttctgtatttactgctgcagctcatacttctttgctcccaccactttgtccagaagcgttccctctttcacaaacacaaaagtgggcatagcctcaatagcccaatcttgagaaacactc

SEQ ID NO: 212030 - DNA, 536 bp, Glycine max
aatgttaaatagtgcaaagtagcaaagacatgctatcttaattcttataactgataattaaagcggggcgcatcaatacaatacaatacaatatgtaactatgaactatcaatatatgatcgttatttatgtctgtgatacacacaattcaggccatgatattcttacgtgatttacagcaacttctaacttatttaatacatcataccaacccaactaggagcaattttcattatacaatgacacttatctttaaactctgaagcatgacaaggtggtagtcaccagggaccatattcttatgcaatttatgccacaactggataagacgcacaagttgcaacaccacacatgttcttccccaattccattttgaagtagccattctcaccccaactttctccccatgaattttttatgagccaatatgggacgccattttcaactccataccccacagcaaggacggcatggttcacatcctgggaagtgctaccgcaaatgtcactagtgtaaactccattctcgtagaaatg

SEQ ID NO: 212031 - DNA, 517 bp, Glycine max
gaacacatatataaagttgacatttaaaaagcaaaccaacaacgcaacggcaaagccctaaaactcgctgcgcttaacaaaaatgtaatcaggggttctcacaaacacaacacattaaaacagaatgataaaaggagtcttgccaccgtcgatcaagaacccaattctgggaacaaaagttgcgagatgatggtggagacttcaaactatgtccgaaaaacaagctacctagaaacgaagacacaagggcaagaaaccaacatttattgtaaccataagaaacgacatcccctgatgaaccaaaccgcacgattcacttcttcttctgggcagccttggtgaccttggctccagtaggatccttcttctccacgttcttgatgactcccacagcaacagtttgacgcatatccctgacagcaaagcgaccaagtggggggtactcagagaaagtttcaaccaccatgggtttggtcggaatcatcttaacaaaaccagcatcaccattctttaaaaa

SEQ ID NO: 212032 - DNA, 370 bp, Glycine max
caatcataatagctaaactttattaattggatggtaatccatcaatacaatcaccgaaatcacgtgatttattattcatactatataacctatgagtgggtaatagcatctgtgtattcacttattctaaacggagggatatataaccaattaagtcgatctctccactggagagcactttaagggcagaatgtgatggcataatcaggcctgttggagcaagtgaaagtgctgctcttatcatcgtaagcgtaggaataagcattgggacactggtcctcgaaaatctgagagtagttcagaggtggacatgtttctgcggtgttgttaggtccagtgcagcaatatctatcttgcttaaaagcctcgc

SEQ ID NO: 212033 - DNA, 479 bp, Glycine max
  unsure (1)..(479): unsure at all n locations
aggacatatggaaaaggcaccaaattcaatttaagtggacactgtaactcaaaattatagaggaagacggtccaatatgaaaaatatagtaagatcatctcaaacttagcatcttctctttgcacctaagacattgagaatgctaagaatgttacacgcaagttccatcacaacttctagcacttggattagtacaacaaccttcacgaacagaaatattnacttgccaagttagctttgcctccaattcaagactggaagaaagttcccctctgaatagcatcctcgttagcatttccaagagcagcctcgttcaagtacttgtcagccaattggactctcttgacattctctagatcttggacaagcatgttaccatacagcaagagcttctccagagtcatcttgggctgctcaaaggtaggaggtccatctttagagttcacaagcttcttcccacactgtaacaccaacaccag

SEQ ID NO: 212034 - DNA, 304 bp, Glycine max
gttataagctagtttcattaagttggattcggatacacaagattattcacattatctgaagtacttcaccaaacacaaatctaaaaactctgaaaagtcatttcgttctttgacgctcactttccggggacgaagttggcggcataagcccaggcgttgctgttgacagggtcagcaaggagatcggcgaggttctccaaaggaccctttccggcgacaaaggcctgaacaaagaagccaaacattgcgaacatggccaatcgtccggtcttgagttccttcaccgtaagctcagcataagcct

SEQ ID NO: 212035 - DNA, 518 bp, Glycine max
cctgtggcagagccataatagaaacacattattctgaacaattgtatgcgtcaagttcatcacaaatattcctttttcataaattgacaaaaccgtatttcaattagtgtttatataagggtaatgtttctcaatttcatccattgaaatcagaaattccacatttgcattctatttctttgtatgtcactgtgtttgtgtctacattctcaagcatccactcattcttcatgtcttggcataaccacgagaaaacttttaatgcacagttggagtgcgcatgaacaggaactcgaatgatttccctgatcgttcaaattctagcatgcttagagcaacttgacaactttgtgagacatgaggctctggatctgcccaaaactccctaagaagggctacacattggtcatctgcaattgaaccaagaagcttaacagccctatgccaaaccattggatgctcattcacatctttaagcatattggatagagcagcttgaacaggtttgtcttgcaatt

SEQ ID NO: 212036 - DNA, 511 bp, Glycine max
  unsure (1)..(511): unsure at all n locations
aatctagaacagtctcaacacatttcagtagataacatcgtttggtttgccatcagtgaacctctacatagattggttgtttgagcattacatacaattgaaagggcatttagccgaataggtgcataacctactcatcattttcaacagtaccatctttgaggtgaaaatgtttttctctcttctggaactctgtcaaacctttcccacttcccgtcacaccaacctttccctgaggatcatcaggagatttaaaaatactctcccgttttcttccagagaagaaaccaatcttctttgcctttcctttggttgactgaaattgctgccaagcattttgccgcttattttgtgtgacttcaagttgctccatccgcatctttgacttaaaggcatgtattttcttgcgtttcgaagctttcacatcctcaagatcatcagcctctatacgaagctntgcaagtagactccgagactgtaaatcgttagatgcagcttggacaatttttcg

SEQ ID NO: 212037 - DNA, 397 bp, Glycine max
ataaaattaaaatttataaaaattttatttcccacgagacctagtacaatatatagtaacccaataaataccagagattctggaaactgaaaaagggattcttactaaagcaaactcaaacaagaacaactttcactcatttggcatttaccggagtaacacaagatcaaaagcagcttctttgatagaacacacgtacgtatgattcaacatttttcacaggagggggtcatttttaacagctagctattgcgaacttaaaataattgcaatgcttttgcaaagggctaactttttttcccccccttttttatggatatgacaatgggatcagaatggaacaattaccaatccattgaatttgaatctgattttgggtttggatcgataccaccat

SEQ ID NO: 212038 - DNA, 549 bp, Glycine max
  unsure (1)..(549): unsure at all n locations
gcgactaagatgtggtcgagtttccctctcgtcttgcctttgggtgccgccctagtggcagggcaggatattactacctgtcccgggtactcagctagcaatgttcagcaaaatggtaatggtcttactgccgacctcactcttgttggcgaggcctgcaatgcatacggcaccgatctacccaacttgactctgactgtcgaatatcagtcagccaaccgcctccatgtgattattcaggaccagaaccaaaccgtgtaccaggtgccaaacgagatcttcccgagacctgaatcccctgaaaatagctcatctgaagactctgaccttcaattttcctacacagaatcgccgttcagttttgcagtggcaagatcagatggtgagacgctattcaacacctncggttcgcccttgatcttcgagtcccaatatctgaatctgaggacctcgctaccagatagtcctgctctctatggtttaggagagcacagcgatccatttcgcttgaacagcacgaattacacacgaaccatctggaacagagac

SEQ ID NO: 212039 - DNA, 400 bp, Glycine max
ggaattagccaacacaacactgatcattatcatgtctatggtttgttagcattggtatgattcaaaattgctcctggttattacaacatgcgttcttcccatcataacatagtttgcatgatttacattaacatttacgaccaaagggggaagagatgttagactgctttatttttacaagggttcatgaacttttcaaagctgataaagcttcctttgttgccgatgagataacagcgtctgaagcatttggcagataataatacttgccttgggcaactctagcaatctccttggcgaaacccgttgagacaaacttattttcagagtcgatgacaaggagagacattcctgctttatatatcttcccagccacctcaagaatttcatccttcaattc

SEQ ID NO: 212040 - DNA, 324 bp, Glycine max
cattcgaattcattttatttatatattaatattatattcaaatgaaatataatgatattaaaagatactaattataagaatttgaaagtgaaattataaaggtattaaatgattaatcaaagtctttctacctgtacctgttgtaaaaagagatccatctgatcttgaatagcttacttcaaaaggacttctgcttccccagtgaatgtcttggtagaagatatgatttctttgaattgaagttcattcgcgtttaagtaagcacgtgactcagcaagaaatttccttacctgtccaatttctaatgaatcaagataaccattc

SEQ ID NO: 212041 - DNA, 387 bp, Glycine max
agctcgcgatctagaacctttttccttcttttctttcttatgttttggtctttcaagctttcctcttgttttagttcataaaagaaatgaaaaaaaaaggagtctaaaactgagatatataatatgtaaattattttgaggtagtagtacaatcaatgtattcaaatttctggcagtgagaaattggttttattaaaaaaaataaaaataaaaaaatatataaaaaaaataaattaaataaaaattataaacaatatataaaaaaataatataacaaaaaatataacttaatatatattgaaatttacataaaaaaagaggggggcccctatctatcttaaaatttttcgtccccgaaaaaataagggccctccggggtcccccccc

SEQ ID NO: 212042 - DNA, 476 bp, Glycine max
ctccttgaatttgataaaataattattgattcttacagtgtacaagtcagagcgtattttatagtacaaacataattctgtgacttgcgtgtatgattatgcaacatataattcggcttttccatcaatgaatagactcatgaactcttcaccatccacagtttctttttctatgagaagttgagcaagcttgtgaaggatatcaatgtgagttgagataatatgtgttgccctagaatatgctctctctaccagttccctcacttccgcatccactacatccgcagttgccatggagtaatccttttgcgatgacatctgttgacccaagaatggatttccaccaggtccaccaatggcaacttgtccaatttttttgctgaatccaaatctctcaaccatctgccttgccactcgtgaaactcgcatgaagtccgttgatgctccggtggtgacattttcctggccaaaaataa

SEQ ID NO: 212043 - DNA, 655 bp, Glycine max
cgaggctcacactaatgcggccggaacgcgccttgttctgtctcttttttcttatgcattaagtactataatctagtctcttcttttattgggtgacattagtcatgctatataggacgatatcttatatatcatagtcatactctttacaaatatatctcgaacagaaagagcgtcgatgatatatctatcgacaacattgctctaatagtcagataaactcacgtaacatgcatgtttctactatgatatagtgaaagtactcgaaaagttgaaataggaaaagtttatacactaacaagactctttccaagaattatgtcatctgttgagaaatcagcctctttccggtatgttcctctaccaaagtccaggttgtacgagtctgcaagaccctctacaagcccaaattcaggttcccacccaagcactctgtttgctttctcaatgtgatgcaaagaaatgctggtcacggaatggaaatgatttctttttcccaaagtcaaaatctttaaggctgtagtgaatgatctctggctctgggaacccaccagccttagcacatgctcttgctaatccgtcaaacgtgacatacttctcttccgagatgttgaatacttgcttgcagcatctcattaccaagacgtggataaag

SEQ ID NO: 212044 - DNA, 576 bp, Glycine max
cagaactaattttacacaaaatggtaggaaaataacagcaatttggtactacattgggagtaaacagaaaaaatcttcaaactacaaaaccaaccaaacaaaataattaaataattggggaactattgagtaatcccttaagaaaatgtacatggctaagtggccagtaaatatgtttgtacataaccccccaccccctcaaagaaaaaactatgcattataagtagctatttaaacaagtattacccgcagacctgcctgtcccaccttgttacttctaatcaatattcagggaccctactttccacctttgctatagctgccctttaaggtgacagtcctattaaaaacaagtttttctgatgtcgagtcccggtcaaccacaaaatagcctaatctttcaaattggaaattgtccccaacttttgcattctgtatggaagacacaccatatgcatcgggaattatcactttggaatttgggttcaaatcgccaagccagttgtcaagttcagcgggattctctgataggaatagcctctcaaacaatctgactttcaccttcaatggatcaac

SEQ ID NO: 212045 - DNA, 497 bp, Glycine max
atatctaaatgatgcgtgcataaacagtaataaagaaagtgacgattaaaagtacagtcaagttcaacattatttacccaccaaatgttatggtagttacactatttttgcaatcagaaatttaatcaaaatccaattgatcgcctatggatgagatcaaaggaaagcatgtttattcaggtactaaacagagttcaatacattggccacaaagcacagaaccaaaactcaaaaacagcaatttccgaagcagcttgaaaggcagcattatcagttcctaactacgaatttcaattcttcttcacagtagcagcgtttatgatgtccacaaattccgccttgagggatgcaccaccaaccaaaaatccatcaacatcgggctgtgctgccaattctttgcagtttcctccatttacagagcctccatagataattcttacagatgcagcaacttcagcactcacattgtcatgaacccatttccttaaatcagcatg

SEQ ID NO: 212046 - DNA, 342 bp, Glycine max
actagaatgcaatcatatactaaggttccgttgtttacagaaaaagagaagaaataaataataaaataaagtgtgactcacttttacactctattttaattcaaaactttcatctcatttcatttttttccactctagcaaactgtacctgattgagcaaaattgtttttcaacagggtagtttgaatcccatgtatctccctgatgtatagtctttccaagttcgaaaggctccgaagctagtcattagaacaatacttaaagtcatcactatgctaaccgaaaatactattaaagatggtcttccatagctttgaattgctttctgcaccactaataacc

SEQ ID NO: 212047 - DNA, 446 bp, Glycine max
aatgaaaatggtcccttcaaatgcaagcacacaatacatcaaggtgcatagtttcacaagtacattcacaggatctataatgtaaacctgtgccatagtagttacagaaagcttatttacaatacaataacgagcttattaaaacatgccctatataatctccaacatgtcttgttaggcagctttggcaaaaccaactgggagattgccatagtcaaagacggtgtgatataccctcatgaaaacattcccaagaatccagagaggaccccgtggaggaggaatgtcaaaagcaataaacccactaaggcaaacttctgcaatgccttctccagttttcagaatatactgctcaggagtgagggtgaaaggtttgtctccaacagtaaacgtgatgttaggcaatccataaatgctattacagtctactactgactctccatttg

SEQ ID NO: 212048 - DNA, 540 bp, Glycine max
gaaagtgaaacagacaatacagtatatattgattcagatatgcaaggtcgaaaagtagtgttcaaacagaagtactaaacatgtggatatgtaatagtcttcttaaccgtaggacctgagagaaaaatacatgttaaaattctctcagtattaagggagccaattgatggtagtcctgaaacaatttcatgagaatctgcaccagtgctattcagcctctgtcctggacttggaccaagggattccagggcttgttctcccattttatggatatcttcaggtgaaagtattttgatataccatacattattgacaaatgattcccacggatcgtctccaaggagaagaacatcgttctccctgtcgacgaatacaagctgccagcctgatctaagagggtcttctaatttcccctcaataccaaacatctgtgccaactcctgccgcagctcatgataactgctgaaccgggagatgtcaagtgagcgcccaactgaccctgatttgaaaccttgacgaatgttcgtgtctggtttgagg

SEQ ID NO: 212049 - DNA, 365 bp, Glycine max
aaaaaaacacaaatgcatccaattgatctaggttcataataataataataataaccaaaagaagatgaaaacggagagtaacaaagcatggtgagacacagctaccgaagctactaaaaacaagggacagagcaatcaagtaggataactagggagcagagaagcagtaggaatttaagcaaactagaaatatagacactcaactaacaaaacctaataaccccaaatcaagatggacctaatgggaatagaattctcatcaaaacttatctgccctgtacctcttctctttatatgctattcaaatttaggttatggctggaatggtcctcacttggccatcatgactttgacaaactcctcat

SEQ ID NO: 212050 - DNA, 466 bp, Glycine max
gactagcctactagcggtctgccgcccttttttttttttttttttggaaaatttgaggaagaatgatgagattgtaacttctgatcaatctaagaaccaaatatcactttcactcaatacaaacagtatattttgtatatttaagaacaacaagacatcattcctatgaccaaacacttacatgaaaagaaaagaaaaagaaaaagagaaaacaataaacttgccaagatatgtgggaaaaactacataaaaagagaagtgtaggtattaaaagatttcacttggactccaaaatgttgagaattggttgaatcatgcacatatagatattattctattctgctgcaaaaggcttgtgaaactaagcagagcagcatccagactttttaacagctgagacatcatccctactgccaacattgatggtctgccccttgggcaaggctgcagggtcatccccaatctc

SEQ ID NO: 212051 - DNA, 483 bp, Glycine max
gattgtaaccccattataggggataggttcaacaatcatctgattaagaaatttggtatttgaagcctttattacatatgcatctatacatttcaacataacgatcaagattttctggattcttacatataaaggcttttgacattgcttttaaaatatgttgtcgtcctctaccatggatcaggaaaactgatcttgttgaattgcttgccagtaagaccatgggatgacctaatggaaaattttcttttctcaattcttgtgcttcatggttgctttatcaaaaccaatggttggaaatcggtttgcatactcctcaacatcaaggcggagctttgctatttccgattgaaaggtagaagatgactcaattgcggccaagaagtccttcagctttgatcctttgctctctcccttaatcttcacagctatcttcactgctgcatcaaaaaactctgctaccttgacaaaatcctctctaac

SEQ ID NO: 212052 - DNA, 486 bp, Glycine max
aaataccgcgactaatcacataaaatttgtgtttgttctttttatatttatattatttatatttttattttttgtacaatttattactagtatagtaatcgattccctaaatctatgaacccctccaactaaatccaataatttttttattttattattaatcaagaatttcgtatatagctagaacggccctcacaaattgcaaatactaatttgttaagaattaatcgaattgaggctatagcatcatcattagctggaattgaaatatcggcgaggtccgggtcacaatttgtatcgattaaacaaattgttggaatttccaaagttatacattctcgaagagccgtatattcttcttgttgatcgacgattattacaatatcaggtaaccccgtcatatatttaatgccgccaagatatgtttccaaatgagctaaatgtctcttcaatatagcggcatctctttttggaaaactattgagt

SEQ ID NO: 212053 - DNA, 561 bp, Glycine max
gaaaaagtaaggtagaatctttaatcattcacaaatatggagcaggctgcagagggcattctgtattctaagataatacatatgaaagatgttacatatataggctattcaaacagtggctggtactggagttgaaggagcaacacggttttcagctggaatttcaacaaactcagacaatatagcacggaattcatctccgctcagagtctccttctccagaaggacttccacaatcttgtcaatggcctcacggttgttccttatatgctccagtgcaatttcatatgcttcatctgagatcctcttgatggcagcatcaatgtcttctgcaagcctctctgacattgagttccttgccatcattctcatgatgacatccccaccttgtgctgatggttccataagtgaccaaggaccaatatcagacattccaaatgtggtcaccatctgttttgccaaactggtgatttgctgcaaatcaccagctgctccagttgtaacttcaggctcaccgaaaataatttcttctgcagccctcccacctagtccttcaacaat

SEQ ID NO: 212054 - DNA, 460 bp, Glycine max
tttttttttttttttttttttttttttttttttttttttttttttttttttttttttttttttttttttttttttttttttttttttttttttaaaagggggtaaaaaaaaccaaaaggggccccaaaaaaaaggccccctttgaaaaaacaagaaaaaaatacctgggcccgcacttcaaagaggtgcaacaaccctggaaaaattttcttaaaaaggaccacagattacccagaaaaagacggggtccacatatacgatttccccgaaaagaggtttaatctcgccaaaacaaacaggcaaatcaacaggaaattttcttaccagaacactttccagggaaaaaagatacccaagaggtccgggaaaaataggtattatcgggcctaacacggtgggaggaccccactgggaatggcgaaacctctcgcgcaatcccagaaccaaacgcaatttgcct

SEQ ID NO: 212055 - DNA, 515 bp, Glycine max
  unsure (1)..(515): unsure at all n locations
agttcgtgtgaatcatataatatatcagcctcgtacttttctttgcaggaggcaaaaggaattacaagctttgacatggacatgaaattcaaaaaacgaaactggcccatgaatgatccaataatagccacgccgtgaagagcaagggaaggactaagaaggggcatgggacccaaaaatgacgacaaccaaccactgatcatgtcattctacaatttgaggtggggaagggctttgtttatcttcaatggatatttcagtttctaagtcatccatagcctttggtgttaatgccctttcaatcttcatgcccgtgccattgacaaccatctctttttctaagtgaaagcagtagctctcaaaaacccgtgagcttaccataactctaaaatccaacagaaagagtaactctaactcaagcttgttcaattcagcattgcttactcctnctactcgagcatatatgggcgttgtgtaatgttcgtcatccagcatcttggaaagcaccatgacac

SEQ ID NO: 212056 - DNA, 385 bp, Glycine max
aacatcctctcatttatagaacagaaggaacatatccacaaagtactttacgaatagttcttcatttttagatagttacatggactatgttataacttaaacatcgatttgcaaagtttattgaaccaaagcacttgtgtggtaaacaagaagtgccccaccagctaaaagaccaagtagagtcacagcccaaattgccaagccagtcgtaccgccagcgtaaacatcaccggttggagaccagtccttggtgtcgtagataggactgtaaccatcgacattagcaccgtatttgtctacaaactggtaaacaccctttccctttcctttcctgccagatgcatcagtcccatccctcaaagccatgccacctttaattccataa

SEQ ID NO: 212057 - DNA, 473 bp, Glycine max
aaccaaaaatatggtatatgtatatatagcagagccaaaaccatgcatacctacatttattacatgaaaagtgaggagtatcacaagctaaaagtaataatcaattgcaactaagtttgctgtgcttgactaagaatgccccatctgttctggagggttatttacattcctaatgttccaccaaaatttggcattacttctgccatcagaatcctttctttcagactgtgcttcctgcatttcagatgaaccaggattctctgtcaagaatcgttcccagaatatgtcattaacaccagtagtcacaggggcttttcccactggttgttcttttgatgcatcaagatcaggaacagcaactacagatggctcagaattcatgttgattccaggtgacttaggctgatcttcaacttctagttgcacacaagatatagctggactatctgcacaacttggagatgcatcaaaat

SEQ ID NO: 212058 - DNA, 489 bp, Glycine max
gctgtcaaaattctgctacaagtgtaaataaaaaggtttgagtagtaatgttttccatcatcttcatcatcctttttctatatttgccaacaacattttaattgcccattgaaaaattaagcaaatggagaataataaattaataatactaccacttttcagctaccttcattttctttattaattggatctgagctcacagttggaagattccttctgaactgctgagacgtcaatctcctttccaatggtgttttcctattgcttacaacaaatttgttcacccctttgcgcataggcattattgaaggaaaatcttcgtctggaatctgactgagctcagaaatatccttaatctgtgcgacgcgacggaaccatttctcagcctttgcctcctctgacatgttcaaaggatctgggtccttcactgccgaccccttcaaactctttcctgtccactctgctctaccactctggttctcaaatgct

SEQ ID NO: 212059 - DNA, 581 bp, Glycine max
  unsure (1)..(581): unsure at all n locations
gtaggacgatagttttgaaaagacagattgcctatcttctctttaatctcaggcgaaatacgatcggggggtgccaattcaaaaccttccggtaaaataagaacagcccccacattcaaagctccctttttaccattagcaagaacttgtttcacttgcatatcataaggaattcgaacaactgcttcaaatacagtatcaggaagtaccgcttgtggaacctcaatatccacgggcttattagctaaatggcaattggcacagacaatacgaccggttgcttctcggggattttcataaccctgctgtgcaaaaattggatatgcgtttgaaatgggtgctcgaattattatatatatcatgatcgatatggaaatggatcgagtaatcccttcctttatacaagaaaaagcatttctaggttgcatggtctaatcattgatcctgaaaatttctacaataagattaggtaggtcactcgcatagttccctatccaagtcggngaaacccttttttcattaaaggcgttaaaacgaagggaaaaacaaagtattctttttagctaaaaaactttaaataa

SEQ ID NO: 212060 - DNA, 478 bp, Glycine max
aatgtaagtggctcctctgactataatatgcaagaacaatctgatcttctttattgtggctaaaagtgatatctcaaaaaacaaataatgtaatagtaacccaaagccaccaccagtgaaaaccacaagttctagatgagataaaacttaaaagaaagtcaacaaatagatctacgaaagttctttggcagcagcaataacagcttccttggtgataccaaactccttgtatatttttcctgctggagcacttgctccaaatcgatcaatgcctatggcctttccttggcttccaacaatcttttgccaaccaaatgttgatcctgcctcaatgctaactctaactgttaccgaagcagggagaacactctctttgtattcatctgactgctcatcaaaaagttcccagctaacaaaagaaacaactctaacagcttttccttccttccttagatcctcagcagcagcagcagcaatt

SEQ ID NO: 212061 - DNA, 518 bp, Glycine max
aacatcaagcagaagcatttctgcttagcctctccaatttcacgttacaagtttttcacaagtactactaatccagctatgtagaaaatgtttaattacaacccaaagccgaagaagaagaaaaagacttttacaatataactagaatgaccaggcacaagaaagactattcttcttcttttgcttcttcttaagaggaggatgagaaggtgtcaatgatggttgtgtggagtgggtcactcaagtgggtggcccagttgttgagcgggcccttgccagtggcggcagcttggactgcaaagcccaagaagcccaccatggcgagacgggcgtgcttgatctccgccaattgaagggtggctttcttctctggatctgaggccaggcccagtgggtcgaagtaactgccacctgagtacagcctcttttcttagtccagctctgcgttcctctggaactctatgtagccaattacgagaacctcgatccagatcagtgtggtgattgagaatggaagt

SEQ ID NO: 212062 - DNA, 492 bp, Glycine max
caatcattaaacatgccatgactagaatccaatattataatctcttttctctcatcaagcccaacaaatctaaaactgtttacaaatacatttttttttccgattgaacagaattcgaacacatacgcactttcaattttctgcacaaaactgttcttcgccgtagccctacagcctaaaaatcaaacggtaaggccttgtggggcaccagctacaggtgccttgggcttaggtttctccaccacaatggcctgcgtggtcaacaccattccagcaactgaagcagcattctgcaaagcacacctagttaccttggcagggtcgataactccagcctccactaaattctcatacctgtctgccatggcattgtaaccgacctcccattcaccactctttattttctccacaacaacttcaccttctattccagcattttgagcaatcaatgctgcaggagctatcagtgccttttgcacaatgtcagctcct

SEQ ID NO: 212063 - DNA, 554 bp, Glycine max
acaagttaattgaagaaattcaatttgtttaatcaaattccccaaccccctctctttttatttgttcactacgtattatatgcaataaaatattatatggcagaaatattctaagttggaaaaaatagaaactaagatataggatttttcaggaaggggttaaaaaagattattttattgatatttttagaatatttctatttcgacacaaacaagaaggaataggaatcggactctaggaaaagacaaaaaatcccccctagagtaccttttccatattttaattgattttgtttcaaattatctatctatatagatatctattttatgtttagtatcgaatccaattttattgtattttacaatcgaaatttctataatagaactctctattatagaaaaatgaaatctgaaaaaaacagtgtcataaccataatattcgaatttattggggggttgaaaaaacaaagtcaaatagtcttcctgacaatatccatactcgagtttattggtattacgttacaagtaactctttaaatatagtataaaaagac

SEQ ID NO: 212064 - DNA, 505 bp, Glycine max
  unsure (1)..(505): unsure at all n locations
aagaaataccatatcaatcaatatatgggcgatattcatgaatttcagtcacgccaaaatttattattggctgcagataatgttaaactttgaaaatctctcctcagacaccgtctgaacgaacaatttccttctttttcacatgatacgttaacacaaggcaaagagtaaaaatggtttgctgctggtaatggtaatcatcaaatcagaaaaaggcgctctcctctattcatatactttgcattcctcatcagcagggtttgtctcgcagaattcctccaatgggtctccactccctgctttagctgcccctggccacttgcttgctactaggtgtgccaaatccaccaccctttggctgtaaccccattcattgtcataccaagcaaccaccttaaccatgtcatctcccatgaccatagtcaaggaggagtcaatagtagaggaaacatcagagcagcggaagtcgatagacacaagtggaacattacacacgtncaacaca

SEQ ID NO: 212065 - DNA, 491 bp, Glycine max
aattagaattatcttcactgacattttcctgcgttgagatagtagaacaacgtagttcatcacgaaacataggtaattatcctcctacaattgacataatttaagtctataaaacatcacaccatcccaccaatataaatttgttatatacaatgtcccttagtcaacttgacaaggcaaaggcgaagttccgtggtgcactttccacaatagcaaactattaggtaccttgagatcatggataacaggcaaatcagaaaatggaaatgccggagaagagactaacatttcaagggcctgtcataagtgggaggaagggaaggacagtgctcgttcatattggcataaggatccaaggtgttatagccaggcaattccatcctatattcaccaagaatctggcagaatggatgccgatcgttctcattgttgcaccatcttggtagacgtgtttggttatccttcaaaatcctaaacatgtatgcatcacg

SEQ ID NO: 212066 - DNA, 470 bp, Glycine max
caggccactactcccgaatatagagcatatcaagagcaagttctcagcaacagctttaaatttgcacaggctctgagtgagagaagctatgagcttgtctctggtggaaccgagaatcacctggttttggtgaatctgaagaataagggtattgatggctccagagttgagaaggtgttggaagcagttcatattgcagctaataaaaacactgttcctggagatgtgtctgccatgggttcctggtggcatcaggatgggaacccctgctctaacttctagaggattggttgaggaggatttggtcaaggtagcaaagtttttggaggcacaatggaaaatgcctggaagatttaagggagagagcaaaggaacaaagctgaaggacttcttggccacaattgagtcatcttctacctttcaatcggagatagcaaagctctgccttgatgttgaggagtatgcaaaac

SEQ ID NO: 212067 - DNA, 514 bp, Glycine max
aatatccaagtgcttatagcttatctaaaccacatgtaatcatccattacaactgtataaatgaaactctacaatagttatagttcacccaccaatgttttttgtttacttctttttaggggacatgttatcgtccccaatcatgacaaatgagaggtccagttcaaagaagttcataaagtttaaaaaataaaagaagctataggtagaaccagcttaagaggatagaggttctccctatcaagtagctaaggcggttgttttgcaaatagggcagaggttcttctgcattagccactgcttgatgcagccactatggaactcatgcccacaatccagtgatccaacattctctccatcagcaaattcatcctgacagatacagcaaggttccaaatcaatagaagagtctgtcatgacagacacgtaaattcgttggttcatcaacttaataatgatgtcctcacttcatccaatgctcacgtctcctatacgctgctccaatgccaacaac

SEQ ID NO: 212068 - DNA, 492 bp, Glycine max
gacacagtgaagttggattcatctatattgcatcatccctcaaaaatagtactagtaaaactggcaatgaagttgttcatgaacagtataaaaatcgtcaaagaaaaattacagggtcgtcatatatctacacaacgcaggagggttgatagacttgctgcagcataaagcaggagatgatatttgtgcaagtgaacagaaattaatagacttcgacattccattgctctgctctcttcaattgcctcttgtactcagtccaatcaatgccatctttggcagccaatgacaccataatgtcatcaattcccttttccattccttttagtccacacatgtacacaaaagtgttatccttcttcagtaattcccaaagctcttctgcgaattgagccattcgggtttggatgtacatcttctaccctttctcgtttgcacgctctcgactcacagcgaagtcaagcctgaagttctcaagacttttctcttgca

SEQ ID NO: 212069 - DNA, 517 bp, Glycine max
  unsure (1)..(517): unsure at all n locations
ggcattttctccaccataattattgtgaaaaaacgtttacaataatgagtcttggtcaatttatttgcgaaaatgtatgtatagttcaaacgaaaaatgcaccacacctaaaatcgggtcaaattctaacagttcaaatggattctgtaggaataagatcggctaacccttatttggcgactcctggagcaacggttcatggccattatggggaaatactttctgaaggagatatattagttacatttatctatgaaaaatcgagatcgggtgatataacacaaggtcttccaaaagtagaacaggtattagaagttcgttcgattgattcaatatcgatgaacctagaaaagagagttgatacttggaatgggcgtataacaaaaattcttggcattccttggggattcttgattggtgctgagctaacgatagcgcaaagtcgtatttctttggttaataaaattcaaaaagtttatcgatcccagngagttcacattcataatagacatataga

SEQ ID NO: 212070 - DNA, 398 bp, Glycine max
aaaataacacccactttacacattattaccacaattaaaagagggggggaaattttcaaatagaccgagctttctcaacaagagggtcatgtctaagttcctttattgaattaaacaaacggacaaaccaaagaaaacccaaattccaaatcatgccgagggttccccattttcaaaaaaactggcagacacccttggaacagaaaaagctggcataaaagttttacccgcagtttcaaaattttgagaaattcccaagagaatttcaaaaactgggcactgtttgggattgtcaataaggaaacctaagggccatgaagcttgatttgcccactcagaacttcacatttaaaaacccttattaggaccacattcctcttttgggaagatcaattccc

SEQ ID NO: 212071 - DNA, 508 bp, Glycine max
gagagcatggaaaaagaatttttgcgtctaatagttaaatcaatttttttgaaaggataaaaataaaaataaaaataaaaataaataatattagggatgggcttttcgaaagccaaagaatatggaacaatatcaatgccacgtacatcctcagctgaaatttaaggatgactaatcaaaattctgatgcatatatatgtacatttctgtacacaacgatgaaacagctactctgctgctatacaatttttcacttctctggcttcttttaccttccactttgcatatatggggcaatcttcatgtcgccagtttacctttagagacttgagtatcatctgatgaatctagggattgagatctggctttgctcgtaattctattatatccatatccaaaagaagttccatttgtttccgatagttcagtgagctcagccagatgacgggatctgaattcatttatagtcgctgcaatctccgatgtaagaagattagcctgagcaagc

SEQ ID NO: 212072 - DNA, 599 bp, Glycine max
  unsure (1)..(599): unsure at all n locations
aattcccggatctacatactcggaggccgccctttttttttttttttaggataatataacatcttcatctatttgatacacacaataaatttacaaatctattccatacattctataataatgttacaacatggacttcacatcatataaactaaaaagaaaaactataacaacaaattagaaggtatacatcacaaattggagaactcaaactccgtgttttaagtgtagtttatctttgaataaagagggcagctccaactaatcccaaccatattgttaggccaacccagaaagctcgatttttccctaacccgacaggaggtttccatacaagaaagtccccaaggtaatctttagatgatggaagctgattcgtgactgatccactaatttttttatcattgtccttgtatttatcactccatgttgccgcatagctgtcataagtagaaccaatcaagggtatagtcaccatctnctcctgggatatcttgagctttggcgcttgtaaaatgtaacgaagctctgcagcttggcgtcagatgctaacacttgngtgcgtcttttctaattgtcggtatagagcaatgcaatct

SEQ ID NO: 212073 - DNA, 550 bp, Glycine max
  unsure (1)..(550): unsure at all n locations
agcccccgacgccttgcggngccgggccggaataattcccggggcgaccagctcggcggccgccctttgtttttttttttttttttttttttttttttttttttttttttttttttttttttttttttttttttttttttttttcttttgttttttttttttcttttttgggagaaaaccaaactggggaaaggggccccaaaaaagggccccgacgccaatttgaaaaaacgcgcaggaaattcacccggctataaaagaaacggggcccgccggccacaccccgaaaaaaaaaaaacaaaaaccctggggctttggacaaaacgggggaaaccgaccccggggggaaacccttgggggcgcaccgacaaaccccgcccaagggggaaaaaagtgcccccaattttaggggaaaaaccgggatacgcggcgggcccccagaaaaaaccccgttgttccccatccaaaaaggggggaacccctgttcgggaggcccccccccccgaaaaaggggcccggccaggggccccggggggaaaaaaaaccccgg

SEQ ID NO: 212074 - DNA, 441 bp, Glycine max
tttttttttttttttttttttttttttttttttttttttttttttttttttttttttggttttttacttttttgtattgggaggttatttccgtattcgcgcagatattatatgtgatgttcaaaaggttctgtaatttacacaggtgatcaatggagggggacaacagcccgaatggaaaaagagaggggcccccaaaaaaaaaaaaaaaaaaaaaaaaaaaaaagtgccagcgaaaaccacagacaaggggaaaggaatggcccccccccaaaaaaaaaaatcaaaaaaaaaaaaaacccactgggaaaattgatgccggggccaaaaaaagttgggtgccaaaccccccaggggaattttcacacacggaaacaccagggaacccaaatttacccgagggggcgacaaaatatggttttaaaaaaggggggggccaac

SEQ ID NO: 212075 - DNA, 356 bp, Glycine max
gagaaagcttgaataacaaggcgacattttaaaacctcccggttttataagaacagaggaaacattatccgcaaagttcttaccgaatgctgatccatttttagattgcatatcatgcggaattttgacctctagactaagttcagcatagggaattgccccaaagcggcacgctattatcaccagacttgttcccccagcgggaatacccacagacgttacgacccggatggttctaggcggatttcataaccctgctgagctaaacggggggatgccattgataggggtgctcgaattattatatatctcatgatcgatatggcaatggatccagtcatccctttctttataca

SEQ ID NO: 212076 - DNA, 467 bp, Glycine max
  unsure (1)..(467): unsure at all n locations
gcacaatgagaaggcagagaaaattgatggttctgtttctcagtacaagttttagaatgaaaaatgaagcaacaagtgtttgtagtggtagtagtagtagtagtaagcatacaaaactacaatggcatggtacatacatataataattgaattaccaattcagaatttgatggctctcacttccacttgttggcaacaatgtcagccaaatccacaaccctttgggagtagccccactcattgtcataccaagcaatcaccttaaccatgtcatctcccatgaccatggtcaacgatgagtcaacggttgaggacacatcagtgcacctgaagtcaacagacacaagtggctcatcacacacagagaggattccctggagctcattgtctgcactctctctgaatgctgcattcacttcttctgaaaggtcttcnttgagacctgaacaacgagggtcaccactgag

SEQ ID NO: 212077 - DNA, 545 bp, Glycine max
gcgtgaaagcacatgaggaaaaccctcagatgtggcaagaggaattctttccatatagtccaaaccctcaacaccattaagtgctgcacttaaagaaacttcctcaaaggaatcctcctcatcaacacaatcaaaccattcctcaaccatatcttgtgcaactttagaaagaatttcttcatctaggggcatcatgggagtggcatatttttgaattccaccaagaaaaggatcatatccctcatgttctgtgcctaccaatctctcatcagttgtagtcaagacactaggaattttgtcacaaggtagatccagttgccattccttgggagtttccaccaaattagtttttgtaggcagtggaacatagacaccagatttcaattcaccaatgtgagcaactccctcttgactatcaacctccacagggaagaagtcaaagtaaacttcagcactttgagcttgcacaactggctcaacgtatggtatcaatgaagcatatcccagtcttcctttgcttccagcaacatggaaaccaacaattt

SEQ ID NO: 212078 - DNA, 520 bp, Glycine max
aaattctctgtatttaatcgatcaaaattaagaatatacaatgagtgaattaatgcagcagcagcagtagtcacacaagtatcatcatataatgcttaaaagaaattaagcatagagttttccaaatacaaccttaaatgagttctccaaaaaggaaaagaaaggaggttcatgaaacacatatagaactgtttcctccattggtctgcaccacattatacaaacttggctcaaatgaggagcaaatttttcataatcttggcaatgcgcggggaagaatgcgaggttggtcccaatcagtgacaatgtgatcacgagtgatatccttgagtgaggtgcaaccactcaaggccatggttagctcaaactcctcacgtagcatccgcagcacgtttcttacaccagcctgtccttcagcagccaaggagaacaccacagggcgttcaataaatatgccagaggcacctagtgctaatgccttgaagacatcaggtccacggcgaacaccaccattcaaaaa

SEQ ID NO: 212079 - DNA, 361 bp, Glycine max
attctctccttaatttattattggctgcagataatgcaaaaccccgaaaaaaaatcctcattacaccgtctgagcaaacgtttgcaaaatttttccttgatacggttacacacggcccttagtttggacggattgcctgctgggaatggtaatcatcaagggagaaaaaggcgcgcccctctattcatatactttgcattcctcatcaggagggtttgactcgcagaattcctccgatgggtccccactccctgctctagctgcccctggacacttgcttgctactaagcgtgcccaatgcaccaccctttggctgtaaccccattcattggcataccaagcaaccaccttaaacatgtca

SEQ ID NO: 212080 - DNA, 506 bp, Glycine max
  unsure (1)..(506): unsure at all n locations
aacttaatggatcctttatgcaaggaattccaagttaattgcaagaacaatgtctacaatggagatatatcacgggagtaagaagaatggtttttctggactaaaaaaccagaaatttctcttaccataacaactgtgattaaattaccagagtattttctttttgtaccagactctattcacatttgcagtccggaatttcctatctgtacattttttttttcttcttcttatttagtagaaaattaaatgaggtattcataatacattaggaaaagtgcatctgggtgatctttaggcagcttgctgacatagagataaaaacgcaacaagtcctctttagaaactgtttcagcatcaacaacatcatcattacaagttaatacccatagatcctccgaattaactctcctcaagctaccacggcaaaaaggacaagactctgactntctgttccacttgcggtagcatttaatacacatggcatggcagcaaccaggtaaaac

SEQ ID NO: 212081 - DNA, 525 bp, Glycine max
gtaatagttatacttcatggcattttcttcagtaactatcaatcgcgaaatcgttatcgttatccgtcaatctttttcaacacgccaatcttagttacaccagcacagtaaggaaatcataaaatgtattcatacacgaactcaaccaaagaccaaagctctgacttcaatgctctccctgccaggccagccttgctgtgtcctaggatcgacaaacgccgaatgaggcgtcctcgcgccatccttgctatcgtagcactgaagcagaatcctctcgtcatttttcatcccgctcaagtagtgccacttgccctctggcgagtatttgacaccggcagtttcgccagtgcggtgaggatagcgatgttgcacgccagcaagctggtcatctgggactgtgcgagaatcggcgtaggcgagcggtgatgctaccacagggcccgtgagtggacgccagacgttaatgagtcgaacgctgtcttgtagcagtttctctgcttcgtctcccatgtggtagtgcacgcg

SEQ ID NO: 212082 - DNA, 541 bp, Glycine max
tttgttctttttttttttttttcaatttaagtggacactgtaactcaaaattatagaggaagacggtccaatatgaaaaatatagtaagatcatctcaaacttagcatcttctctttgcacctaagacattgagaatgctaagaatgttacacgcaagttccatcacaacttctagcacttggattagtacaacaaccttcacgaacagaaatatttacttgccaagtttgctttgcctccaattcaagactggaagaaagttcccctctgaatagcatcctcgttagcatttccaagagcagcctcgttcaagtacttgtcagccaattggactctcttgacattctcttgttcttggacaagcatgttaccatacagcaagagcttctccagagtcatcttgggctgctcaaaggttggaggtccatcttttgagttcacaagcttcttcccaacactgtcaacaccaacaccagaaatccacttcctcactttatcatcatatactttggccctcagtgcaccaaagaaatcaatgga

SEQ ID NO: 212083 - DNA, 473 bp, Glycine max
caagagagaaacaaaaatgtaatttatttatagttttatgagaaaatttttcctttggtatggacaagaaagaaaaaggaaggggaggggcaattgggtaaatttaggagggttgttaagagagaaaaacttcaacggttgaattctttggggtgagacaaactgggcacgctcggaaatgcgcatcgcattctgtacagacgcacaagtgccgacacggcaaaacgaccaccgaggccacgcgctttgcgcaccctcggcatttgggacgcgccgccgtggcagccaccacgcggtcggggtcgatgtaggcggactccgcgtcctccgcctgtccctctacagcagcagatgaaacgcccacgacagcaggatcttcaccgccgtgggacagtatcgaatgctgcatgatggtctggagggagactgtcgtagcctcttgggcccgggcctttacctgtcacacatgggcc

SEQ ID NO: 212084 - DNA, 372 bp, Glycine max
tttgttttttttttttttttttttttttttttttgtttgctggtttttttttgtttggtgtttgttttttttttgtttttttttttttttttttggtttttttttttttaaaaccgacagggtttttgccttttcgccgggagaccctggcaacaaaattcagggggtgatacaatgggcctgaaaaggggggccaaggggggggggaaaaaacggggggcacttccgaaaacagttgactattacggaccgggggaccatggggggaaggttgggggggggatggaacccccggggaagaaacgggcccctttagggggggggccaagtgggaggaagcggaggccgggggtacagcaaagggggcttggg

SEQ ID NO: 212085 - DNA, 540 bp, Glycine max
  unsure (1)..(540): unsure at all n locations
acaagttaattgaagaaattcaatttgtttaatcaaattccccaaccccctctctttttatttgttcactacgtattatatgcaataaaatattatatggcagaaatattctaagttggaaaaaatagaaactaagatataggatttttcaggaaggggttaaaaaagattattttattgatatttttagaatatttctatttcgacacaaacaagaaggaataggaatcggactctaggaaaagacaaaaaatcccccctagagtaccttttccatattttaattgattttgtttcaaattatctatctatatagatatctattttatgtttagtatcgaatccaattttattgtattttacaatcgaaatttctataatagaactctctattatagaaaaatgaaatctgaaaaaaacagtgtcataaccataatattcgaatttattggggggttgaaaaaacaaagtcaaatagtcttcctgacaatatccatactcgagtntatttgtattacgttacaagtaactctttaaata

SEQ ID NO: 212086 - DNA, 460 bp, Glycine max
agtaacatctacaattattattttttaataaaacgtttgaaacacaggctttgaggttgaggtgtaaatgctgctgaataaccatcctcacttgtcacacaagcctaaatttaaatatttatttacattggcacataggctccttacagccatatttgccctcgagtgatctttcacctaaaagcagaccaatcgtttacaaacacataaaatcatctcctaagatgatctctcataaagaaggaatgcctcaaagcatccctagctgtaagtctttcaaaggggtcatatctaagtagcccctgcaaaagatgtataagatctccagctgaatgatcaacatgctgcattataaggttctgtagtcggtgaagcttcataacagctttaatactctctcgtgagattgcaccctctggccagtccaacctaccccttcgaacatacttttttgcatgtc

SEQ ID NO: 212087 - DNA, 500 bp, Glycine max
aatcactctggtcaatccttaaatttcttttttctactttctccgctgttagccataggccacagcatctccaaaagacaaaaaagaaaaaaacagaagactgttttagaattgccccagccagactagtactgtcacaatcacactgttacagcaccaacatatactcgctacaagcacaactacaaacttgtatcggcatttgatcaaacaaattacgctatattaacagcaaccggcttccccctacccattgaaaatcctcttgtaccatccggcattcggggcccagggggttgcttggcaatgacttgatcagtgaaaattgtattatttgaagggggtgttcccacacgattattctgatgacaatgaactcggccacgtcccttaccccggccccggctacgacctttcctttgcccactctctttgtcataaccatgctcttctcccgcatgttcaagcagcaaagtatcaggaaaggaagcatcttctaa

SEQ ID NO: 212088 - DNA, 422 bp, Glycine max
aaagaaagagaaatgccaagccctttaatgcatagtatatatagaggggaatttttcttctgatttgtgttgcttcctaaaacaataatttataccgtagcttccttaaatcatgacaaagttgcattcagaatcaatcatttaatttctttgattcattttcaggcagagactaacatcaacataagatttatatagttgtataatgtatactcaaattgaatttgacttcattgtcatgaatgttgtttcaagcttcctggtatagcaacagtcagcaccagaattcttgttctttgacaacataactgcttccttcttcaacattgcattgtttaaaatcaagggtccatttctcaaaagagcaattagagaaattataatatcctccatgtagagaaagcaactcttttctcactcta

SEQ ID NO: 212089 - DNA, 432 bp, Glycine max
gggtaacagaataatcaaagttttattgaaatgaatacctcataaaactcatgaaagccgttacaaaaaagctggtaaccgatgtagcaaaaagttttattaaaattctaattttgccatttaagatgactccttagaaagcttctaatcaatgtattatgcggttaatggtgggtttaaactaaaaatgggaagggtggggtccaattgcaaggccttctactggttctagcatgggggcatacttaaacttctcatcaggaatcaccaaatcccacttgaaccgtttcacgatattatgcatgaacacaagtatttttagtttagcaaacttttgacccaaacacattcgggggcccccaccaaatgggacatatgaaaatggtgttggccctgctccttcaaaccttgaagcatcaaaagtttcgggat

SEQ ID NO: 212090 - DNA, 435 bp, Glycine max
aatgcgtcatcattgatgcatattattacattattcagaaggtaaagaactaccttttgaatgtaatgtgtcatccggtttcatcgcagggaaaagcaagacttctttgatgttacttgaatctgttaagaacatggccaatcgatcaacacccataccccaaccacccgttggtggtaaaccgtaatctaaagcgtgacaaaagccttcatcgaccatttgtgcttcatcatcacccatttctttatcttttgcttgatgttcaaatcgtttccgttgatcaattggatcgtttaattccgtgtatgcattacacacttcttttgtcgccacaaaacattcaaagcgttcacaaagtccttttgtatctcgatgctttttggctaatggggacatcatttctggatgaccacagataaaagttggattaataca

SEQ ID NO: 212091 - DNA, 551 bp, Glycine max
ttgcaattccttcctcgttatggagtcgcgagtgctgtcacgcgccggaaccttgtcctccctccctcacctccgcaagccgccgcgggaggccgtctccagcgcctccctcgtcgccgtgaaggccgtgggctccgtcgcggacggcggaaacctgatttgggggaggcagctgcgcccggagctctgctcgccggtgctgaagaaggaggctgtcctcctccggccatgcctcgccgccgcctcctcgccggccgagggtagtgattccgccggagaagcaaaggttgctccggcggggttcttcgacaagtacccggctctggtcaccggatttttcttcttcacgtggtacttcttgaacgtgattttcaacatcctcaacaagaagatctacaattacttcccctatccatacttcgtatcggtaatccatttattcgtgggagtggcgtactgtttggtgagctgggccgtgggccttccaaagcgtgctctatagactccaacctactgaagttgctcattccagtggctgtgtgtcatgcatt

SEQ ID NO: 212092 - DNA, 437 bp, Glycine max
acttcctgaatttacattaaatgcatctaaacttaaataggtatttgtacattgaataatcaatctgtgcatgacaatagaagtaccattttacaagctttcaccaacataaaaactcccccctaaagacatttaagccttacaacttagttaaacaagtttcccaatgtttctccaaggcttgcaatcatagagttgttccaacccttctcacttgggagtgaaagcagcaaaaatagtagcatgaccaggatctgcaaggtgagcaaagaggttgtcaataggaccagtgccagtgtaaatgtgctggaaccatgcccccatcacagccaacatggccaacctcccattcttgagctcctttgatctcaactccttgatcttctcaggagaaccacttccccagccaagtggatcaaaccaaagcccacctgggt

SEQ ID NO: 212093 - DNA, 492 bp, Glycine max
ccttgctcctgcttcctactatatcggtttttcactttttctttaggttgattctttgaactgttgttggccatggatggcctaagtcgcttttggggttgcttgcttgaaagcaacagtgggagctattctgcagctcctcctctgatgctcctgaacaagttctccagcaaaccagtcaagtttctcgaagttactctgctccccaattctctttcctccaaacagtactgactctacattctcctgcttcaacatctcttctgctattcctactagcatcttcacattgccgggacttgaatctgtatccacattgggtccacatcgccccatacttgacccatttgcctgaatgcggacataattggtgctgcggcactgaccaaaggccatggcgatggcctggtcgacgaggtcagaggagccgtcggcggaaatgcgggccatgggcctggcccaatccttggccttccagcgtttgactcggtc

SEQ ID NO: 212094 - DNA, 519 bp, Glycine max
aagaaaaaagtcacttgcatatagaacgtttaattgtccacagttttccacacgagtaatagagaaaagtacagacacatatttttttttgaaagaaaagtattgattgcttttaaatgcattagcaggtgccactcaatgatgaccagtcatcactatggggtgtgcagaagaagcaacggtggtccacgattatgatgatcagaaatcacttgatccgacggcagatagtgattccatcaccaaccgggagcatgcaaatctcgatcctggggtccacagcgagggctttgttgagctccagcacgaagtccctgtagtacctaacatactttctaagaggagcatcagggggtgccaccacagatccgttccatagggtgttggcgtacccgatcacgcccccaacttttacaagctctatcaacctcttgtggtagttgaggtagttgtccttgtccgcatcaacaaagatgaagtcatagctgtcatggttcttctcatctgtaatcatttcat

SEQ ID NO: 212095 - DNA, 441 bp, Glycine max
gagaggacatatacgccactctagaacatcattatttatttatttatttatttatttatagctcttaacacatataattccctggatacaacatgtatactggtcatattcaactctagagagctttatctgatatgatcatccttaacatattcaaagatagctaaatacttaactgtgtaatatatcacacaaacgtagagtgacatatatcgagtaaataataaatataagtttaatttatacacacaaactatgagtatataacatcggtatccaaatattcaacaagaatttactttattaccgcatcatgttaaaatgttgcgataaagtggtgaaatcctattgaatgcttgtgtcaagatgctttgttggatcaaagtgggtataaatcaaactggttatctatatatatatatatatcccacactttaatta

SEQ ID NO: 212096 - DNA, 462 bp, Glycine max
gcggcacccaccatgaaagccgatttttttgccaccaccaaacaaagcatcccaaggaccacttaatgtagacaccaccatctgtggcaccacaattgcaagattgaggactcccaaagataaaccttggcctgctcctgaagcgctgcagtatattgatgctagagcaaatggaacactgaaagtaatcgcaagaggaactccgagaaccccaaagaaaaccatggacccaaccaccaccccttcggaggggtgacccacggcggcgggattcatcttgcgctggtgctccgccaccttggtgatcaccaccgtcattccgaacccaattgccagaataaagttcacaatcgcccacagcctctttactcccccaaccatcttacccaacggatccaccgtcagcgacatgaagcccaaaacgacggcgtttaccatcagacctagcgacccaacgcgcac

SEQ ID NO: 212097 - DNA, 503 bp, Glycine max
gcacaaaactggtaaaattccagatcaataaggattgcggcgaagccgcaaagatacaacattcattagggaaaacaggagtggggaaaaataaggggggaggggttgaggaagaatcaattgctcacagagcatgctaagacacctaaatattccacacacagttattgaaacaacccaatatagagaaaatttttctttggtgtattataatataaagcagaaccaaatgacttggaagattctactttcttataccattcacttggcaagttcgttgcggatgagttttgctgcggcaaccatgtttgtgagggctggcttcacctcagtgtacttacgggtcttgagcccacagtcagggttcacccacaagatgttcttctcgagcactgccagcatcttgttgattctgtcagcaatttcttcagttggtggtattcttggggagtggatgtcatagacaccagggccaattccagcaccatactgtacaccttcgc

SEQ ID NO: 212098 - DNA, 490 bp, Glycine max
ggctcgagagaggttcttactttcagccattctcttggagtttgcgaatgaaaatagcactaggggctgcaaagggtcttgcttttcttcatagtacagaacataaagtcatataccgtgactttaaaacgtcaaatatcctactcgatacaaactataatgccaaactttctgattttgggttggccagagatggtcctactggtgataaaagccatgtctctactagggtcatgggaacccgtggatatgcggcaccagagtatttagcgacaggtcatctcactaccaagagtgatgtgtatagttttggagtagttcttctggaaatgatatcaggaagacgagctattgacaagaaccagccaactggagagcataaccttgttgaatgggccaagccttatctatctaataaacgaagagtcttccgtgtaatggatccccgtctcgaaggtcaatattcacagaatcgagctcaagcagcagc

SEQ ID NO: 212099 - DNA, 449 bp, Glycine max
ttcgttctttttttttttttttttacaacaataacagttctactatatgaaacagagtatttagagacaaaagtgtaggtttattagaaaaccatctcaaaaccgtgcatgacttcaagttcagagatttacaatacccattagcaggccaaatatatatgacatttttggaacaaccccattttcaagctttgtttccatacacagtaaagaaaagggaaaagaaaacagacaaaatttcggggattgatcatatgaacatgatcatgtggcggaggctaaaatgaccttggctttgccacaaaggtggaatgctcgagtatgagcaagcttaatgggcctgctttctcactagagtcaatctgcgactggccagggggaggcaagagctcaagagttttggaccaaacgctccaaagagatgccaagaattggcaatgcaagaatga

SEQ ID NO: 212100 - DNA, 439 bp, Glycine max
aggtaaataatttttggttctcaatattattttgtaaatccaagtttccgcgccttccccctaaaacaaaaatgcattattatctccaacttgggaagaaaaatcgtttcctatttttcttctgaaaattcttttgttggctaaccttgtatcggtaaagggaaaattacaataaaaaaaataccaaaaacaaacccaactatatgacaatggacataatacaactatgcaataagaagttccttgttaggagaccaagcaaatacattaagcggcaacttcttgctcttttgtggcaagttggttctgaatgtgctgaggcaccacatcaaacatggctaattgcattgtgtaggatgcacggccctttgtcatccctctgagtgtgctgacatactggaacatctcagcaagaggtaccagggcatcaaccacctta

SEQ ID NO: 212101 - DNA, 396 bp, Glycine max
aaagtagtagttctagcgggtgactcgcttttttcaaattggttttcattattaagaaaagggaacaaagataaaatacgagcttgttttatagcaattgttattaatcgttgttgttttaaggtcaatctatttacgcgtctggataatatttttccttgttcactaataaatcgactaattaaacccatgtttttataattaattcggtcccccgattggatcgggggcaaacgcctacgaaaagatcgcttggatttcataaagagtcgcttagatttttccatggtttatttatccctattccaaaaatcacatttattacaagaaatactatcaaggatttggttttttattctgacttttttaatatatgttggcatttttttaatatat

SEQ ID NO: 212102 - DNA, 420 bp, Glycine max
  unsure (1)..(420): unsure at all n locations
aaataattgtctaaactaataaaatatggcgttgggccacagagtctccacaaattgcaaacttcttttactaaatgaaattgactacatatgcctcttttttatcctttatttgagcagatcttcccatttgcagtactgccctcctgctaatgctcgataatacctatccctacaatagacaggtcttccatcagcagcctcagcagcagctgctgctagatcatcatcagttatcacctccactggcaatttaagcaactcctcttttcttaggagctttgtgttaaccttgggagcttgaacagntgatttaatttcttctttggtaaaggtagttcgaaaaaaattctccactggtgtagcaaagataaatagcattactcctgtaacaagcaatgctcctgtcccaactagagt

SEQ ID NO: 212103 - DNA, 480 bp, Glycine max
  unsure (1)..(480): unsure at all n locations
aagataacttgccccaattttattaatctgatgaagtatatgtgtaaagaagcttctgcattgttcacgattgtttatacccacacaacacaaagagatattcaaagccagggagaattgtaaatgggagttacaacagatttaacttgaagatacttgtgtagggcttccattccaaaatctcttccaaatccactcatcttgtaccctccataaggaatgtcattcccaaaggcaaagtaacagttgatccaaacaatgccagcacgaatggaccttgacacagtgttggctgtgtccaaactctttgtcacaatgcctgatgctaggccatatcttgtattgttggcaatcttaattgcatcctcaatagtcttaaacttcatcaaagccatcacagggccaaatatttcatcttgtactatgagcatgtcctccttaacattagagaaaatngtaggctcaatgtagtaacccttg

SEQ ID NO: 212104 - DNA, 472 bp, Glycine max
gaaacagaatataaagtaaacatttttcccatccgaattctcaaatggacataaaacccacattccgaagttcatataacactacaaaatcaagtcgtatacaaatataaataaccagcacaaaaatgaaacctacaatatccagagtaaccttaaaaggtaaagaaccacaaaatttaaccaaatcattgagaatgtccctaatcaaacaagccgaatcccatatcatcatcactctcttcttccggtacttccttctttttctcctcagcagctggagctgcggcagcagcaccaccagcagcagcagcaactggggcagctgcaacagcaactggtgcaccaccgtctgacgcatttgctatcaaatcgccaagatttttcttctcagcaagtttatcaaacaaggttggccaataagagtctactggaacctttgcagttttcaacaaggtgctgatcttgtcagcag

SEQ ID NO: 212105 - DNA, 525 bp, Glycine max
  unsure (1)..(525): unsure at all n locations
cattcgaattcattttatttatatattaatattatattcaaatgaaataaaaagatattaaaagatactaattataagaatttgaaagtgaaattataaagttattaaatgattaatcaatttttttctacctgttcctgtagtaaaaagagttccatctgttcttgaatagcttccttcaaaaggacttctgcttccccagtgaatgtcttggtagaagatatgatttctttgaattgaggtttattcgtgtttaagtaagcacgtaactcaacaagaaatttccttacctgtccaatttctaatgaatcaagataaccattcgttccagtataaataggtattatctgttcttccacggtaagaggagctgattgggattgtttaagcaactcgcgcaatcgttgacctcttgctaattgattntgagtagctttatcgagatcagaagcgaattgggcaaaagcttctaattctgcgaattgtgctaattccaattgtaatttaccagctacttgtttcatg

SEQ ID NO: 212106 - DNA, 494 bp, Glycine max
tttgttttttttttttttttttttttttttttttttttttttttttttttttttttttttgggtttgtgttgtttgttattttttttttgtgagggtgtttatacattattgttgtgtttgtgtgggaaaaaccaaaaaagggggggggggggtataggggggggggggggaaaggcttggtgggggaaaaaaaaaggcgcccaaaaaagggagaaaaaagggggcatttttatgaggacaggacagaaaaagcaaaatggacggcgggggggggagtaccacgggggggggggggggggccccccccggaagaggggggggggggggggtccaaaaaaaaaaatccgggggggaacaaaaactttggttccgggggggggaacaacacgccccgggggggggggagggggccctccaaggcccaaaaaaacaaaaaaaggtgaggttcccggggcgaccccccccttgggggggggggaacgggggggggccc

SEQ ID NO: 212107 - DNA, 511 bp, Glycine max
aatctctcgaagatttaatttgtcattaaattggtctctcaaaaattggttaaaaagctgcagaggaaattgtaaatttaaacctctaaatgaactaacaaaaactaagatttttatgtatggctaaaagaataggtattatcaatccaagtcccaaatactcccttccctacgctgttcgtgttatgtactgaaatgattaaaaggcattggtgaattacctttcaaaagggaaaattgttatataaaaattctccggagttctagtaatcagaaattaagaatcaatcagagctactagtagtggtgcaaatatccacttgggttttggtaggactaaatatgaatggctttggtggaatttgcaactgatctatgcttccttctaacatttcaaccaccttactcatagcaggcctgtcagatgggattgtttgtatgcaccacaatcccacaataatcattttcttacaaatttcattttcatctgtggtcataccttcatccatgc

SEQ ID NO: 212108 - DNA, 544 bp, Glycine max
atgtttctatcgcgtaccgattccgatcttatttccttaggctcaatgataggcctactgagaaaacaaataattccaattcatatatgaacttttttgactgcttatctcttgaaaatgtggaactggaattccccgaggaattccgaactcatttactttggattcagcgagaggcctaattactaaaacaaataatttcaatgcatatctcaacattactgcctccttatttcttgcaaatgtggaattggaaatgcaagaggaattccgatcttaacaacttcggctctaggatcggccttatcagaaatcaaattatccccattcatgtatgaacagcattgcctacttatctgttgccaatgaaagcatcggaaatccctcgaagggagcactgtagggtatacctgccggcatgcttactagtatctaactcctgtgaggggtagatgggcactgcatcctctgtttacaactcttgtgacagaaagaaccctgtcatactccacattatttgacccgtaggacatcctccttatat

SEQ ID NO: 212109 - DNA, 473 bp, Glycine max
gacacgattagctagcttcaactagattagatggcaacagaaagttgtccaatacaattcccaaagtggctgctcaaccagaaataaaacgagaaataaaggatccaaaaaaatcaaatacatgccaaatttctaacaaccagaccttcacagtgtcttaggcagtatttgccaatgacaattaatatgactaccaagtaaacacctatttttccctaataacctataggcttcaacaaaaagaaaacttagtaacaaaacaccatccgcagccaccaacaatccatgttcacaaacacagaacgcaccaacttaagcacgctcaccacgaatccttcttgccagctgaatatccttgggcataatagtcacacgcttggcgtgaatggcacacaagttagtgtcctcaaagagcccaacaaggtatgcctcagcagcctcttgcaatgcaagcacagcatggctctggaaac

SEQ ID NO: 212110 - DNA, 570 bp, Glycine max
acaagaattaataaataccatatcaatcaatatatgggcgatattcatgaatttcagtcacgccaaaatttattattggctgcagataatgttaaactttgaaaatctctcctcagacaccgtctgaacgaacaatttccttctttttcacatgatacgttaacacaaggcaaagagtaaaaatggtttgctgctggtaatggtaatcatcaaatcagaaaaaggcgctctcctctattcatatactttgcattcctcatcagcagggtttgtctcgcagaattcctccaatgggtctccactccctgctttagctgcccctggccacttgcttgctactaggtgtgccaaatccaccaccctttggctgtaaccccattcattgtcataccaagcaaccaccttaaccatgtcatctcccatgaccatagtcaaggaggagtcaatagtagaggaaacatcagagcagcggaagtcgatagacacaagtggaacatcacacacgtgcaacacacctttcagtggaccctcagctgcctttctgaatgctgcattcacatcttcagcagt

SEQ ID NO: 212111 - DNA, 504 bp, Glycine max
aaaatatccaaagccaaaatttgacacataaatttgattttttaaaagcaaaccaagcaaaaattgaacacaaatataaagttgacatttaaaaagcaaaccaacaacgcaacggcaaagccctaaaactcgctgcgcttaacaaaaatgtaatcaggggttctcacaaacacaacacattaaaacagaatgataaaaggagtcttgccaccgtcgatcaagaacccaattctgggaacaaaagttgcgagatgatggtggagacttcaaactatgtccgaaaaacaagctacctagaaacgaagacacaagggcaagaaaccaacatttattgtaaccataagaaacgacatcccctgatgaaccaaaccgcacgattcacttcttcttctgggcagccttggtgaccttggctccagtaggatccttcttctccacgttcttgatgactcccacagcaacagtttgacgcatatccctgacagcaaagcgaccaagtggggg

SEQ ID NO: 212112 - DNA, 548 bp, Glycine max
  unsure (1)..(548): unsure at all n locations
cgtaggggaaataaaatatactaaatttaaaccaatactgtcaaagcagaagttactattaacggaccaaggaagaaactaaattaatacttctgcaactagcaacaagtactggccattaccacattatatattcggaacaacagaaaataaagcaaaagagcaaacacgttacaagacattacattatacaccatcacctcctaattaattgtgaaaaaaatcgccttaattattgtgaaatctgtccgagttcaatcgctgtcctcttcatcatcgttaaattcttcactctgacttccatcatcgtcaccgctatcctcttcctcatcttcttcatcctcttcattatcattatcttcatcggcattatcactaccttcagccccattgccactggtttcaactggaacctttggctttggaggtggagatgtataactacttgttgatcttctacgtgaacttgacacaatattgcttagatcaataccctcaagttctttggctctcgccttcttcctttntacttctttgatttccttttc

SEQ ID NO: 212113 - DNA, 527 bp, Glycine max
ctaagaacagttagttaaagaaaaagtattagtatcaaatacaatgattcaatcctaattatacacacatcccatcctatattggtcataagatttctcctaattgattttgccatatatacatgataaactactaaaaatatctaagatattctaacagaaatatatgtccacaagcataaaagataagataaatatgaactcacatttgttctttacaagaaaacagaaatttcttgtaaatgcacatgactattttggttgaaatgaaattctcattttgtagctccttgtaacaccttggctcaagggcttgcacaatctgatcaattatataactttagtgagcatggcaacatccttcaggcatttagaattggaacttttcttaaaataatcactatagtttatattctagctactcaaaatgatatgaaaatcattatctaaagaaatcaaagaggatatagatgaaaaagaaagatacaaaaataactttccttattacccgaagggcttttttttta

SEQ ID NO: 212114 - DNA, 496 bp, Glycine max
aacaaagtaaaactccttttgaaatgaacattgttcaagaacaattagatcaaagctcaatgcaacaccaaggatgccacaaaaccctcttatttcgaaacctaacctatattaagcctctacaggagcaacaagagctctctcattgtacctcaatccactgttggctgaaatccaaccataataataatataaagcacaaattacagaggaactagtgatgtttactcaagcatcatcaagggcaaggacaccagggagttgcttcccctcaagaagctctaagctggcaccaccaccagtggagatgtggctcatcttgtctgcaagaccaaccttctccacagcggcaacagagtcacctcctccaatgatggtcgttactcccttcccactcaactctgccagtttcttggctatggcctctgttcctgtggcaaacttatcaaactcaaaaacacccattggtccattccaaatgacggcctgggtctta

SEQ ID NO: 212115 - DNA, 428 bp, Glycine max
gatcacaaacaatcatatagcataaagatggtatcaacagtataaatcactcacatgtaaaagcacaaattgcaaccaattgttccaggttcatagtagtaacccaaaaaagatgaaaagtgaagtacaaatgcttggggagacacatttaatccaagcttctaaaacaaggacagagcaaacaagttgaaaatactaatgagcaataccaataaataaaagcaaacaaagccgaccaacaaaaactaatgaccccaaatgaagattgtcctaatgaaaatataattctcatcaaaacttatctgccctgtcttttttctgttcaggtgtttttcaatttttttttgttatggttgattggtcctcacttggccatcatgactttgacaaactcctcatagttgatctgaccatcaccatcaacgtga

SEQ ID NO: 212116 - DNA, 556 bp, Glycine max
gatttctagaaacttcgtgaaaactcgcacgcctactcaggtcgctagtcacgctcagaagtactttctccgccgccacaaccagaatcgccgccgccggagatctagcctcttcgacatcaccaccgatacggtgatggaatcttctactataatggaagaagaacaagttccgccagagacggtggcggcgcctctccccgccgcatatccgccgtcgcattacggggcttttgccggcgcgggttttccgatagctccggtggtgttgccggtgagtggcgagagactaaccaagccgatcaggccgacgccgattttgccagtgcctccgtcttcgaagatggctaatttgaacttgaaagagaaagcttctccgacaaatctcattgagcctttgccgttgtcgttgaatctgccatcgccgacgccgcggtctcaggatcagtcgtcggcgagtagtgggcactcgtcaccgtcgtcgtcgtcatcagcggcagcttttcaggctatgtctgcagcgaagttcggcagcggcggggatagtatcatcagc

SEQ ID NO: 212117 - DNA, 376 bp, Glycine max
attcattagttctcatccattaatttccattgaagtccgaaaacagaaaccaaaaatacaggatgatgaaatctcaaaaagcaaaaacaaatgggaatgtactttaagtacaaacaaacaaagcggggtggcggctacaaatgctttgcaaatttttcacacttataatcctgggggcttgtatgcgatgaagctgatgcactgcacttggcgaacgttgtcgaatccgatgatacggatgaagccgttggggtatgcattcttagcctcttgaagctcctttaacacctgagaagcataattgcaacctaacataggcggcttacacatggtccagtagcgtccatcgcagtatcctggtgacctgttgcgctca

SEQ ID NO: 212118 - DNA, 501 bp, Glycine max
cgtcccaaaagaagtgacataaacatttatatctctatttatgtatatatttaattcctctgctgcagggaaagcaagagaggcgtctatgagtaatagaaaaaacttacaggcgttctccacgtgtttgcttttttttttagctgactactaaactcattagccacaaacattttaagagagccatggaaataaaagaaaaacagggtattattattattccttttactggccacaggtcgaaataattaggatgacaccctaactaaggctcgattaacgagattgcaatacttgggattggtattctcccaacgcccaaatggggaatatgtttctgtatgcggcgtatgtgatcatgcaattcttgttgaagactgccattatttcctgctgcggaaagccaccgtcctccaattgggaatttatcaagtatgcagctgcccggcgcagaggatgcgaatctctcttatcctgtccagcttcaatgagagccaacat

SEQ ID NO: 212119 - DNA, 486 bp, Glycine max
gcatgaccacaaggaatatccaaattaaacacaagcaaacaactgaaaatgaaagaaagcagaaattcaacacattccattaagttgaacactacccactttcttcctttcattggaatctgctaaaagtacatttattcttgactaacatattcaaagatgatacactaatagcagtttccctgaaactcatttagcaactagattggagctctgtagagctggagaaccttgttccatgatggtctactgctaatgtcatcccaccaggcacccacatgcttcctctcctctaacaaatactttttccccatattgttcacaacataatcaagaaatggaaggtggctaatatcagcaatgctgaagaaatccccagccaaatacttagtctttgagagcctctcctcatagatgttcaacacttgtaccagctttgcttcactctcctcaatcaccttgggatctggagtcacaccaaatagt

SEQ ID NO: 212120 - DNA, 495 bp, Glycine max
tttcttttttttttttttttttttttttttttttttttttttttttttttttttttttttttttttttttttttttttttctttttttttttctccggggggtttagcacccccgccaaaaaggttcttttttttggggaaaaaacggggggggggggggcacctcttggaaacccaggggcaaagcccaaaatggttccctccccaatgggcacccccccagaattgggcccctctaaaattggcccaaaacaaaatttcccctgcaaaggggcccatttttttgggaacccccgccccccggggaaaaaaaaaaaaaaaacccccccgggggggaaccccaaagttggtatggggccccccccccccattagagggggggcggggggtgcggaatttttaaaacaccttcgttccctctgtgaaaaccccccccgcaaccggtggaaaccaaggggagaaccccccccccccccaacccaagaaccttttttt

SEQ ID NO: 212121 - DNA, 390 bp, Glycine max
cattcgaattcattttatttatatattaatattatattcaaatgaaataaaaagatattaaaagatactaattataagaatttgaaagtgaaattataaagttattaaatgattaatcaatttttttctacctgttcctgtagtaaaaagagttccatctgttcttgaatagcttccttcaaaaggacttctgctttcccagtgaatgtcttggtcgaagatatgatttctttgaattgaggttgattcgagtttaagtcagcacgtggctcatcaagaaatttccttacctgtccaatttttaatgagataaggaaaccattcgttccggtataaatagttattatctgttcttccaccgttagaggagctgattgggattgtttaaac

SEQ ID NO: 212122 - DNA, 469 bp, Glycine max
gagttccaaggaacaaagccaaatgccttaatatctcagtgatatgtattgtacattaagtaagattggagaaaaacatgaagatgaatgatttagagagttggagctctctcagcagatccagaaatgacagtgagcaagttgttgccaaaagggtcactgagatgttttgcaaggttctcaacaggaccttctccagtgacataagcttggaagtagaaaccaagcatggcaaacatagcaagtcttccatttttaatttccttcacctttagcagtgcagcttggtctggatcatttgcaagccccaatgggtcaaatggaccacctggatgaagtttgtcttcgaaattcaggccattaataattctgtagtactctgcacctcccacaagaacaatctcagcaatgacagccacaataagattgatggggatgggtttcccgagtagttcaagtacccccatca

SEQ ID NO: 212123 - DNA, 470 bp, Glycine max
tgggccatgcattcgctcccactgatgggaggtgccactttgacgccgacgaatattgggtggcgtctggcgatgtcaccaaatcgccggtgacaagtgcgtttgaccttgaatctgtggcagtgcacgagatcgggcacttgctcggattaggccactcgtcggacctaagagccatcatgtatccttctataccacctcgaactaggaaggtgaatctagcgcaagatgatatagacgggattcgaaagctctatggtatcaacccctaattattatagctaggtgttgtttgtactagaactagagttttatttcggtaatttgcattaaaggattttgaaagttatcgaggtgaaattattctaattcaagaacaacaaaaatagcatgtaagatattgtattttagttttctcttaattaagaataaaccagctgatactaggtgatgcatatatgataatgaat

SEQ ID NO: 212124 - DNA, 500 bp, Glycine max
ggataacttgatattattttattacatacatgcatagatagcctgctctcaaataagtcggcaggaacaaagatagagagattcaacgatcttcaaatttcacatttgccagaaatatataacagaaaagaggggtatgggatatgagttaagttttgatcacattcaactacactatcccaaaccgttactcttaagactttgaacttcacttgtactctaggatcatgttgttctcaggagctaatccaacacaagccctcaggatgttttccagcatagctcgctgctttgacaacgcattcaccactggtgtacccggtggaaccagaagggccttggtcaggtaactaaggatggtcgcaactgggtggaacgagtgggattttccctcattttcaggtttaaactcgattcgagtgctgagctcagcaagaaggaccaagtccaagataataggagcagctaacagtgaatcctcacatgtgttgtgcaacaca

SEQ ID NO: 212125 - DNA, 467 bp, Glycine max
gtcccctttttttttttttttttttttttttttaggacgggtccaccactctagaacatggataaaaaattgtttatttaactatgaatagctcttaacacatatggattccgctggatacaacctgaatactggccatattcaactctagagagctatatcagatgtgatcatccttaacatattcaaagatagctaaatacttaactcggtaaaatgtcacacaaacgtagagtgacatatctagcgttaataataagaatatagtcaatttatacacacaagctatgagtatataacatcgttatccggatattcaacaagaatttactttcttaccgcatcatgttaaaatgttgcgataaagtggtgaaatcctattgaatggttgtgtcaagatgctttgacggatcaatgtgtgtctaaattaaagccggtatctatatatatatctatatcccacactt

SEQ ID NO: 212126 - DNA, 445 bp, Glycine max
gaactgaatcaatcagatctataaatcgcaaaagggaaggtacccacaacagttgcaacaaaaaagaaaccactggctagcttgggaatggaaaataataaaaagaaagcggatatagcattagatacaagttgcatgaaaactattagtgatgatgataattgatatcccagagcatttaagccccttccctattttaaatttcacaaagctcaaatcactgtgatctcatcctgttgagctggttgagagcaggctgcaagatgttgtaaagcacccaagcaatagccggcgtaaccacaaacagcagaagctgtcccctgttgtcgctcgcagcagccgcagcttcagaagccgccgcccacgcatgcggtgcagccgccaacccagccaagccgccaagccccaagccaatgatcacgcctttggtgctgcgcattcggtt

SEQ ID NO: 212127 - DNA, 447 bp, Glycine max
aacccgaatctttgattttacattgaaaattattacgattacccaatagacccatccaaaagtagaaactgatcaatcctttgggggggggattgaaatgaaaattacctaaacttattaagcggggggaagaaccttattaacaatctcctggctaaaagctgcaatctgggaatcaagggacctgatgggttcttccttttgattctccaagctaaacagagcctcctgcagatcaacctcgacttttttcctcccctcagcaattttctgctccacctcagcctgcgtcttctttttcatggggttcagcgccgttgcaatttccgctcgagcagccgccatgacagcattggccttcttctccagctggttcacctactccgacgggtcctttacgctgctcagcttcttcctgatcgccgcgtccctctcgtccatgaattt

SEQ ID NO: 212128 - DNA, 392 bp, Glycine max
cggcggccgcccttttttttttttttttttttttttttttttttttttttttttttttttttttttttttttggggttctttttcttttttcttttcgtttatttttttttcttttttttttcttcttttttggtaaactcttctctaattctggcaccaacgccaccaaagccaaaggctcacaaaaaaaagaccccccgggggggggtcaaaaaaacagggacaaaacaccccagcccttgtgatatcgggggggaaaaaaaacaaacacgaggacaagccggccccccctcgtggggcacacaaaaaaaaacccccccggagagagccccccccccggggggggcaaacacaaggggggggaaacaccataacaaagagcctcaacccc

SEQ ID NO: 212129 - DNA, 497 bp, Glycine max
aaaatcataatcctatttatcattaatatatatgcacaaagcagaacaacctttacatgaacggcgtataaaatataattcaaaacattcattctataggaccttatcactcaaatatttaagaccgggtttggcgttgataatgatgtccaagtttcgaacttcttaccctataaccttttgcccttccctctaagtaatatcacaaaagtaatattaaaatattaatgaatcatttattctcattagatctagggacaagctaaacatttccccatttttggtcattcataccaatatggggaatccttgtataataaaattaccttaaggcctaagtaatagctcataaacgtcggatgaattgttcccagttacacgctatgacatttcaaaacttgtacgactacccaagaattcgacccttgtaaacagtgcatagccatgttctgctgtttccttactagagtacactgatcgaagcctatcagcgtggc

SEQ ID NO: 212130 - DNA, 574 bp, Glycine max
ttaaaatatagaacacactaccctcaacatagtaaagcagctggtgcaagtgaagcaatggctcaaaccatgttgctcatgtctagtgtctctagcagttattccgtggatttgaagaaagaccttttcctccaattgcagagtcaaagtttaaggcctaagttctctcaactctcattcaacccacttccaccatcaacttcttccttttcttcaccccgtacattcacaaccctggctctcttcaaatctaagacaaaagccgctcctgctaagactaaggttacaaagccaaagcaaaaggttgaagatggtatctttggcacttctggaggatttggttttactaagcagaacgagctctttgtgggtcgtgttgctatgcttggttttgcagcatcattgttgggtgaaggaataactgggaaaggaatcctagcacaattaaacctggaaactggaattcccatttatgatgcggagcctcttcttctggttttcatcctcttcaccctgctaggagccattggaggtttaggtgaccgtggaaaattgtcgatgacaaactactact

SEQ ID NO: 212131 - DNA, 511 bp, Glycine max
aagaaagttgaaccatccggaaaggaatatatttagaaaattgaccacgcggaagagatggtaaacatcatcgtcatcatacaaggaaaattttcgcagcagactcagcctaatcaagttgtcttaaaactacatgagacaaaatatactttgtttcacggtgggggaggaaaaggtttcaaaaacaatggaattgacatgacagatgagttaaagactaacacaaaaacgagaaggcattggtaaagggacggcttttccttgctctgtcggtgtagaaaaacgatggacgacactctttttctatcaaatcctttatatcccgaagagtgggccaccatgtgtagcaaagaagggagcaaacacaagagactcagccgccatgagcttaataaggatgttaagtgaaggtccagatgtatcctttagagggtctccaatggtgtcaccaataacagctgccttgtgacaatctgacccttttggaccaaggcttcttgcatgctcagaa

SEQ ID NO: 212132 - DNA, 374 bp, Glycine max
ttcgttttttttttttttttttttttttttttttttttttttttttttttttttttttttttttgtttagaattttttgtttttttttcttttgtttttttcctcacctcacttttttgttttggtcgcccgggggaaacgcccctgtggccgcccccgagccgaaaaaaaaaaaccatacccccccccccccggggggggggggaaaaaagaccaactaacgaccgcgcccgggggggggttggatcaaggggcaaaaaaacaaccgaacccctctctgggggggcgaatggcccctgacacagaggggggcgcgccccaacccaaggaaaaaagggggggcgcccggtcccacccaagttttgtttgcaggc

SEQ ID NO: 212133 - DNA, 419 bp, Glycine max
gagaaagataaaacaaatgacttaaaatacttgtaactgagtataacaatttcttcaaaattttgaacatgtcttcaacaacaaacattgcatacaagaaaaactaggcactaagctaatatgaattactcctccagcgtataacttttcaagcaacagggacctcaatatcattagcagccaaaactggagcaggctggatgtattcttcttcctcctttggagaatggattgtgacaagatcagggaggggagttttaggaccctgtttccccttaggatcccaatcaagcatgatcttcaccttaatgccaagaacaccctgtctcaggagcacatgtctcactgcagagtcaatgtaatctttgacaggctgcccagaagaaatcatgtacccatccttaaactttatagatttg

SEQ ID NO: 212134 - DNA, 520 bp, Glycine max
tttttttttttttttaatataaaaagaaagttctaattattaataaattatatctatatatatatatatacagatagatattctatatcttttatcttaattaatatttgacccctccttataatgtgttatagttttctttatttttaggaacttatccattccttttttaatgtgcccgacaatccgaaagaattctgggggaggggtcatttcgtttttgatctagaataaatagagcttcaagaaatgagagaattaagaatacccacgagaaacactaatccaatccataatgatgtaccggaaaatacaacatttttgttattcgaccaaccttcaggagaagcaaatacaacaggtacactaatcaataaaataaatgaaatagcaattaatgcaaaaacagctaattggaaagcaatagtcatgtttctaatcctccaatttaccaacaaaagaactttaccatttgatcccccaaccccttgatccctttattgacaaaaaaatttataat

SEQ ID NO: 212135 - DNA, 503 bp, Glycine max
  unsure (1)..(503): unsure at all n locations
aatggaagcactttttcaactattttagtaattaatattagtatttattatttatatacaacacgtgagactcccaatctctaagcatggacactaaaagggtaagaaactctaaatctaaaccacttaatccctacaacaccacacttaaaccgtggtagagagctcaatttggttcccttctgaattgctatcccctttgtcatggacctgaattggcttgtaggtgtacaatttggcacaaaccaagtagtaaataagattgagaaactgcaatatggtgataagccagtaaaagtactccaacttccctttgttgaggttgttgtcagggagccaatttgacccattagacccagcactgaacttgtggaccaaagtaaccataatggtactcacatagttcccagcagcgatagcagtccaaaataatgccatggcagcgctcctcatactctcaggggcctggtcatagaanaactccaagtgtccaattgacataa

SEQ ID NO: 212136 - DNA, 550 bp, Glycine max
  unsure (1)..(550): unsure at all n locations
gtttcttcctttctctgctctttgtcttctctgacacatttggggccttgttgagtgtgtttttgcaagagggtatggcgaaggacgttgaggttgctgagcgtggctccttctctgggaaggactaccaggaccctccaccagcaccactcattgatgctgaggagctcacaaagtggtccttttacagggctcttattgctgagttcattgccactttgctcttcctctacattactgtgctcacagttatagggtacaagcaccagacggatcatgctgatgcgtgtggtggggttggcattcttggcattgcatgggcctttggtggcatgatcttcatccttgtctactgcactgctgggatttcaggaggtcacattaacccagcagtgacatttgggctgtttttggctcgcaaggtgtctttgatccgagccatcatgtacatggtggctcagtgcttgggtgctatctgtggagttggtttagttaaggctttccataagtcttacttcaacaagtatggtggtggngctaattccctcgc

SEQ ID NO: 212137 - DNA, 617 bp, Glycine max
  unsure (1)..(617): unsure at all n locations
gaaacgcaacaatggctcaagcggttgaagaatggtataagcagatgcccgtcatcacgcgctcctatctcaccgctgctgttgtcaccactatcggatgctcccttgatataatttctccgtatcatttgtacttgaaccctatattggtggtgaagcaatatcagttttggcgcctggttactaatttcttgtactttcgtaaaatggacttggatttcctgtttcatatgttttttcttgctcgttactgcaagcttcttgaggagaactcgttcagggggaggactgctgatttcttttacatgctcttatttggtgccactgtattgactggaattgttcttcttgggggcatgataccttatttatcagagtcgttcgcaaaaataatattccttagcaactcattgacatttatgatggtttacgtgtggagcaaacaaaatcccttcattcacatgagcttcctggtctctttactttcactgctgcctacctttcatgggttctctggcngttctctgtactcgttggtgctagtgcttgngtggatctactgggaatgattgctggccatgcatataattttcttgaaatgttaatcctcggatgac

SEQ ID NO: 212138 - DNA, 206 bp, Glycine max
cctctgcatgatctggaatttgtgttttctttcgtttgttcgtttgtttaattcaataaaggaaattagacatgaccctcttgttgagtatgctctgtctatttgaaaatttccacacctcttttaattgtcgtaatgatgtgtgaagtgtgtgttattttaaaaaaagactatgaatcttcaaataacaataaaaggatgggcgt

SEQ ID NO: 212139 - DNA, 426 bp, Glycine max
ggcgaatgatgaatgcgcagagcttagaattcgatattggctgagtccttatgaggcaggtggccctgtcaagcgcctaacctgcggcagaacttgccaccgcgcacacgtcgtacacgggctgttattgcactcggattcattctaccacattcccgatactgtgcgttcatatgagtgtgagagaccatggcgctaattgtgagggacagtcgacgttactgcacggctcgtacgagcttggccgtgtgctgtggcacggaacgttctccacggtgtaccacgcgcggtacctgatttcatggcatcacgtggtcatgaacgtcgtgggatatgaaccggtgttctacgactgcttgatctaacacgttaagatggcgatctgagtgatgaacatggctgagtaccacatcagcggctaactac

SEQ ID NO: 212140 - DNA, 320 bp, Glycine max
gagccgcatatagaatcgtagcattcgatgcttgagcatgcagagcgggaagagatcttgggagagggggtctcaatgatccaatgaagaatgaatcctataggaagattcctgttatgctatagctactagtacgaggcgctcaacctacaggaactgtccaggacatatcatagagggctggacgcgatacgggacttaactcgaatcaacaaccgataggccataaatgaatgtaaacgatagggagtgcggacgactggtatatcgatttctaaaactctactctgttctatccgatcggtctattgggctattga

SEQ ID NO: 212141 - DNA, 468 bp, Glycine max
aataatgcattcctctttatgttcagatgtactgatagtctagaatcgctacatttcctatgtatagctactcagaagatcttaatgctagtgatcatagctaagccaatatctctcataggataatataccctttcacttattcaaagacatgatggatatgccttatacatgtttagtcacggaacacaaactgtgggagtgaaagaactcgctcacaacgccctttgaaagattacccggtacgatcgaatcaaacgagcgcttctggaataaatattcagctgcttgtgaaccttgaggtactgccttattcaacgcgtgatcaattactctgtcaccagcatgtgcaatataggcattaggttcggcattaatgatatcccccaacgtgccaaaactcgcaggtacccccccagttgtgggagacgtaagttcggatacatagaataactacatagacctttg

SEQ ID NO: 212142 - DNA, 290 bp, Glycine max
gagccgcatatataatcagagcattcgatgctcgagctcgcagagcgggaagagatcttgggaaagggggtcttaatgatccaatgaagaatggatcctatttgaggatccctgggatgctatatctacttgaacgatgcgctgaacctacaggaactgttcatgacatatcataaaggggtggtgcgtgtactggacttaactcggatcaacaaccgaaggtcctttaatgaaataaacgatagggagtgcggatgactggtatatcgatttctaaaactctactctgt

SEQ ID NO: 212143 - DNA, 469 bp, Glycine max
aataatgcattcctatttatgttcagatgtactgatagtctagaatcactacaattcctatgtatagatactcagtagatcataatgctagtgatcatagctaagccaatatctaccataggataatataccctatcattattcaaagaattgatggctatgccttatacatgattagtcacagaacacaaactgtggaagtggaagaactcgctcacaacgccctttgaaagattaccccgtactatcgaatcaaacgagcccttatggaataagtattcagctgctccgtgaaccttgaggtactgccttattcaacggatgatcacttactcgttcaccagcacaggccatataagcattaggttcggcaataatgatatcccccaacgtgccaaaactcgcaggtaccactccagttgtgggcgacgtaagtctggatacatagaataactacatagtcctttga

SEQ ID NO: 212144 - DNA, 493 bp, Glycine max
aaggctcaagcacagcacaatactatgtgacttaaacggtgacacaattcagcaattattcttaaagcactacggatttgctgaatttgttcataattttagagccttgttagtgtagaatcacacattcttgtgaaccagctaccaccacagtagggtgttcgcttgtgctgactgcatcaacttctttgacactttcaacgttgacatcctccaattcaccacagccaatggcttcaaaaataagatcattgacttcttgaaacctctcttgagagagggacacctctgcaagaagcctccaagcattgccttcagatgcctcatcataatccttcttcctctttagaaccatgtgcccactaatttcccacacagcaggattcacttgggtgtcaagaagctcagcatccacttctccaagagcttgtttctctgcataacactgtggtaacagatagacttgctttccacagtcagagataagaacatt

SEQ ID NO: 212145 - DNA, 622 bp, Glycine max
gaattattatcccgttcttttccgtggagtcaatggaacagttgctcatgaattcatcattgacctgagaggctttaagaatactgctggaattgagcctgaagatgttgcaaagcgcctcatggactacggttttcatgcaccaacaatgtcatggcctgtgcctggcacactcatgattgagccaactgagagtgaaagcaaggctgaactagacaggttctgtgatgctcttatttccattagacaagaaattgctgagattgagaaaggaaatgctgacattaacaacaatgtacttaagagcgcccctcatccaccatcactgctcatggctgatgcatggacaaaaccatactccagggaatatgcagccttcccagctccttggctccgtgcttcaaagttctggcctaccacaggacgtgttgataatgtgtacggtgaccgcaacctgatttgcacccttctgccagcatcacaggctgttgaagaacaagctgctgccacagcatagtgtgttcaaatgacaactattttcaatttccgtgtacataaactcttatcctattcatcagtcttgcacctcttgatattgctcaacattgtgatatgatgatat

SEQ ID NO: 212146 - DNA, 445 bp, Glycine max
ggatgaaacttaagagcagtggattatcatcattatcacatatgatgaagcaatattcaagaggtgcaagaactgtatgaataggaataagagtttatgtacaacgggaaatgaaaatagttgtcatttgaacacactatgctgtggcagcagcttgttcttcaacagcctgtgatgctggcagaagggtgcaaatcaggttgcggtcaccgtacacattatcaacacgtcctgtggtaggccagaactttgaagcacggagccaaggagctgggaaggctgcatattccctggagtatggttttgtccatgcatcagccatgagcagtgatggtggatgaggggcgctcttaagtacattgttgttaatgtcagcatttcctttctcaatctcagcaatttcttgtctaatggaaataagagcatcacagaacctgtctagttc

SEQ ID NO: 212147 - DNA, 489 bp, Glycine max
ggcgagtgaggaatgcagagaaatgagaattcgtcattggctgagtccttctgaggcaggtggccctgccaaacgcagaagctccggcagaaattgccaccgcaaacacgtcgaagacgggtagtaatagcactcggtttcattctcccacattcccaattctgagcgttaagatgagtgagaaagagaaaggcaataatagtgagggacagtcgacgttgctgcacggcaagtacgagcttggtcgtgtgctggggcacggaacgttcgccaaggtgtaccacgcgcggaacctgaatacagggcagcacgtggccatgaaggtggtgggaaaagaaaaggtgataaaggtcggaatgatggagcatgtgaagagggagatctcggtgatgaagatggtgaaagcaccaaacatcgtcgaacttcacgaagtcatggccagcaagtccaagatctatattgccatggaactcgttcgcggcggagagc

SEQ ID NO: 212148 - DNA, 487 bp, Glycine max
aaccttcatgcatatcgaatcatccgttgttgattctctttttatatcctcaatcacaattctgggcgacagagagaaagatcttatcaacaactcaaagttcctgaacaaaaacgagaatcagacatcattcaagcactagcaggtgcggaattctgggaggaattccagaagatatccttaagcgcagggcgaagctgtttgctgcagaactggttatactccaaggtatccccattggccttcttgacctccaccaccataaacgacggcgtcacggcgtaaatatccgcggcaatcgccagcttccccttccttccacgctcctgaccctgaagcctcaccttggtctcgctactcctgacgtcgaacttcccggccttggccaccttcttcagccgcgaaatgacggtgctgggcgtccccgcggtggcgaacctcatctcctccctcctcttgtcctcgaacaagggcgacaaattgaacc

SEQ ID NO: 212149 - DNA, 559 bp, Glycine max
  unsure (1)..(559): unsure at all n locations
agaagatgatcgttgtgctgagcatgattattgatgggtagcagaagtagaacggtaaacgttaacactaaggacactaacaaggttctgaacgggatgccaagctacgctcctccattgccttcttctaattccatagccatggaagcaactaatgttcatccttcccgcatttctgaatttggaaccctggagcaatctcttggatttcgcgttgaagataccattaatcttagcagaaatccgatgtttaatcaaatgaaatcaaatagccaagctctaggtgctgatattcaatttggtgctttaaataagtcaattgcaacatcagatataaacctctctgctgctattgctgggtctcaagcattggtattacaaaaagattcacaaccaactctggcttcaacatctgctggtcgtgagaactgnggagagaccaacttggctgatgctagccctaggactgatacttcaacagatgatacagaagacaaaaatcaaaggccttgaaaggggtgaatccagtggatcaaaagataaatcagatcaaaagaca

SEQ ID NO: 212150 - DNA, 496 bp, Glycine max
gagccgcttatcgaatcgtagcattcgatgttcgagctcgaagagagggaagagatcttcggaaagtgggttttaatgatccaatgaagaatcaaacctatttgaatattcctgtgatgctatatctccttgaacgaggcgctgaacctacaggaactgttcatgacatatcataacgggctggagtgcatatggaacttaactcgaatcaacaaacgaaattccattaatgaaataaaacatagggggtgtggatgacttgtatatagattcctaaaactctactctcttttatccgcccgctctcttgtgctattcatacctaatgagtcttatcacttgttgttaatataaaatgataggatgtagttttctatagccagaaaatgagatgaaatttgcatccatcttcaaagcacaatgagacaatgtatagagatctaagatagaatataggaaaaagaaacgaagtagtcactagatgaagtaattggac

SEQ ID NO: 212151 - DNA, 441 bp, Glycine max
attattgcattcttatttatattattatatacagatagtctataatcactagaattcctatgtatagatactcagtatatcataattctagtgattatagctaagccaatatatatcataagataatataccctttccttattcaaagaatttatggctatgccttatcatttttagtcacagaacagaaactatggaattgaaagaactcactcacaacgccctttaaaagattacgcggtacgattgaatcaaataagcccttatggaataaatattcagctgcttgtgaaccttcaggtactgccttattcaatgtgtgatcaattactctgttaccagcacatgcaatataagcattaggttcggcattaatgatatcctccaacatgccaaaactagcagttaccccttcagtagtgggagacgtaagtatggata

SEQ ID NO: 212152 - DNA, 511 bp, Glycine max
agaatgcaatgcacaatttgcacagttgcacttggtgtattgtattgttccataactaaggaagagcattactaatgtactagtagttgttcagcaaatttaatttaatcccaccaaaaggattttcatttcaatcatcatccaatgtcaagtaagaaaattacaagacggattcagtacggcacactaactgcgggagttgctgcgcttgggcgcgttgccctttgatccatttacgcgtcctcgcttcccagccgtctgatcctggttcaagtcaaagccgatcccatggccatgatcttcccccaccatctccacgaacatcctctgtaggtcctccaaactgtccccctcgtctttcacattgttcatcattgagatcatctcttgcatgaagtcacaaaagtcggacttggtcttcttcctccaaaggatcgtagagccccgcatcgtacattgaccttttagactgatcggagagaactgagtaggcttcttggatttgctgaaa

SEQ ID NO: 212153 - DNA, 561 bp, Glycine max
  unsure (1)..(561): unsure at all n locations
ccattactggggcgatcagtggtatggcgaggacttgtccatcttctcgctagacgacaagccagttccagcaggttcattttcaccagaagaatcccgtgcctcgctagatcgaaattctccgtccttctcgagagcgcaatctgtggataccctcagcgtcacgccatcgaatctcaagcagacggtcagcagcgagcaaatgagctccagcaggacggatggcgatgttgcgggtctgcgagcagccgaggcattcattcgaccagcacccgtggctgttcatggcgacatctcttcgttcgttttcgacctcaagacgtgcacgttcaaattagccctcacagcaccaagttcaaccggcgaagatgcgccaacgacaacgtaccttcccgagttccactttcctgcaggacaaacgagcgtcgaggtcagcggcggcaagtggaccatgacatccgaagagaccaacggcgcgctacagcaaacactccgatggtggcatgcttgaggagatcanaccattacggtcaaaggtgcantgcgcaagccggaagcgca

SEQ ID NO: 212154 - DNA, 452 bp, Glycine max
ctttctcctaaaacatctcaatgggttcttcttctattacaacatcgtccgcaaccatgaccatggctgcgatcgtgctcctgttcacggtctttgccgtttcctccgccctagacatgtcaataatatcgtacgacagcgcccactcggacaaggccgccacgttgcgcaccgaggaggagctgatgtccatgtacgagcagtggctcgtgaagcacgggaaggtgtacaacgcgctccgctagaaggataagcgcttccagatcttcaaggacaacctgcgattcatcgacgaccacaactccgcggaggaccgaacctacaagctcggactgaaccggttcgctgatctgaccaacgaggaatacagggccaagtacttgagaaccaagatcgatcccaaccggaggctcggaaagaccccgagcaaccgctacgcgccacgtgtcggc

SEQ ID NO: 212155 - DNA, 444 bp, Glycine max
gggacaaatccaaatattgctgctgcattgtcacataatctacagaaccttgaaaactaacagcaatcaaatatgttcgccatttggaatttgaatacaaatacagtgcatcgataatataaccctatgtacagagccaatgtctgactgaaatttgatacagaacattatctattttgcatcataataaaatggtaaagatctttatgttacgtgcagcattatgtgaagaagggggaagtgcatccagctggtgctttagtccttcgtcttcccttttacttcatcattggctccttctgcacgttcacatttccttaaactggttaagcactgctgaccttgttcttacgtgcgaaggtccaatggggtttcgctggagtacgccttaatgccttcactccaaaggggttgaccttgcttctgagacaagttccagcgtaa

SEQ ID NO: 212156 - DNA, 370 bp, Glycine max
caggacatcacaagaggaaagggtttggttgactcccttttccaagctccacaggatgctggaactcactatgctgtcatgagctcctacgagtaccttagcactggacttcgccagtacttggacaacaacatggatggattttacattgctccagcttttatggacaaacttgttgttcacattaccaagaacttcatgaccctgcccaacatcaaggttcctctcattcttggcatctggggaggcaagggacaaggaaaatcttcccaatgtgagcttgtctttgccaagatgggaatcaaccccatcatgatgagtgctggatagatggaaagtggaaatgcaggagagccagcaaatctgatca

SEQ ID NO: 212157 - DNA, 546 bp, Glycine max
caggacatcacaagaggaaagggtttggttgactcccttttccaagctccacaggatgctggaactcactatgctgtcatgagctcctacgagtaccttagcactggacttcgccagtacttggacaacaacatggatggattttacattgctccagcttttatggacaaacttgttgttcacattaccaagaacttcatgaccctgcccaacatcaaggttcctctcattcttggtatctggggaggcaagggacaaggaaaatctttccaatgtgagcttgtctttgccaagatgggaatcaaccccatcatgatgagtgctggagagttggaaagtggaaatgcaggagagccagcaaaactgatcaggcagagataccgtgaagccgcagacttgatcaagaagggaaagatgtgtgctctcttcatcaacgatcttgatgcaggagctggtcgtcttggtggaaccacccaatacactgtcaacaaccagatggtgaatgccaccctcatgaacattgctgataaccccaccaatgtgcag

SEQ ID NO: 212158 - DNA, 596 bp, Glycine max
agagaaatgaacaagaaagagattgaaaagtggattggaggagatgagagtgcctcggagatgctgagtagagtgagcagcatgcgacctttcttgtttcctccgccgctccacagggttcctctccgcgtcggaaacgtcgtcgagcttgtggggccctctccttccgccaaaacgcacattctcatccacgccgccatcacttccgttctccccaaatgctacggaggcctcgaccacttggtcctctttctcgacctcgattgtcgcttcgacattgcgcgcttctcccaattgctcattcatcgcattacccaacacggaacggattcttatgataaaacgctgtatgctctctgtatggcccgttttttgtacgtccgttgctacgacagctttgaatttcttcacactctcaggacattgcattgtcgcttagagaacgagatagaagttcacggagttggtgtccacctgctcatgattgacagcatcggagcttttcattggatggatcgtgcatcgatgttctcgtctcaaagagaaaacagcatgaatatggaggacgatgttcaaaaatgtggcatgaaaccatc

SEQ ID NO: 212159 - DNA, 565 bp, Glycine max
  unsure (1)..(565): unsure at all n locations
atagaacactaccctgaacatagttaagaagccagtgctaggatttgttagtgaagcaatggctcaaaccatgttgctcatgtctagtgtctctagcagttattccgtggatttgaagaaagaccttttcctccaattgcagagtcaaagtttaaggcctaagttctctcagctctcattcaacccacttccatcatcaacttcttccttttcttcaccccgtacattcacaactctggccctcttcaaatctaagaccaaagccgctcctgctaagactaaggttacaaagccaaagcaaaaggttgaagatggtatctttggcacttctggaggatttggttttactaagcagaacgagctctatgtgggtcgtgttgctatgcttggctntgcagcatcactggtgggtgaaggaataactgggaaaggaattctagcacaattgaatctggaaactggaattcccctttatgaagcggagcctcttcttctgttattcatcctcttcaccctgctaggagccaattggaagtttaggtgacccgtgaaaatttgttgatga

SEQ ID NO: 212160 - DNA, 366 bp, Glycine max
atgatgaacccaatgcattttatgatcgatgagcacccccgtttttgtttaaacccaaaccaacaaaagggttcttggctaaacatccttcccctcatctgtaaccaattttccattccccggattccaagcaggaatgaacaaaaaaagaacctttgacaacactagggggtcacatttcaggattggttccccaagctcaaaggttaggcgggcatagggcccccttttcgggtataagttctccaatcaatgcgaaaaccaaacccacttgggccaatttttccacaaatagctcttgtgctttctggaatcccaattttggccctgtccccagacccatagtttacctgaagcctttgcctg

SEQ ID NO: 212161 - DNA, 268 bp, Glycine max
  unsure (1)..(268): unsure at all n locations
ctcccaacccccacccgtagtttctaccaccttcagtcacggcgtaatacactaaccaacccaccatgtcgctgcctgcttgtcccgccgaacaactggcccaacttctcggcccaaacaccacagacgcctncgncgncgnnctccttatctgcggccagttcgccggcgtggacagcaagttcgtcgacacggccttcgccgtcgacaacacctacctnctcttttccgcctaccttcgtttttctatgcagctcggcttcgccat

SEQ ID NO: 212162 - DNA, 551 bp, Glycine max
aattataacttatgaaagaaatttaattccttttacataccttacatttttttttttcttattagtacttacagataagtttattaaaaaaaaatgtcatcacatgatattctatgctcatctttctaagtttataaatagctgaaagtgaaacttaacattctcaaaattctattgctagttaatagcattaattaaaatgcattttatagaggtcaagagtggaatcaaccaagaaagagttgtagtggagaacttgaaccattagctgggtcaacatatccagcaggtctacctccagcagcaaacatagtgaacaaagtgttgaagaacatgaagaatcaagtttatctacttgacataacacttctgtcacaactaagaaaagatgcacatccttctgtctatggagtggatcacaccggtaatgattgcagccattggtgcctaccaggactacctgatacttggaatgaactcctatatgcagctctgtactagctgttgggcagcctgtatttgtgaagcagtaccacttatctcaacagtca

SEQ ID NO: 212163 - DNA, 263 bp, Glycine max
ataaatgccctggcttgaccatttttttgtctgacacatttggtgtcttgtcgagcggggctttgcaagagggtatttccaaagacgttgaggttgctgagcgtggctacttctctgggaacgactcccatgactccttaaacagttccactcattgatgctgatgaactcacaatgaggtccttttacagggctcttattgctgagttcattgccactttgctctatctctacattacagagctcacagtgtatagggtaca

SEQ ID NO: 212164 - DNA, 495 bp, Glycine max
ccttttcctgtcttgatttcatgttataaactatcatcaactgttgctttccattttggctataattccacaaaatgtgccattcattgcaagtgtaatattactagcatttccatatatcagtccatggcctccttaatgctcaatggagctcatcaaaatccaaacctcattagtggcatagctccaaatggccttaactttcacaacaagtgtttattccaaaagggtgtgctgtctcatggtaacaagttaagggtggtcagaaaaaactttactcccaaaggcagcatgtcagcatcatcatcatcatcatctaagcctggttctcagccaaggttcatccagcacaagaaggaggcattttggttctacaggtttctctctattgtgtatgaccacatcataaacccggggcactggaccgaagacatgagagacgaggcactggaacctgctgatctctacaaccgcaacctgagagtggtggatgtt

SEQ ID NO: 212165 - DNA, 568 bp, Glycine max
  unsure (1)..(568): unsure at all n locations
agagaaatgaacaagaaagagattgaaaagtggattggaggatatgagagtgcctcggagatgctgagtagagtgagcagcatgcgacctttcttgtttcctccgccgctccacagggttcctctccgcgtcggaaacgtcgtcgagcttgtggggccctctccttccgccaaaacgcacattctcatccacgccgccatcacttccgttctccccaaatgctacggaggcctcgaccacttggtcctctttctcgacctcgattgtcgcttcgacattgcgcgcttctcccaattgctcattcatcgcattacccaacacggaacggattcttatgataaaacgctgtatgctctctgtatggcccgttttttgtacgtccgttgttacgacagctttgaatttcttcacactctcaggacattgcattgtcgcttagagaaggagaaagaagttcacggagttggtgtccacctnctcatgattgacagcatcggagcttttcattggatggatcgtgcatcgatgttctcgtctcaaagagaaaacagcaagaatatggagggag

SEQ ID NO: 212166 - DNA, 532 bp, Glycine max
  unsure (1)..(532): unsure at all n locations
tcacaggtttcctgcaagcggtgactcttgctttggtgttagccaccgtctctgcatcagatcctgatcctcttcaagacctctgtgtcgcagaccttgcttcagcggttaaagtgaatggattcacatgcaaagatgctgccaaggtaaatgcgagtgatttcttctcagacatactagccaaaccaggtgccacaaacaacacctatggctccctagtgactggagccaacgttcagaaaatcccaggactcaacacccttggcgtgtctttatcacgcattgactatgccccaggtggcatcaacccacctcacacgcacccacgtgccaccgaggtagtgtttgtgcttgaaggaacactagatgttgggttcataaccacagccaacgtgctcatatcaaagagcataagcaagggtgaaatatttgtgttcccaaaagggttggttcacttncaaaagaacaatggaaaggaacaagcttcagtgattgcagcattcaacagtcaattgcctggcacacagtccat

SEQ ID NO: 212167 - DNA, 404 bp, Glycine max
caaattccaatcatcaaagaaatgaatatgctccattttatactctcattccaaatctttgaatttatgagttcccaacaaacatgaattgtaaagcaccaagaacagggacaagagaggaaggtgtaagaagtaagaccatggagagagacattacaaccacatcccacattagtattaattatttcttaggagcaagcctagacttaattttctcaacctggttggtccccaggtgaacctcgttggaaaacacattgagtaacacaggcggcgctgtaaaagacaacgttagagcaatggactgtgtgccaggctattgactgatgaatgctgcaatcactgaagcttgttcctttacattgttcttttgaaggggacccacccttttggggacacaaata

SEQ ID NO: 212168 - DNA, 527 bp, Glycine max
cacaaagttccctcctctccaaacatggcggcaattttctcttcttcactcttcgcttcctcgcctcttcccaaaccactttcttcctcctattctcgaatccataccgctccacaacttttcagggctcgatcttctctccttcaggataacgagaaaaaagtgatcgtgcatgattccttcccctccaaaacctctcctcttcacaccgctgataaatcaactggtggaaactcaattaacacctctgcgttcgagaaacggattatcaaggtcgaacaatcggtcaatatctttcttacggattccgtgataaagatacttgatactctgtaccatgatagacactatgcaaggttttttgtgcttgaaactattgcgagggttccttactttgcctttatgtcagttctccacatgtatgagagttttggttggtggaggcgggcggactatctgaaagtgcattttgctgagagctggaatgaaatgcatcatttgctcatcatggaagaactaggggggga

SEQ ID NO: 212169 - DNA, 533 bp, Glycine max
  unsure (1)..(533): unsure at all n locations
aaatttgttagggagagcaccttaatacttgaatcactgagaagaagagcaaggataatgactgatggattcaacagttgcagaaatgtggtttgtaattttactgaaggtgccatgtattcattccctcaaatacgcttgccgccaagagctttagaggctgctaaacaggctggaaaggttccagatgtttactactgcctcaagcttttggaagccactggcatatccactgttcctggttcaggatttggtcagaaagaaggggtgttccatttgaggacaactattttaccagctgaggaagacatgcctgatattatggatagtttcaaaaagttcaatgatgaattcatggagcaatacgaagacgatagaggttattcaaggttgtaagaaaatcattgtaaaagctgcattatactcttgcgcttttggaagttcttcatccatccatccctcggagagaaaaaaaacataacctnncgttctactatttgttcttcattggagattattcttaaaccttacac

SEQ ID NO: 212170 - DNA, 445 bp, Glycine max
attgtttttggtggtcgccgcatgggtgattgggaagaggggatgacaagccctgagtatggttacaaatatttcaagatttaaactgggacttgttgcagctgatttcatttcatgcattgtactttccattttgttcaaaaagggttgtagtgcatttgtgcatacgaaaaggtaaactttttgggccatggccattccttttatttcgtattgttgtcatttggagaaaaaattgtaggaaggaataaaaattgcataaatagaacagaaacctataaatcgaaatcaaaagtaaatggcaagaatataaaggacttgactgtggatgaaaaaaaaaaaaaaaattaaaaaaacataaatcaaataaaaaatcaaaataaacagtaaattaaaaaaaaatatactaaaaactaatactttaaaacataatcatctaaattat

SEQ ID NO: 212171 - DNA, 365 bp, Glycine max
ttcgttctttttttttttttttttttttttgtatattttttttttttttattttatttctgtgtttcatttttttttgttttttactttttctttctttcaatattacaaatttcattagatgaaaacgtagtatcaattcaagtggagaatgcttacgttcttagggggggcataagcaggaaacataataggggggggagagggaaacaagcttgaggcaaaaggatcaaaacaacccccaggaacagcaatgaggacaagctgaactgatttgacatacaaaggacctccccagaaggaatcttgattaggattaccaaaagccggctgtttcaagaactcgaaagccccttgggctgggaa

SEQ ID NO: 212172 - DNA, 555 bp, Glycine max
  unsure (1)..(555): unsure at all n locations
gtgaatttacaaagaaattcaaaagcaaagcaagaatcatgaattccaatatttgcaattggaaacaaaatcaggttcttcccacagaggaagcaaagggggatgacacttacctctcagctttgacactatgcttcagccgaattttccctgcaatcttgaacgctgctgttgatctgaatttgtttgatatcatagccaaggcagagagttcatctttgtcagcctcggaaattgcttctttgctgcttccaaatccacaccctcaattggctaataggcttgaacgcatattgcctgtgttggcaagttactctcttctcaattgctccattcgcaccaatgaagatggtgtgagagagagactctatgctctctcaccaattggtcaatactttgcgtgtgacaacgatggaggctctttgggtcctctctcaagcttatttcatcgtggatattttcacgtcttggaggatgtaaaggatgcaattatggaccctaacaacaacgaccatttccaaaatgtccatggaatgcctncttatcaatatatga

SEQ ID NO: 212173 - DNA, 575 bp, Glycine max
caataaaatagattcttcatagattagaatcattagacattatttccttttatgatttggtacaatattcttccttcaacattatgaaaattgctaacatatccaaattctaagtgatatatagcataaatatgataagtgattttaattatgatgctcgtcatcatccttcaagaactgattttatttatgatgctcgtcatcacccttcacaagtaatagcataaattttatttataaaattccaccactgatagaaccgacggtgagtctctacatgcaacatgaaatccagaaaatccagaattcctgcacaagctctcaaattctttctcagttctttcctttccacttgttactaaaaacatgagactatcagcaacacaagtttgcatagaaattttgcttgaatccggaacttctggaattatatagtctataacaatcaccttcccatgttgtggcaaagctttgtggcaattccttaaaaactttacacagtcttcgtctaaccaattgtgacatacaagcttaagtaaaatggcatcacccttgggaacactttcaaacatatc

SEQ ID NO: 212174 - DNA, 584 bp, Glycine max
  unsure (1)..(584): unsure at all n locations
tgcccctgaagtttcgaaatgttcaattcagtggtatcgtgtatcatctgatggtgccaaaaaagaacttatctcaggagcaacaaaatcagtttatgcccctgaaccttttgatgttggacgcatattgcaagttgatattatttcagaaagcgagcacgtcacactttcaaccgctggtccaatagatccagctgctggtttgggaacctatgtagaggcactagtgcgcaaacatgacactgaattcaacgtggtagtaacacagatgaatggttcacatcatccaactgaatctattcatgtgcttcatgttggaaagatgaggattaaactttgtaagggaaagacaacaattgccaaagaatactattcaagttcaatgcagctntgtggagttcgcggaggtggaaatgccgctgcacaagcactattttggcagccaaagcaggggcattcttttgtattagcttttgaatcagagagagaaaggaatgctgccatcatgcttgcaaggagaattgcatttgactgtaatatcatgcttgctggaccagatgacagagctcctctagggacatgat

SEQ ID NO: 212175 - DNA, 465 bp, Glycine max
tttttttttttttttttttttttttttttttttttttttttttttttttttttttttttttttttttttttttttttttttttttttttttggggggaaaaccaacaaaaaaccagggaacccctgggaaaaaacccccaaaggggaggagatccccaaattgccccgtccaaaaggcccgggcccaaaaacaaaaggcaaccaaaattcccaaaaatgggcaaaaaggccgccaataaaaaccccccaattagcatttaaaaccccttgacaggggacccccgggttttattaaaaaaaaaagggaccccaaaacttcccacccccaaaggccaaaaaaaaaaccccctggaccgggaaaacaaaattttttaaaggaccccaccccccgggggtgaaacattcccaactcccccaaataaccgggggaattttcccgggaaaaaaccccttttaatcccgggg

SEQ ID NO: 212176 - DNA, 459 bp, Glycine max
agattatattacagccatgtatgttcctgacaatgacaaggacaaagtgtttcagctaccaaagtccatgatgttgtacccttacaagtattccttttcttcggggtctgccaatagaagtattgatctctgagaggaaagagagttgctgctattatcatcagttcactgatatttctttcttcagtatggttggctactgtaaaaagttgagagaattacaaattcaagaatggaaaggatattacatcaactataagttaatgaagaagaaagtcaagagatatgtagaacaaatggaggttggagctcaaaatcgccataatgttctaagagacttctcaatgctgctagacaatcagattgaagaaatcggtctatttctgcttggacaaacaagagtacttgcacataggctgtcaaatattggacaagatcaccatactcttttcagcagtc

SEQ ID NO: 212177 - DNA, 455 bp, Glycine max
catctcaatgggttcttcttctattacaacatcgcccgcaaccatgaccatggctgcgatcgtgctcctgttcacggtctttgccgattcctccgccctagacatgtcgataatctcgtacgacagcgcccacgcggacaaggccgtcacgttgcgcaccgaggaggagctgatgtccatgtacgagcagtggctcgtgaagcacgggaaggtgtacaacgcgctcggcgagaaggagaagcgcttgcagatcttcaaggacaacctgcgattcatcgacgaccacaactccgcggaggaccgaacctacaagctcggactgaaccggttcgctgatctcaccaacgaggaatacagggccaagtacttgggaaccaagatcgatcccaaccggaggctcggaaagaccccgagcaaccgctacgcgccacgtgtcggcgacatattgcctgatt

SEQ ID NO: 212178 - DNA, 471 bp, Glycine max
ccacattgtaagcaaattaaaatagcatgtgaatatgggacaaatccaaatattgctgctgcattgtcacataatctacagaaccttgaaaactaacagcaatcaaatatgttcgccatttggaatttgaatacaaatacagtgcatcgataatataaccctatgtacagagccaatgtctgactgaaatttgatacagaacattatctattttgtatcataataaaatggtaaagatctttatgttacgtgcagcattatgtgaagaagggggaagtgcatccagctggtgctttagtccttcgtcttcccttttacttcatcattggctccttctgcacgttcacatttccttaaactgcttaagcactgctgaccttgttcttacgtccgaaggtccaatggggtttcgctggagtacgccttaatgccttcactccaaaggggttgttcttgctcctgagacaagtt

SEQ ID NO: 212179 - DNA, 409 bp, Glycine max
attttgcctcgcctgtttctattttttattgctttttcggatttttcgtattagaaaacaaattagccagagagaggcgcttgccgtaacgctaattgagaaagaagatgcaaccaacatgcaacggctctgattcgcaagcgaccgagcagcggacgccgtcggcccagtggatgccgatgcagtacccggcagcggcgatggtaatgcagcaccacatgatgccgactcacattacgcttctccgccgccgcagccctacatggtctaccaccactaccaacaacagctgccgcacgccctgcacgcgcaccatcagggatccagtgccgagaacaagaccggttgagtcggcgatttgcaatattggatggacgaaaattatctcccaccgtgtttcgcttccaac

SEQ ID NO: 212180 - DNA, 548 bp, Glycine max
gcttaggagaatagaagaggagcaggaggcatcaccattgccacaatggttaaaggtcgccaaggagaacgtgtaagactctacgtcaggggttcaattcttggatacaagaggtccaagtcaaatcaatacccaagcacctccctaatccagattgagaatgtaaactctaaggaagaagttgcgtggtactgtgggaagcgcatggcttacatctacaaagcgaaggtaaagaagaacggaagccactatcgctgcatttggggtaaggtcaccaggcctcatggtaacagtggtatagttcgagctaagttcaagtccaatctgccacctaggtcaatgggtgcaagggttagagtattcatgtatccaagcaatatatgagattctcaggattcgtgtgtcgtggggctagtttgtcagagtatttgaaaggaatttgcattttgcgagttaaatttgtgtttttcttttttggtagctcttgagcagaatagtatctttgtttaggatgaagaatgaaccccgtgtttttctttattctcact

SEQ ID NO: 212181 - DNA, 566 bp, Glycine max
cttttctctatagctccgtccaaacatgactctccgcaaccaccaagagctcttggttgctcttgcaattctatattttcttgccacctcactcccttcagtttcagctcatggcccatatgcatgggatggggaggccacatataaattcactacttaccaccctggccaaaactacaaaggtttatccaatgtcaaaaactacttccaccatctcggctacatccccaatgcaccacacttcgacgacaacttcgatgacaccctcgtatctgccatcaaaacctaccaaaagaattacaacctcaacgtcaccggcaagttcgacatcaacactcttaaacaaatcatgacaccccggtgtggcgtccccgacataataatcaacacaaacaaaaccacatcgtttggcatgatctcggactataccttcttcaaagacatgccgcggtggcaagctggaaccacacaactcacctacgctttctccccggagccaagacttgatgacactttcaaaagcgcgattgcaagggccttcagcaagtggaccccagtggtgaaca

SEQ ID NO: 212182 - DNA, 533 bp, Glycine max
aatgtaaatgctaaaacattatatagattagataaattaaggtaaatttgtcacatttattcattatcatatatgcatcacctagtatcagctggtttattcttaattaagagaaaactaaaatacaatatcttacatgctatttttgttgttcttgaattagaataatttcacctcgataactttcaaaatcctttaatgcaaattaccgaaataaaactctagttctagtacaaacaacacctagctataataattaggggttgataccatagagctttcgaatcccgtctatatcatcttgcgctagattcaccttcctagttcgaggtggtatagaaggatacatgatggctcttaggtccgacgagtggcctaatccgagcaagtgcccgatctcgtgcactgccacagattcaaggtcaaacgcacttgtcaccggcgatttggtgacatcgccagacgccacccaatattcgtcggcgtcaaagtggcacctcccatcagtgggagcgaatgcatggcccaatatc

SEQ ID NO: 212183 - DNA, 553 bp, Glycine max
  unsure (1)..(553): unsure at all n locations
gctcaatgaacctatagaggttagaattactgagtggaatactgggggcctgctaacaaggattgagggtttgcgagctttcctacccaaagctgagcttgtaaaaagagcaaatagctttactgaattgaaagaaaatgtggggcgctgtatgtatgtacaaattactcagatagatgaaactaaaaacaatttgatacttagcgaaaaggaagcttggcaaaaattgtatcttcgtgagggaacacttcttgatggaactgtgaaaaagatcttaccgtatggagctcaaattaagctaggaaaaactaatagaagtggattgctgcatgtttctaatatctctcgagctgaagttacttctgtcagtaacatactttctggtgatgagaatgtcannagtcttgtggtgaagtcaatgtttcctgatnaaatatctcttagcattgctgaccttgaaagtgaacctggcctttttctatcaaataaggagagactatatatggaggctgatatgatggcaaagaaatataagcaaaagctaccacctttt

SEQ ID NO: 212184 - DNA, 566 bp, Glycine max
  unsure (1)..(566): unsure at all n locations
gccttgctcattcatccatcaacttctcatcatttattaaacaggatttcctgggcattctgtgtatatctagaagctgtctcagtcctgccccaactgcgggtcatgcagaacaccaagattgttgaacctttcacagctcattatgtatttgcattgggtgttgcaagattcttgagctgcgctcattgggttcttcaggtgttagatagccgtgggcatttgctggtggccttggggtatggtttatggccatcaatggttcttatctcggaaattgtccagaccttcatcttagcagatttctgttactattatgtcaaaagtgtcttcgggggacaacttgttctacgtcttccctctggagtggtgtgattgaagatctgctttggtgtgtactgtcacatttgattttaacttaatcaggctttatggttggttacccttgttcgagtacattntgtgttgacacacttgtttggttccttggtggaatgtaaagttggggatgaaagaaactaaatatatttatggttacggtactggtatatatggttggagtgctt

SEQ ID NO: 212185 - DNA, 438 bp, Glycine max
agacagcaaggttgcctgcgaaacatgcaccaaaaccaacttggtcatggtcttcggagaaatcacgaccaaggccaatgttgactacgagaagatagtgcgtgacacctgcaggaacatcggctttgtctcaaacgatgtgggactggatgccgacaactgcaaggtcctcgtcaacattgagcagcagagccctgatattgctcagggtgtacacggccacctcaccaaaaaacctgaagaaattggtgctggtgaccagggtcacatgtttggctatgccactgatgaaacccctgaattgatgccattgagccatgttcttgcaacaaaactcggtgctcgtctcaccgaggttcgcaagaacggtacctgcccttggctgaggcctgatgggaagacccaagtgaccgttgagtattacaatgacaatggtgc

SEQ ID NO: 212186 - DNA, 512 bp, Glycine max
tggaaacgaacatgtcgtggcacttgttactgctggagaatcatacaagggcgtggatgatctagtgtgctacacttggggtaacaacagtcatggtcaattaggcttaggggacacaaagaataggccaagaccacaagtggtgaaaacatttgatcttgaatccccttgggcaatatatgaggtagcatgtggtgccttccacactgctttgcttactcacaaaaagaggcacagtgacacattagaaagcacatgctggacctttggccttggggataatggccaactaggtcgtggcacaacacaaagcacatcacttcctgaacctgttaaggaattgccacaaaatgtgcatcttgtttctggtgactgtggcttgtttcacacttgtgttgtttcctctgatggggatgtgtggtcatggagaatggagaaaggtcttggcttgtgttctgatgatagcaatggtggaacacattctggtgatgctctttctccgttcttatctc

SEQ ID NO: 212187 - DNA, 518 bp, Glycine max
cagtgttcaagatgcagatctttgtcaagaccctcacgggcaagaccatcactctcgaggtcgagagctccgataccattgacaatgtcaagtccaagatccaggacaaggagggcattcccccggaccagcagcgtctgatcttcgccggaaagcagctcgaggatggccgcactctttcggactacaacatccagaaggagtccaccctccacttggtcctccgccttcgtggtggtatggccaagaagcgcaagaagaaggtgtacaccacccccaagaagatcaagcacaagcgcaagaagaccaagctagctgtcctcaagtactacaaggttgacggcgatggcaagatcgagcgtcttcgccgcgagtgcccccagcccgagtgcggtgctggtgtcttcatggccgccatgcacaaccgtcagtactgcggaaagtgccacctgacctacgtcttcgacgaggccaaataagcgcatcgccaccggtgcacgcgacacgatccgatacga

SEQ ID NO: 212188 - DNA, 553 bp, Glycine max
  unsure (1)..(553): unsure at all n locations
attccacaagaactctccaaggatcctccttcccacgagattctttggtgggaaaaatccaagaggtttgaaatttgaaggcagggaagatggattatttcaatgcaccaggaagaaaccatctctttgtttcagggccggttaacattccggaccagatcatccgggccatgaacagaaacaatgaggactaccgttctccagcaattccagctatgacaaaaactttgcttgaggatgtcaagaagattttcaagaccactactggaaccccatttctcatccctacaactggtactggtgcttgggagagtgctctcacaaacacactgtctcctggggatcgaattgtatcgttcctgattggccaattcagcttgctttggattgatcagcagcaacgcctgaagttcaatgttgatgttgttgagagtgaatggggccatggtgctaaacttgatgttctggaatcaaagattgcttcagatacttcacacactataaaggcaatttgcattgttcacaatgagactgcaactggngtcaccaatga

SEQ ID NO: 212189 - DNA, 543 bp, Glycine max
acaccttcctctccacaccattcaaagaagaacctcacgaaaaaaatcacgacttgctcttcgatcaaaatggtttccttcacagtatacaaaggcggcaaagatggcaaagtcaccaaagccaccaccgagaaaggcgaactcgagcgcgaccaagttctcgtccgcgtcacagcttccggactctgcggaacagatctccactaccgcaccgcagatatggcgttgggacacgagggcgtgggtgtaattgaagatgtcggaccacaagtcacatacatgaagaagggcgatcgtgttggttggggctacctgcacaactcctgcggacactgccaggaatgtctcaaaggcaatgagacgtactgtcctgagcgtgccatgtacgccatggcgaacacggaccagggttcttttgctagccacgctgtttggcgggaagcatacctgttcaagattccagactcgctgagtgatgaggcagctgctcctctgatgtgcggtggtgccacagtcttcaacgcattgcatgcatacaatgcg

SEQ ID NO: 212190 - DNA, 528 bp, Glycine max
cttctcttaaaagttattaagagcttttgcttttctttctgcgcgcttttcccaattaagtagttcttccttttctcaaagcaaaaaaaatgttcatcgagagtttcaaggttgagagtcctaacgtgaagtacacagagactgagattcagtccgtgtacaactatgaaaccactgaacttgttcacgagaacaataatggcacttatcagtgggttgtcaagcccaaaactgtcaaatatgaatttaaaaccaacacccatgtccctaaactagggttaggtaatgcttgtggggtgggggggaaacaatggctcaaccctcactggtggtgttattgctaaccgagagttagtttcatcttcaattcctaatcattaacgttttaatttatttcttcttcttcttattttttgtggctatggtaatggctataaaataatttaagggtaaccatgtatgtatgtgaattatgtttctcacttctcaagggtatttcatgggcaacataggacatgattcaacaag

SEQ ID NO: 212191 - DNA, 629 bp, Glycine max
  unsure (1)..(629): unsure at all n locations
agagtatctggtggaggcatatgattctcgagtcgcagaaatagagaagacaaagttaatggttcctgtccctcttgatgtagaactgaagtctaaggtttgttcttgtaaaagacagtggggagcaagttggtttgagcaattttccatattattttcaagaggattcaaagaacggaggcatgactactttagctggttaagaatcacccaagttctagccactgcagtcatcttaggattactctggtggcaatcagatgctaaaacacctaaaggtttgcaagaccaggccggactgcttttctttattgctgtgttttggggattctttcctgtgttcactgcaatattcacatttcctcaagagagagccatgctgactaaggaacgaacaaccgatatgtacagactaagtgcttatttcgtggctagaactacaagtgaccttctactggacctggtgctaccagtgtttntcctccttcttggttatttcatggccaatttgagactcgtttcanggcgttttttctttagtattcctaccgtttttctctgcatcatagcagctcanggtcttggacttgctataggggctacacttatggacttaaaaaggcaacaac

SEQ ID NO: 212192 - DNA, 385 bp, Glycine max
caacactatccctatatttcgctttaacacgctcacatgaactgatgttgtgtacccatgttggctttggtacaatccacttgactggggaagtgcatctcctgacaagatgagagcgttcagaacactcgacatcacgaatgggagcttgcccatgttgactgtgatcggcgcatggagccagctcatttgcactgtcactggctctattgacagcctattagctcaccttgcctatgctgttcatgctactatggtcagctgctgtcactaccaagtgatacaggttgacactactctatgagtgcaagccgcggatagacattcgagaacttgtgtaactgagttgtgacgcatacatgtctttagggaggagatcgtatgt

SEQ ID NO: 212193 - DNA, 412 bp, Glycine max
aggatggttatcaagaccattgaatagcccgtgctatgcacaatcagaaattggagcagccctatgctccatgcaaaaactgggataacttcctgaatttacgttgaatgcatctaaactgaaataggacctttgacattgaataatcaaattgtgcatgacaatagaatgcaccattttagaagctttcaccaatataaaaactcccccctaaagacattaaagccttacaacttatggaaacaagtttcccaacgaaactccaaggcttgcacttatagagaagatccaacccttgtaacttgggagggaaagcagcaaaaaccgtagactgacccggatctgcaaggcgaccaacgaggatgtcaatgggaccaaggcctgggtaaaagtgctagaaccatgcccgcat

SEQ ID NO: 212194 - DNA, 513 bp, Glycine max
caacactgaccctatctttcccattaacaagctcacaggaactgatgttgggtacccaggtgggctttggtttgatccacttggctggggaagtggatctcctgagaagatcaaggagttgagaacaaaggagatcaagaatgggaggttggccatgttggctgtgatgggggcatggttccagcacatttacactggcactggtcctattgacaacctctttgctcaccttgcagatcctggtcatgctactatttttgctgctttcactcccaagtgagaagggttggaacaactctatgattgctagccttggataaacattgggagacttgtgtaactaagttgtaaggcttagatgtctttaggggggaagttttatgttggtgaaagcttgtaaaatggtacttctattgtcatgcacagattgattattcaatgtacaaatacctatataagtttagatgcatttaatgtaaattcatgacgtcatcacagtttctgcatggatga

SEQ ID NO: 212195 - DNA, 375 bp, Glycine max
caggatggtaaacaagaccatttaatagcccgtgctaggctctatcagatattggagcagccctatgatccatgcaaaaactgggattacttactgaatttacgttgactgcacctaaactgaaataggacctttgacatcgaataatcaatctgtgcgtgacaatacaatgcccattttacaagcttttaccaacttaaaaactcccccctaaagacatttaagccttacaacttatggaaacaagtttcccaacgtttctccaaggcttgcacttgtcgagatgatccaacccttgttacttgggagtgaaagcagcaataatcgtagcctgaccgggatctgcaaggcgagcaaccaggatgtcaatgggac

SEQ ID NO: 212196 - DNA, 455 bp, Glycine max
ccctattgtaatttctgccagccttaaaaaagacttgctctgcctctgccactctctgagtaggactacactgccatggctgcctcagtctccactgttggagctgtcaacggagcttcactgagcttgaacagctctggagctggagcttcagttcccagttcagccttctttggcaccagcttgaagaaggttattgcctcaagggtccctaacgtcaagatttcttctggaagtttcaaaatcgttgccgcggaaaaagagattgatgagaaacaacagacagacaaggacagatggaaaggtcttgcctatgatgtttcagacgaccagcaagacatcacaagaaggaaaggtttggttgaatccctcttccaagctcacaggatactggaactcactatgcaatcatgagctcttatgagtaccttaacactggacttaaacagtacaac

SEQ ID NO: 212197 - DNA, 531 bp, Glycine max
aacattgcacacattgtaaaatgtagacaatgtaactcaaaattatacaggataacaatccaatatgaacaagataacttattttattatctcaactcttagcttctctccaagtggagaatgcttaggttctcagggtgtgtataagcaggttccatcatcacttcttgcagttgggtcgaagtttgaggcatttggatcagtacaaccttcaggaacgggaatgtttacttgctgagctgctttgccatagaaagttcctctgttgatggaatcttgattagcatcaccaagagcagcctctttcaagtacttgtctgccagttgtactctcttcacattctcttgttcttggacaagcatgttaccatactccaagagcttgctcaaagtcatcttcggttggtcaaaggttggaggtccttccttggagttcacaagcttcttcccaatgaagtcaacaccaacaacagagatccacttgctcacctcatcatcatatactctagccctgagtgcaccaagaaatca

SEQ ID NO: 212198 - DNA, 528 bp, Glycine max
  unsure (1)..(528): unsure at all n locations
gcacgcttgcgtgagctcggaattcggctcgagccctattgaatctctgccagctttaaaaaagacttgcgctgcctctgccactctctgagtcggactacactgccatggctgcctcagtctccactgttggagctgtcaacggagctacactgagcttgaacagctctggagctggagcttcagatcccagttcagccttctttggcaccagcttgaagaaggttattgcctcaagggtccctaacgtcaagatttcttctggaagtttcataactcgtgccgcggaaaaagagattgatgagaaacaacacacagacaaggacagatggaaaggtcttgcctatgatgtttcagacgaccagcangacattacatgagggaagggtttggttgattccctcttccaagcttcacaggatacctggaactcactatgcaatcatgagctcttatgaagaccttagcactggacttaaccagtacaccttggataacaacatggaccgttattacattgctcctgct

SEQ ID NO: 212199 - DNA, 531 bp, Glycine max
aacattgcacacattgtaaaatgtagacaatgtaactcaaaattatacaggataacaatccaatatgaacaagataacttattttattatctcaactcttagcttctctccaagtggagaatgcttaggttctcagggtgtgtataagcaggttccatcatcacttcttgcagttgggtcgaagtttgaggcatttggatcagtacaaccttcaggaacgggaatgtttacttgctgagctgctttgccatagaaagttcctctgttgatggaatcttgattagcatcaccaagagcagcctctttcaagtacttgtctgccagttgtactctcttcacattctcttgttcttggacaagcatgttaccatactccaagagcttgctcaaagtcatcttcggttggtcaaaggttggaggtccttccttggagttcacaagcttcttcccaatgaagtcaacaccaacaacagaaatccacttcctcacctcatcatcatatactctagccctgagtgcaccaaagaaatc

SEQ ID NO: 212200 - DNA, 522 bp, Glycine max
cttgttctccgagctctcccgccgtcggattcggagcgtgagcagcctcatcaaggttggacgaatcgagccggtgatggtgctccgtgtcgacaaggaaaagggttacatcgatctcagcaagcgcagggtctccgaagaagacatccaggcctgcgaggagaggtacaacaagagcaagctcgtccactccatcatgcgccacgtcgccgaaaccctcaacatcgatttggaggaactttatattcacattggatggcctttgtatcgcaaatatggtcatgcttttgaggctttcaaaataattgtgactgatcctgatactgttttaagtactctcactcgtgaagttaaggaagttggccctgacgggcaagaggtgactaaggtggtgccagctgtatcagaagaagtgaaggattctcttgtgaagaatattagaagacgaatgaccccccaacccttgaaaattagggcagatattgaaatgaaatgttttcaatttgatggagttcttcacat

SEQ ID NO: 212201 - DNA, 500 bp, Glycine max
ttccttcgtctcttttgtttcgttctttccttcaccacttttcccttttcattttcaggataacaaaacaacactccttgcaggattaaacttcacttcaattgaactaacctatctgtgggttttttgtagattgattcaattcaatggcttcagtaatgctcagtggaactgaaaagctcactctcagaaccctaaccggaaacggcttaggtttcactggttcagatttgcacggtaagaattttccaagagtgagttttgttgccaccactagtgctaaagttcccaactttaggagcttagtagtacccaagtgtagtgtctctgcttcgaggccaacctcgcagccaaggtttattcagcacaaaaaagaagcgttttggttctataggtttctctcaattgtgtatgaccatgtcattaaccctggccattggaccgaggacatgagggatgatgccctttgacccgctgatctcaatgacaggaacatgatt

SEQ ID NO: 212202 - DNA, 513 bp, Glycine max
  unsure (1)..(513): unsure at all n locations
ttccttcgtctcttttgtttcgtcctttccttcaccacttttcccttttcattttcaggataacaaaacaacactccttgcaggattaaacttcacttcaattgaactaacctatctgtgggttttttgtagattgattcaattcaatggcttcagtaatgctcagtggaactgaaaagctcactctcagaaccctaaccggaaacggcttaggtttcactggttcagatttgcacggtaagaattttccaagagtgagttttgttgccaccactagtgctaaagttcccaactttaggagcttagtagtacccaagtgtagtgtctctgcttcgaggccaacctcgcagccaaggttcattcagcacaaaaaagaggcgttttggttctataggtttctctcaattgtgtatgaccatgtcattaaccctggccattggaccgaggacatganggatgatgccccttgacccgctgatctcaatgacaggaacatgatngtcgtcgatgtcg

SEQ ID NO: 212203 - DNA, 568 bp, Glycine max
cattcgaattcattttatttatatattaatattatattcaaatgaaataaaaagatattaaaagatactaattataagaatttgaaagtgaaattataaagttattaaatgattaatcaatttttttctacctgttcctgtagtaaaaagagttccatctgttcttgaatagcttccttcaaaaggacttctgcttccccagtgaatgtcttggtagaagatatgatttctttgaattgaggtttattcgtgtttaagtaagcacgtaactcaacaagaaatttccttacctgtccaatttctaatgaatcaagataaccattcgttccagtataaatagttattatctgttcttccacggtaagaggagctgattgggattgtttaagcaactcgcgcaatcgttgacctcttgctaattgattttgagtagctttatcgagatcagaagcgaattgggcaaaagcttctaattctgcgaattgtgctaattccaatttaaattaccagctacttgttcatggctttaatttgagccgcgatccaactctggaaacggaaatactac

SEQ ID NO: 212204 - DNA, 553 bp, Glycine max
  unsure (1)..(553): unsure at all n locations
cagccaaggactggagaggtggatgagctgcttcatttaacatcattcctagcagcactggagctgccaaggctgttgggaaagtcctccctgctttgaatggaaaattgactggtatggcattccgtgttcccaccgtggatgtctctgttgttgacctcacagtgaggctggagaaagaagcttcctacgatgaaattaaaaatgctatcaaggaggaatcagagggcaagttgaagggaattcttggttacactgaagatgatgtggtctccactgactttatcggcgatagcagatcaagtatttttgatgcaaaggctggaattgcattgaataagaactttgtgaagcttgtttcttggtacgacaacgagtggggatacagctcacgtgtcattgatcttcttgtattcgttgccaagaagtctctttaaggtgttacttcaaagtagcttgtcttcacattattaccgtatgtttatgcttagctgcgatttagtgtcttgctcgagcannaaatgagaggtctgaataaatcggtttctgaaac

SEQ ID NO: 212205 - DNA, 537 bp, Glycine max
caacactgaccctatctttcccaataacaagctcacaggaactgatgttgggtacccaggtgggctttggtttgatccacttggctggggaagtggttctcctgagaagatcaaggagttgagaacaaaggagatcaagaatgggaggttggccatgttggctgtgatgggggcatggttccagcacatttacactggcactggtcctattgacaacctctttgctcaccttgcagatcctggtcatgctactatttttgctgctttcactcccaagtgagaagggttggaacaactctatgattgcaagccttggagaaacattgggaaacttgtttaactaagttgtaaggcttaaatgtctttaggggggagtttttatgttggtgaaagcttgaaaaatggtacttctattgtcatgcacagattgattattcaatgtacaaatacctatataagtttagatgcatgtaatgtacattcaggaagtaatcacagtttctgcatggatgatagggctgcgacaatatctgatag

SEQ ID NO: 212206 - DNA, 435 bp, Glycine max
cggctggttaacaagaccatttaatatcccgtgctaggcactatcagatattggtgcagccctatcatccatgcaaaaactgggattacttcctgaatttacattaaatgcatctaaacttaaataggtatttgtacattgaataatcaatctgtgcttgacaatagaagtaccattttacaagctttcaccaacataaaaactcccccctaaagacatttaagccttacaacttatgtaaacaagtttcccaaggtttctccaaggtttgcaatcataaagttgatccaacccttgtcacttgggagtgaaagcagcaaaaatcgtagcctgaccaggatctgcaaggcgagcaaagaggttgtcaatgggaccagggccagtgaaaatgtgctggaaccatgcccccatgaagccaacatggccaacctccca

SEQ ID NO: 212207 - DNA, 502 bp, Glycine max
cattaacctaaactcactcagttctacgatacgattctcttccgcctccctttccttcaactccacggcgcagatccgaggagtttgggaaaccctaattcattcctctttgcttcttctatctctattcctctaacaccagtgatggcaggtttggctccagaaggatcgcagtttgatgctcggcaatatgattctaagatgaatgaattgctttccgccgatggacaagaatttttcacttcatatgacgaagtctatgatagttttgatgcaatgggccttcaagaaaatcttctgagaggcatatatgcttatggttttgagaggccttctgcaatccagcagaggggaattgttcctttctgcaagggtctggatgtgattcagcaggctcagtctggaacttgaaagacagcaacgttctggtcatgaattttgcagcaacttgactattgattggttcagtgtcaggctttggttttggcaccaacaagggagc

SEQ ID NO: 212208 - DNA, 558 bp, Glycine max
aagcaaattaacaaattttatagaatccattataaaaataaagtcaggtgtattggaactctaatgctaaaatttgaaaaagaaaaacaaagagcacaaaataataattggcaaaaagtaatagccctctgatgacttaacaaagaatgaaaattaacccatcagagcagatcagcaacatttgatggcaactcctctacagtcacattgtagaacttttgaatatcagacagcattcttgcatcatccaaagtcacaaagtttatggcaacaccttttcttccaaaacgcccacttcgtcctatgcgatgaagataattttcaggttgggttggcagatcatagtttataaccaaagacacctgctgtacatctataccacgagccaagaggtcagtggtaattagaactcgagaagagccagagcgaaattcccgcatgatgatgtcacgagtgttttggtccatgtctccatgggtggctgagactgtatggtcattgcttcgcatcttgtcagtgagccagtccaccttacgccttgtgttcacaaagatgaca

SEQ ID NO: 212209 - DNA, 484 bp, Glycine max
  unsure (1)..(484): unsure at all n locations
ccctattgtaatttctgccagccttaaaaaagacttgctctgcctctgccactctctgagtaggactacactgccatggctgcctcagtctccactgttggagctgtcaacggagctccactgagcttgaacagctctggagctggagcttcagttcccagttcagccttctttggcaccagcttgaagaaggttattgcctcaagggtccctaacgtcaagatttcttctggaagtttcaaaatcgttgccgcggaaaaagagattgatgagaaacaacagacagacaaggacagatggaaaggtcttgcctatgatgtttcagacgaccagcaagacatcacangaaggaaaggtttgggtgattccctcttccaagctccacaggatactggaactcactatgccatcatgagctcttatgagtaccttagcactggacttaaacagtacaacttggataacaacatggacgggttttaca

SEQ ID NO: 212210 - DNA, 532 bp, Glycine max
aacattgcacacattgtaaaatgtagacaatgtaactcaaaattatacaggataacaatccaatatgaacaagataacttattttattatctcaactcttagcttctctccaagtggagaatgcttaggttctcagggtgtgtataagcaggttccatcatcacttcttgcagttgggtcgaagtttgaggcatttggatcagtacaaccttcaggaacgggaatgtttacttgctgagctgctttgccatagaaagttcctctgttgatggaatcttgattagcatcaccaagagcagcctctttcaagtacttgtctgccagttgtactctcttcacattctcttgttcttggacaagcatgttaccatactccaagagcttgctcaaagtcatcttcggttggtcaaaggttggaggtccttccttggagttcacaagcttcttcccaatgaagtcaacaccaacaacagaaatccacttccttacctcatcatcatatactctagccctgagtgcaccaaagaaatca

SEQ ID NO: 212211 - DNA, 548 bp, Glycine max
aaactccctgtagttggtgaccataaatgggtagtatggatatgttccttcaatgtccccatggcacccggtaagactcgctccatagtttgcagtgctcgaaacttcttccagttctcagtgccagggccagcctggtggcaagtcgttcctagatggtatgagcattggacttcaaacaaggtatatgatggagacatgattgttcttcaaggccaagagaaaatcttcctttcagaaaccaaggaaggtggagacattaacaaacagtatacaaacatcaccttcacaccaacacaggcagatcgctctgtcttggcatttcgaaactggctaaggcggcatggcaatggccaaccagaatggtttggcaacagcagcgaccaaccattgccatcaactggtttatcataacgtcagatgttggatagatttgaacagcacactctcaagtgttcatcatgtatagcagcatatgagggattccaaacatggcagaaaggcctaattggtacaacagttgtgttttgtccaacatcagggatccc

SEQ ID NO: 212212 - DNA, 499 bp, Glycine max
catcaaaatactagtatacatgtatttttgtcttcaactctatttacaactaactagtagaagttcctttggagggaagtgtttaatcaatttcggcatgcacgtaatccacgaattcaaaattcttttggagttgatttagggcaaaagttatggctgcactgacaattgcgagtccagccaaaagtacacgcaactggacatctgatgggatccctgatgttgcacaaaacacaactgttgtaccaattaggactttctgccatgtttggaatccctcatatgctgctttacatgatgaacacttgagagtgtgctgttcaaatctatccaacatctgacgttttgataaaacagttgatggcaatggttggtcgctgctgttgccaaaccattctggttggccattgccatgccgccttagccagtttcgaaatgccaagacaaagcgatctgcctgtgttggtgtgaaggtgatgtttgtatactgtttggtaat

SEQ ID NO: 212213 - DNA, 515 bp, Glycine max
cttgttctccgagctctcccgttttcggattcggagcgtgagcagcctcatcaaggttggacgaatcgagccggtgatggtgcttcgtgtcgacaaggaaaagggttacatcgatctcaacatgcgcagggtctccgaagaagacatccaggcctgcgaggagaggtacaacaagagcaagctcgtccactccatcatgcgccacgtcgccgaaaccctcaacatcgatttggaggaactttatattcacattggatggcctttgtatcgcaaatatggtcatgcttttgaggctttcaaaataattgtgactgatcctgatactgttttaagtactctcactcgtgaagttaaggaagttggccctgacgggcaagaggtgactaaggtggtgccagctgtatcagaagaagtgaaggattctcttgtgaagaatattagaagacgaatgaccccccaaccctttgaaattagggcagatattgaaatgaaatgttttcaatttcgatggagtt

SEQ ID NO: 212214 - DNA, 585 bp, Glycine max
  unsure (1)..(585): unsure at all n locations
cttgttctccgagctctcccgtcgtcggattcggagcgtgagcagcctcatcaaggttggacgaatcgagccggtgatggtgctccgtgtcgacaaggaaaagggttacatcgatctcagcaagcgcagggtctccgaagaagacatccaggcctgcgaggagaggtacaacaagagcaagctcgtccactccatcatgcgccacgtcgccgaaaccctcaacatcgatttggaggaactttatattcacattggatggcctttgtatcgcaaatatggtcatgcttttgaggctttcaaaataattgtgactgatcctgatactgttttaagtactctcactcgtgaagttaaggaagttggccctgacgggcaagaggtgactaaggtggtgccagctgtatcagaagaagtgaaggattctcttgtgaagaatattagaagacgaatgaccccccaacccttgaaaattagggcagatattgaaatgaaatgttttcaatntgatggagttcttcacattaaggaggcaatgcataaggctcgagctgcangaaatgatgactgccccgtcaaaataaactt

SEQ ID NO: 212215 - DNA, 408 bp, Glycine max
aagaaacctaacagcgccatagcgttctctaagctatcgggcgaggtccctcgacctaggcacagccccagcaccaaggggctgtgcctgtcgtcgacttccacgcccatgtcggaacccgacacccaggcgccggcgccgtctccgttcctgcttcagcgcccgccgattgtgcagacggtgtcgccgctcttcaagcatcagacgtggtcgcgcggacgccttccgcgacgaggcgtggctccaccgcaaggggaactggaagaaccgccgcagtgagagcgtcaccgatgaggacgcggacgagctcaacgcctgcatcgagatacgctttggattcgattcctcccccgaggtcgagctcgatcaacgcctttgcgatactctacccgttctcggactgtacta

SEQ ID NO: 212216 - DNA, 487 bp, Glycine max
  unsure (1)..(487): unsure at all n locations
cacaaagacatcatcatccatggctgcctccgtctccactgtcggagctgtcaacagagctcttttgaacctgaatggttctggagctggagcttcagctcccagttcagccttgtttgggaccagcttgaagaaggttattgtctcaagggtccccaacagcaaggtttccggtggaagcttcaagattgctgctgtagaagagaagaaagagattgaagagacccagcagaccgacaaggacagatggaagggtcttgcctatgatatctcagacgaccaacaagacatcacaagaggaaagggtttggttgactcccttttccaagctccacaggatgctggaactcactatgcagtcatgagctcctacgagtacctcagcactggacttcgccagtacttggacaacanaatggatggattctacattgctccagcttttatggacgagcttgttgttcacatctncgagaacttcatgacc

SEQ ID NO: 212217 - DNA, 394 bp, Glycine max
aggacaaaaggaaaaggcaccaaattcaatttaagtggacactgtaactcaaaattatagaggaagacggtccaatatgaaaaatatagtaagatcatctcaaacttagcatcttttttttgcacctaaaacattgagaatgctaagaatgttacacgcaagttccatcacaacttttagcacttggattagtacaacaaccttcacgaacagaaatatttacttgccaagtttgctttgcctccaattcaagactggaagaaagttcccctctgaatagcatccttgttagcattttcaagagcagccttgttcaagttcttgtcagccaattggaactcttttgacatttttttgttcttggacaagcatgtttccatactgtaagagcttt

SEQ ID NO: 212218 - DNA, 397 bp, Glycine max
caagaaaagaaaaaaagggagagaagcagaaagagagagagagagaactgaaaaaagaaaagaaaagataagactaattaacgtttttttggtttggttttcttcaacacgcaggagacacgaagtaaagagacaagttacatgagatggttaaaacttgttaaaagagtttgcgtatgtgtgtgaaagtagtttaaggttgtgggggtggttgaagaagtttttgtagctttgtggatagagatgtcaggtggtgccggcatcattgtgtggatctgcagagatttgatgatagaatacaatgcagcactggcagcatgagtgagaggtgctgctgtggttgcagttgtcgtatgggctcctgaagaagaaggttaatactaccctggcagggtct

SEQ ID NO: 212219 - DNA, 598 bp, Glycine max
ccgacctcaccggcttgcctatgtcgaatgcttcattgcttgatgagggtactgctgctgctgaagcaatgtctatgtgtaataatattcagaaagggaagaagaagaccttcattattgcaagtaactgccaccctcagacaattgatatttgcaagacaagagctgatggttttgatctcaaggttgtgacagcagatcttaaggacattgattacaagtctggggatgtttgtggtgtgcttgtgcagtaccctggcactgagggagaggttttggactatggagagtttgtgaagaaggctcatgctcatgaggtgaaggttgttatggcaagtgatttgttggcactgactgtgttgaagcctcctggggagtttggggcagatattgttgatggctcggctcagaggttcggagtgccaatggggtatggagggcctcatgcagctttcttggccacttcacaagagtacaagaggatgatgcctgggagaatcatcggggtcagtgtcgattcttccagaaagaccgttttgaggattgcaatgcaaactatggagcagcatatcaggagggacaaggctaccagcaacat

SEQ ID NO: 212220 - DNA, 369 bp, Glycine max
ggagggccaagcaacaacgcccacgtggccgcgcatgtgcgacacgtgccgctccgtcccctccaccgtcttgtgccgctcccacaccgactttctctgcgccacgtgcgacactcggctacacgtatctctcacgtggcacgagcgcgtgtggatgtgcgaggcgtgcgagcgcgccccggcggcgttcctatgcaaggccgacgccgtcttcctgtgcgccatctgcgacgccgacatgcacgccgccaacccactggccagccgccaccagcgcgtccccatcctacccatggtcgccgacaacaacaacaacaacgacgacgacgacgttgctgacgatgacgacgaagacaaaaccgcttcatg

SEQ ID NO: 212221 - DNA, 631 bp, Glycine max
gtactgcgtttcggaagcaggtaccaaagtagtccttcgaggtttagtgatctgttttgcgcttttgaaaatttgaatatatgattctgcttctagttcgaaacttgtcttaagcatggtttagggtttgagcatagtttagggtttgagcatgattaaatcgattttcacttatcttctatagtttctgctgatttccaaatcttgtatcttagataggccagttgaatttttattcttccctagtcataacgctctgatttccaaatcgatgttttgttatggagaattagtcgatagtttcatctggccaacgtatcatatgtctttaatttattaattaaactaagattatgcataaatataaatatataaagttttgaagattaggttatgcaatagaaaggggcaaggaaggttctattgttgtttgtttgtaattgatgtttctgaaattactttttgggcgtagacacagatggctcgtacgaagcaaaccgctcgtaagtccacaggaggaaaggctcctaggaagcagcttgcaaccaaggtctcttctataatcacaacaacaattaattaatctttggtcattttgatatggtttgaaatttattcgagagtttaattc

SEQ ID NO: 212222 - DNA, 559 bp, Glycine max
ctcgagccgaatcggctcgagcggctcgagcctacttctacttccctttgttctcaaaccttatcccttatcctcccaaaaccaaaccatgtctacctccgcagcttctctcgcactcccaaccctcactctccgaactcgacaacctctctgttctccccaatgcttctcctcgtccctctccctcacccctaactccaaacccatttccatttccgccgttttcctcaaaacaacgctgtcgtcgtcgtcgccgttgtcgctgtcgtctcgcttcgttccccatgtctctgtgttggagcaggaggaggacaccttcggcgacggagacggccccagcttctcccgcgaccttaagctctttgtcgggaatctccccttcagtgtcgacagtgcgcggctcgcggagctcttcgagagtgcggagaatgtggaggtggctgaggttatttatgataagactactgggaggagcagggggcttgggtttgtgaccatgtctttcgatgaggaagctcgagcggctgctaagcagttcaatggctatgaacctgatgga

SEQ ID NO: 212223 - DNA, 536 bp, Glycine max
gacaaggtggaccccaacgaacagcgcctctccaagtggcacaactgcgccctctccaacgaacccttgagagagccctgcgtgatcgataaattggggaatatcttcaacaaggaatctctggtggaagcgttgttagggaagaagcttcccaaggaatttgggcacatcaagggtttgaaagatatgattaatgttcagctttctgcgattcctggagcggaggatggggcaaagtttcagtgccccattgcagggcttgaatttaacggaaagtataggtttttcgcgctgaggaattgtgggcatgttttgagtgccaaggctctgagggaggttaagtcctcttcgtgtttggtttgtcacaaggagtatgctgacttggataagattgtgctcaatggaagtgatgaggaggttgtaattttgcgggagaggatggaggatgagaagcctaagattacggagaagaagagtaagaaggttaagcataataatggtgatggtgtgagcttggagggactaggttgagtggt

SEQ ID NO: 212224 - DNA, 631 bp, Glycine max
agaggaggtgccaaaattgtgcattgtagctgaatgagcaagtagtggaaaagctaaaaagcacattctgagaaagaaagatatgggtgcatactgcaacggcaacgtttcgttgtcaccatcctacgacgtcgcttcagcccaagatcccaggttctgcaagcacgttcacgacaacgtccatggcaatatttatctcgattcccttagtttgaagttcattgacactgagcagtttcagaggcttcgcgagttgaaacaactaggttttacaaacatggtttatccaggtgctgtgcattccagatttgagcattctcttggcgtgtattggcttgccagtcaatgtgtggaaaagcttaaaacttatcaaggcttggagcttggtattgatagatttgatattcaaacagtgaaacttgcaggacttctgcatgatgtgggacatggcccgttcagtcacttgtttgaacgcgagtttcttccccaagttattagtggttctgattggtcacatgaacaaatgtcagtcgatatggttgattatattggtgatgaacaccatattgatgtttacccccaaatgataagaagagtcagggagatgatactggcaagctctgatatgctc

SEQ ID NO: 212225 - DNA, 634 bp, Glycine max
  unsure (1)..(634): unsure at all n locations
gcaactaacgttttcgacaaagacgttatcgtcggggttgaaagcgctcgtgccggcgctgaagacattgatagttgacaagaatctagggtttcctgtgttctcggccatagatgaccttttcgatgaaggcctttacttgcctcctctaaaaggtatcaggagtatcttgcccaggctcgttaggcatattaaggatattcaggaagacattctcctttttgatcctcccgcaacaatgaacaaggacagatttttctggttaagggacgaagaatttggaagacagactctcgcgggtcttaacccttgctgcatccaattggtcacggaatggccattgaaaagcaaacttgatcccgaaatttatggccctgcggaatcagccatcactaccgaaatagttgagcgggaaataagagggttcaatacggtggaagaggccataaaacagaagaaactgttcatcctggactaccacgatttgttgttgccattagtaaaggatgtgagagaactttgagggcacacgctatatggatcaagggcatngttcttnctaacccgcgaatgcacattgagacctctgctatngagctgactcgccaccaatggacggaaaccgcatggaagg

SEQ ID NO: 212226 - DNA, 402 bp, Glycine max
  unsure (1)..(402): unsure at all n locations
agaacactgaagctaaccgccaggcataccgtaccctccttgtgacagttccaggacttggtcagtacatctctggtgccattctctttgaggaaactctctaccaatccacaactgatggcaggaagattgtcgacgtgctcctcgagcaaaacattgttcccggtattaaagtcgacaagggtttggtaccccttgctggttccaacgacgagtcatggtgccaaggtcttgatggtcttgcctctcgctcggctgcatactaccagcaaggtgcccgtttcgccaaatggcgtactgttgtgagcatccccaacggtccctctgctctggcagttaaagaagctgcctgnngtctggctcgctatgcaacaattgctcaggacaatggattggtcccaa

SEQ ID NO: 212227 - DNA, 419 bp, Glycine max
cattgattgccgagattcaaccatgtttgttatatattgagacataatcaatcaagtacaccactcacagcagaaggtttataagctgtaaaggtacatgtaaccataaacaaaaatagtctccaagactataaaaacattacattttagacaaattagtcttcttccacttcatcctccgtcaacacctactataactgctggtgttgctgctgcctaacatgtatcatattcactacatacatcttagtaggagtagcctttgacgaacaactccttcttggcttcctcggattcaccctcaccggtgtacttcccaagctgggcgagcgagttggacttggcacggaaaaggagtgcattttgtgccgccttaacgttttctgggcggcctccccatgtcttcaaggcagtgtttt

SEQ ID NO: 212228 - DNA, 483 bp, Glycine max
tgatcttcatccttgtctactgcactgttgggatctcagggggtcacattaacccagcggtgacatttgggctgtttttggctcgcaaggtgtctttgatccgagccatcatgtacatggtggctcagcgcttaggtgctatatgtggagttggtttggttaaggctttccaaaagtcttacttcaacaagtatggtggtggggctaattccctcgctgctgggtacacgcacaggtactggattgggtgctgagattatcggaacctttgttttggtctacactgtcttctctgccactgaccccaagaggaatgccagagattcccatgtgccggatttggctccacttgccattggatttgctgtgttcatggttcacttggccaccatcccagtcactggtactggaatcaaccctgctaggagtcttggagctgctgttatctacaaccaagataagccatgggatgaccattggatc

SEQ ID NO: 212229 - DNA, 503 bp, Glycine max
tgatcttcatccttgtctactgcactgctgggatctcagggggtcacattaacccagcggtgacatttgggctgtttttggctcgcaaggtgtctttgatcctagccatcatgtacatggtggctcactgcttaagtgctatctgtggagtagctttggctaaggctgtccaaaagtcttacttcaacaagtatggtggtggggctaattccctcgctgctgggtacagcacaggtactggattgggtgctgagattattggaacctttgttttggtctacactgtcttctctgccactgaccccaagaggaatgccagagatttccatgtgccgggttcggctccacttcccattggatttgctgtgtacatggctcacttggccaccatcccagacactggtactggtatcaaccctgctacgactctaggagctgctgttatctacaaccaagataagccatgggatgaccatggcatctttagcgtaggaccatttatt

SEQ ID NO: 212230 - DNA, 606 bp, Glycine max
  unsure (1)..(606): unsure at all n locations
tgtggttttcatcgtcttccttctcttatatttctttttttttttttgtcttcgccgcgacgccgaaacaatggccggaaaaggagagggtcctgctatcggaatcgatctcggaaccacctactcttgtgtcggtgtgtggcaacatgaccgagttgaaatcatcgccaacgaccaagggaacagaacgacgccgtcttacgtcggcttcactgataccgagcgtctcatcggtgatgcggctaagaaccaagtcgccatgaaccccatcaacaccgtcttcgatgccaagaggttgattggtcgtagattcagtgactcctctgttcagagtgatatcaaattgtggccttttaaggtcattgctggtgctgctgacaagccaatgatcgtggttaactacaagggtgaagagaagcaatttgctgcagaagaaatcttttctatggtgctcatcaagatgcgtgagaatgctgaggcttaccttggctccacggtgaagaatgctnngtgcactgtccctgcttacttcaatgattctcagcgtcaagctaccaaggatgctggagtcattgctggtcttaatgtgatgcgatttatcaatga

SEQ ID NO: 212231 - DNA, 482 bp, Glycine max
  unsure (1)..(482): unsure at all n locations
cacacgggcaaaacaattagtatcccatccaacaaaaatcataaaagttaaaattcaataaaaaagcatcaaataagttttaaacagataaatggatgaaagcaactacacatttagtccacttcctcaatcttggggccagcaccacttccaccagagggagcagcataatcatcctcggctgccccagcaccagcaccacccatgtcaggaccagcaccaccttggtacatcttggcaatgataggattgcagatgctttccaattccttcattttgtcctcaaattcatctgcttctgcgagctggttgctgtctagccactggatagcttgctcaattgcgtcctcaatcttcttcttgtcagtaggatcaagtttctcaccaattttgtcatccttcacagtgttcctcatgttgtatgcatagttttccaaagcattcttggcctcaaccttcnttttgtgctcttcatcctcaga

SEQ ID NO: 212232 - DNA, 424 bp, Glycine max
tgtgggtctcatcgtatcccttctcttatattgattttagcttttatggcttcaccgaacgccgaaacaatggccggaaaaggagagggtcctgctatcggaatcaatctcggaaccacctactcttgtgtgggcgtgtggcatcatgtccgagttgaaatgatacgcaacgaccatgggaacagaacgacgccgtattacgtcggctgcactgataccgagcgtctcatgcggcgatgcggatgagaaccaagtgggcatgaacccgatcaacaccgtcttcgatgccaagatgttgattcggtcaggaatacagtgactcctctgttcatagtgatatcaaattgcggcctgataaggtcattgatggtgctggtgacaagccactgatcgtggttaactacaagggggaggagatgcaatt

SEQ ID NO: 212233 - DNA, 310 bp, Glycine max
cacacgggcaaaacaattagtatcccatccaacaaaaatcataaaggttaaaattcaataaaaaagcatcaaataagttttaaacagattaatggatgaaagccacttccccattatgaccacttcctcaaattcttggggcccgccccacttccaccagaaggagcagcatattcattcttggttgccccagcaccagctccacccttgtcaggaccagcaccaccttggtacattttggtaatgaatggattgcagattctctccaattccttcatttgtgtctcaaatatatttgcttctgcgagct

SEQ ID NO: 212234 - DNA, 426 bp, Glycine max
acaagaaaagtccaatcaataacgtgcactgacaatgagattcactatcaatattagcacgttttcatgtataataaaacgagtggacattaagattttccgtcacagcctaatgcttactgacatccataataccatgaatacaaactcctatatagaaaaggtgggcattgacgaccctgactgttcagagaacgtacctaagcgtatcctccactacatacagacccggggcagtgtggaccagatgaactgttccttgctcaataaggatatcaagtgtgccgttgccatccccgggaggggggaagacctcattggtccacttcttcgaagcccagatccttgaaaccattggcattgactacgtcgacgagagcgaggttcttactctcgtcggcgacgccaaccacattaacaaacaca

SEQ ID NO: 212235 - DNA, 475 bp, Glycine max
caaacatttaagcagagagatcaaagttttgagaagaaagaaacaatggcgatacattgtgggttctacagtgtgaatggggggtttaagatatctgatgaagataaaagttacatgcaaggttgcaaagttgttgtatctacttgtgcatttggcggtggagatgatctctatcaaccgatcggagtgtctgaagcttcgattaataaggtctgctatgtagcattctgggatgaaatatccctgtacgcgcaggaattacagatgctgcatattgttgctaagtggattcatgggtacagggagaagttgaaccatgtattgatgcatgtctactcagctgaggaagctactagataagttgaacttacttatgcctgttccataatgtcttactcggaaatcttaaaatggctgtttggctaacctgtgactacagatggcgctacttcatgaaatggaaataaatgaacca

SEQ ID NO: 212236 - DNA, 447 bp, Glycine max
gatgaatcagagcaagtacactctagatgctgtcttaagtgaactctcatgcccgttgttgctgctttggggtgaccttgacccatgggttggtccagccaaagcgaatcgaatcaaagagttctatccaaaaactactcttgtgaacttgcaggctgggcattgtccacatgatgagacaccagagcttgtgaacaaggctttattggattggttgaccaccctcactcctgaagtgactctccaaacagtttgaacgcgtatgattttgtaaagccaattgaaaacaagttcttgattaagttttgagtttcaaatagataatagtagttatcagtatacgttgtgtacaaagaattgtgtaaaggatactcagaatagagaaaaatcacagcaagaatactttatgatcattgttctacttcttctgcaaaaaaaaaaaacaat

SEQ ID NO: 212237 - DNA, 353 bp, Glycine max
gcagaagaagttgaacaatgatcataaagtattcttgctgcgattgttctctattctgagtatcctttacccaattctttgtacacaacgtatactgataactactattaactatttgaaactcaaaacttaatcaagaacttgttttcaattggctttacaaaatcatacgcgttcaaactgtttggagagtcacttcaggagtgagggtggtcaaccaatccaataaagccttgttaacaagctctggagtcttatcatgtggacaatgcccagcctgcaagttcacaagagttgtttttggatagaactttgtgatttgatttattttttgctggatcaacccatgggtc

SEQ ID NO: 212238 - DNA, 333 bp, Glycine max
cttccggagatgtgtggaactgagcggccacttgtagctgggaatgccatcctcatcaccatgcagttgtgttcagcgggtgtacttgggctttgcctacaatagctttttcaagaccgatatggactggcgcctggagtctccctattcattgcagcccatatctgagaaaaccctatatggaaggcattgagggcaaccaccatcaacattggacgtggccctgaatacgaaggcgctggtccagctctgttccattaggtgataactagaacacacactggccgtgctctctgggtggcatcataccggcataatctttccaacgtgaca

SEQ ID NO: 212239 - DNA, 476 bp, Glycine max
tgatctgcatcctcggctactgcactgctgggatcttagggggtcacattaacccagaggtgagatggggtctgtttttggctcgcacggtgtctttgatccgagccatcatgtccatggaggctaaccgcttaggtgctatatgtggagtagcatcggctaatgctctgcgcaagtcttacttcaacaagtatggtggtggggctaattccctctctgctgggttcacatacaggtactggattgggtgctgagattaccggaacctttgttgtgatctacactgttttgtctgccactgaccctaagaagaatgccagagatgcccatgtgccggattcggctccacttcccattggatatgctgtgttcatggttcacttggccaccatcccaggcactggtactgggatcaaccctgctaggagtcatgtagctgctgttatctacaaccaagattatcgatgggatgacca

SEQ ID NO: 212240 - DNA, 435 bp, Glycine max
tcttattcttccagttatatatatggatttgtattggctaattgcttcaatgggtactattgaggaggcatatgacacatataccaagatcctaagaagatggccagtcttttactatggcatggggcacatgctcactgacatatctgctgctcgtaggttcacgtatctatcatcgatcttgacagatattggactttcacctagcagacagatgctccaaagaaaaggataacgaacaagtttctgatgaagattatcaactaaacacctgtggcatagcatggtcgcgcaaacacatctcccacaccccatggtgagaatgcacctgctgtgacgctgacaggacaagtggctgatggatctgccaccatacttggaggtgaactgatagacaggctcggacacttgaagatatggcatggtgctggatct

SEQ ID NO: 212241 - DNA, 461 bp, Glycine max
gcatttcaaaggattgagtttccccactatttcttcagttggctcaaatgcagctataattcactattttccaaaggcagaaacatgtgctgaacttgatccaaacaaaatatatctctttgattctggagcccactatctagatggaccaacagatattacacgaacagttgattttggaaaaccttctactcacgaaaaagcgtgttctacagcacatcctaaagggtcacattgctcttggaaatgctagatttcccaatgggacacatgggcattctcttgatattcttgcccgaattcctttgaggaaggatgggcttgattatcgacatggtactggtcatggaattgggtcctatctgaatgttcatgacggacctcacttaatcagtttcagacctcaggctcgaaatgtaccattgcaatcgtaaatgactgttacagatgaacctggttac

SEQ ID NO: 212242 - DNA, 420 bp, Glycine max
ggtaattgttttcaatattttaaaaataaagatagcgaagagaggataggctcattacataataaattggtcaatttcccataagttattgcgtgtgagagccaaatgaatcgaaagattcatgtttggttcgacaagagatcctatacattccgaaatgaagtggaaagagagtctactttaattaagtgatttattagatgatcgataacagaaatatcttgagaactattcgacactcaaaagaattacgggaaggggccattgaacagctggataaagcccaagcctgcttaaggaaagtcgaagcggcagcagatcgttctcgggcgaatggctgttctgcgatcgaacgagaagaattgaattgaattaattcaatttatactactttggaacaaatacaaaatgacgaaaacg

SEQ ID NO: 212243 - DNA, 475 bp, Glycine max; identical to SEQ ID NO: 212235

SEQ ID NO: 212244 - DNA, 535 bp, Glycine max
ctccgcatcgtcggcaagtactttcccgcaactgttgtgagtgcggagcggctcaagcggtatgtgttcaacaaaatttgcagtgagttgcctgaggggcccttctgtattgcttacatgcacagcaccgttcagaaggaggataattcccctggcatcaccatcttgaggtggatctatgaagaacttcctgctgatttcaaggacaggcttcagactgtgtatttcgtccaccctggctttcggtcccggctagtcatcgctactcttggccgctttttcttgagtggagggtaactcatctatcaatgctgaccaaaaaaaaaaaaaactcatctatcaatttttcttaacagaaatgaacatccaaaagcattctatttaggagtatcatttaggtcgtgtttggataaacttctttcaagagaagcagaataaaaaagtaaaatgaataaagcttctataagtttaaatcaatttatgcactttagccctttgaagaagttagatgaaagagtttatggtaaaattgaag

SEQ ID NO: 212245 - DNA, 360 bp, Glycine max
aattaaaaaattttaaaaattataaaaaaaaaaaaaaaaaaaaaaaaaaaaataaaaataaataataaacaaaaacaaaaatattaataaactaaaaaaaaaaaaaaaaaaaatcgaaaaaaaaaaaaaattataacataaaaaaaacaataaaaaataaatataaaaacaacacaaaataaaaattaaaaaaaaaaaaaaaaaagaaaaataaaaaaacataaaaaaaaaaatatagcaaagaaatataaaaaaaataaaaaatacaaaaaaaaacaaaaaaaaaaaaaaaaaattaacaaaaaaaatataaacaaaaaaaaaaaaacatatataataacatataaaaaattaaataaa

SEQ ID NO: 212246 - DNA, 418 bp, Glycine max
aataattcagaaatgttactgcaaacattagctatccctacaatactccttgtgatattcatatgggtggtacaaccaaagcaacgtcatgggaagattgcaccatgtcccaaggcggtgccaattattggtaacctccacatgcttgggaaactcccgcaccgcacccttcaaacctttgcaagaaaatatggacccataatgttcttgaagctagggcaagtccaagccatagtggtttcctcccctgaaaccgctgaactatttctcaagacccatgacactgtatttgcaagcaggccaaagaatcaagcctctgcatatctctctcatggcaccaagggctcggtggtttccgagtatagcgcctactggcgctaagtgaggaaagtgggctccctttaactttttagtgctt

SEQ ID NO: 212247 - DNA, 419 bp, Glycine max
gactggtgagagctgctcttcatgaagctgcaaagaagagagagatgagatacgatgacataaagaaaattgacaaaggaataagacgacacttccatgatgatatcactgtggttgtaatctatcttgatcaccatgcaggctcctctaagcaaactgctgttggctatacaactgccccagttgatattttttccctaaatgcggatgggatgcttggcacagctgcctaagagtgaaattgcttgaaaggatcatacactgacattattaggggcaaaaattattcataggagaagattaatattgacggtaaatgaagggaattcttgagaaaaatatacaaaaaatgactgcatagatctagtagctgggagttgctagacatattctttctggtgcagatatgcatttgtata

SEQ ID NO: 212248 - DNA, 490 bp, Glycine max
gactggtgagagctgctcttcatgaagctgcaaagaagagagagatgagatacgatgacataaagaaaattgacaaaggaataagacgacacttccatgatgatatcactgaggttgtaatctatcttgatcaccatgcaggctcctctaagcaaactgctgttggctatacaactgccccagttgatattttttccctaaatgcggatgggatgcttggtacagttgcctaagagtgaaattgcttgaaaggatcatacactgacattatttggggcaaaaattatttataggtgaagattaatattgttggtaaatgaagggaattcttgagaaaaatatacaaaaaattactgcatagatatagtagctgggagttgctgacagattctttctggtgcagatatgcatttgtatagctgtgaagtttattgtttgagattgacggtatcaagtctgtttttctctggaaagaaagaaaataaaatta

SEQ ID NO: 212249 - DNA, 536 bp, Glycine max
ggagttgtaaattaagagcatggctgcacaagctcttgtatcatcatcatctcttaccttctcagccgaggctacaagacaaagtcttggaccaagatcactccaatctccatttggcttctcaagaaaagcctcctttcttgttaaggcagctgctactccccttgtcaagcaaggatcagacagacctttgtggtttgcatcaaagcaaagtctttcctacttggatggcagccttccgggtgactatggatttgaccctgtgggactttcggaccctgaaggaacaggagggttcattgagccgaaatggctagcatatggtgagataatcaatggtcgttatgcaatgttgggtgcagttggtgcaatagcacctgaaattctaggcaaggctggtctgatccctcaggagacagcactcccatggttcagaaccggtgtgttcccacctgcaggaacctacaactactgagcagactcctacacactgttcgtggttgagatggcactgatgggatttgacagcacagaag

SEQ ID NO: 212250 - DNA, 411 bp, Glycine max
atttagactccagctttttgtgaggattccaaagcatggcttcccttgcagcatccactgctgctgcttcccttggcatgtcagaaatgcttggaaaccccatcaacctcagtggtgccacaaggccagctgcatatggctctagccctgcctccttcaagactgtggctcttttctacaaaaagaaggctgcacctacaaaaaaagctgcagctgctgctcctgccaatgatgagcttgccaagtggtatggtcctgacagaaggatcttcttgcctgagggtctcttggaccgatctgagatcccagagtacttgaccggagaagtccctcgagactatggttatgacccatttggtcttagcaagaagccagacgatttttccaaatatcaggcatttgaattgattc

SEQ ID NO: 212251 - DNA, 516 bp, Glycine max
  unsure (1)..(516): unsure at all n locations
cgaccttgcgattcagcgcagcattgaaggcgattttttactagcatggcagcaatagtgttgacgactatgaatattcctctgcacacttcggtttgggttaattcccggcggaagagttggtgctgctacgcctcactttcgcagccagacaggaaggagatccgtctcggtttgcccagcaaaggtcgcatgtccgctgacaccctcgaacttctcaagaattgtcaattgtcagtgaagcaggtcaatcctcgtcagtatgttgctgaaattcctcagctatccaacctcgaagtttggtttcagaggcccaaagacatcacaagaaaattgttatctggagatcttgaccttggtattggtggactcgatactttcagtgaacatggccagngtagtgaagatcttatcattgtccacgaggctctcgagtatggtgattgccgtttatcccttgcgattccccaatatgggatatttgaaaatgtaaattcagtggacgagcttgcaaaa

SEQ ID NO: 212252 - DNA, 508 bp, Glycine max
  unsure (1)..(508): unsure at all n locations
cgaccttgcgattcagcgcagcattgaaggcgattttttactagcatggcagcaataatgttgacgactatgaatattcctctgcacacttcggtttgggttaattcccggcggaagagttggtgctgctacgcctcactttcgcagccagacaggaaggagatccgtctcggtttgcccagcaaaggtcgcatgtccgctgacaccctcgaacttctcaagaattgtcaattgtcagtgaagcaggtcaatcctcgtcagtatgttgctgaaattcctcagctatccaacctcgaagtttggtttcagaggcccaaagacatcacaagaaaattgttatctggagatcttgaccttggtattgttggactcgatactttcagtgaacatggccagngtagtgaagatcttatcattgtccacgaggctctcgagtatggtgattgccgtttatcccttgcgattccccaatatggaatatttgaaaatgtaaaatcagtggacgagc

SEQ ID NO: 212253 - DNA, 374 bp, Glycine max
ctcaaacacattatcatccatggctgtgtgaaacttcactgtcagccatgctaacggagatagtgtgaccctgaatgggtctggagctggagcttcaatttcaaagacacatatctgtggtgacagctggtaatagggaagagccttgcgggcatctatcattgaagcttaccgcagtggctatatgattgatgcggttcactataagaaagagagctgagatacccatcatacctgctgggacagagggaaggttcttgcctgtgctgtctcatacgacctacatgacatctcacgatgaacatgctcgagctgctcaatttcgcaagcttgacatgatgatggttctgactatgcagtcatgaccgtctact

SEQ ID NO: 212254 - DNA, 198 bp, Glycine max
aagaaaaaagaaagttctaattattaattaattatatctatatatatatatatacagatagatattctatatcttttatcttaattaatatttgacccctccttataatgtgttatagcttttctttattttaggaacttatccattccttttttaatgtgcccgacaatccgaaagaattctgggggaggggtcatt

SEQ ID NO: 212255 - DNA, 268 bp, Glycine max
agcagcgaaatatgccgaaaaggtatataaatataaatactggcacatacaaacggcatttattgagatagctcaacgagttgcatgcatggagttatgggaacacaactaaaattgcaagaaatggattagttttttcaaattgatcgaaaatcacatccttatcgctctctttgcacgtttgcaactctaacaattcattcttgggttggttacaacattaaatttttggtctcatgctcattcaagattcttttttttttgctta

SEQ ID NO: 212256 - DNA, 441 bp, Glycine max
tataaatatactggcgttctttgttaatttcatgaacaaaataatacgtgcatacatagctatctagctagcaagtgggacaagagatatatatacgtggtaccctagagagccattctgtagtctatttctgctcaccagggctcatcacatcacaatttgagcatagactcgggctctttttcttctttgcttgccaaaaatgttacacacacaggtatctagcaaatgggttctcaccagcctgaaccatggatattggagaatgagaaaccgagggtggggaccacagagaataggcatggccgatctgcacacaggatgtgcttcacgtattcgcgcaagaagtctagccgaactcttgctgtcaagctttcatgcgccacactcagaagcattcttttaaatgtgcaagaggttattgttggtaccaagctttac

SEQ ID NO: 212257 - DNA, 349 bp, Glycine max
aagaagaaacaagcattaatagaatttttatttctcacacaataaatacaagagattctgcaaactgaaaaagggatttcttactaaagcaaactcaaacaagaacaacttccactcatttggcatctaccgtagtagaacaggatcaaaagcagctctctgatagaacacacgtatgtattatattgaacatcttgcacagtggttcatttttcacagctattgcaacttaaaattcttgcaaagcttctgcaaattccaaactttctttttctcccttctttatggatatgacaaagcgatcagatcatgaaacctatagtcaatccattgaatctgaatctgattt

SEQ ID NO: 212258 - DNA, 536 bp, Glycine max
tataaatatactggcgttctttggtaatttcatgaacaaaataatacgtgcatacatagctatctagctagcaagtgggacaagagatatatatacgtggtaccctagagtgccattctgtagtttatttctgctcaccaaggcttatcacatcacaattcgtgcattgcctcgcgtcctttttcttctttgcttgccaaaaatcttacacacacaggtatctagcaaatgggttctcaccagcaagaaccatggctattggagaatgggaaaccgagggtgttgaccaaggagaataggcatggccgttctgcacacagcatgttctccacgtctttgcgcaagaagtctagccgaactcttgtctgcaagcttgcatgtgccacactcagaagcatccttttaaatttgcaagaggttattcttggtaccaagctttccattctcatccctgccatttcagctgacatcattgacgagtgctatggcttaggaagaccttggattttatattgagcttacttggacttacacca

SEQ ID NO: 212259 - DNA, 439 bp, Glycine max
aagaagaaacaagcattaatagaatttttatttctcacacaataaatacaagagattctgcaaactgaaaaagggatttcttactaaagcaaactcaaacaagaacaacttccactcatttggcatctaccgtagtagaacaggatcaaaagcagctctctgatagaacacacgtatgtattatattgaacatcttgcacagtggttcatttctcacagctattgcaacttaaaatacttgcaaagcttctgcaaattccaaactttctttttctcccttctttatggatatgacaaagtgatctgatcatgaaacaattatcaatccattgaatttgtatctgatttttggttaggatcgatgcctccattcttcattttaagatgggtcatcaaatttgctatagcctacttaattagtgcttaaaatctgtattag

SEQ ID NO: 212260 - DNA, 562 bp, Glycine max
ctcttgctgaaatgcagtctttctagaaagtttgttcaactgtcccattattggcgttagctatgctacccactggagcaaaagagacccaattacgtgagagcaacagtcagaaggtccatcctcaaccaatagaagaggccatgaatcagaatccagaagcaatggaaaccctaatatctaaagtttttatgaatatctcttccttgaagtcagcttatattgagcttcaagctgctcatactccctacgaccctgataaaattcacactgctgataaacttgttattagtgagctgaaaaatctgtctgaactcaagcatttctacagggagaacaacccaaaaccagtgtgtgtttctccccaagactcacgtttagctgcagaaattcaagaacaacagagccttctgaaaacttatgaggtcatggggaagaagttccaatctgaaatccagaataaagattcagagatccatcaattacagcagcagattgaggaggctagccagaagcgagcaaaactagagaaaaatctgaaggctagaggtttgtcaaccaa

SEQ ID NO: 212261 - DNA, 364 bp, Glycine max
tggtaattaaagagacgatgagttgattcgagatggggaacaactgaagatggggaggattattggcttcttgcaaatcagtggaatagtgaatggggagatgatggttacttcaagatccgaagagggacatacgaatgtgggattaaagaggatgtaactgctggtttgccttccaccaaaaacctcgtcagagaggtgactgatatggatgctgacgctgctgtttcattcagaataatttgtgtgtaactgcagctgatcgggctattaaagagatattagagaaggaaaaaaaggagctcgcttattgacattggatgatttgcaaagagagtgaaaagcactactctatcttcagcta

SEQ ID NO: 212262 - DNA, 391 bp, Glycine max
cgaccttgcgattcagcgcagcattgaaggcgattttttactagcatggcagcaataagtgttgacgactatgaatattcctctgcacacttcggtttgggttaattcccggcggaagagttggtgctgctacgcctcactttcgcagccagacaggaaggagatccgtctcggtttgcccagcaaaggtcgcatgtccgctgacaccctcgaacttctcaagaattgtcaattgtcagtgaagcaggtcaatcctcgtcagtatgttgctgaaattcctcagctatccaacctcgaagcttggtttcagaggcccaaagacatcacaagaaaattgttatctggagatcttgaccttggtattgttggactcgatactctcagtgaacat

SEQ ID NO: 212263 - DNA, 533 bp, Glycine max
  unsure (1)..(533): unsure at all n locations
gctggtacggcttcaaccctggttcgtttctgacaatagccaaggggtatgaaagtggagggtattatggtcaatggagcgctatagggaggacagctgtcacgacgacattggctgggagcactgcggctctgacgacgttgttcagcaagcggttattggctggccactggaacgtgattgacgtgtgtaacggcctgcttggcgggttcgctgccattacatcgggctgtgccgttgtggaaccgtgggccgcgattgtgtgtgggtttgtggcggcgtgggttttgattgggcttaataagcttgccgcgaaggtagagtacgatgatccgttggaggcggcgcagcttcacggcgggtgcggagcgtggggggttttcttcacgggattgtttgcgaagaaagagtacgtggaggagatttacggtggtggaaggccgttcggtgctttgatgggtgggcgatggaggctgctggcggcncaagtgattcagatattggtggtgtgcgggtggggtacggcgaccatg

SEQ ID NO: 212264 - DNA, 461 bp, Glycine max
gctggtacggcttcaaccctggttcgtttctgacaatagccaaggggtatgaaagtggagggtattatggtcaatggagcgctatagggaggacagctgccacgacgacattggctgggagcactgcagctctgacgacgttgttcagcaagcggttattggctggccactggaacgtgattgacgtgtgtaacggcctgcttggcgggttcgctgccattacatcgggctgtgccgttgtggaaccgagggccgcgactgtgtgtgggtttgtggcggcgtgggttttgattgggcttaataagcttgccgcaaaggtagatgacgatgatccgttggaagcggcgcagcttcacggtgggtgctgagcgatgggggttttcttcacgggattgtttgcgaaaaaagagttcgtggaggaaatttacgggggtggaatgccgctcagagctttgatggga

SEQ ID NO: 212265 - DNA, 497 bp, Glycine max
gtgcagaagacaattctcgaaaggaaaggaccccctacattttcatgtgcggttgaaatgatatctaaaactgaatgccgtgttcatcatagattagatgcaactgtggatgccattttggcaggaaaacctccattatttgaaatccgtcaatgggatgattctgacaacgagttgccaaaatatgctccattgcccgaagaaaatcttggagaaacttctgacttaactaacaataatatcacgagttctgacaatgaacctagtgaggatgataaagatcacccacgtacttggtccacgaaatggagtaccagtggacctgtgatgacgaggagttcaccaatgcaagtttatacttacaagattcttgaagctgatctgctacaagtggccaaggttatggggcttgaagatgtaatagatgtgactgatgacattggaactgctgaagcaattctagcatccagttctgagatacgacaaaacccatggat

SEQ ID NO: 212266 - DNA, 547 bp, Glycine max
attttggctttggcagcaaatgctgttcacaagctttggaaatggcagagaaatgagcggaacactactgggaaggccactgcaagtattcaaccacaactatggcaaccatctagtggaatactgatgactaatgatataagtgatactaacccagaggatgctgtgtcatgttttgcactgtcaaagaatgactcatatgttatgtctgcttcaggggggaaaatttctctattcaatatgatgacatttaagacaatgacaactttcatgccacctccaccagctgcgacatttcttgcatttcatcctcaagacaataatattattgctattggcatggaggactcttccatacaaatctataatgttagagtggacgaggtcaaaaccaagctaaaaggtcatcagaagagaattactggtcttgccttttctcatgttctaaatgtgcttgtctcatctggagctgactctcagttgtgtgtttggagcacagatggatgggaaaagcaagcaagtaaattcctacaaatgcccagtggac

SEQ ID NO: 212267 - DNA, 379 bp, Glycine max
gagatgagatcatatgaaaaatataaccgattctttcctttgtttgggctactggccatccgccggaagtttcgggtttaataccgatattttagcaacaaatctaataaatcttagtgtagtgttaggtgtattggttttttttggaaagggagtgtgtgcgagttgtttatttcaaagaatagattggatccaaccaaactgcactttttagttataactaagaaaatgtgcataatcccgcgaattacttctgaaaattacttctgaattaatgaaattttttcaataatttaagaaaaaatatttaagaactatagcttttcgcgatttattggtaatgcactttgattctctaataaccaataattttggacta

SEQ ID NO: 212268 - DNA, 456 bp, Glycine max
cattcgaattcattttatttatatattaatattatattcaaatgaaataaaaagatattaaaagatactaattataagaatttgaaagtgaaattataaagttattaaatgattaatcaatttttttctacctgttcctgtagtaaaaagagttccatctgttcttgaatagcttccttcaaaaggacttctgcttccccagtgaatgtcttggtagaagatatgatttctttgaattgaggtttattcgtgtttaagtaagcacgtaactcaacaagaaatttccttacctgtccaatttctaatgaatcaagataaccattcgttccagtataaatagttattatctgttcttccacgggaagaggagctgattgggattgtttaagcaactcgcgcaatcgttgacctcttgcttattgaatttgagtagctttatcgagatcagaagcgaat

SEQ ID NO: 212269 - DNA, 486 bp, Glycine max
gaagggctatatagcataaacatttgagtcttcattgcacaatgtcgacctcttccattaacgggtggtgcctctcttccatctccccagccaaaacctctctcaagaaggccacattaggcccttctgtcttcgcaaccgttagcactccttcttctccttcttcttcttcttcttcttccttcccttctctcattcaagacaggcctgtctttgctgcccctgcccccatcatcaccccaactgtgagagaggatatggcaaaggaatacgagcaagctattgaagaactccagaaattgttgagggagaagagtgaactcaaagccacagctgctgagaaagtggagcagataacagcttctctgggaacatcatcatctgatggcatcccatcatcagaagcctcagacaggatcaaagctggtttcattcacttcaagaaggagaaatatgacaagaatccagctttgtatggtgaacttg

SEQ ID NO: 212270 - DNA, 475 bp, Glycine max; identical to SEQ ID NO: 212235

SEQ ID NO: 212271 - DNA, 425 bp, Glycine max
atggactcctaatgttgggttgcatcatgtaatggtttggatgttattgatgattggcctgagtaggtcattactagtggaaaactgagagctctgagagccaagtccatgagattcaacgatggatacatgatttcttttggacaaccagtcgaggattatattgactgagcagtgagacacgtgctactaagatagggtgctcttggtatcaaggttgagagcatgcttgattggtatcctaaagggaagtagagccctaaaactccctttatctgatcttgacacgaggcacactccaaaggaggaagaatacaagtagcctccagcatgtattggcaaatgatatagagagacagcttgtgcaaagattaaagagtaaaggctgtggatctacatacaacaaaaccatgcttctggacagt

SEQ ID NO: 212272 - DNA, 557 bp, Glycine max
agaagatggctttaggtgttcctgctcttccgttgacatacgtggctcacgttctggcagttgttgccagcgtcttggtcgtggtctgggtcgtcaatttcaggggtggcttggcttgggattctgataacaagtccctcatcttcaacattcatccagttcttattgttattggcttactagttcatgggggtgaagctattataagttacaaagcttttcccctaaagaaggaagtgaagaaattgatacaccttgttttccatgccatcgcattaatacttggaatagttggaatttatactgccttcaagtttcacaatgaaagtgggattgccaatctctacagcttgcattcatggcttggaattggggttattgtcctttatggcattcagtggatatatgggtttgtgatctttttcttccctggtgggactccagacattagacgcgcctcacttccttggcacgcgctatttgggctgtttgtatttgtcttggcttggggcactgctgctcttgggtttctggagaagctcacttttcttgagaac

SEQ ID NO: 212273 - DNA, 434 bp, Glycine max
aactgatataacccaatgactaatttcacattttagggttaatatattgaaattgatgattaaatacaagctttagatccaagaatacaaacaacaaattattttctttctccaactcccaatacaaacttttatagcagacatgagattattccataaaataaaaatatgatacaaacttacaagtgtctatatggcttcatagtcatctgctgcaggggctgggggagcatcagctagagcagataacacaacaaaggcaccaaataagattgtgataatggtagtgaagttgacaagcaaagcctcagaaccatatttgtccaatcctgagttcttaaggaaagtgagcttttccagaaacccaagagcagcatcgccctcagctcaagacaaatacaaacagccccaatagctcgtgccaaggaagtgag

SEQ ID NO: 212274 - DNA, 514 bp, Glycine max
agaagatggctttaggtgttcctgctcttccgttgacatacgtggctcacgttctggcagttgttgccagcgtcttggtcgtggtctgggtcgacaatttcaggggtggcttggcttgggattctgataacaagtccctcatcttcaacattcatccagttcttattgttattggcttactagttcatgggggtgaagctattataagttacaaagcttttcccctaaagaaggaagtgaagaaattgatacaccttgttttccatgccatcgcattaatacttggaatagttggaatttatactgccttcaagtttcacaatgaaagtgggattgccaatctctacagcttgcattcatggcttggaattggggttattgtcctttatggcattcagtggatatatgggtttgcgatctttatcttccctggtgggactccagacattagacgcgcctcacttccttggcacgcgctatttgggctgtttgtatttgtcttggctgtgggcac

SEQ ID NO: 212275 - DNA, 332 bp, Glycine max
atacgaattactttttttttttttcctgtgattggatgaaacttaagagcagtggattatcatcattgtcacatatgatgaagcaatattcaacaagtgcaagaactgtatgaataggaataagagtttatgtacaacgggaaatgaaaatagttgtcatttgaacacattatgctgtagcagctgcttgttcttcaacagcctgtgatgctgggagaagggtgcaaatgaggttgcggtcaccgtacacattatcaacacgtcctgtggtaggccagaactttgcagaacggagccaaggagctgggaaggcttgatattccctggagtat

SEQ ID NO: 212276 - DNA, 574 bp, Glycine max
aaaggagaaaggctcaaatttgtaagccaatcatatgtattttatcgagttgagaagggtcaaactaaggcatatgaggaagggttaatcaagtaattatacagcagctttagggagagagaagagaagagtaatggcagaggtggacagagaaagaatccatacacattgatgatcccggtggatctagtagtggatcagcaatatcagtggccgcaaatttggtggcagggtcccttggtagtgagactgatgggtccattttatgcccttcaggttctaactcagtagtgggcattaaaccaacagttggcctcactagtatagcaggggtagttccaatcaccccattacaagacacagttggaccaatttgcaggactgtattagatgctgctcttgttcttgaaaccattgcaggcatcgacatcaatgatgaggcaacaatcaaagcatcaaagtatgttccaagagatggctatgctcaatttctaaagatagatggactgagaggaaagagattatgtgtttgtagagcattctacggttttggaaatgacacttttaagcatga

SEQ ID NO: 212277 - DNA, 550 bp, Glycine max
agctaaatagacacacttcaaattttattgccatatatggtttttgtcagagttcctgatagaaggacatgacaatacttaatttactcttttagatggataattagtcttggccatcattaaacaaacaaacacttggctattcaattccatcaaaattctgacaatctttttgtaacggttaaacctccaactttcggagtggtgggggcttcctgatcaaagttgcttgctcaaaggaataagcaatttggatgagctttggttccgagcctttcaaacctccaaagataattccaaatggtgcacccttttcatatcccgctggaacagttactccaggataacctccccttgcaagtatactagcaaagaatgaaaaaggtaccaccattgcgtcaaggttatttgttatcattaatttctcaaatccaatatgtgacaatcttgccattgtttagcactgctttcttcagttccctaacttcatttgccttttgagctaccagcatgagatcttggccatacttcttaagtttttccaatttgg

SEQ ID NO: 212278 - DNA, 606 bp, Glycine max
  unsure (1)..(606): unsure at all n locations
attttggctttggcagcaaatgctgttcacaagctttggaaatggcagagaaatgagcggaacactactgggaaggccactgcaagtattcaaccacaactatggcaaccatctagtggaatactgatgactaatgatataagtgatactaacccagaggatgctgtgtcatgttttgcactgtcaaagaatgactcatatgttatgtctgcttcaggggggaaaatttctctattcaatatgatgacatttaagacaatgacaactttcatgccacctccaccagctgcgacatttcttgcatttcatcctcaagacaataatattattgctattggcatggaggactcttccatacaaatctataatgttagagtggacgaggtcaaaaccaagctaaaaggtcatcagaagagaattactggtcttgccttttctcatgttctaaatgtgcttgtctcatctggagctgactctcagttgtgtgtntggagcacagatggatgggaaaagcaagcaagtaaattcctacaaatgcccagtggacgaccgnctgcacctnttgcagatactcgggtccaatttcatctagaccagacacattta

SEQ ID NO: 212279 - DNA, 510 bp, Glycine max
tctccatcttcatcactcccatggacaacgacacaaacacaacaccaaccaccacctcagaaccacaaatagcacacgattttcccggtctcatccgtgtcttcaccgatggtcgcgttcaacgcttcaccggaaccgacgtcgttccacccttcaccactccccacattacatccaaagacatcacactcctccaccctcactccgctactctctccgcacgcctcttcctcccaacaccacaaaccaccagccgccgcaacaacaacctccctctattaatctacttccacggcggggccttttgcgccttctgccccttcaccgcaaactaccacaactacgtcgtcacaatcgtcgccgaagccaaagtcgtcgctgtcttcgttgactaccggctagccccggagcaccctatttctgcagcgtacgaggattcatggtctgcactacagtgggtggcgtcacaccgtaacagaaatggacaagagccttggttgaatgagcatg

SEQ ID NO: 212280 - DNA, 427 bp, Glycine max
  unsure (1)..(427): unsure at all n locations
gaagggctatatagcataaacatttgagtcttcattgcacaatgtcgacctcttccattaacgggtggtgcctctcttccatctccccagccaaaacctctctcaagaaggccacattaggcccttctgtcttcgcaaccgttagcactccttcttctccttcttcttcttcttcttcttccttcccttctctcattcaagacaggcctgtctttgctgcccctgcccccatcatcaccccaactgtgagagaggatatggcaaaggaatacgagcaagctattgaagaactccagaaattgttgagggagaagagtgaactcanagccacagctgctgagaaagtggagcagataacaagcttctctgggaacatcatcatctgatggcatcccatcatcagaagcctcagacaggatcaaagctg

SEQ ID NO: 212281 - DNA, 535 bp, Glycine max
caaacatttaagcagagagatcaaagttttgagaagaaagaaacaatggcgatacattgtgggttctacagtgtgaatggggggtttaagatatctgatgaagataaaagttacatgcaaggttgcaaagttgttgtatctacttgtgcatttggcggtggagatgatctctatcaaccgatcggagtgtctgaggcttcgcttaagaaggtttgctatgtagcattctgggatgaaatcaccctgaaagcgcaggaattagtggagcgcagaattggggaaaatggatttattggaaaatggcgtgttgttgttgttcgggatcttcctttcgcggaccaaaggttgaatggtaaaattcccaagatgttaagccatcgtttatgtcctcaagcaaaatactcaatttgggtagactccaagttgccaatttcggagagacccactatgtgtgttggaagcactcctttggcgctcatattctttacttgctatatcagaacatggagctcggagtagtgtttatgatgaggct

SEQ ID NO: 212282 - DNA, 475 bp, Glycine max; identical to SEQ ID NO: 212235

SEQ ID NO: 212283 - DNA, 455 bp, Glycine max
ttttccgttccaacggcatagaattcaaagtttcacccattcaagacaactccataacctataaggattatctctttgacaaaagattcaacctttctcttcgcttctacaagccccaacaacaacacatagcactcagcaataagaaggtccctattgtgattttccttcacggtggaggcttttgcttcggttcgcgcacctggccccatattcacaactgttgcatgcgcctcgcgtcggggctccaagcggcggtggtttcgccggactaccgtctcgcgccggagcaccgtcttcctgctgcggtggacgacgccgtggaggcggtgaggtggctccagaagcagggcctgagcttgagggaagacgcgtggttgagtgggggcgttgactatgaccgcgtcttcgtcgtgggtgactcgtctggcgggaacattgcgcaccacctggca

SEQ ID NO: 212284 - DNA, 518 bp, Glycine max
aaataagtacatgatgatatgactgcttcattgacacattatttcatttatagctgggcacaatttctatctgaccgggaattaactgagcagagactgtagtgatgtgccaatcataaaggctctgcaacgaggtgagagagtaattgaactagatttatggccaaattcacacgaagatgatatcgaattagttcatggaaggactcttaccactgctgtctcactcatccaatgatcgaagtccataaaagagtatgcttgtggtaaatctcattacccactcattatgactttataagagcaccttactccagatattgaagctaaagctgcagagatggcaactcaagtatgtggagaattgctctattatactcagacagattctctgatggaatacccatcaccgggatcattgaaaggtcgtattcttatatcgaccaaaccaccaaaggagtttcttgaattcatagcctatgatgacaaggacaatgaaaaggaatcagttgacgagc

SEQ ID NO: 212285 - DNA, 574 bp, Glycine max
  unsure (1)..(574): unsure at all n locations
tgtgtttgtcacgagacccatagtgctgccaaattatagtaactctctttctctatctgaagaagaagaagttctgaagaagcatgtgtggaggtgctatcatctcagacttcattggtgtgaagcgtggccgcaacctcgccgcgcaggaactgtggtccgagcttgaccctttctctgacctccttggcttcgataccaccaccaccaccaccaaccaaccaccccttccagacaaaaaagtggtgtcatcatgtgagaagaagaagaagaaaagtgtgagtgcagaaaagaagagtggtgggcgagctcggaagaacgtgtacagaggaatcaggcaaaggccgtggggcaagtgggccgcggaaataagggacccacataagggcgtccgcgtctggctcggcaccttccccaccgccgaggaagccgcccgagcctacgacgacgccgccaagcgcattcgcggcgacaaggccaagctcaacttcccggccaccgntccgccacccttcaaaaaacaacgctgcctcagccctgacaccaccaccgaacaaagcagcagctcacaatc

SEQ ID NO: 212286 - DNA, 600 bp, Glycine max
ctcgagccgtttgaaaagaagtgcacaaccttagagcttgagcttatgaatgctcaaaaaggccgggatgaaaccatggagaaactgagagagtctgaacagaagtgctctcaacttgagcaaaatgtgaaacggcttgaggaaaagctattgagtttagaggatgaaaatcatgttcttcgtcagaaagccttaagtacccctcttcttaagagtaaccgtccaagttttgccaagtcaatatcagaaaaatactcaagtgcaatcgcctcccgtactgaacgaaagaccatatttgagtcacccacacccacaaaacttattgccccttttacactaggcttgtcagactctcggcgatctaagttaacagcagagaggcagcagagcggtatatttatgctcaatctggaagaaatgaagagaaatgaaaatatcttcctcatgatagaaaaataggaggataactatgaatttctctctaaatgcataaaagaaaatttgggattcaaaaatggtaaacctattgcagctcgtattatatacaaatgtctacttcattggcattcatttgaatctgagcgcacaaccatttttgat

SEQ ID NO: 212287 - DNA, 514 bp, Glycine max
gtcccattggaagagtcggaagcggaggggaggggagaggaagaaggaacatgtcaggcgttagagatgggcgttgttgttgttggtgtgcccacccatccccaatccaaacactcttctcttagtaccctaatctacttattattatcacaacccttccatcttcttcttcttcaatccatgccggtcaacgccagctggtgctgagggtcaatcgaggtcttcctttctcaatggggagcgggagcagaagctactcggccaaccccgccgactacaagcttctagaagaagtcggttacggcgccagcgccaccgtgtaccgcgcaatctacctcccttacaacgaagaggtcgccgtgaagtgcctggatctggatcgctgcaacagcaatctggacgacataagaagagaagcgcagaccatgagcctaatcgagcacctcaacgtcgtgagggctttctgctccttcgtcgaggagcggagtctgtgggttgtgatgggattcatggc

SEQ ID NO: 212288 - DNA, 591 bp, Glycine max
gtttatccactgatgaaagggaaagggtagttgggtgtgtctttgttgcaatcacagctgctttgcttcctttttttcgcattcacgcaatcaaattcaaattcgctgaaacccttcaacacaaccaatggcttcttctttcagtctctccactccccctctctgtcaccctagggtatgtaaacatttcaaaccgtacaatgggttgcataagttctcattcaatggacatgggtcggattttgccgttgtccgacacaactctaaagtccccaatgctggtggtagaattagagctacattgacctctggaggaggaggagacctaggatcttatctgaagagctctggttttgtgaccaatcatttcagaactggggcacagcttgatgtcatagcatttggaacactgagagcagacacagcagtgccagcaggcagtggtttttctgatgatgaagatgaccatgatttcgatagtccaacggaaggttttgcttccataccggagggccatgaagacattatgaatggaaagatggtagtggttgtagatgatgaggaccaggaaaatgaaagagacttgataat

SEQ ID NO: 212289 - DNA, 438 bp, Glycine max
agaaggtaaatttcttatctgctgatgattttgaaccccctcttatccctcccaagacaatcccagatcctgatgataaaaaacctgaggactgggatgagagagagaaaattccagactcaagtgcagtaaagccagatgactgggatgagaatgcacccttggaaattgttgatgaagaagctgagaaacctgaaggatgggacaatgaacctgaggagatagatgatccagaggcaacaaaaccagaagattgggacgatgaggaggatggtgaatgggaagccccaaagattgagaacccaaaatgtgaagcagcccccggttgtggtgagtggaagaggccaatgaagaggaatccagcttacaaaggaaaatggcatgccccactaattgaaaattctgcttatagggaatttggaagcctcaggacattcc

SEQ ID NO: 212290 - DNA, 537 bp, Glycine max
aagtgttacttcttattgcaccacccacgatgatcatgggaatcggtgataagaagaagaagacgaatacgagggagtgtgaaacgacgtcgtcgttggagttgcagcttaagaagcggaacgaggagttggaggaggagctgagccagagcaaggagagggaggagcacgtgaggcgccaactccgcgccgcactggatcgcctcaccgtggcggaggaagcggaggagcgcctctgcgcccagctcggtgacctcgaagccgaggcgctgcagcaggcgcgtgagtaccacgctcgcatcgtttcgctcgtcgaccagctttctcaagcgcactctctcctcctcaacacccccattccccttcattctcgctcttaaatcaatcttcttctcttttcttctctcatgtgcttgttgcttttacgtctacgacggtacgtcgtgtggtaaatttgatcatgttagggtttttttttttcttcttcacgtggtttcttgggagatatctttgtttgggtatgattgacactaattt

SEQ ID NO: 212291 - DNA, 572 bp, Glycine max
  unsure (1)..(572): unsure at all n locations
cattcttcatcacttcattcaacatttctccccttagcttgtttcaccaatggctgctgcggttagtgctgcagtctcttttccatccaccaagtctacctctcttccaagcaggacctccctcattgccccagagagagttgtgttcaagaaggcttcattgcaaaacagagatgtttctagcagtggacgggtagtttccatcagagctcaagtcaccactgaggcaccagccaaggttgaaaaagagtccaagaaacaggatgaaggtgtggttgtgaacaagtttaaacccaagaccccttacattggtagatgcctgctcaacacaaagatcactggggatgatgctccaggagaaacttggcacatggtcttcagcaccgagggagagattccttacagagaaggacaatcaattggggtaattccagatggtattgacaagaatggcaaacctcataaactgagattgtattctattgctagcagtgccattggttgatttggagattccaaaactgtttctctatgcgtganacggctggtgtacacanatgaaaatggagaaa

SEQ ID NO: 212292 - DNA, 595 bp, Glycine max
  unsure (1)..(595): unsure at all n locations
aagaatttaagtcagaggttagagatgacacccagtgcagatactgaggagtcagaagtattaagtccaaggagaaatcttgaggaggaatatttgacctatgaagccaagattattaccaccttcagtgtagtggataacataaaacagcagttttatgctcaacaggggagaatttccaggaaagatgaagagagagttaaagagctgtttgaagccattgaaaagttacgaactcaatttgagtctatagagagaccaattcttgaaatagagacccctgcaaaggctgaaacaccaccttttgagaaaaagtctgatgctactccttcagtttctgctccaactcaaggtgccgagctttcaaagccagaaacggatgagctgccaaaatcaccttcagttaagacagaccagatattggatcatgaagctgaattagctaaactggaatctgagtttgggaaggttagtcaggattattcaactgaggaaattggtgattgggaatntgatgagcttggaagagaattgagcaagtagttagggtggatcttatttctgagtaattaatgctggctgttgtatttttatg

SEQ ID NO: 212293 - DNA, 543 bp, Glycine max
  unsure (1)..(543): unsure at all n locations
ggttttcatggtaacttgataagttacttgacccaagagctgaacatgccattggtagctgcctcaaacacactgacaaactttggaggaacatctagcttcacccctctcattggggctattatagcagattcctttgctggacgtttttggaccattaccgttgcttctctcatttatgaactgggattgattagcatcactgtatcagctatactgccacaatttcgtcccccaccatgcccaacacaagctaattgccaagaagccacatcctcacaactgtggatactctacatctccctcctcctcacatctgttggatcaggtggcattagaccatgtgttgtgcccttttcagcagaccaaattgacatgaccaaaagtggtgtggcatcaagaaagtggaacatcttcaattggtactttntcagcatgggcttcgcttctcttagtgctttgaccattgtggtttacatccaagacaacatgggctggggttggggccttggaattccatgcattgccatgttgatatccatc

SEQ ID NO: 212294 - DNA, 616 bp, Glycine max
  unsure (1)..(616): unsure at all n locations
agcagtcgttacagagactccataacccgaaaatgcctttcaagaggtacgttgagattggaagggttgctcagatcaactatggcaaagagtatgggaggctcgtggttattgtcgatgtcattgaccagaatagggctcttgttgatgctcctgacatggtgaggtcccaagtgaacttcaagaggctatcactcactgacatcaagatcgatattaagaggatccccaagaagaaggatctcattcaagccatggaggctgctgatgttaagaacagatgggagaagagttcttggggcagaaaactgattgtgcagaagaggagggcatcccttaatgactttgataggttcaagataatgttggccaagatcaagagggcagctgttgttaggcaagagcttgctaagctgaagaaaagtgcatcataggcattatatcatgtgcaattttcaaattttgttatgaatttcattcagttagtactttttggttgctatgagnttttatgtatcaatgagggacatcctagaaatgtttatttttaaatcatttgtgttagtgaattatcgccagttctcccaatatcattgttacaatatcaggtgtccgc

SEQ ID NO: 212295 - DNA, 517 bp, Glycine max
gttctattctctgaacaatggcgtctctctctcacctcaacaaactcctctgcatgcccccgctcaactcttcaccctctatttcgccaccacgcagcagcgtcggaatttggaccaaacctgtcggaaggccgaggctactggtgcgtgtccgagcggtcacgagcgacgacgagtgggggccggagaaggaggaggcgtacggcggcggcgtagcggtggaggagaaaccgacgaagtcggagacggagacggagaagctgaagaaggccttggtggattcgttttatggcaccgatcgtggactgaaagcaacgagcgaaacgagagcggagatcgttgaactcatcacacagctcgaggccaagaaccctaaccctgttcccaccgacgccttgactcttctcaacggaaaatggattctcgcgtatacatcctttgcaggtttattcccattgttgtcaagtggaacactaccattggtcaaggtagaggaaatatcccagattattgactc

SEQ ID NO: 212296 - DNA, 516 bp, Glycine max
aaaaaaaaaaaagaatctatataaatataaaaataatatatataaggtacaaatagtaaatcgaggtacccattttatgataaactttccttccatttttgttcctctagtaggcctagtatttccggcaattgcaatggcttctttatttctttatgttcaaaaaaacaagattttttagatacagaaaacaaagtaaaactctggggttttctattccccaattataatactaaattcaaaaaaaggagagtaatgagtataatctttcgctcagacgatgtactgatatattctatggcggaggttcgaagaacaagcaatttattttgtgccgatttcactttgataggttcattggggttattgatcgttgcaatttccagacatcttggtatggattcgttctttatttctgagaaaattagtgattcttcttttattccggactttatttattttccatttattccacaaggggccacgatggctttttatcgaatcgcgggtctcttt

SEQ ID NO: 212297 - DNA, 519 bp, Glycine max
actggaagttcaacacttttgatgcccacaagtttcctatattctctaaccagttgttcacggccagtggacataaatatgacaccaccaagatcttaaccccagagtatgaccttaatgttgatgcatacaacaaatacagcaagttatacctcagccctctgtttgcattatctattggatcaggttttgcaagatttacggcaaccctcactcatgtagcactgttttatggaagagacatttggagacagagtagatcggcaatgagtaacgcgaaattggatatccatggtagactgatgaaagcttataagcaagtacctgaatggtggttcctcagtatattgtttgggagcatggcgctatccctgctaatggcttttgtgtggaaaatggatgtgcaactgccatggtggggtatgctctttgcttttggattggcttttattgtcacccttcctattggtgtgattcaagcaactaccaaccagcaacctggatatgacattatagcac

SEQ ID NO: 212298 - DNA, 554 bp, Glycine max
  unsure (1)..(554): unsure at all n locations
aagaatttaagtcagaggttagagatgacacccagtgcagatactgaggagtcagaagtattaagtccaaggagaaatcttgaggaggaatatttgacctatgaagccaagattattaccaccttcagtgtagtggataacataaaacagcagttttatgctcaacaggggagaatttccaggaaagatgaagagagagttaaagagctgtttgaagccattgaaaagttacgaactcaatttgagtctatagagagaccaattcttgaaatagagacccctgcaaaggctgaaacaccaccttttgagaaaaagtctgatgctactccttcagtttctgctccaactcaaggtgccgagctttcaaagccagaaacggatgagctgccaaaatcaccttcagttaagacagaccagatattggatcatgaagctgaattagctaaactggaatctgagtttgggaaggttagtcaggattattcaactgaggaaattggtgattgggaatttgatgagcttgaaagagaatngagcangtagttaggttgaat

SEQ ID NO: 212299 - DNA, 613 bp, Glycine max
ccggggcacactcttcctcattgcagtcagagtggaatggttagctggggagaagacaaaagtagtgggcacattcccacctcgtcgtaagccgggttggactggctatgttgagaaggacactgctgggcagacaaacatatattcagttgagccagcagtttatgtggcagaaagtgctataagttcaggaactgctggctcttcttctgatggagctgagaacacagcagcaattgttgcaggccttgctctgatatcgattgcagcagcatcgtcgatactgctacaagttggtaagaatgctcctcctcagatccagacggctcaatactctggaccatcacttagttactacatcaacaaattcacgccgccggaaattactcaagtgtctgtgccaagtgaggctgaactatcctcatctgttcaacctgaaagcccaccttcggaagtttcccaggttcaggttgaagctcaagcttctgagacctctagtgtgaacattgaatcgtaggtgtatcaagtggttaccacttttgctaccaaaacatacccaagaagtttattttgtgtatacacaactaaagggtatggatgcaatgttgacatc

SEQ ID NO: 212300 - DNA, 588 bp, Glycine max
  unsure (1)..(588): unsure at all n locations
gcttgtttacttgtcaggcggagcgggaattgcagccctggattgccaaggatgatgattcaggtcagaagatgtggagaatcaatcagcggattgtaaaattgattgtggaacttatgaggaatcatgagactgcagaatcattggtaattgtggcaagttcatcagatttactactgcgagccacagatgggatgctggttgatggagaagcttgcactttaccacagctggagctattggaagcaacagctagagcagttcagccagtgctcgagtttggagaatctggattggctgtggcagatggcctttcaaaccttttaaagtgtcgcctctcagctacaattagatgtctttctcatccaagtgcacatgtccgagctctgagtatatcaggtcttcgtgacattttgcatactggttcaatcagatgtagtcctaaacctcggagattaaatggcacccacaacccttcttatcaatacttcaatttggatgccgttgactggcaagctgacatagaaaaatgcttgacttgngaagctcacagccgactttaaacggatgtctattaacttctgatat

SEQ ID NO: 212301 - DNA, 566 bp, Glycine max
  unsure (1)..(566): unsure at all n locations
gcttgtttacttgtcaggcggagcgggaattgcagccctggattgccaaggatgatgattcaggtcagaagatgtggagaatcaatcagcggattgtaaaattgattgtggaacttatgaggaatcatgagactgcagaatcattggtaattgtggcaagttcatcagatttactactgcgagccacagatgggatgctggttgatggagaagcttgcactttaccacagctggagctattggaagcaacagctagagcagttcagccagtgctcgagtttggagaatctggattggctgtggcagatggcctttcaaaccttttaaagtgtcgcctctcagctacaattagatgtctttctcatccaagtgcacatgtccgagctctgagtatatcagttcttcgtgacattttgcatactggttcaatcagatgtagtcctaaacctcggagattaaatggcacccacaacccttcttatcaatacttcaatttggatgccgttgactggcaagctgacatagaaaaatgcttgacttgngaagctcacagccgactttcaaac

SEQ ID NO: 212302 - DNA, 272 bp, Glycine max
gcaaagcaaacttggcaagtaaatatttctgttcgtgaaggttgttgtactaatccaagtgctagaagtagtgatggaacttgcgtgtaacattcttagcattctcaatgtcttaggtgcaaagagaagatgctaagtttgagatgatcttactatatttttcatattggaccgtcttcctctataattttgagttacagtgtccacttaaattgaatttggtgccttttcctttgaaaaaaaaaaaaagcaaaaaacacaatagtgaagag

SEQ ID NO: 212303 - DNA, 627 bp, Glycine max
ggaaaatgtggatgtaggagatttcgggacgaaaggcctcaaaacgcttcgtcgtttgtggttactgagtcctgagtgatcttgtcatccgacctttgccatgacaggtgcgcttgcttggcaggtcaaaatatgttaataaaaaaagttttattggtttagggagagatcgcacgggagttgcccggggtctctctctcgtgtggtgtgtggtgtttgctgtgctctccttttcgttatgccttttattattacctatctgtcgctccactccgtattacgactctggatcagagggatacatcagaggattcgctccaactcctatcgaataaggtattatctgtcaatttacattggaaagggttaggatattcaattttacataattaaagataaaatcaacgatagctatagttttaaaattaaccatcgatttagttgcaactggaacacaggtttctttcaatgaaataatattaatatcaatttaataagctggtaatgtaaaatactgctaatgttaatatgaagtttggatggtcttattggcagaagatgctaggtggtgttcatcaatattcttgaaggtaaaacgattttgttttaatgatatataccatgaat

SEQ ID NO: 212304 - DNA, 617 bp, Glycine max
  unsure (1)..(617): unsure at all n locations
acttcttcttggaatgtcccttccttaatacccctcaaagaaaagccaccttaacatctcttctctgaaaattctctttagagagatagagagaggaagaaagaatggcagcttgcactgtctactcaacacaatctctgagcacaaattgctccatctcaaccccatcaaagacgcaactcagttttttccaccaaaagcaggtagttttctggaggaacagcaagaagggcagctgccgcagcagaagaagctatgtgataacatgtgcagcaggtgactcacagacagtggtgattggcctggctgcagactcagggtgtgggaagagcaccttcatgaggaggctgaccagtgtgtttggaggagcagcagagccaccaaagggtggcaaccctgactccaacactctcatcagtgacaccaccactgtcatatgcttggatgattaccactctttggacagaactggaagaaaggagaagggtgtcactgcccttgaccctagagccaatgantttgatctcatgtatgaacaagttaaagctcttaaagatggaattgctgttgaaaaccaatctacaaccatgtcactggtctcttggatccccctgagc

SEQ ID NO: 212305 - DNA, 592 bp, Glycine max
ctaggggagtgatgctgggtcctgaccagcccgtgatcctccacatgcttgacattcctccagcagcagagtcgttgaatggggttaaaatggaattggtggatgctgcattccctcttcttaaaggtgttgttgctacaaccgatgtggttgaggcatgcactggggtcaatattgcagtgatggttggtggattccctagaaaagaaggtatggagaggaaggatgtgatgactaagaacgtctccatttacaagtcccaggcttctgcccttgaaaagcatgctgctgccaactgcaaggttcttgttgttgctaacccagcaaacaccaatgcattgatcttgaaagaatttgctccatctattcccgagaaaaacatttcttgtttgactagattggaccacaatagggcactgggccaaatttctgagagactgaacattcaggtttctgatgtaaagaatgtcattatctggggcaatcactcatcaacccaatatcctgatgttaaccatgcaactgttgtggagaagcccgtccgcgagcttatagctgatgatgcctggttgaatggtgaattcatactact

SEQ ID NO: 212306 - DNA, 561 bp, Glycine max
gagaagaacttcatgaccctgcccaacatcaaggttcctctcattcttggtatctggggaggcaagggacaaggaaaatctttccaatgtgagcttgtctttgccaagatgggaatcaaccccatcatgatgagtgctggagagttggaaagtggaaatgcaggagagccagcaaaactgatcaggcagagataccgtgaagccgcagacttgatcaagaagggaaagatgtgtgctctcttcatcaacgatcttgatgcaggagctggtcgtcttggtggaaccacccaatacactgtcaacaaccagatggtgaatgccaccctcatgaacattgctgataaccccaccaatgtgcagcttcctggtatgtataacaaggaagagaatccccgtgtgcccatcatcgtcaccggtaacgatttctccacactctatgcgcctctcatccgtgatgggcgtatggagaagttctactgggcaccaacaagggatgaccgcattggtgtctgcactggaatttttcgcaccgattcaattcctgaaccaggacgtgtcaag

SEQ ID NO: 212307 - DNA, 573 bp, Glycine max
aaagattttatccaattgaaattttaaaaatgactgggataaacttaagaattcaattattgaaattgaataagtaaacaatttaattggattggtcgaatggtatcaaaaaaatggagtactaactcccatttcttatttattattgaattaaccgatcaacttgctttgttatcgaacatttctttttgatttcaaaaattttccggaaaaaatttgaatctatttttatatgcgaatcaatcctactacttctggtcctgaggtttctgcgcttgaaaaaaaaaatctgggacgtatcgcccaaataattggtccggtactagatgtagcttttcccccaggtaagatgcctaatatttacaacgctctgatagttaagggtcgagatactgttggtcaacaaattaatgtgacttgtgaagtacagcaattattaggaaataatcgaattagagctgtagctatgagtgcgacagaaggtctaatgagaggaatggaagtgattgacacaggagctgccctaagtgttccagtaggtggagcaactctaggacgaattttcaacgtgct

SEQ ID NO: 212308 - DNA, 565 bp, Glycine max
  unsure (1)..(565): unsure at all n locations
cgtgaagccgcagacttgatcaagaagggaaagatgtgtgctctcttcatcaacgatcttgatgcaggagctggtcgtcttggtggaaccacccaatacactgtcaacaaccagatggtgaatgccaccctcatgaacattgctgataaccccaccaatgtgcagcttcctggtatgtataacaaggaagagaatccccgtgtgcccatcatcgtcaccggtaacgatttctccacactctatgcgcctctcatccgtgatgggcgtatggagaagttctactgggcaccaacaagggatgaccgcattggtgtctgcactggaatttttcgcaccgattcaattcctgaacaggacgttgtcaagattgttgacaccttccctggccaatccattgatttctttggtgcactgagggccagagtatatgatgacgaagtgaggaagtggatttctggtgttggtgttgacggcattgggaagaagcttgtgaactaaaagatggacctccaacctttgagcagnccaagatgactctggagaagctcttgacgtatggtaacat

SEQ ID NO: 212309 - DNA, 544 bp, Glycine max
cagatggcggaagtatggtcagaaggcagttaaaaatagtcctttccctaggagctactaccggtgcacaaacagcaaatgcacggtgaagaagagggttgaacggtcttccgaggacccaacaattgtgattaccacatatgaagggcaacactgtcatcacacagttggatttcctcgagggggaatcattagtcatgaagctgcatttgcgggccagttggctccaacaatgtcacagttttattatccgattcaattacccagcagagagaatgatgataataataataatactttgagcactatttctcagccatgccaagcacaggatgaaactggagaaggatcaagtgttatgatgccagctgatggatcgtcaccgtcacagcctcccacggatgaagggttgcttggagatattgttcccccgggaatgcgcatcagatgagagaattatttgatgctgatgatcatgtggaagtggagcagcgaaaatgcatgggcatgcatgcatctttgttttctgcatactctgagcgag

SEQ ID NO: 212310 - DNA, 505 bp, Glycine max
gcgcagttagttgacggcgaaaacccgcaccaatacactcacagcgaggatgtgctactgtgtgtgttgcctatgtttcatatctatgcgctcaattccattttgctctgcgggattcgttccggtgcggccgtgcttattttgcagaagtttgagatcactactctgttggagctcatcgagaagtacaaggtgacggttgcgtcgtttgtgccgcccatcgttttggcgttggttaagagcggagagactcatcgctacgacctgtcgtctattcgcgctgtggtcaccggcgcggcacccttaggaggggaacttcaagaagccgttaaggctaggctaccacacgctacttttggacagggatatgggatgacagaagcaggaccacttgccattagcatggcatttgcaaaagtaccctctaagattaaaccaggtgcatgcggaaccgttgtgagaaacgccgagatgaaaatcgtggatacagaaacgggtgattcac

SEQ ID NO: 212311 - DNA, 657 bp, Glycine max
  unsure (1)..(657): unsure at all n locations
ccttctccaaaaccatccaactctcatgttcgaagaaaacatacacaatctcttcaaactctaattttcttttcctttcatttaatttcctcaatggcggcttccgtcgaccagcgtccgtaccccggcctccacaatggcgtcgttcggcccctcaaaccaggcccggatatcccgcgtcccaagaagctaccccagccgccgccgccactctcggattcctcaagcgacgaagaagaagacaccaccttgaacttgaaggacctgattcgcaagggaacaacggaagttgaatcctccattttcgacccgcgcgacgatggaacctctgaccactggatccaacggaactcttcccttgtccgtttaacgggaaagcacccgtttaactcggagccacccctccctcgcctcatgcaccacggcttcatcaccccggtccccctccactacgtccgcaaccacgggccagtcccccgggcccgctgggaggactggaccgtggaagtcacgggcctggtcaccaggcccacatgcttcaccatggagcaactnctccacgatttccccagtcgcgagttcccagccacactcgtctgcgctgggaaccgccggaggaacagaacatggtgaaacagagcatcggcttcaactggg

SEQ ID NO: 212312 - DNA, 575 bp, Glycine max
aaacaatttaattggattggtcgaatggtatcaaaaaatggagtactaactcccatttcttatttattattgaattaaccgatcaacttgctttgttatcgaacatttctttttgatttcaaaaattttccggaaaaaatttgaatctatttttatatgcgaatcaatcctactacttctggtcctgaggtttctgcgcttgaaaaaaaaaaatctgggacgtatcgcccaaataattggtccggtactagatgtagcttttcccccaggtaagatgcctaatatttacaacgctctgatagttaagggtcgagatactgttggtcaacaaattaatgtgacttgtgaagtacagcaattattaggaaataatcgaattagagctgtagctatgagtgcgacagaaggtctaatgagaggaatggaagtgattgacacaggagctgccctaagtgttccagtaggtggagcaactctaggacgaatttcaacgtgcttgggagcccatgataattaggtcctgagatactcgcacacatcttcattcatagactgcgcctgcttatacattagat

SEQ ID NO: 212313 - DNA, 197 bp, Glycine max
gttgtgctgatccaagtgctagaagttgtgatgggacttgcgtgtaacattcttagaattctcaatgtcttaggtgcaaagagaagatgccaagtttgagatgattttactatatttttcatattggactgtcttcctctataattttgagttaaagtgtccacttaaattgaatttggtgccttttccttttgtcc

SEQ ID NO: 212314 - DNA, 601 bp, Glycine max
attggttctaatagaagttgcaactttccactgaatgatcaaactataagtggaaattgatgcaagatcaaacatacgcagggtgacggaagtgctgtagctgtgctagaaagtatgggtagcaaaggatctgttctagtaaatgggacacatgtcaagaagaataccagctgtgtacttaactcgggtgatgaagtggtttttggtgtgcttggaaatcattcttatattttccagcaactaaatactgaggttgcagttaggggtgcagaagttcaaagtggtattgggaaatttctgccgcttgaaaggagaagcggagacccttcagctgtggatggggcctctattttggcttctctttccaacagacaggaccttacaagatggaaatctccatctcagacctccagtaaacctcaccagggcaccgatgtctctagtcgttctgttcatcatgattgtacagaaactgagcttgatggctcagaatcaactccaaatgtgcggagtgataaagcagcagaggttcgaacaagtgacaagaattcaacaatggatgcaatccagatgctggtgcagaggcaagcaatgtaaaaat

SEQ ID NO: 212315 - DNA, 610 bp, Glycine max
aatcagtgtttcttggaggcttcacgttttggcagtacagaacttgtgcgcatactattgcagattgctcaaagaaacagcttggatgttgatgttgacttggcgttgggttttgcctcccattatggcaagataggaactatggagtgcttggtggaagagggaaatgccatagcctttttgggccctttgatgagagctgctgagaggggttgcatgcaagttgttgagtggtttgtgcagaggggttgccgagacatggaactatgccttgcccttacagctgccacttctagctgccaagttcacattgcagcttatcttctgccgcacgtacctcagcaggtccttgcagcacttagtgttgaaattcttaaggccgctggtgagcgcagcggtggatctcttgatggtgtagcatttcttctccaatctgacttcttaggtgatcctgcagctacttatgctgttgcagatattattgctaaatcagaggatgaggctgttgcgcctgagttgaagacttttcttaaggagcattggtcagaaggagcttacaaggagggattaaggttagggcaagagcattacatgaaccttgtgagaatca

SEQ ID NO: 212316 - DNA, 591 bp, Glycine max
atccagcagcacctacatcccaagagatgagaactttggtcacttgaagtcatcagatttccttacatatggaataaaatccatagctcaaaccgttttacctacatttcaatctgcatttggtttaaatgccgagtttgataggtttgacgacgtgcgtggactctttgaaggtggaattcatctccctacagatgcactcagtaaaattagccccctaccagtgctcaaggaaatcttccgcactgatggtgaacaagtcctcaagtttccaccacctcatgtcatcaaagttagtaagtctgcatggatgactgatgaagaatttggaagagagatgcttgctggtgttaatccatgcctaattgagtgccttcaagtgttccctccaaagagcaagctagatcccacagtgtatggtgatcaaactagtacaataaccaaagaacacttagagatcaaccttggtggactctctgtggaacaggcactgagtggtaacagattgttcatattagatcaccatgatgcattcatcgcatatctgaggaagatcaatgaccttcccactgcatagtcttatgccacaag

SEQ ID NO: 212317 - DNA, 572 bp, Glycine max
agcaaaagcaagaagaactagtctaagcagaaatggcctcttcagtgatggcatctgtggccctcaaacctgcccctttcactgttgagaagtcctcagttagaggccttccctccctctcaaggaactcctcttcattcagagttgtggccagtggtggcaagaagatcaagactgacaagccttatggaattaatggtggcatggctttgagggaaggagttgatgcatctggcaggaaaggaaagggaaagggcgtttaccagtttgtagacaaatacggtgctaatgtcgatggttacagtcctatctacgacaccaaggactggtctccaaccggtgatgtctacgctggcggtacgactggcttggctatctgggctgtgactctacttggtcttcttgctggtggtgcacttcttgtctacaacacaagtgctttggcgcaataaactttgcaaatcgatgttttaagctcaaacttagtccatgtaactatctaaaaatgaagaattattcatgaagtactttgtggatacgtgttccttctgttctatagatgtgtggatgtg

SEQ ID NO: 212318 - DNA, 557 bp, Glycine max
  unsure (1)..(557): unsure at all n locations
ggacgaatacgccaaacaaacacttgactcagccacccaattcatatggggggtcttccagcaaaacgctcctgctgatagaaaagatatacaaaaaataaacttatttgtggaggacagggttgtgccaaatggtgttgttgcatatacaagcaaggatgagattcatgttattgcaaaatatgttaatgactatggtggggatgtgaagacagagatcacaggggtgctgtatcatgaaatggtccacgtttggcagtggaatgggaatggtcaggctccaagtggattaattgaaggtattgcagactatgttaggctgaaggcaaactatgcacctagccactggaagaaagcaggggagggacagaaatgggaccagggttatgatgttactgctcgttttctggactattgtaatactctcaaaagtgggtttgtggcacaattgaacaagcagatgaggactggttatagtgatcaattctttgtcagttactgggcaagacagttgatcagctttggcaagactacanggctaagtattgcaatatacc

SEQ ID NO: 212319 - DNA, 513 bp, Glycine max
ggaagggtatcctagtgatgaggaccgagatgccatcttccaagcctacattaaggcattgaaggaagatccagaacaatacagaatagacgcacgaaagttggaagagtgggctcgagttcaaaagccaacttcccttgttgagttttcatccaaagaaggagaagttgagggaattttaaaggacattgcagaaagagctggaggaaaaggagaattcagttatagtcgtttttttgcagttggactgtttcgtcttctggagttggcaaatgccacggaaccaacgattttggacaagctttgtgtggctttgaacatcaacaaaagaagtgttgatcgggacttggatgtgtatcgcatcctgctttcaaagttggttcaagcaaaagagctgctgaaggagtatattgacagggagaaaaagaaaagggatgaaagggctgaaccacaaaaggctaatgaggccatcacaacatgtttgggacaacaattgcctggtctgtagttatg

SEQ ID NO: 212320 - DNA, 546 bp, Glycine max
cttgaggccttcaatttcacccttcacacgtggtggtggtgttgttcttcttctcttcccctttctttttcttcttctgagcttgtttaagctctttctatttgattccattaacatatattatcacaatgtgtggtattcttgctgttcttggttgttctgatgactctcgagccaaaagggtccgcgtgcttgagctctctcgcagattgaagcaccgtggccctgactggagtgggctccatcaacatggtgactgctttttagcacatcaacggttagccatagttgatcctgcttctggggatcaacctctctttaacgaggacaaatccgtcattgtcacggtgaatggagagatttacaaccatgaagagctcaggaaacagctgcctaatcacaagttccgtactggatgtgattgtgatgttattgcacacctgtacgaggaacatggagaagactttgtggacatgctggatggtatcttctcatttgttctactggacacccgtgacaacagttttatagtggctcgggatgcta

SEQ ID NO: 212321 - DNA, 612 bp, Glycine max
ctcttcctcttctgtccctcaatggaaggatcaggatccggtgtggttacagtctacggcaacggcgccatcaccgagaccaagaagtcccccttctccgtcaaagtcggcctagcccagatgctccgcggcggcgtcatcatggacgtcgtcgacgccgagcaggcccgcatcgcggaggaggccggtgcctgcgcggagatggccctggagcgtgtccccgccgacatccgggcccagggcggcgtggcccgcatgagcgatccgcagctcatcaaggatatcaagcgggccgtcaccatccccgtgatggccaaggcccgcatcggccacttcgtcgaagcccagatcctcgaagccatcggcatcgactacgtcgacgagagcgaggtcctcaccctcgccgacgacgccaaccacatcaacaaacacaacttccgcatcctcttcgtctgtggctgccgcaacctcggcgaggccctccgccgcatccgcgagggcgccgccatgatccgcaccaagggcgaggcctgcaccggcaacatcatcgaggcccgtcgccacgtccgctacgtcatgagcgacattagggttctcccgcacatggacgac

SEQ ID NO: 212322 - DNA, 462 bp, Glycine max
accatacgttgagccagttgtgcaagctcaaagtgctgaagtttactttgacttcttccctgtggaggttgatagtcaagagggagttgctcacattggtgaattgaaatctggtgtctatgttccactgcctacaaaaactaattcggtggaaactcccaaggaatggcaactggatctaccttgtgacaaaattcctagtgtcttgactacaactgatgagagattggtaggcacagaacatgagggatatgatccttttcttggtggaattcaaaaatatgccactcccatgatgcccctagatgaagaaattctttctaaagttgcacaagatatggttgaagaatggtttgattgtgttgatgaagaggattcctttgaagaagtttctttaagtgcaacacttactggtgttgagggtttggactatatggaaagaattcctcttgccacatttga

SEQ ID NO: 212323 - DNA, 480 bp, Glycine max
gtgtgtgttgcagtaagtacccaaatcaatgttcacactcacttctccttcttccagggccttacccatggattctcttcccaaattgcgccacccttctccatttcccactcccttatcctcttccctctccttccgctctttaccgccaccccattttccttcgtcgtcgtttaggttaccctccatcagagcctcctcctcaccctcccaaaacgaccccgcttttcgcaccccgaaagacacgccctccctcccccccctcctccaaaccctaacctccttgctctcccccctcctcgaaaccacctgcatcgtcatcgccgccgccgccttcttcttcatgcgcttacaccacacgcccgccgtcatcgtcgctccgctcactttccccgccgcggaaaccgacaccgccttcacccaggaggaagccgagaggcttctcgaagagccgttgagcaccaaccctcgcgataccga

SEQ ID NO: 212324 - DNA, 522 bp, Glycine max
gtgtgtgttgcagtaagtacccaaatcaatgttcacactcacttctccttcttccagggccttacccatggattctcttcccaaattgcgccacccttctccatttcccactcccttatcctcttccctctccttccgctctttaccgccaccccattttccttcgtcgtcgtttaggttaccctccatcagagcctcctcctcaccctcccaaaacgaccccgcttttcgcaccccgaagaacacgccctccctcccccccctcctccaaaccctaacctccttcctctcccccctcctcgaaaccacctgcatcgtcatcgccgccgccgccttcttcttcatgcgcttacaccacacgcccgccgtcatcgccgctccgctcacttcccccgccgcggaaaccgacaccgccttcacccaagaaggaagccgagaggcttctcgaagagcgtctgagcaccaaccctcgcgataccgaggcgctccacgcgctcatggaggtcaaaatcaaagcgcgta

SEQ ID NO: 212325 - DNA, 528 bp, Glycine max
  unsure (1)..(528): unsure at all n locations
acttgatcagccattaacaagtaatccaaatgtgggtggatttggtcagggggatgcggaaatagtacttcaagatccgttacgtgtccaaggtctcttgttcttcttcgcatctattattttagcacaaatctttttagttcttaagaagaaacaatttgagaaggttcaattgtccgaaatgaatttctagtcccgcatatttatcaacatattaaactcataaaaataactcaatttttttgttgataatttatgtaattctattcagtataatatcagtataatagaataaaaaaattatgaaaagatctttggttctgtatagtctttttatactatatttaaagagttacttgtaacgtaatacaaataaactcgagtatggatattgtcaggaagactatttgactttgttttttcaaccccccaataaattcgaatattatggttatgacactgtttttttcagatctcatttttctataatagagagttctattatagaaanttcgattgtaaaataca

SEQ ID NO: 212326 - DNA, 590 bp, Glycine max
  unsure (1)..(590): unsure at all n locations
ccttaagcctagcatggttacacctggagccgagtccaaggacaaggccagtcctcagacagttgctgattacaccctcaagctccttcacaggagaattccccctgctgtccctggaattatgtttttgtctggtggacagtctgaggttgaagctaccctcaatttgaatgccatgaaccaatctccaaacccgtggcacgtgtcattctcgtatgccagagccctccaaaacactgccttgaagacatggggaggccgcccagagaacgtgaaggcagcacaagatgcactcgcattccgtgccaagtccaactcactcgctcagcttgggaagtacactggtgagggtgaatccgaggaagccaagaaggagttgttcgtcaaaagctactcctactaagatgtttgcagtgaatatgatacttgttaggcagcaacaccagcagttacagtaggtgttgacggacgatgaagtggaagactaatttgtctaaatgtaatgtttttatagtcttggagactatttttggttatggttaaatgcacctttacagcttaataaaccttttgctatgangtgtgtactt

SEQ ID NO: 212327 - DNA, 428 bp, Glycine max
ataaccactattaccatgtacacgggtcgtaaactaaacttcacattaacacgagctcgtacatgcactgatcacttgacaccactgtctcgagattttggtgttcaccttattcaagttaatggcaggctcttatgccttcgacctgggatgattatactctttgctatggacactgctgattatcaagggaaagtgctagaactactataggattcagatcctgctgataggcaagatgtaccatattgcctgatagacctgagagagaagaggtgaatggctgaactggaccttgaatctctgcaagaactgtaagcattctattatgacggaatggctatgatgtcaaacgtagagtacgatgatttgaatgaataactcatgaagaaaggaagcagcgctgtgatgctatgcactgatgagca

SEQ ID NO: 212328 - DNA, 592 bp, Glycine max
aaattcccttcccatggtctctctctcttcaattaattccatttagctttccccaaatcccaaaccctttttcgcttagatcccaatccaattgggttatggacatggcttccagtccccgcaccgtagaagagatcttcaaggattacagcgccagaagaacctctgttattcgcgctctcactcacgacgttgatgaattttacggcctctgtgatccagataaggataacctgtgcctctatggacatccaaatgaggcctgggaagtaactctgccagcggaggaagttccgccagagctcccggagccggctcttggaatcaattttgctagggatggcatgaaccgcagggactggctttctctggttgctgtccacagtgattcatggttggtttctgtggccttttaccttggggctcgtcttaaccgcaatgaaaggaaacgattatttagcttgatcaatgatcttccatcttgttttgaaagtgtgactgacagggaaccagttaaggacaagccaactgcggatagtggaagcaagtctaggggaagtgcctagagatctagcgatgggcaagttaaaag

SEQ ID NO: 212329 - DNA, 515 bp, Glycine max
ctcttcctcttctgtccctcaatggaaggatcaggatccggtgtggttacagtctacggcaacggcgccatcaccgagaccaagaagtcccccttctccgtcaaagtcggcctagcccagatgctccgcggcggcgtcatcatggacgtcgtcgacgccgagcaggcccgcatcgcggaggaggccggtgcctgcgcggtgatggccctggagcgtgtccccgccgacatccgggcccagggcggcgtggcccgcatgagcgatccgcagctcatcaaggatatcaagcgggccgtcaccatccccgtgatggccaaggcccgcatcggccacttcgtcgaagcccagatcctcgaagccatcggcatcgactacgtcgacgagagcgaggtcctcaccctcgccgacgacgccaaccacatcaacaaacacaacttccgcatcctcttcgtctgtggctgccgcaacctcggcgaggccctccgccgcatccgcgagggcgccgccatgatccg

SEQ ID NO: 212330 - DNA, 522 bp, Glycine max
  unsure (1)..(522): unsure at all n locations
gttctgatcttctctcatagcaatcaaatcacactcccatcttctcatctcgtaaaccctaaaccccgttttcagtgacatcgagatcgatcgaacatggatgaggagtacgatgtgatcgtgttgggcacgggtctcaaggagtgcattctcagcggtcttctctccgtcgatggcctcaaggttctgcacatggacaggaatgactattacggaggagaatccacttcgctcaatcttattcagctttggaagagattcaggggagatgacaagcctcctccacatttgggagctagcagggactataacatcgatatgaaccctaagtttattatggctaatggcaatttggtgcgggttctcatacatactgatgttactaagtatctctctttcaaagctgtggatgggagctntgtgtttaataaaggaaaggttcataaggtgcccgcaaatgacatggaggccttgaagtctccacttatggngctatttgaaaaacgccgagcacgcaagttt

SEQ ID NO: 212331 - DNA, 557 bp, Glycine max
tgggtccgtttcgtaaacccttccttgcatttctctcggttgttctatttctgggtctctatgaggcagcagcagaacagactcagactcacaagagtacttacattgtacacgtggcgaaatcggagatgcccgagagcttcgagcaccacgctgtgtggtatgagtcgtcactgaagaccgtgtctgactcggcggagatgatttacacctacgacaacgccatccacggctacgcgacgagattaaccgctgaggaagcgcgtttgctccagcgccaaacggggattctggctgttttgccggagacgaggtacgagcttttcacgacgcgaacgcctttgtttctcggacttgacaagagcgccgacttgttccccgagtcgagttcgggaagtgacgtcatcgtcggagtcctcgacaccggcgtctggccggagagcatgagcttcgacgacaccggactcggacccgttccgagcacgtggaaaggcgcgtgcgagacgggaacgaatttcaccgcgtcgaactgcaacagaaagttgatcggagcaaga

SEQ ID NO: 212332 - DNA, 556 bp, Glycine max
  unsure (1)..(556): unsure at all n locations
cttcgccgtcgacaacacctacctcctcttttccgcctacctcgttttttctatgcagctcggcttcgccatgctctgcgccggctccgtccgcgccaagaacaccatgaacatcatgctcaccaacgtcctggacgctgccgccggcggcctcttctactacctcttcggcttcgccttcgctttcggcgcacgtgattcagattctggtgattgctgggtgggttagtgcgaccatgggacccttgttttgggggttgaataaactgaagctgttgaggatttcttcagaggatgagcttgcggggatggacatgactcgccatggaggctttgcttatgcttatgaggatgatgagacgcacaagcatgggatgcagttgaggagggttgggcccaacgcgtcttccacacccaccactgatgaatgatctttttttcccatatgcatgtctcattagtcaaacattaaatttggatacatattccttgtaaggattcaaaccttgggtactngttacttctgttagatccaactncggttgatactcatgac

SEQ ID NO: 212333 - DNA, 518 bp, Glycine max
ataaccaccatcaccatgttcacggctagtaaactagccttcacattaacaccacctcgtccatgcactgcacccttgacaccaatctcttcagcttctggtgttcacctcattcagttcaatggcaggcacttatgcctccgccaaaggctgtttctactttctcctatggccactgcagatcaacaagggaaagttgaagaatttgaagatgattcaaatactgttgatagtaaaattctcccatattgtagcatagacaaaaaagagaagaaatcaattggtgaacttgagcaggaattcctccaagcactgcaagcattctattatgagggaaaggctatcatgtcaaatgaagagtttgataatctcaaggaagaactcatgtgggaaggaagcagcgttgtcatgctaagttctgatgagcaaaaattcctggaagcttcgatggcttatgtgtctggaaaaccaattatgagtgacaaagagtttgatgagttgaaactgaggctaaagat

SEQ ID NO: 212334 - DNA, 604 bp, Glycine max
aggagctcttctccattggttcttcatctgcatgcacacacttgcatagttttggaaaccaagaatttttgaagggtagcatcaacaagaagttctggaaatggagatcaccaatgtcagcgagtatgaagctattgcaaagcagaagttgccaaagatggtgtttgactactacgcatctggtgcagaggaccagtggactctgcaggagaacagaaatgccttttccagaattttgtttcggccacgtattcttattgatgtgagcaagatagacatcacaactactgtcctgggcttcaaaatatccatgccaatcatgcttgccccaacagccatgcagaaaatggctcatcctgagggagaatatgcaacagcaagagctgcatctgctgctggaacaatcatgactttgtcttcatgggctacttcaagtgttgaagaggtagcttcaacaggacctggcattcgctttttccagctatatgtgtacaaggacaggaatgtggttgctcagcttgtgagaagagctgaaagggctggattcaaagccattgcccttacttgtgataccccaagactaggacgcagagaagctgatatc

SEQ ID NO: 212335 - DNA, 594 bp, Glycine max
  unsure (1)..(594): unsure at all n locations
attgaattttgattctagcaagcagagcttttgtcaattttctattgaccttctcggtggaggaattttagtggacaaaactggagattggatcacacttatacaaaattctccaattagtaacttgttgagagttgctgcttggaagaaaggctgtttaatggttaaaattgtgatgtctgggaatgcagcagtcaaaaggagtgattgggcctcattggtacaagtgtttttaacaaacagcaacagtacagagcatttcgatgcatgtaagtggacaaaatcggaaccacattcctgggaattgatcttcccaatagaggtatgtggtcctaataatggttttgaaatgtggagttctgagtgggcaaatcaaacttcatggcacttgagtttccttattgacaatcccaaacagtctacagtttttgatattctcttgngaatttctcaagattntgaaattgctggtaatactcttatgccagctttntctgttccacaggctactgccagatcttctgaaaatgcggaatcctctgcatgatctggaaattgnngtttctttcgtttggtcgntttttaattcaataa

SEQ ID NO: 212336 - DNA, 601 bp, Glycine max
  unsure (1)..(601): unsure at all n locations
ctctcctccatcctcctctccgcccctctccccgccggcgccgacatctcggggctcaccccatgcaaggagtcgaagcagttcgcgaagcgtgagaagcagtcgataaagaagctggagtcgtcgctgaagctctacgaggcgggcagcgcccccgcactggccattaaggcgagcgtggagaagacgaagaggaggttcgacaactacgcgaagcaggggttgctgtgcggcggcgatgggttgccgcacctgatcgtgagcggagaccagaggcactggggtgagttcatcacacccggaatactattcctgtacatctcgggatggatcggctgggtgggtcggagctacctgattgcgatcagggacgagaagaaacccaccatgaaggagatcatcatcgatgttcctctggcttctcgcttgctcttcaggggtttcagctggcccgttgctgcctacagagaactcatcaacggcgacctcattgccaaggatgtctagataagagagggtggatggctacattggaggaaagcctgnagaattgtatgtggatgggatcttacgcgctcttttgtaatacttttttataaat

SEQ ID NO: 212337 - DNA, 535 bp, Glycine max
  unsure (1)..(535): unsure at all n locations
caagcctctactatactgcttcaccttctgctctagaaaattcagtgctgaaacatggcttcggctactctctctgtagccaaaccagcccttcaggcaaatgggaaaggcttctctgaattctctggcctccgaagctcatcaggcttccttcccttttctagaaaatcttcagaggatttccattctgtcattgccttccagacctatgcagttggaagcagtggaggatacaagaagggtgtgacagaagcaaaactgaaggttgccataaacgggtttggaaggattggaaggaacttcttgaggtgctggcacggtcgcaaagactcccctcttgatgtcattgccatcaacgacaccggcggcgtgaaacaagcctctcaccttctcaaatacgattccatcctcggaaccttcgatgctgatgtcaagcctgttggcagcaatgtcatctccgtggatggaaaggaaatcaaagttgtttctgaccgcaaccctgccaaccttncttggaaggaccttgggatagact

SEQ ID NO: 212338 - DNA, 595 bp, Glycine max
tgcaattgaagttgaagtcttgcccttctctcttcaactccaaacacaagacatcatcatccatggctgcctccgtctccactgtcggagctgtcaacagagctcttttgaacctgaatgggtctggacctggggtttcagctcccagttcatccttctttgggagcagcttgaagaaggttattggctcaagggtccccaacacaaagatttcctctggaagcttcaagattgttgctgtagaagagaagaaagagattgaagagacccagcagaccgacaaggacagatggaagggtcttgcctatgatatctcagacgaccaacaggacatcacaagaggaaagggtttggttgactcccttttccaagctccacaggatgctggaactcactatgctgtcatgagctcctacgagtaccttagcactggacttcgccagtacttggacaacaacatggatggattttacattgctccagcttttatggacaaacttgttgttcacattaccaagaacttcatgaccctgcccaacatcaaggttcctctcattctttgtatctggggaggcaaggggacaggaaaatcttt

SEQ ID NO: 212339 - DNA, 615 bp, Glycine max
  unsure (1)..(615): unsure at all n locations
ctgcactctgcacaatgctttccctctccgtccctcctctcaacctcaaacccataacacccaatgacctctttctctcatcagcctctccctcacctcaccgtcgctacttcgtgaaacccatctccgccgtcctcaactcatcttccttcaagaaacctgagcagcctctgctgccgcagcatcaagtctaccagcccttccgccctcccccgtctcccctcccctcgcaattcggcaccctcgacatcgccggccgaatcgacatcctcgccaaccgcctcggcctctggtacgagtacgcgcccttaatcaattccctaatccgcgaaggcttctcccctccgacaatcgaagaaaccaccggcatctccggcgtcgagcagaaccgcctcatcgtcggggcgcaggtccgcgactccctcgtccactccaaggccgaccccgacctcctcgctgccttcgagaccggcggcgccgagctcctctacgagatccgtctcctcagcgcctcgcagcgcgtcgccgccgcgcgccttctcgtcgagaatcgctgcgacgggaaggccgcgcangagctcgcacgttccatgatggatttcccgagccggcgcg

SEQ ID NO: 212340 - DNA, 537 bp, Glycine max
gacagaatcattcattgtcagggatcacagaggagaattgtacaagaagcaccatcctcctagtctgtctgatgaagtttggagattggaaaaaataggcaaggatggagctttccacaagcgcttgagtcgggaaaagatccttactgttagagagtttctcacacttctcaatctggatccagcaaagctgcgcagtatactgggcactggtatgtctgcaaagatgtgggaagtaactgtggagcatgctcgaacttgtgtacttgatacaacgaggcacgtgtacttcccttctaattctcaagaacctggtgtggtcttcaatgctgtgggacaagtgacaggactgctttctgaatgcgagtatgtcacagtagaaaagctgactgaaactgaaaaggctgatgctcaaaactcagttactgctgcattaagacaaggggagaaatacacaacttttgaagatgaagactctctcatggatgggtcttcacacttaactatgtactctactccccaagctcttccaagact

SEQ ID NO: 212341 - DNA, 586 bp, Glycine max
cgagaagagagaagaagaaagggagagagataatgcagtgttatggcttaaccgtaccgggaagcgtgcccaccgtatctccagtgttcttgaggcccaacaggcccattatcgcgacccgaatcgcgtttcccaaggcgaccctgaataagaaccagggcttcgtggtggagctgagcttctacgagcttctgggcatacccgaatcggtttcggtaacggagatcaagaacgcctacaagcaactcgcccgaaagtaccaccctgacgtgtcgccaccgggtcgggtcgaagagtacaccaagaggtttattcaggtgcaggaggcctacgaaaccttatctgatccttcccgaagagctatgtacgataaggacatggccaggggcattaacttggccttcaacgctcgtcgacgctataattatcacgatcaggtggttgaacaaaaaagtgaatggaaagtcaggtggaaatctcaactgtcagagcttgagagaagaagtaacagctaggatgttggagggaatatgtcatgggcagcacgaatgcgccagcagagggatgaattgcaaatgaatcatga

SEQ ID NO: 212342 - DNA, 550 bp, Glycine max
  unsure (1)..(550): unsure at all n locations
aataaatgtcgaggggatctgatggatcacaaaaaaagcgtttagttgctgcgatctgtgttgtggcaatttttcttggttttctgtatgtgtatggcggatccatctttggttctcagaatagtggttcatctgctcttgaatatggcagatcattgaaaagacttggctcgtcatatttgggtgcagaggatgacactgatggcaagcaagatgaatcttcatcaagtttcagacagggagatggggaggataatattgttcctaagagtttccctgtttgtgatgatcgtcattcagagttgattccctgcttagatagacaccttatctatcaaatgaggatgaagctggacctgtctgtgatggagcactatgaaagacattgtcctcctgcggaaaggcggtacaattgcttgattcctcctccatcaggatacaaggttcctattaagtggccacaaagcagagatgaggtgtggaaagcaaatatcccacatactcaccttgcacacgagaagtctgaccagaatnggatgactgtaaaagc

SEQ ID NO: 212343 - DNA, 582 bp, Glycine max
  unsure (1)..(582): unsure at all n locations
ggtctcgattgcaagtgatccacgatacactctacgcttcacaaaaccttcaaacccaattccacagaattcttctgcttcaccatgccaccaaagcctttagactatgggtcaataaatgaaaacgtgaagaagagtcaatatgctgtcagaggtgaattataccttcgagcttctgaacttcagaaagagggcaaaaagattatctttactaatgttggcaacccgcatgcattgggacagaaaccactgagcttccctcgccaggttgttgctttgtgccaagctccattcctacttgatgatcctaatgttggactgctattccctgctgatgcaattgcaagagctaaacactatctttcattgacctcgggtggtttaggtgcttatagtgactcccgtggccttccaggagtgaggaaggaagttgctgagttcatactcaggcgtgatggttatccaactgatccagagctcatatatctcactgatggtgcaagcaaggagtgatgcagatattaaatactatcatcaggggtcaagacgatgggattttggttncagtcccacaatacccac

SEQ ID NO: 212344 - DNA, 568 bp, Glycine max
attttccctccacctcttccttcttcctcacaatggctctgagcttcaacaatcgaagaatccctctcgctcttcgcattttccttctgttctccttattcttcagcctctcaccgaccttcgctcaggattctctcgttcagaacgcgaaggaagattccggcggatctgtggatctcggtcgccgcgccaaaattgcattgaatgacatagagaatgattcgatcctttctcttggcttggactccaccggtcctggactcttcgacgcatttttcgcgagtttttcgatgatccttgtcagtgagattggggatgagacgtttataatagcagctcttatggctatgcgtcaccctaagtcaattgtcttgtctggtgctctcagtgctctgattataatgacagtactttctacagggcttggcaggattgtgccaaatttgatttctaggaagcatacgaatagtgctgctacagttctttatgctttctttgggttaaggttactgtacattgcatggagatcatcagattcaaaatcctcacagaagaaagaaatggaaga

SEQ ID NO: 212345 - DNA, 583 bp, Glycine max
  unsure (1)..(583): unsure at all n locations
aattgattggtttatttcctctcaggaatgtgttcccaggacttattgtgttttaaatccacaaaatccttttgtgttgaataggtggatggggaaactgactttcccccagggcacttcccgaagtgttaagagaatgcctctttctatagggggaggagctggtgcaaagaatgctattctcatgaatatgccaaatgctgttctttcaatgtggagatattttgttggagatctcgtctttgaagtttctaagatgacttctccctacattaaatgtacagtctctttcttcatagcatttggaaatttggctgatgacaccatcaattttgaggcttttccccacaagctggtgcagtttggagagattcaggaaaaagttgtattgaaattttcacaagaggaatttcttacagcttggtcaactcaggtgcgtcctgcaacaactctgttggctgatgggtgtccatatttgtatgctatggtgcatgatagntcagtgtctacaataccaggtgattttgtcattgggtgtaagttgacaaccataaacaatatgtgtgcatatgggctcaatcct

SEQ ID NO: 212346 - DNA, 514 bp, Glycine max
aattgattggtttatttcctctcaggaatgtgttcccaggacttattgtgttttaaatccacaaaatccttttgtgttgaataggtggatggggaaactgactttcccccagggcacttcccgaagtgttaagagaatgcctctttctatagggggaggagctggtgcaaagaatgctattctcatgaatatgccaaatgctgttctttcaatgtggagatattttgttggagatctcgtctttgaagtttctaagatgacttctccctacattaaatgtacagtctctttcttcatagcatttggaaatttggctgatgacaccatcaattttgaggcttttccccacaagctggtgcagtttggagagattcaggaaaaagttgtattgaaattttcacaagaggaatttcttacagcttggtcaactcaggtgcgtcctgcaacaactctgttggctgatgggtgtccatatttgtatgctatggtgcatgatagttcagtgtctacaata

SEQ ID NO: 212347 - DNA, 394 bp, Glycine max
cctcggggaattccaattccacaccctcaagacgtggtggtggagaaatgtctcatatatgaatgggaattgtttgttttcttattaggcctatcctgaagccaaaggaaatgagatcggaattcctcggggaattccaattccacattttcaagaaataaggaggcaaaaatgttcatatatgaattggaattatttgttttcttattaggcctatcctgaagccaaaggaaatgagatcggaattcctcggggaattccaattccacattttcaagaaataaggaggcaaaaatgttcatatatgaattggaattatttgttttcttattaggcctatcctgaagccaaaggaaatgagatcggaattcctcgggggtaccgagctcgaatt

SEQ ID NO: 212348 - DNA, 432 bp, Glycine max
gtttgttggtgtaactcgttcttcttcttttgttgttctgtgtttgagtttgttttttctctcacctgaaaatgtcttgctgcgggggtcactgaggttgcggaagctcctgcaagtgcggcaacggctgcggaggctgcaagatgtacccagacttgagctacactgagtcaaccaccaccgagaccttggtcatgggagtggcacctgttaaggctcaatttgagggtgctgaaatgggtgtgcccgctgagaacgatggctgcaaatgtggaccaaactgctcctgcaacccctgcacttgcaagtgaggtgttgggagagcaagcttcaagcagagatagcccttaattaggaataatgataaactattaatgtgtagctgaaaacttatgtattatgtctgtgatagctttcgagcactctggagtt

SEQ ID NO: 212349 - DNA, 447 bp, Glycine max
  unsure (1)..(447): unsure at all n locations
ccttaaggtatgttgctgactgttctcaagctgtagttgtacacatgtaactctgtcaacattttcagaccaaatccaacgttgtttctggcaaaaatggatgcattccgtttatcacattcatttatgctcagcaccaacatccacagcccctcctctctctgcacccttcgttccctctccaccaatccccgcaacaggtggttcaaggtggaagccaccgccggcggcagccagaagaagaacaataacaaggccttcgacgcggcggcgttcgaggcggagcgacttgccctcgacgcagaggcccggcgaaccatggcggacgccgccgacccgaaggcctggaaatggataatccggaagagaatatgggatatgatggaagctcgcaactttgccaacaaccctcggnccgttcaccaccgcattcccaattttcgtggc

SEQ ID NO: 212350 - DNA, 332 bp, Glycine max
tgatagcaaatgtaatgacggaacacactaccagttacctttccaagtggaagaaaggaaagcttcttggtcgacgaacattggggcatgtttacctgggattcaatagagatagcggactattgaacgcaattaaagaagtcagggctgtctgggatgaccaatcatcaaaggagtgcctcatacaacttaagcaggagatccatttgctcagttagcttttacatccaaacatcgttgaatactatgggagtgatttgcgggaagaaacactatgcgtttatttagaatatgtctttggtggttctattcataaattactacaggaaaat

SEQ ID NO: 212351 - DNA, 479 bp, Glycine max
  unsure (1)..(479): unsure at all n locations
cataactgaacaaacaaagcaaccctatgtcgaaggtggtttgtgtcaccggagccagtggcgccattggatcatgggtggccctcctcctcctccagcgtggttatacggtccatgccaccgtccaagacatcaaggatgaaaatgagacgaaacatttggaggaaatggaaggagcaaagagtcgtctccatttttttgaaatggatcttcttgacatcgactccattgccgctgccataaagggttgctccggcgtaatccacctcgcatgtcctaacatcatcggtcatgtggaagatcctgagaagcagatactggagccggcgataaaaggaacagttaatgtgttcaaggcggcaaaagaagcgggggtggagcgcgtgagtggcacttnctccatctcatacattatgccaagccctaactggccagctgataagattaaggcagaagagtggtggacagaccttgaatac

SEQ ID NO: 212352 - DNA, 527 bp, Glycine max
aaccaactcaccagcacgtaccatctataactaccaccaaaaccaaacccggacaaatgacagacaaaatggctgaggaagtcaaggccaccgagaaccccgccgtcgaggcccctgctgctgaggagaagaagccagtcaccgagactgtcgctgagaccgccactgctgccaaggagaacgtgttctccatgtttggcggcggtgcgaagaaggaggccaagaaggacgacgacgaggagaacgaccgctctggctccgcaaaggcacataaggagaaggccgctgaaggctgtgatgatgatgacaaggtccaggaggaggaggccgatgtgcacttcgagcccgttgtgcacctcaccgagaaggtcgacactaagaccaacgaggaggccgaggagcagactttcaagatgagggccaagctcttcaagttctaccgcgagagcaaggagtggaaagagaggggcacttgcgacgtcaggctgctcaagcacaaggagaacggctagactcgcctggttatg

SEQ ID NO: 212353 - DNA, 475 bp, Glycine max
gctaaataaatattaaagcctttccttcatcaaggtactgtttgatctttgaatttcaggcctcaaagattggaacaacaggaacatgtgtactctcacaactgttcctgtgctcccttctaagcttaacaagccttcgctttctccgcaccacaattctctttttccctactgtggaagacgggtcgggaagaagaacaaagcaatggttcctgttgcaaggttgttcgggccagccatatttgaagcctcaaaactgaaggttttgttcttaggagtggacgaaaataaacacccaggaaatctcccaaggacttatacgctaacccatagtgatataaccgctaagctcaccttggcaatctctcaaaccataaataattctcagctgcaggggtggtacaacagatttcaaagggacgaagtggtggcacagtggaaaaaggtgaagggaaggatgtctctgcacgttcac

SEQ ID NO: 212354 - DNA, 467 bp, Glycine max
ggagaaagtgactgagcttctgcaactcctcttgacaccaatggttcaccctgggccagcctgtgtccacgctttgggtgcgaacctcatataatccgttggcataccctactgcatcaccagaggcttttccatcgccggtaacaagatggctctgcccgacaccggattaatgtcctacggcgaaatgctagagcagggacaactcataaaccaagccgctctcattcccgtgattggccacccccactacgggtacggcgatgccatgaacctcaagccaaccgccaagggtttcattgccggcagttgcgcacgaatcattctggaagaccagattgcgcccaaagcgtgtgagcacacacgcgggagggacgtgataccgagcgaggtcggctttatgaagattagcgccctcgcggatgctaaaagagagagcgtgtctgacattgtgattgtggggctca

SEQ ID NO: 212355 - DNA, 446 bp, Glycine max
ctcgagccgctcgagccgatccatctatcttttctaacatggctgctgggactggactctttgcagagattttggatggagatgcgtacaagttctatgctgatggagagtggaagaaatctgcttctgggaaaagtgtttccatcatcaaccccactaccagaaagactcaatacaaagttcaagcttgttcacaagaggaggttaataaggtgatggacttagcaaaatctgcacaaaagttatgggcaaagaccccactatggaaacgtgctgagcttcttcacaaggcagctgctattcttaaagagcacaaaactccaattgcagagtgcctggtgaaagatatagcacagccagccaaagatgctgttatggaggttgtaagatctggggatctggtttcttacactgctgaagaatgtgtaaggattctgggagaggga

SEQ ID NO: 212356 - DNA, 508 bp, Glycine max
aagtaattgagtgtgagagccaaatgaatcgaaagattcatgtttggttcgggaagagatcctagacattttgaaatgaatggaaagagagtctactttcattaagtgatttattagataatcgaaaacagaaaatcttgagaactattcgaaactcagaagaattacgggaaggggccattgaacagctggaaaaagcccaagcccgcttaaggaaagtcgaaacggaagcagatcgttttcgggtgaatggctattctgagatcgaacgagaaaaattgaatttaattaattcaatttatacgactttggaacaattagaaaattacaaaaacgaagccattcattttgaacaacaaagagtgattaatcaagtccgacaacgggttttacaacaagccttacagggagctctaggaactctaaagagttgcttgaacaacgagttacatttacgtactgtcagtgctaatattggcatgtttgggacgatgaaagaaaaaataac

SEQ ID NO: 212357 - DNA, 430 bp, Glycine max
atcaatttctttggtgggagatataccttaaggcctaccaaaattttctgttccaaaatcttttgagtatgcacagtccttaattccaactgctcttctcataactggtgtggctatattggaatcagtgggaattgcgaatgcattagcagcaaagaatgggtacgagttggattcaaatcaagagttgctccgtcttggcgtttccaatgttcttgggtcatttttttcagcataccccacaacaggatccttttcaaggtcagctgttaatcatgaaagcggagcaaaacctggtgtatctgggattgactcacgaattataatgacctgtgcacttttgtttctaacaccattatttgagtacatacctcagcgcacccttgctgacattgtgatctctgctgagataggtctggcctattatgat

SEQ ID NO: 212358 - DNA, 424 bp, Glycine max
aagagaatccgaggcgaagagaagagaaaaattaagatggaggggaaggagcatgatgtgtcgctgggagcgaacaagttcccggagagacagccgattgggacggcggcgcacagccaagacgacggcaaggactaccaagagccggcgccggcgccactggttgacccgacggagtttacgtcatggtccttttacagagcagggatagcagagtttgtggccacttttctgtttctatacatcactgtcttaaccgtcatgggagtcgccggggctaagtctaagtgcacgaccgttgggattcaaggaatcgcttgggccttcggtggcatgatcttcgccctcgtttactgcaccgctggcatctcagggggacacataaacccggcggtgacatttgggctgtttttggcgaggaagt

SEQ ID NO: 212359 - DNA, 272 bp, Glycine max
gactcgggggttatttttgattttgcaaattacacaatcacagccgtacatgacacgtgagctgtgcctcttccaacttaaaagcagaggataacattggtccatgacgcaacaaatgtaccacctaataagtataaatttacatctttacatacaaaatacaaagactttaaacttaaactaaaaaaaaaaagattaacagatcatcttgatgaaatgaaccgaaacccagaaacattgttttgattttttttgttgcttcaaacttgtta

SEQ ID NO: 212360 - DNA, 460 bp, Glycine max
aatttctttggctctgtgctttgagtccgagtctctcccacagcgacaccatccatcttctttcacattttccactacgttagggttcgtcttcatttcgaattgaaggattcaacaacttagcaaaccacgccatggcaactctgcaatctctgccaccttctttccgtccatgaatcccacccccaaattcccactctttcccagccactccctttaactattcccccaaattgattgcctcaaagggtgtcagcgttaccctcaggaactctatcacttctcccagggtttcggtttccaattcggagtatagtccccaaattgcggaaaatctcggtgacgttaccattttcaccgctgccggcgagccagtaaggttcagtgatctctgggatcagaaccagggagtagctgtggtggcaatgctgaggcactttggatgcatttgctgttggga

SEQ ID NO: 212361 - DNA, 549 bp, Glycine max
gttattttcagaatacagcaagaaggagcatcagattcaagcatttccttgcttcagaggtcaatttccgaaagaagtattgcccattatattcttcactatcaagggtcaagcaagtaagtaggagactactttgttcagttgccacagaggattcaccaaagcaagttgaagaatccaaaatggagacaccaagggaaatatttttaaaggattacaagatgcctgattactactttgacactgtagatctgaaatttaccttgggagaggagaagaccatagttagatctaaaattgctgtgtatcctcgcattgaaggttctactcccccactagttttagatggacaggacttatctttagtttcaattcacctgaatggctaggctctgaaggaggaagattatcatttggatgcacgccatctcacaatgcaatcacctcctagtggtaaatatgatcttgaaattgctacagatatttgcccacagaataacacatcattagagggactttacaaatcatctgggaattactgtactcaat

SEQ ID NO: 212362 - DNA, 507 bp, Glycine max
gcacaagctcttgtatcatcatcttctcttaccttctcagcggaggctgcaagacaaagtcttggaccaagatcactccaatctccatttggcttctccagaaaagcctcctttcttgttaaggcagctgctaccccccctgtcaagcaaggatcagacagacctttgtggcttgcatcaaagcaaagcttttcttacttggatggcagccttccgggtgactatggatttgaccctctgggactttcagaccctgaaggaacaggagggttcattgagccgaaatggctagcatatggtgagataatcaatggtcgttatgcaaaggcgggtgcaggtggtgcaatagcacctgatattctaggcaaggctgggctgatccctcaagagacagcactcccatggatcagaacgggtgtggttccacctgcaggaacctacaactactgggcagactcctacacactgttcgtgtttgagatggcactgatgggatttgcacagcac

SEQ ID NO: 212363 - DNA, 527 bp, Glycine max
cgcgatttcggaagggtcgtgtttccctgcttcagtttcagcttcggcttcgagaagcgtcgattgggtccttaagctgttccttctctgtttctgacaaactgtataactcctatcaaacatgagcggtcgcttttctcgcacaatttatgtcggcaacctgccctctgatataagagagtcagaaattgaagatctattctacaagtatggccgtataatggatattgaattgaaggttcctccccgccctccatgttattgctttgttgagtttgataatgctcgagatgccgaagatgcaattcggggtcgagatggatacaactttgatggttgtcggttaagagtggagcttgctcatggtggtagagggccatcatcaagtgatcgacgtggatatggaggaggaggtggtaatggtggagcaggcggcggtcgttttggcatctcacgccattctgaatttcgagttattggtcgtggactcccatcttctgcatctcggcaagatttgaaggatcata

SEQ ID NO: 212364 - DNA, 571 bp, Glycine max
gcttgggtatcccttggtaataaattctgccgtctatcggtttgcatggttgggatgcctctctttcagttttgtgtgcttctgtgccaagagattccatgtctggttcacaaatctccataattcaatacgcgatgaccggtatctgattggccggaggttgcataactttggagaacatgctgagaaagcaaatgtagcagaaacttctacaggggagcaggaagctattttactaggtacaggtttaaaccaacaagatcacgaagcagatgttggactacggttgaggcacgtaaatcaacaggtgggctgaattgtattttcagggaggaaggccactgtgtaggttgtgaagcctcgtgctgacatggttcatgaatcactgatgtatactctacacttgtgttgggttagttataatacctcgtcatgacacacctgtgcttatagttaacgttaaacattttgtgcgtgtcgttttaaatttaactaataggaggaaaataaaattgttgatagcgcatttttttttaaagatttctttgtgaaatacggaagctggtcttga

SEQ ID NO: 212365 - DNA, 345 bp, Glycine max
ggaagctctcacggtcaatccttgcacttcagatggcagtggaagccgaaaataaggattatcggctggattacaacagcccgggggctggagcaactatcaaccatcttaactcccaggcttattagctggctctgcccttcacaatagagaaggcccccactcagagaattgcacgtgtaaatagtggggcgaagatatctgaactcgcgaagtctccgtgaaaaggcttagtctctgacggctgcgaaatgctggaagatccatcaaacgctgtatcagatgcatgtctatgtctcgagaacaacaacattccttttaatgttcttatctctgactgtgaaa

SEQ ID NO: 212366 - DNA, 554 bp, Glycine max
gcaagaaactccatagcgaaaaagaaaattcacgttatattgttagtttattcgtcatttctttctttgagtagtaatggcaagcctcaaggttgcatttgtggttgctgtgctatacatggttgtggtgagtgcacacatggcacatgctaggatcaactgcggccgtgtcgcggtcgcggtgtctccgtgccttggctaccttcgtcgcggtggaaggccacaggcgaggtgctgcaacggagtgagaaacctccacgccctggccaagaccaccgtggaccgccggacggcgtgcaattgcctgaaaacctttgccagaggtcttggtaggggtgtcaatgccaacaacgcagctgcacttccaagaaaatgtagagtcaacatcccctacaagatcagcatctccaccaactgcaacacgatcaggtaaggatggatctggtataaaggagaaacaacagggcaatttttcagtcacagggcactatatatacgataataatagtgctgctgaattaactaatgaaaaataatgggagggcgatgagggc

SEQ ID NO: 212367 - DNA, 535 bp, Glycine max
ctgtggccctcaaacctgcccctttcactgttgagaagtcctcagttagaggccttccctccctctcaaggaactcctcttcattcagagttgtggccagtggtggcaagaagatcaagactgacaagccttatggaattaatggtggcatggctttgagggaaggagttgatgcatctggcaggaaaggaaagggaaagggcgtttaccagtttgtagacaaatacggtgctaatgtcgatggttacagtcctatctacgacaccaaggactggtctccaaccggtgatgtctacgctggcggtacgactggcttggctatctgggctgtgactctacttggtcttcttgctggtggtgcacttcttgtctacaacacaagtgctttggcgcaataaactctgcaaatcgatgttttaagctcaaacttagtccatgttactatctaaaaatgaagaattattcatgaagtactttgtggatacgtgttccttctgttctataaatgtgtggatgtgaaaaatcttgtgttgtt

SEQ ID NO: 212368 - DNA, 534 bp, Glycine max
  unsure (1)..(534): unsure at all n locations
cacaggaatagtaggctgtgcaggactgaagccaacagttgcagcgatagaagcagggaaagacatagctttggccaacaaagagacattgattgctggaggtccttttgttcttcctcttgctcagaagcataatgtaaaaatacttccagctgattcagaacattctgccatctttcagtgtatccaggggttgccagagggtgcacttaggagagttattttaactgcatctggaggtgctttcagggattggccagttgataaactgaaagatgttaaagttgctgatgcattaaaacatcctaactggaatatggggaaaaagataactgtggactctgctaccctttttaataagggtctagaagtaattgaagcacattacttgtttggagctgactacgatcatattgagattgtcattcatccacaatcaatcatacattcaatgattgaaacacaggattcatctgttcttgcacaattggggtggcctgatatgcgtntgccaatcctctatacattatcatg

SEQ ID NO: 212369 - DNA, 444 bp, Glycine max
aggagctcctctccactggttcttcatctgcatgcacacagttgcatagttttggaaaccaagaattcctgaagaagggtagcatcaacaagcagttctgaaaatggagatcaccaatgtcagtgagtatgaggctattgcaaagcagaagttgccaaagatggcgtttgactactacgcatctggtgcagaggaccagtggactctgcaagagaacagaaatgccttttccagaattttgtttcggccacgtattcttattgatgtgagcaagatagacttgacaactactgtcctaggcttcaaaatatccatgccaatcatgattgccccaacagcctttcagaaaatggctcatcctgagggagaatatgcaacaagcagagctgcatctgctgctggaacaatcatgactttgtcctcatgggctactttcagtgttga

SEQ ID NO: 212370 - DNA, 472 bp, Glycine max
gtgggtttagaaatgcatacaacatggtgcttcacaaatttggtgagaagctctactcagggctggttgcaaccatgactggacatctcaaagatatagctcaatctgttgaagctgctcaaggaggttcttttctggaagagctgaacaggaaatggaatgatcataataaggcgttacaaatgatcagagacatactgatgtacatggataggacctacattccaagcacccagaagactcctgttcatgaacttgggctgaacctgtggaaagaaaatgtcatctattccagccagatcaggactcgactattgaatacacttctggaattagtacatagtgaacgcactggggaagttattgatagaagcattatgagaaatataacaaaaatgcttatggatttaggcccttctgtttatggacaagaatttgagactcattttcttcaagtttcagctgagtttta

SEQ ID NO: 212371 - DNA, 396 bp, Glycine max
atgcaagtttcatcctcatggttcggaacaatagtactttccaaccgctactcacgcaaccgctccctccctctggaaccgtgttccaccacaaccacatcatcggtttctgctacctcgtaccctcctctattcacgcgcccctatagttctctttcgtttctcgtctctcaaagaaaaggcttcaccctcacctcgctgtcaccgatcagaacaaataagaagagaagaagagcgtcgttgagggtttccgcggtgttcgagaggttcaccgagagagctataaaggccatagttttgtcgcagagggaagccaaagcgctcggaagcgaattagtttacacgcagcatcttcttctggggctcatagccgaggagggatcgttctccgatggg

SEQ ID NO: 212372 - DNA, 408 bp, Glycine max
gaagacctttgcagaagaagtgaatgcagcattcagagagagtgcagacaatgagctcaagggaatcctctctgtgtgtgatgagccacttgtgtccgttgacttcaggtgcactgatgtgtcctcaaccgttgactcctcgttgaccatggtcatgggagatgacatggcgaaggtcattgcttggtatgacaatgaatggggctactcccaaagggttgtggatttggctgacattgttgccaacaaatggaagtgagagccaaacaaattctcattggtaattaaattattatgtatgtaccatgccattgtaattttgtatgcttactactactactaccactacaacacttgttgcttcattgttcttttaaacttgtactgagaaacagaaccatcaatttc

SEQ ID NO: 212373 - DNA, 581 bp, Glycine max
  unsure (1)..(581): unsure at all n locations
gaacaagtggaggcgtggcgaaacatagtggatgccgtgcatgccaaaggcagcattatcttctgtcaactttggcatgttggccgtgcctctcatccagtgtatcaacctggtggagctccaccaatttcgtccaccagcaagcccatatcggcgaggtggaggattctgcttcccgatgggtcctatggtgtgtacccagagcctcgtgcacttagcacttctgagatacctgaaatagtgcagcattatcgccaagcagcaattaatgcaattcgagcaggttttgatggaatcgagattcatggggcacatgggtatctcattgatcaattcttaaaggatggaatcaatgatcgaacagatgaatatggtggatcactagcaaaccggtgcaggttcctaatgcaggtggttcaagcagttgtttctgctattggtgcggaaagagttgctgtcagaatttcaccagcaattgatcaccttgatgccattgattctgacccacttaagctaagcttggcagtggttgagagaactcaacatttccagaaagaactgngcaaaaaaactcacttatc

SEQ ID NO: 212374 - DNA, 587 bp, Glycine max
  unsure (1)..(587): unsure at all n locations
gttttgtttatttgaaattaacaagtagcaaagatgtttggaatcatcggaggaaacaagggtgacaagataaaggggaacttggtgattatgcgaaagaatgtgttggatatcaacagcattaccagtgttaagggtgtcatcggaaccggcattaacatcattggaggagtcgtcgacaccgttactgctttggcgtcccacatctccatccagctcattagtgccaccaaggctgatggacatgggaaaggaaaagttggaaaggctacaaatttaagaggacaagtgtcgttaccaaccttgggagctggcgaagatgcatacgatgttcattttgaatgggacagtgacttcggaattcccggtgcattttacattaagaacttcatgcaagttgagttctatctcaagtctctaactctcgaagacattccaaaccacggaaccattcacttcgtatgcaactcctgggtttacaactcanaatcctaccattctgatcgcattttctttgccaacaatacatatcttccaagcgagacaccggctccacttgtcaagttcagagaagaagaattgaagat

SEQ ID NO: 212375 - DNA, 467 bp, Glycine max
ttctactccactgttactcgtgccagatttgaggagctcaacatggatctcttcaggaaatgtatggagccggtggagaaatgtttgagggatgctaagatggacaaaagaagtgttgatgatgttgttcttgttggtggttctaccagaattcccaaggttcaacaactgctgcaggacttctttaatggaaaagagctttgcaagagcattaatcccgatgaggctgctgcatatggtgcggctgttcaggctgcaatcttaagtggtgagggcaatgagaaggttcaggatcttcttctactggatgtcacccctctgtctcttggtttggagactgccggtggtgtgatgactgttctgatccctatgaacactacaattccaacaaagaaggaacaagttttctcaacatactctgacaaccagcctggtgtgcttatccaggtctttgagggtgaaagagc

SEQ ID NO: 212376 - DNA, 438 bp, Glycine max
aaacttaatcgatcatcacttcacttcactaatacatcatggcagacgagacccagaacaaggatgagagctatgaggttgtggtccacgatcgtggcgtttctgactttctcggtgagaaaaaggatgaagaagacatgcctcatcctcaggaggaggtcatcgacaccgagttttaaaaagtcactgtctcagaccaaggagagaacaagcacagtctcttagaaaagctctaccgatctgacagcagctctagctcttcaagagaggaggaaggagaagatcgacagaaaaggaagaagaagaacaacgaacagaaagggctgaaagagaagatcgaggagaaaatagagggtgatcatcatcatcacaaggatgaggacacaagtgtccctggttagaaagtttatgttgttgaaacactacatgctgaggaaa

SEQ ID NO: 212377 - DNA, 351 bp, Glycine max
  unsure (1)..(351): unsure at all n locations
gaagacctttgcagaagaagtgaatgcagcattcagagagagtgcagacaatgagctcaagggaatcctctctgtgtgtgatgagccacttgtgtccgctgacttcaggtgcactgatgtgtcctcaaccgttgactcctcgttgaccatggtcatgggagatgacatggcgaaggtcattgcttggtatgacaatgaatggcgctactcccaaagggttgcggatttggctgacattgttgccaacatatggaagtgagagccaaacaaattctcattggtaatttaattattatgtatgtaccatgccattgtnattttggatgcctactactactactaccactacac

SEQ ID NO: 212378 - DNA, 373 bp, Glycine max
gaagacctttgcagaagaagtgaatgcagcattcagagagagtgcagacaatgagctcaagggaatcctctctgtgtgtgatgagccacttgtgtccgttgacttcaggtgcactgatgtgtcctcaaccgttgactcctcgttgaccatggtcatgggagatgacatggcgaaggtcattgcttggtatgacaatgaatggggctactcccaaagggttgtggatttggctgacattgttgccaacaaatggaagtgagagccaaacaaattctcattggtaattaaattattatgtatgtaccatgccgattgaattttgtatgcttactactactactaccactacagcaggttgtgcttcattattctt

SEQ ID NO: 212379 - DNA, 415 bp, Glycine max
gtcttgcaattgaagttgaagtcttgcccttctctcttcaactccaaacacaagacatcatcatgcatggctgcctccgtctccactgtcggagctgtcaacagagctcttttgaacctgaatgggtctggacctggggtttcagctcccagttcatccttctttgggagcagcttgaagaaggttattggctcaagggtccccaacacaaagatttcctctggaagcttcaagattgttgctgtagaagagaagaaagagattgaagagacccagcagaccgacaaggacagatggaagggtcttgcctatgatatctcagacgaccaacaggacatcacaagaggaaagggtttggttgactcccttttccaagctccacaggatgctggaactcactatgctgtcatgagct

SEQ ID NO: 212380 - DNA, 550 bp, Glycine max
gagagtgagagagcacacttcaactattgagaaccgttgacctccatggctgtgacagtgggtggactcgcaagttctcaactttggtgtcacaatttgagaatcagacacagtgctcttacactgagttggggaaaaaaagcagctgacgagagcacagaaatgtggtggggacgagaatccatggaaggcagtgaagatagtgatgcgtgtggttgatcatcctcaaatggatgattatgtctcccgtggagtgcataaggattcggtctcccttccaaagccattatccatatctgatattgtggctgctttggatgatggtgctaaagtacagatatcatataaggggataccaggatcatacagcgaggatgctgcactcaaagcttaccctaattgtgaaacagtttcatgcaatgactttgaagaagcttttaaggcagttgagatatggtgggctgacaaagttatcctttccatagaaaatacatctgggggaagcattcaacggaactatgatttacttctttgccataggctttacatt

SEQ ID NO: 212381 - DNA, 584 bp, Glycine max
  unsure (1)..(584): unsure at all n locations
caatatattccattctctctgtgtatttccctacctctcccttcaagatgcagatcttcgtcaagaccctcaccggcaagaccatcacccttgaggtggaaagctctgacaccatcgacaacgtcaaggccaagatccaggacaaggaaggaatccccccggaccagcaacgtctcattttcgccggaaagcaacttgaggacggccgtacccttgctgactacaacattcagaaggagagtactcttcacctcgtcctccgtctccgtggtggcatgcagatcttcgttaagacactcaccggcaagaccataaccctagaggttgaaagctccgacaccatcgataacgtcaaggccaagatccaggacaaggagggtatccccccggaccagcaacgtctcatcttcgccggaaagcagctcgaggacggncgcaccctcgccgactacaacatgcagaaggaatcaacccttcacctcgtcctccgtctccgtggtggcatgcagatcttcgttaagaccctcaccggcaagactattaccctagaagtcgaaagcttcgacaccatcgacaacgtcaag

SEQ ID NO: 212382 - DNA, 562 bp, Glycine max
aacttatgcgatgatatgaagttttttgctactccaccagttcatggttccctggctaatcagatagtgcatcctgcagacctatgttttaagctgccagacaacgtgagcctagaggagggagcaatgtgtgaacccttaagtgttggtgttcatgcttgtagaagagctaatattggaccagaaacaaatgtgttgatcatgggagcagggcccataggacttgttacaatgctggcagctcgtgcgtttggggcacccaaaacagtcattgtggatgttgatgaccatcgtttatctgttgcaaaatctcttggtgcagatgatattattaaagtctcaacaaacattaaggatgtggctgaagaagttgtgcagatacagaaggttatgggagctggtatagatgttacctttgattgtgctggttttgacaaaaccatgtctacagcactgagtgctactcagccaggtggcaaagtttgcctagtgggaatgggacattctgaaatgactgtcccactcaccccagcttgcagcagggaagttgatgtgggtggag

SEQ ID NO: 212383 - DNA, 536 bp, Glycine max
ggaagaatcactcccttatccatttccacaccacaccatggcctcaaccaacgctctctcttcagcctccattctacgctctcccaaccgccagtctctgacccgaagagcgaaccataatggaagagtaaattaccggaaaccgaataaccgtttctccgtgaaagcctccgccaaagagattgcctttgaccagcattcccgctctgctatgcaggccggcattgacaagctcgccgacgctgttgggctcactcttgggcccagagggaggaatgttgtgttggatgagtttggaagtcctaaagtggtcaacgatggtgtcaccattgctcgcgcaatcgagcttcccgatcctatggagaatgctggtgcagctcttatcagagaggttgctagcaagactaacgactctgcgggtgatgggactaccacggcttcggttcttgctcgcgagataattaagctggggcttctcagtgtgacttctggggcaaatcctgtgtctcttaagagagggattgataagactgtgc

SEQ ID NO: 212384 - DNA, 565 bp, Glycine max
cgaagcctggggtgagtccaccggcgagttgcgctatctccctgtctatgaggaaacttacaagagtctgagatcgaggggtattcggttccctggccgtgacaatgaaagcttggctccaattttcactcctcctcgttcagtgtcttctgctccggaggctgatgtcaaccttcaacagcagtttgagcatgatattcctgagcagtttcatcatgatgttcccgtgcttagttttacgcctgaacagacaaaggaggcccttgatgttgcaaggaatagcattgagcttctttccactgtgttgtcgtcttcaccacaacaagatgctttacaggatgatttgaccaccacacttgtgcagcagtgtcgtcggtcacagactactgtccagcgaattgttgaaacggctggggataatgaagcagtgctttttgaggccttgaatgttaacgatgagattcagaaggtcctcaccaaatacgaagagttgaagcagcctgcaactactccacttcatcctgaaccagctatgatacctgttgctgttgaaccagacgagtca

SEQ ID NO: 212385 - DNA, 508 bp, Glycine max
tggcgatggcaatggcgcttcgcaggctttcatcttcaattgataagcctcttcgccctctcttcaatgcgggttccctctactacaagtcgtctttgcctgatgaagctgtttacgacaaggagcgacccggagttacatggccgaagcagttgaatgcttcacttgaggtcgttgatcctgagattgctgatattattgagcttgagaaagctaggcaatggaaggggctggaactgataccgtcagagaatttcacttctgtgtctgtgatgcaagcagttggatctgtgatgaccaacaaatacagtgaggggtaccctggtgcaagatattatgggtggaaatgagtatattgacatggctgaaacactatgccaaaagcgtgccctggaagcgtttagattggatccccgctaatggggagtgaacgtgcagcctttgtcagggtctcctgcaaattttcatgtctacactgcattggttaaaacctcatgaaagaatcatg

SEQ ID NO: 212386 - DNA, 498 bp, Glycine max
ggcatggaagagccccttgaaatacccataataaatgaccttactatgattttgggctctatatctcagtccaaggcagcaggagttgtagttgatttcactgacccttcctctgtatatgacaacgtaaaacagggcgtcttggttgcaccaaccctttccataggatcaatattattgcaacaagctgcgatttcagcttcttttcattacagcaacgtcgaaatcgtggaatctagggctaatgcaaatgatcttccatcagcagatgcaaaccaaattgccaacaatctctccaacctgggccaaatctataacagagaagacccttcaacagatgtcttggcaaggggtcaagtcctaggagatggaattcgtgtacacagcatggtccttccaggcattccttctagtacaacagttcacttctctggtccaggagaggtatactctatcaagcatgatatcacagatgtgaaagtgtctcatgcctggctt

SEQ ID NO: 212387 - DNA, 546 bp, Glycine max
gtagttgagaactaagaagaaggaaatggcttcctcaatgatctcctccccagctgttaccaccgtcaaccgtgccggtgccggcatggttgctccattcaccggcctcaaatccatggctggcttccccacgaggaagaccaacaatgacattacctccattgctagcaacggtggaagagtacaatgcatgcaggtgtggccaccaattggcaagaagaagttcgagactctttcctacttgccagacctcgatgatgcccaattggcaaaggaagtcgaataccttctaaggaaaggatggattccttgcttggaattcgagttggagcacggtttcgtgtaccgtgagcacaacaggtcacctggatactatgatggacgctactggaccatgtggaagctgcctatgtttggctgcactgatgcttctcaggtgttgaaggagcttcaagaggctaagactgcataccccaatggcttcatccgtatcattggatttgacaacgttcgccagtgcagtgcatcagcttcatcggctacaag

SEQ ID NO: 212388 - DNA, 430 bp, Glycine max
gtagttgagaactaagaagaaggaaatggcttcctcaatgatctcctccccagctgttaccaccgtcaaccgtgccggtgccggcatggttgctccattcaccggcctcaaatccatggctggcttccccacgaggaagaccaacaatgacattacctccattgctagcaacggtggaagagtacaatgcatgcaggtgtggccaccaattggcaagaagaagttcgagactctttcctacttgccagacctcgatgatgcccaattggcaaaggaagtcgaataccttctaaggaaaggatggattccttgcttggaattcgagttggagcacggtttcgtgtaccgtgagcacaacaggtcacctggatactatgatggacgctactggaccatgtggaagctgcctatgtttggctgcactgatgct

SEQ ID NO: 212389 - DNA, 562 bp, Glycine max
tttcatttggcatttacatttgcatttgatttccgcgttcgcaagttgtaatcaaaatcaagccatagcgaccgaggaaggcggtgatcggcaatgagcagcggcggcggaggcgaaggagaaggagaaggcgcgtgtgagtcgaacgtcgctgattctgtggcacgcgcaccaaaacgacgccgcggcggtgcggaagcttctggaggaggatccgtccctggtgaaggcgagggattacgatagccgcacgccgctgcacgtgaagtcactccacggatgggtcgaagtgtcgaagtgcttgatcgaattcgatgctgacgtcaacgctcaggatcgctggaaaaacactcctctggctgatgcagaaggagctaaaagaactgccatgattgagcttttgaagtcacatggtggcttgtcgtatctggtcaggacttcaggcatgaggttaatttactagtgaagctttcgacaccctaatgtcgttcaatttctcggagctgttactgacaagaagccccttatgttaattactgagtatctgagaggaggtgatctt

SEQ ID NO: 212390 - DNA, 559 bp, Glycine max
tgcaacttacttgttgatataaacttcagacagagcgagttgttgtaaagctagccttgttgcagccatggccacccacgcggctctagcttctacaaggatccccactaacaccaagttcccatccaaggcttcacactctttcccaacccaatgcgcctcaaagagacttgaggtgacagaattctctgggctaagatccacttcatgtgtgacatatgctaacgatgctagagaatcttccttttttgatcttgtagcttcccaactcactcccaagaccaatggatcatcaactcctgtgaggggagagacagtggccaagttgaaggtggcaatcaatggtttcggacgcattggtagaaacttccttcgctgctggcacggccgaaaagactcaccccttgaggtcgttgttgtcaacgacagtggtggtgtcaagaatgcttcgcacctgcttaaatatgattccatgctgggaactttaaagcagatgtgaaaatactggacaatgaaaccatcactgttgatggtaagcccatcaaggttgtttcaagca

SEQ ID NO: 212391 - DNA, 584 bp, Glycine max
  unsure (1)..(584): unsure at all n locations
cttgtgcaccgtaagggttgtgaagcaggcagagaagagccatggtgcacgtttccttctaccgaaactatgggaaaaccttcaagaagcctcgtcgtccgtacgagaaggagcgtttggacgccgagttgaagctggtcggtgagtacggacttcgctgcaagagggagttgtggagggttcagtacgctctcagccgcatccgtaacaacgccagaaatcttttgaccctcgacgagaagaacccgcgccgtatcttcgagggagaagcccttctccgaagaatgttccgttacggacttctcgatgagactcagaacaagcttgattacgtgttggctctcaccgtcgagaactttctcgaacgccgcctccaaaccctcgttttcaagtctggcatggccaagtccatccaccacgccagagtcctcatcaggcagaggcacatcagggttgggagacaggtggtgaacatcccatcattcatggttagggttgattcgcagaagcacattgacttctcactgaccagtccacttggtggtggtcgtnccagacgtgtgaagagaaagaaccaaaggctg

SEQ ID NO: 212392 - DNA, 457 bp, Glycine max
gccaaagcatggcttctctctcttgctccgccaacgaccttgccccactcatcaacgacaccgccgccgccaactacctctgcgcacaattcgattccatttctagaaagctcgtcgaaacaacctacgccgtcgacaacacctaccttctgttttcagcgtatcttgtcttcgccatgcagctcggcttcgccatgctctgcgccggctccgtcagagccaaaaacaccatgaacatcatgctcaccaacgtcctcgacgccgtcgccggcggtctctcctactacctattcggctttgcattcgccttcggcggcccctccaacggcttcatcggccgcccaaacttccgcctacgagattacccgatgggctcctctatctccagcttcttcctctaccagttggtcttagccatcgccgacgcaggaatcaccatctctcccttcggcgacta

SEQ ID NO: 212393 - DNA, 459 bp, Glycine max
gccaaagcatggcttctctctcttgctccgccaacgaccttgccccactcatcaacgacaccgccgccgccaactacctctgcgcacaattcgattccatttctagaaagctcgtcgaaacaacctacgccgtcgacaacacctaccttctgttttcagcgtatcttgtcttcgccatgcagctcggcttcgccatgctctgcgccggctccgtcagagccaaaaacaccatgaacatcatgctcaccaacgtcctcgacgccgtcgccggcggtctctcctactacctattcggctttgcattcgccttcggcggcccctccaacggcttcatcggccgcccaaacttccgcctacgagattacccgatgggctcctctatctccagcttcttcctctaccagttggtcttagccatcgccgacgcaggaatcaccatctctcccttcggcgactaca

SEQ ID NO: 212394 - DNA, 492 bp, Glycine max
aaagctacaagagaagaaaaaaaaaaagagagaaaagaaaaaatttgttttataactttttaacttattgttcacttcttcttcttcttcttcttcaatatcttggttctttgatattattctattgagcaaaaaatgggagttccagagagagaccctcttgcacaattgagtttgcctcctgggtttaggttttaccccacagatgaggagcttttggttcagtacctttgccgcaaggttgctggccatcatttctctcttccaatcattgctgaagttgatttgtacaagtttgatccatgggttcttccaggtaaggcagtgtttggagagaaggagtggtacttttttagcccaagagacaggaagtacccgaatggttcacgaccaaacagagtcccgggttctgggtattggaaagcaactggaacagacaagatcatcaccactgaaggtagaaaaagtggcaataaaaaagcacttgttttc

SEQ ID NO: 212395 - DNA, 597 bp, Glycine max
gggaatatggatgggtttcgttagcctgtgtcttctgtctgtatcagtatcaggtctgctccaacgcctagagcaccctgtcaaagctgatggctcacttagccttatggtcattggagactggggaaggaaaggaacatacaaccaatctcaagttgccactcagatgggaagggttgctgcaaagttaaatatcgactttgtgatatccactggagacaatttctacgatgatggattgactggtatagatgaccctgcatttgaaatttccttctcaaaaatctacactgccaagagcctccaaaagcaatggtatagtgtgttgggcaaccatgactacaggggtgatgttgaagctcaattgaatccaatccttcagaaaattgatcctagatggatctgccaaagatcatttattggtgatactgaaattgctgagttcttctttattgattcaacaccttttgtggacaagtattttcttagccaaaggaccacaagtatgactggagaggagtgcttccaaaggaaaaatatttatcaaagctcttgaagatctggaatagcattgaggattctactgcagtggaagat

SEQ ID NO: 212396 - DNA, 321 bp, Glycine max
aaaaaaacaacataaaaaattaggaactcaaaccatgaatgaaacaaggaaccaactatgatagaagcaactagaccaaaaaaaagagcccaaaaagccctatgacaagccggtggggctcccccttaaggatgcgtacacccgggaaagtattggaactgtgcccctgggacgaggccgagaccccttttttgaagcctgtaatggtgctgacttttgcaccaactggactgtcaactgagggaaagtctgtggagatgccccatgaatcgcattaccaaggcacatacctgagacaataagggctggggtgcttagaat

SEQ ID NO: 212397 - DNA, 531 bp, Glycine max
  unsure (1)..(531): unsure at all n locations
agggagacaacatgattgagaggtccacaaaccttgactggtacaagggtccaactctgcttgatgcacttgaccagattagtgagcccaagaggccctctgacaagcccctcaggcttccccttcaggatgtgtacaagattggaggtattggaactgtgccagtgggacgtgttgagaccggtgtcttgaagcctggaatggtggtgacttttgcaccaactggactgacaactgaagtcaagtctgtggagatgcaccatgaatctcttacagaggcacatcctggtgacaatgtgggattcaatgttaagaatgttgctgttaaggatttgaagcgtggttatgttgcctcaaactcaaaggatgaccctgcagaggaggctgctaacttcacagcccaagtcatcatcatgaaccancctggtcagattggaaatggctatgcccctgtcctcgactgccacacttttcacattgctgtcaagtttgctgaactcatgaccaagattgacaggccgatcggcaaag

SEQ ID NO: 212398 - DNA, 465 bp, Glycine max
ctaacataaaataattagagagagagagagagagagaggatatgggttcgaagaggtatgcgctattgatgtgcggtgaggattcggagtacttggtgaagatgcacggaggcacctatggggtattcatgaagttgctccaagagcaagaggaaaagtgggacctctacaagctcgtccaaggagagttcccggagcagcatgacttgcctctctacgatggctttgtcatcagtggaagctgctatgatgcacatgccaatgacccatggatccttgacctcattgctctcgttatcaaattggactccatgcacaagaagatccttggcatttgctttggccaccagataattgggcgtgcattgggaggaaaagtgggtcgctctcccaatggttgggacattggtgttaaagctataaacgtgtcatcatctttacccttggctttctcatctcttaagc

SEQ ID NO: 212399 - DNA, 429 bp, Glycine max
aacaacgcggtgtcatcactggcgtgtccgttgctgagtgattacggttacagcgtggcgccgccggaagtgcaaccggcgaattggtttctgagagagtggtttgagtcaggtaaggggaaattagaagaaggactgaggctttgcgcgcacattgggtgcggtcgaccggagacgcggccacacgagtttcgccggtgttcggtttgcggcaaagtgaattactgttcacgtggatgtcaggcgctggattggaagttgcggcataagattgagtgttcgccggtggaaatgtacggtgatggtggtgttgatgtggagaatgagtttgtggtcccaaacgatgccgcttgaagaagtgtttcagcgacagaatcaatttctaaggttgaaaaattagaaaatagagaggaaaagaagcgattctat

SEQ ID NO: 212400 - DNA, 558 bp, Glycine max
  unsure (1)..(558): unsure at all n locations
gtttcttacaagcctctactatactgcttcaccttctgctctagaaaattcagtgctgaaacatggcttcggctactctctctgtagccaaaccagcccttcaggcaaatgggaaaggcttctctgaattctctggcctccgaagctcatcaggcttccttcccttttctagaaaatcttcagaggatttccattctgtcattgccttccagacctatgcagttggaagcagtggaggatacaagaagggtgtgacagaagcaaaactgaaggttgccataaacgggtttggaaggattggaaggaacttcttgaggtgctggcacggtcgcaaagactcccctcttgatgtcattgccatcaacgacaccggcggcgtgaaacaagcctctcaccttctcaaatacgattccatcctcggaaccttcgatgctgatgtcaagcctgttggcagcaatgtcatctccgtggatggaaaggaaatcaaagttgtttctgaccgcaaccctgccaaccttncttggaaggacttngggatagacttggtgattgaaggaa

SEQ ID NO: 212401 - DNA, 468 bp, Glycine max
tcaagatggatcaagacagttctattgggaaagttttcaagttcacacatgttgtggctgcctccttcgccggttcagttgccgccgccgccgcctcaagctaccggcgggcaccgtccacggtggtgggagagcagaagaaggttattcccgagctacgtaggacggaatctgggcgtctcggggagatggaaaagttctcccactatgtcgcaaggcaaatggggtttgaagatgctgatgaggttccagagctatgcatattggcccaagagtatttgaaaaaatccacagggtgcgatgaaagcatctttgaatatatttccagtggcaatgtggagaacactgattctctatatgcgaaattagctgaggagttagagagatgcatgctcagttatttagcatttcactggaaccaagctacatatgacattagtcagggtttggggagtggggtctcatcac

SEQ ID NO: 212402 - DNA, 318 bp, Glycine max
cggctcgagcgaggaacagagctggatggctgagtggattggattcaagagcctcgactaccgtctggaccccacggggcctaaatcgatccgcttgagggaaatgacattcgggaaattatatgctgggcttacaaagagccagatgatagaccacatgaaggactgcggctcaaagaacaaggtttgtaagttctacattggcatggggtactattacactcatcttccaccagtgatgctgaggaacataatggacaaccctgcttggtacgcttagcacacaccttaccaggctgagatatcttatgggaggct

SEQ ID NO: 212403 - DNA, 440 bp, Glycine max
cggctcgagcgaggaacagagcaagatggcagagtcgattggattcgagagcctcgactccctcgtggacgccacggtgcctaaatcgatccgcttgaaggaaatgacattcgggaaattcgatgcagggcttacagagagccagatgatagagcacatgaaggacttggcctcaaagaacaaggtttttaagtcctacattggcatggggtactataacactcatgttccaccagtgatcctgaggaacataatggagaaccctgcttggtacactcagtacacaccttaccaggctgagatatctcaggggaggcttgagtcattgctgaattaccaaaccatgatcaccgacctcaccggcttgcctatgtcgaatgcttcattgcttgatgagggtactgctgctgctgaacaatgtctatgtgtaataatattca

SEQ ID NO: 212404 - DNA, 373 bp, Glycine max; identical to SEQ ID NO: 212378

SEQ ID NO: 212405 - DNA, 540 bp, Glycine max
ctcgagccgtatagcgttgccattctcatcctcttctttctctctctaccattgccatggatccctacaagcaccggccatccagcgccttcaattctcccttctggactacaaattctggtgctcctatttggaacaacaactcctctttaaccgttggagctagaggtccaattctgctggaggattatcatcttgtggagaagcttgcaaattttgatagggaacgtatcccagaacgtgttgtccatgccaggggcgctagtgcaaagggtttctttgaggtcacccatgacatttctcacctgacatgtgcagatttccttcgagcccctggagttcagacgcctgtaattgttcgtttctcaactgtcattcatgagcgtggtagccctgaaaccttgagggaccctcgaggttttgccgtgaagttttacaccagagagggtaactttgaccttgttggaaacaaccttcccgtcttctttgtacgtgatggcatgaagtttccagatatggttcatgctcttaaacccaatc

SEQ ID NO: 212406 - DNA, 507 bp, Glycine max
gcaatggtgagtaaaaatagcaagcctcaagctactgcaatgcatgtgggagctatagaaattatcattgatagtttcgcaagtcctgactgcaacatagttggtgcaatgcttttggttgatacttatcataccaatcctgaaaatgcagttcgtagtatttttgttgcgcctttcagaggcggaaggcccattcgggtggttacatttccgaataccatcgtgcagattgaaccagacatgaattcaaggtttcagcttttgagtactaatggtgattttgttcaaggaaaagatctcgcaatggttaaagttaatgtagcatgtgctgctgttggcttgacatcaagttacactccaactccattgttggaatctggtttgcaaaaagacagagggttaattgtggagtattttggaaggatgtcttacgttgctcacaacgttaatcagccccaagagaaagatttgttggaaggaaaatttttctttgatattaaatctcgc

SEQ ID NO: 212407 - DNA, 564 bp, Glycine max
attcaagggtcaattgttccgactgatgcaacaactagagagtactactccacattttattcgctgcattaaaccgaataatctccaatcacctgaatcatatgagcaagggcttgtattgcagcagctgagatgctgtggggtcctggaagtagttcgaatatcgagatctggctttccaacaagaatgtttcaccaaaagtttgctagaaggatccgcttagtgtttcagttgcaattcttcatcagtttaatattttgcctgagatgtatcaagttggctacacaaaattatttttccgaacagggcagattggtgtgcttgaagatactagaaatcgtaccctccatggcattttacgtgtccaaagttgtttcaggggttaccaagcacgtcattctctcaaggatcttcggggaggaatcactactttgcagtcatttattaggggagacaaaaccagaaaggcatattcagcattacttaagaggcatagagctgctgttattatacagaagcgcatcaaagcagtatttgcaagaaacagaatgaggactattagt

SEQ ID NO: 212408 - DNA, 390 bp, Glycine max
cccacccgtagtttctaccaccttcagtcacggcgtaatacactaaccaacccaccatgtcgctgcctgcttgtcccgccgaacaactggcccaacttctcggcccaaacaccacagacgcctccgccgccgcctcccttatctgcggccagttcgccgccgtggacagcaagttcgtcgacacggccttcgccgtcgacaacacctacctcctcttttccgcctacctcgttttttctatgcagctcggcttcgccatgctctgcgccggctccgtccgcgccaagaacaccatgaacattatgctcaccaacgtcctggacgctgccgccggcgggctcttctactacctcttcggcttcgccttcgctttcggctccccctccaacg

SEQ ID NO: 212409 - DNA, 458 bp, Glycine max
gcagagtcagagacagagacgcagccatggggcggagacctgcgaggtgttataggcaaattaagaacaagccataccccaagtcacgtttctgccgtggtgttcctgatcccaagatcaggatttatgatgttggtatgaagaagaagggtgttgatgagtttcctttctgtgtccatctggttagttgggagaaggaaaatgtttcaagtgaggccctggaagctgctcgcattgcttgcaacaagtacatggccaaatttgctggaaaggatgctttccacttgagagtcagggtgcacccattccatgttcttaagatcaacaagatgctttcgtgtgctggtgttatccaatccattattgagtgaaaattctgtcactttatttttaattaattaattttttccgttttatacagcttctgtactttgctttccttttttttatactttaat

SEQ ID NO: 212410 - DNA, 390 bp, Glycine max
gacctgttatatttattgacactgacaagttgcctgctttagaggcaagagatcagaagattgtaaataaccctattgaagctcagataattgctgaggttgcaaaggaattggtaaagaatggaatcggaagtgaacacattggcattattactccctataattcacaggcaaacctcatccggaatgctgcttccatgacttccttggagatacataccatagacaaataccagggtagagataaagactgtatattagtatcttttggaaggtctaccgaaaacccgacaagctgtgctgcttctctgcttggagactggcacaggataaatgtggctcttactcgcgctaagaaaaagttgatcatggttggatctcggagaactc

SEQ ID NO: 212411 - DNA, 299 bp, Glycine max
ctcgagccgaggacccaaagcgtctcttcgaaggaaacgcgctcattcgccgtctggtgcgtgtcggtgtgctcgatgagtcccgcatgaagcttgattacgtcttggccctcaaggtcgaggatttcttggagcgtcgcctgcagacctgtgtctacaagctcggtcttgccaagtccatccaccacgcccgtgtcctgatccgccagcgtcacatccgtgtcggcaagcagatcgtcaacgtcccatccttcatcgtccgtcttgactcgcagaagcacattgacttttccctcacc

SEQ ID NO: 212412 - DNA, 398 bp, Glycine max
  unsure (1)..(398): unsure at all n locations
ggtccttcaaccctttgatgaaaacaaattcaactttaccaaagttgggcaagaagaggtcctcttccaatttgaagctagcgaggatggacaagtccagttctttccaaatgctccagttgatgttgacaattctcccagctttgttgccatcaatgtcagtcctattgagtatgggcatgttttgctgattccgcgcattttcgagtgtttgcctcaaaggattgaccgtgagagcttcctccttgcacttcacatggcagtggaagctgataatccatattttcgattgggttacaacagtttgggtgcttttgcaaccattaaccatcttcacttncaggctttatatttggctctgcccttcccaattgagaaggccccactaagaaaaatgc

SEQ ID NO: 212413 - DNA, 373 bp, Glycine max; identical to SEQ ID NO: 212378

SEQ ID NO: 212414 - DNA, 424 bp, Glycine max
aaggactggtgaagatattggctgaaaaggagacagacaagatattgggagtgcacattatggcacccaatgcaggagagcttattcatgaagcagcaatagcactacagtatgatgcatctagtgaggacattgcacgtgtgtgccatgcacatccaacaatgagcgaggctgtgaaagaagccgcaatggccacttatgacaagcccattcacatttaaaaggagccggttgctacttcttgttttcatttttgtccaagaattttacaatgacttggagatgatacatcctgtgttaaatttagattcaggtttttaaatgcaaattagccccttgtttacttgtttgcataataagaggaatgattgtgttgttcttatccttgttgaataatatatatatctccccttctctctgggac

SEQ ID NO: 212415 - DNA, 569 bp, Glycine max
caaccaaccaacttcttaattaataactgtcgtcgtttcaatctcgttacacatctcaaaacgcagcagcagcacactcgacttaaaatgcaagccgtttcactctcacctttgtcgtctagggattcttccgacgagttcgctggaaagttcgaacacgatttcgtggctaagctcaaaatcaacgaaaacgaaaacgaagagaagcataacgaagatgaggtagaagaagaggaagagtttagcttcgttctcacgaattccgatggatcgccgatctccgccgaagacgcgttcgacaacggccatattcgtccgatttttccgattttcaaccaggatcttctgttctccgacgattacaacggcggcgacggtctccggctgccgataaaggtcttcgtcgaacacgcggatgtttctccgtcgccgtcggaggcgacgacgccggcggaaggaacatactgcgagtggaatccgaaagcggcggtgaagagcaactcgacgggattctcgaagctgtggaggttccgagacgtgaagctgcggagcaacagcgacggaaaaga

SEQ ID NO: 212416 - DNA, 494 bp, Glycine max
  unsure (1)..(494): unsure at all n locations
ttctggtgctcctgtttggaacaacaactcctctttaaccgttggagctagaggtccaattctgcttgaggattatcatcttgtggagaagcttgcaaactttgacagggaacgtatcccagaacgtgttgtccatgccaggggagctagtgcaaagggtttctttgaggtcacacatgacatttctcacctgacatgtgcagatttccttcgagcccctggagttcagacgcctgtaattgttcgtttctcaactgtcattcatgagcgtggtagccctgaaaccttgagggaccctcgaggttttgccgtgaagttttacaccagagagggtaactttgaccttgttggaaacaaccttcccgtcttctttgtacgtgacggcatgaaatttccagatatggttcatgctcttaaacccaatcccaagaaccacatncaagagaattggaggatccttgacttcttctctactttcagaaagccttcacatg

SEQ ID NO: 212417 - DNA, 583 bp, Glycine max
  unsure (1)..(583): unsure at all n locations
agaaaagttagggttcacaacttttccttttccttttgcttgcgaatctgaatcaaataatcaatcatccattcattattcatcatgtcgtcggcgaagaaaatcacgctgaagagttcggacggcgaggctttcgaggtggaggaggcggtggcgctggagtcgcagacgataaagcacatgatcgaggacgactgcgccgacagcggcatccctctgccgaacgtgacgagcaagatcctggcgaaggttatcgagtactgcaagaagcacgtcgaggccgcgaatcccgaagacaaaccctccgaggacgatctcaaggcctgggacgctgaattcgtcaaggtcgaccaggccacgctcttcgatctcatcctggctgctaactacttgaacatcaagagcctgctggaccttacatgtcaaactgtagccgacatgatcaaggggaagactccagaggaaattcgcaagacctttaacattaagaatgacttcacccctgaggagggaagaggagttcgtcgggaaaaaccatgggcatnntgatgattttgttaatctcaaaaaatctgaatcaaag

SEQ ID NO: 212418 - DNA, 561 bp, Glycine max
gtgaagttggagaatggaaggccgagcgcgagcgagttcgtagtcagcggaagcggaaacgcaattccgagttacgtcgtggcgccaaacgcgcgtgttcaggatttggttaaccgaaacgacactcgcctccggatattctccggcactgccaatccggctcttgctcaggaaattgcatgctacctgggcctggagctaggaaaaattaagataaagcgttttgctgatggtgagatatatgtccagctgcaagagagtgtcagggggtgtgatgtgtttcttgtgcagcccacatgtcctcctgcaaatgagaatcttatggagcttctcataatgattgatgcctgcaggagggcttcagccaaaaatattactgctgtcattccatattttggatatgccagagctgatagaaagacccaaggacgtgaatccattgctgccaagcttgtagcatatttaattacagaagcaggtgcaaatcgtgtacttgcttgtgacctccatactgggcagaccatgggctattttgatattgcagttgatcatgtgtatggc

SEQ ID NO: 212419 - DNA, 566 bp, Glycine max
ggggcaatgcctgaagggttaaaggatgcagagaagtgcattgaacttgatccaacctttgtaaagggttatacccggaaaggtgcagtccagtatttcatgaaggaatacgacaaggctttggagacatatagggaggggttgaaatatgactctaacaaccaggagttgcttgaaggcatcagaacatgcatacaacaaattaacaaggctagccgtggagacttaagtcctgacgaattgaaggagcgacaggccaaggcaatgcaggatccagaaattcagaacattcttcaagaccctgttatgagacaggtattgattgatttccaggaaaatcccaaggctgcacaggaacacacgaagaatccaatggtgatgaataagatccaaaagctggtcagtgctggaattgttcagatgaagtatgtttgtggcatgttgcagttcgtgtgaaaaagcaatcaagcaatcgataatgatgtcttagtgtgactattttgacattttaatagatgtgactgggaaaaaagtgggaaattttgagtgttttactttgtttgttt

SEQ ID NO: 212420 - DNA, 526 bp, Glycine max
ggggcaatgcctgaagggttaaaggatgcagagaagtgcattgaacttgatccaacctttgtaaagggttatacccggaaaggtgcagtccagtatttcatgaaggaatacgacaaggctttggagacatatagggaggggttgaaatatgactctaacaaccaggagttgcttgaaggcatcagaacatgcatacaacaaattaacaaggctagccgtggagacttaagtcctgacgaattgaaggagcgacaggccaaggcaatgcaggatccagaaattcagaacatccttcaagaccctgttatgagacaggtattgattgatttccaggaaaatcccaaggctgcacaggaacacacgaagaatccaatggtgatgaataagatccaaaagctggtcagtgctggaattgtccagatgaagtaagtttgtggcatgtggcagttcgtgtgaaaaagccatcaagcaatcgataatgatgtctcagtgtgactattttgacatttaaatagatgtgactggg

SEQ ID NO: 212421 - DNA, 513 bp, Glycine max
ttcgcccttttttttttttttttttttttttttttttttttgttagaaaaaagttttgccacatggctctttgaattttataactgatagcaaaagcaaagggctcacatacaatcatctttaacaacatacaaatcagtgtatgttccaaaaatgagaaagcaactagtaaaacaaaccactggcatagtgaatcttaatcctagcttgtcgaccagctgcatctcctttcatttccatgcatctacagaaatagtagagcttgttggtccagcatcttgggaaaagttctccatcgcctaaaatcattttttgttcagcacactccataatctatacacataatcacctttatctgaacctaacttcaaacagtgtatattttcctatcttaatggccaaattttacacagaaggctatgcatgcatcacatctattatttttcaatggttaagatacactctattcttaaaaaaatcatttcttaatttttctcccttgcccttcttgga

SEQ ID NO: 212422 - DNA, 532 bp, Glycine max
aattacacaatttacgtagttcgacagggtcgaaggctactagacgctgatggccatgttatgttgactgattttggcttagctaaacaatttgaagagagtactagatcaaattcgatgtgtggtacattagagtacatggcacctgaaattattcttggcaaaggccatgataaggctgctgattggtggagcgtaggtattctactgtttgagatgcttactggaaagccgcctttctgtggcggaaaccgtgacaaaattcagcagaagatagttaaagacaagattaagctgccagcatttttgtcaagtgaagcacattcactgttgaaagggctgctacagaaggaaccaggtaggcgcttaggttgtggaccccggtgtgttgaggaaattaaaagccacaagtggtttaaaccaatcaattggagaaagttggaagcacgagaaatccaaccaagctttaggccagaagtagctggtgtgcagtgtgttgccaactttgagaagcgctggactgatatgcctg

SEQ ID NO: 212423 - DNA, 520 bp, Glycine max
gctcagcctaaatcttttggaattagccaacattgatcattatcatgtctatggtttgttagcatcggtatgattcaaaattgctcttggctattacaatatgcgttcttcccatcatagatagttgaatgatttacattaacatttacgacaaaaagggggaagaaatcaagtttggctgatttacttttacaaggtttcatgaacttttcaaagctgataaagcttcctttgttgccgatgagataacagcgtctgaagcatttggcagataataatacttcccttgggcaactctagcaatctccttggcaaaacccgttgagacaaacttattttcagtgtcgatgacaaggagagacattcctgctttatatatctttccggccacctcaagaatttcatccttcaattcttgtgctgaaggttttggggcatcagtagctgcggcagctttagggtcagttgaccttttaatgatatattggctctgccatcagtgattgcaacaatcattata

SEQ ID NO: 212424 - DNA, 498 bp, Glycine max
caagattctataaaaactgctcttttacttggtgcaattgaccccggggttggaggaattgccatatcaggaaagcgaggaactgccaaaactgtaatggcacgtggattgcatgcaatactgcctcctattgaagtggtagaaggttccattgccaatgcggatccaacctgcccagaagagtgggaagatggtcttacagaatgcctggaatatgattctactggaaatattaaaactcgtattatcaagtctccctttgttcagattcctcttggagtcacagaggacagactcattggatcggttgatgttgaggagtctgtgaaaacaggcacaactgttttccagcctggtttacttgcagaagctcatagaggtgttttatatgttgatgaaattaatcttttggatgaaggtatcagtaatttgctcctcaatgtattgactgaaggagttaacactgtttgaagagaggggatcagtttaagcaccctt

SEQ ID NO: 212425 - DNA, 425 bp, Glycine max
gacataatctagtgacaaaaatatatatatcaaatttctagtataattgttttcattgctagtaaacataaggcaagttatatcattcaaaatatagctacaatgacgaactttattcttctcttccacgcacaattatatgacgtcccaggcccttcatgaaacgatgaagtgatggtaaaaagacaaagacaacttaggagaacaaacaagacagaatctaaaggacccaattattatgcataataaagaaccacttccttagttcaaacttcaaagctttgatgtttccctcgggtgatgcacgacaatgtaattataagcatccatagtgagaaaatcatcaagcattggtgacgtgcattggcgagtgaagatcttgcaagcctacttgtacattccctttttgaacttcttttgcccca

SEQ ID NO: 212426 - DNA, 526 bp, Glycine max
cttaattaattggattacaaggaacacatagtccacaacaatagcagcgaaacatgccgaaaaggtatataaatataaatactaacacatacaaacggcatttattgagatagctcaacgagttgcatgcatggagttatgggtacacaactaaaattgcaagaaatggataagttctttcaaattgatcgaaaatcacatccttatcgtactctttgcacgtctgcaactctaacaatcattctggggttggcaacaacattaaatatttggcctcatgctcagacgagatgctatcttttggcctagagaacggtcagcctgagaccagtaagatatccagacactgcggatttcatgggtgacccgtgggtcagataaagcatcaacccatcggcgattaaatctatcttgcctgtcaggtgcccaagatcggtatctctcttcgggctgcttaaagttgttctccttttcaattccacacttttcacgccttccactggagatagcatgaggtatggtgaac

SEQ ID NO: 212427 - DNA, 531 bp, Glycine max
  unsure (1)..(531): unsure at all n locations
cagagaaagaaaaccctagctcaccgtttcaagatgcaaatcttcgttaagaccctcactggtaagaccatcactctcgaagtcgagagttcagataccatagacaatgtaaaggccaaaattcaagacaaggaagggatcccaccagatcagcaacggctcatttttgctggcaagcagcttgaggatggacgtacccttgctgattataacatccaaaaggagtccactctccacttggttcttcgtctccgtggtgggatgcaaatctttgttaagaccttgacgggaaagacaatcacccttgaggtcgagagctccgacaccattgacaacgttaaggctaagattcaggacaaagagggtatccctccagatcaacagaggctgatctttgctggaaagcagcttgaggatggccgtacccttgctgattacaacatccagaaggagtccactcttcatttggtactccgtctacgtggtggaatgcaaatctttgntaagactctgaccggaaagacaatcacc

SEQ ID NO: 212428 - DNA, 526 bp, Glycine max
cacgaaccaaacagaatttataaaaagaccagaacaaacaacagtttttcaaaggccactattgaccatggaaacaatttaacaagagtaaacctttcaggaacattaaaaaaaaaaacccaaagatcttcggaacttccacatgcttagacttcaagacacctacagaacattctcagacttttaaaacccaccacgaagacgcaacacaaggtgaagagtagactctttctgaatgttgtagtcagcaagagtccttccatcctccaattgcttcccagcaaatatcaacctctgctggtctggtgggataccctccttgtcctggatttttgctttgacattatcgattgtgtctgagctttcaacttccaaggtaatagtcttgcctgtcaaagtcttcacaaagatctgcatacctcccctgagacgaaggacaaggtgaagggtggactccttttggatgttgtagtctgccagtgtacgtccatcttcaagctgctttccagcaaaaatcaacctttgc

SEQ ID NO: 212429 - DNA, 520 bp, Glycine max
gtttctcagacctccgcgccgccgctacctcctcctccatgccgtcgtcagcgcgtcccgtcaggatcattcctctccagcacccgaccgccacgacgtcgtcgtcatcgccgccgaacgctgcgttctcgcgctggacggcgaagctccggcgaatgacgtggatggagtggatcgagttcttcctcccttgcctccgctggattcgcatctacaaatggcgcgagtatttccaggtcgatctcatggccggaatcaccgtcggtgtcatgctcgttcctcagtcgatgtcctatgcaaaattggctggacttcaaccgatatatggactctactctggttttgtgcccctatttgtatatgccatatttgggtcttctcgccagcttgcagtaggtccggtggcattggtttctctcttggtctctaatgtgctaggtaacatagctgattcatccactgagttatacacagagctggcaatattactggtccttatggttgggataatggagtgcat

SEQ ID NO: 212430 - DNA, 535 bp, Glycine max
ggaagagtttgtggaatctagtgagagagagcagaggaaaaggggaagaaaaatgttgagtgcgacggcgatcggcgcgttattgggtttgggaacccagatgtactccaatgctctccgcaaactcccctacatgcgccatccgtgggagcacgtggtcggaatggggttgggcgcggtgtttgtgaaccagcttctgaaatgggaggcccaagtggagcaagacctcgacaagatgctcgaaaaggccaaggccgccaacgaaagacgttatatagatggagatgatgattaatgcatgtcttcatggattgtggcagttggtgaaaataatcatgaaatatgttgaacttgttgcctttgttttctgatttgatgatgttatgtttgtaaggctgttaaaactttttcgtgctaatcagccctatttttgcacaagtttttgcaagcagtgaaattggtgtagatgataatgttctggcctggtggcttcattgtaataagatatcacgatttctgggacttcattcgtctt

SEQ ID NO: 212431 - DNA, 508 bp, Glycine max
tcgtccttttttttttttttttttttttttttttttttttttttttttttttttttttttttttttttttttttttttttttttttttttttgggccaaaaaaccttaacaaggttaaaggcccccgggggttaaagggaaaaaaaaaaccaaggggaaaaaaaaaaccccgaaaaaaaaaagagcccttttaaaaaaaaattcccccattaaaaaagaggaaccaaattgggacaaaaccggggaaataaaaggaggggggggggggtcaaaagggaacctggggcccccaaggggaaaaattgggccccccaaaagggggggggttttttcttgggccccaaaaaaagggggggccaacaacaaatggctccaaggggtttgccacggtaccccccccggggggtttaaaaaacccggaggggggggggaaaccgcccggggaaaaccctactatcccaaatttcgcacctttcccataccgggaaaaaaagcctttctttttttt

SEQ ID NO: 212432 - DNA, 451 bp, Glycine max
ttcgtccttttttttttttttttttagcaaagacaatgctatcttataactgatatttgaagcgggagcatcaatacaatacaatatgtaactatgaactatcaatatatgatcgttattatgtctgtgatacacacaattaaggccataatatacttatgtgatttacaacaacttctagcttattttatacatcatgccaacccaactaggagcaattttcatcatacaattacacttatctttaatcatcattcatcaatactggcatcagcaatacgctctaaattctgaagcatgacaaggtggtagtcaccagggaccatattgttatgcaatttatgccacaattggataagatgcacaagttgcaacaccacacatgttctttcccaattccatcttgaagtagccattttcaccccagctttcttcccatgaattttttatg

SEQ ID NO: 212433 - DNA, 569 bp, Glycine max
aactcacattcccataaagttgagaaatatgagaattccaagcaattgcgagttcacacgaatcacgccctctgctttcagctaccaccgtctcaaatcctacgtttccgactgcagagccgtgcttctcccctcattcggcggcccgcacgtgctccagcttcgctcgcacgtgccagtccctccgctcaagcctcacgatgtcctcgttcgtgcgcgcgccgtctccgtcaaccccttggacacccgaatgcgtgctggctacgggcgttccatcttcgagccgctgttgcctctcattttggggcgcgacgtcagcggcgaggtttcggcggtcggagataaggtgaggtcggtgagtgtgggagaacaggttttcggggcactgcatcccactgccgtgagaggcacttactcggattacgcgattctctccgaagaggaggttactccgaaaccggattcacttactcatgtggaagccagtgccattccttttgctgcattgacagcttggcgtgctctaaaagtacagctagataagcgaggacaacggatttagtagtcgg

SEQ ID NO: 212434 - DNA, 501 bp, Glycine max
atgtcccaaatagaatataccacttataaataaagtaatttattttctgcatacatgacagctcaatacatttgtaaattgtagagagtcgcaaggcacataaataagtgactgaacccacaacctgcaaagttgacacaattcctaagggcacaagaaaatgtttaatgttggcatcttgagccaacgccatatcaagctgtctagttagtaagcagggctattcctttgaagaaaagaggctgcaggcctcacataagagaaatccttaaaggggtttccgccatttgggctggcagcaggtgagtcaacaacaggcatatcagtccagcgcttctcaaagttggcaacacactgcacaccagctacttctggcctaaagcttggttggatttcttgtgcttccaactttttccaattgaatggcttaaaccacttgtggcatttaatttcctaaacaccccggggaccacatcctaagcgcctacctggatccttctg

SEQ ID NO: 212435 - DNA, 507 bp, Glycine max
tgatattggaatagtctttctctgaaccccatttttgcaaaaaggaagaaagagaaagagagagagagagagagagaagagatatacactgccaagaagaagaacatgaaaattcagtgcgatgtgtgtgagaaagccccggcaaccgtgatttgctgcgcagatgaggcagctttgtgtgccaaatgtgacgttgaagttcatgctgcaaacaagcttgcaagcaagcaccagaggcttctccttcaatctttatctaacaagcttcccagatgtgacatatgtcaagataagccagctttcatattttgtgttgaggacagagcactcttctgtaaagactgtgatgaacctattcatttagccagtagcctttctgcaaaccaccagcgcttccttgctactggtatccgggtggctttgggttctaattgcaccaaaggcaatgaaaaaggtcacgtggaaccatctaaaccaaaagcacaagaagttcctgcgaaaattcct

SEQ ID NO: 212436 - DNA, 560 bp, Glycine max
aacaaatacaaacggcatttattgagataggtcaacgagttgcattcatggagttatgggtacacacaacataatattgcacgaaaaggtttagttctttcacgtaatccattatcacattcttaccgtactctttgctcgtctgcaactctaacaatcattctggagatggcaactacattaaatatttggcctcacgctgagatgagaagctatctttcggcctagagaacggtcagcctgagaccagtatgatatccagacactgcggatctcatgggtgacccgtgggtcagataaagcatcaacccatcggcgagcaaatctatcttgcctgtcaggtgcccaagaccggtatctctccgggctgcttgaagttgttctccttctcaattccacactattcacgccttccactgcagatagcaggaggtatggggaacctttctgcatgacgaacaggatcataccttgaagggaagtaattgacctccttatccctgtgaatgaaattcatgaaaccttcatgatgattattgtggtgagcacacttgggagca

SEQ ID NO: 212437 - DNA, 528 bp, Glycine max
  unsure (1)..(528): unsure at all n locations
cagagaaagaaaaccctagctcaccgtttcaagatgcaaatcttcgttaagaccctcactggtaagaccatcactctcgaagtcgagagttcagataccatagacaatgtaaaggccaaaattcaagacaaggaagggatcccaccagatcagcaacggctcatttttgctggcaagcagcttgaggatggacgtacccttgctgattataacatccaaaaggagtccactctccacttggttcttcgtctccgtggtgggatgcaaatctttgttaagaccttgacgggaaagacaatcacccttgaggtcgagagctccgacaccattgacaacgttaaggctaagattcaggacaaagagggtatccctccagatcaacagaggctgatctttgctggaaagcagcttgaggatggccgtacccttgctgattacaacatccagaaggagtccactcttcatttggtactccgtctacgtggtggaatgcannatcttgttaagactctgaccggaaagacaatc

SEQ ID NO: 212438 - DNA, 530 bp, Glycine max
gataacaaacagtagtaacattaatgggacaatagagttcaacacaaaccaaacttattttcaaaggtcattacagacccattacacatcacatttcttcttaacacgtatgggaaaatccaacatcgaacatgacacagaaatccgctccagcttaaatcccctcacgaagacgcagcaccaagtgcaaagttgactccttatggatgttgtagacagcgagggtccttccatcctctagctgtttgccagcaaaaataagcctctgctggtccggtgggattccttccttgacctggatcttcgccttcacattgtcaatggtgtctgagctctccacctcgagggtaatagtcttacccgtaagggtcttgacgaagatctgcataccaccacgaagacgcaacaccaagtggagagttgactccttctggatgttgtagtcagcaagggtacgtccgtactcgagctgcttgccggcgaagatcagcctatgctggtctggggggataccctccttgacctggatc

SEQ ID NO: 212439 - DNA, 607 bp, Glycine max
cctccttaccagcacaagggttatggtcgattccttctagaggtgctatatgatgttgctatatctgaaaatgtttttgacttcacggtagaagagccattagatcacttccaacatgttcgtacttgtgttgactcacttcgcctgcttcagttttacccaattcagaatatagttactaaagctgtttcacttctgaagcaaggaaagttatcaaagaaagcaaattgtcctcgacttttgccacctcccagcgcaattgaggatgttaggaaaagtctgaaaattaacaagcagcagtttctccagtgttgggaggttttgatctacattggccttaatcctgttgacaagaacacggagaactttgttagtattattttgaaccgtgttaagtatgatatcttagggaaagattctgggacgtctgggaagcagcttattgaagtaccaagtgatgttgatcaggagatgtcatttgtcatgttcagatcagaagccaacgaagctagtagtgtgcaaatggatgacaatcaggctaatcaagaagagcaactccagaggttagttcagggaagggtgaaagaaatcagttgattgcggaaaa

SEQ ID NO: 212440 - DNA, 465 bp, Glycine max
tttagaatcagctctcactctcttcgcacctcaacggttctctgcaaaagcaccaatctccatcaagctccatgcttccacctcccatatcttctcttccaagtccttcttcaaaaccggaagactctgcttccagttatgctccactctgcaagaggtaacaccaacagagcaaacacttgagcctatccaaccaacagacaacgtaaagaagctctacgtagttaacttgtcttggtctctgacggcggcagacatcactgacctctttgcccaatgcggaaccgtaactgacgtcgagataataaagagcaaagatgggaggagcaagggctatgccttcgttactatggcttccggggaagaagctcaagctgctgttgataaatttgactcttatgaattatcaggacggataatacgggtagaacttgcaaagagattaaaaaaaccttcttctctttc

SEQ ID NO: 212441 - DNA, 556 bp, Glycine max
  unsure (1)..(556): unsure at all n locations
ctgctatctaaaacagcttctagatactggattttttcatgctgatccacacccgggaaatttgatccgcactcctgatggaaaacttgccatacttgactttgggcttgttacaaaactgactgatgatcaaaagtatggaatgatcgaagcaattgctcatctcatccatcgggattatccagccatagtaaaagactttgttaaacttggttttattcccgatggagtcaatttggagcctatcttaccagttcttgccaaggtttttgatcaggccttagaaggtggaggggcaaaaaacatcaattttcaggagctggcatcagatttagctcaaattacctttgattatccttttaggatacccccatactttgcccttataattagagctattggggttctggaagggatagctntagtaggaaattctgaatttgccaattgtgacgaggcttatccttatattgcacagaggctcctcacagatgaatctcctcggctaaaggatgctctgcgttacactatatatgggaaatctggggttttgatg

SEQ ID NO: 212442 - DNA, 303 bp, Glycine max
atatggggtataagaaaattaaaatattaagacaaagatataataatataaaaaaaaaaaaattagagaatataaacttaattaagaaaaaaataagaagtaaaaaatagaaaagattaagatattaaaagaaagaaaaatattaataacaaagggatgatgggggagaaaaaaaaaaatattaaaaatgaagaggggaaaaaaaaaagaaggaaaaaggggaataaaaaaaacttaagtggaaaaagccggaaaaaaatattaggaatcaaaacaaattattgaaaaaaaggggggggggag

SEQ ID NO: 212443 - DNA, 502 bp, Glycine max
atgctcagtggtcgcccttttttttttttttttttttgccaaaaaggacaataaagtttctagccttattttatatattgctggattgatgtttttagctacattggtatgtgccagagataacatatataacaagtgtatgtattatagcataatccttagtttaggggcaaaaatgttcctccaacatgaaggttttaaaaacttgaccaagtcctttcccttgcacagaccataatatcactcatcaggatgaaagcactccatattgatcagtctgcttaggtagtgtagaagccaagaatttaccattggtacttagcagcaacaagaacctcctcatactgctgagcagcattgtcccaactaagatcctgcgtcatccctcgccgttgaagcccttcccagctctgcttatactgcctgaaggtcaacaagcagttccctatcgcgtttattaacttgttagtttctgcactgtcaaatgtccatccaaggcctg

SEQ ID NO: 212444 - DNA, 512 bp, Glycine max
  unsure (1)..(512): unsure at all n locations
gctccctttgtcaaaacaggtggtcttggagatgttgttggatcattacctaaggctttggctaggcgtggacacagagttatggttgtagtacctcggtatagtcattatgctgaagcacaagatttaggagtacggaaacgatacaaagtagatggtcaggacatggaagtaacatatttccactcttatatcgatggtgttgacttcgtttttattgacagtccaaacttccgccatttacaggataacatatacaggggaagccgagaggatattctaaaacgcatggtgttgttttgcaaggcagctgctgaggttccttggcatgttccatgtggtggtgtttgctatggagatggaaatttggccttcatcgcaaatgattggcatactgctttgctgccagtgtatctgaaagcctattatcgtgaccatggtataatgaagtacacangatctgttcttgtgattcataacatagcacaccaggggtcggggccccgtgatga

SEQ ID NO: 212445 - DNA, 505 bp, Glycine max
aagacgtaatggagtcacagatatcgggataatcttattaccaatgaacccaccaatgcatgacataatcatttactgcagttcaactgattgctgaaacttgtgcgaagaaatgagactattttcacgaacaaggtttaacaggcttacgaacataacatcatcaaattagataacaaagggatcaggttcaacatatttcatgattattttcaccaactgccacaatccatgaagacatgcattaatcatcatctccatctatataacgtctttcgttggcggccttggccttttcgagcatcttgtcgaggtcttgctccacttgggcctcccatttcagaagctggttcacaaacaccgggcccaaccccattccgaccacgtgctcccacggatggcgcatgtaggggagtttgcggagagcattggagtacatctgggttcccaaacccaataacgcgccgatcgccgtcgcactcaacatttttcttccccttttcct

SEQ ID NO: 212446 - DNA, 529 bp, Glycine max
  unsure (1)..(529): unsure at all n locations
ctccttaatttctctcttcacttatcatcatacttatatattatataacccaataattaaattaaatacatgttagcactttaacattcctttctctaacctcgttcccactctcatattttcccttctgctgatattcagctaaactaagtcaataagatgactcagggaaagatagttgaagctgcagaagctcataaaacacttgaggatttcgatcctccaaagaagcgcaaaaggaacaagtatgcttttgcttgtgctgtgctggcctccatgacttccatcttgcttggctacgatattggtgtgatgagtggagcagccttgtacataaaaagggacctgaaagtgtcggatgtgcaaatcgagatcctgctcggaatcatcaacctctactctctgataggctcatgcctcgccggcagaacctncgactggataggtcggcgttacacgattgttttcgccggcgccatcttctttgtcggagcacttcttatgggtttcttccccaactattcctttc

SEQ ID NO: 212447 - DNA, 579 bp, Glycine max
atattcccgaatcgcgtactcggtggccgccctttttttttttttttttaagcctgaaattcatgtatatgcaatgtaggaatcagaatctcactataaatatattacagaggaagtcatataactgatgtttttcatttaataagagtgcatgatgctatctctgctgacaaataacaattgggttttttacttggtcaaatccatgctgaaatcccataggttttttgccaaatcagcatcagtcccctgtgaggttgttttggccacattactggctgaaaaatacttgccactagttcccttcacttgtgggtgcaatgctacatagcatgttgttgctgctccctgctggacatttttaagcacgagtcttgcaatagctttagttagaccgttcactggactgatatgacgggaaagattggtggcaattactcctggatgaagagaatttgcagaaatatctaccccatctttcttgagacgtcttgtaagttcatttgcatgtaaaatgttggcaagctttgactgcccatatgcacgccaattgctgaaacttgattcatcggtaatttt

SEQ ID NO: 212448 - DNA, 515 bp, Glycine max
ctttcagctgcacaagagtctccaatcccaactctctctctctctccacttgccaaaggaaaaaggctaaagagaaacccacacacacacacacacacagaaatatgtcttccccaagcaagcgccgagagatggacttgatgaaactgatgatgagtgattacaaggtcgagatgattaatgatggaatgcaagaattttatgtgcaattccatggacccaatgacagtccttatcatggtggtgtgtggaaagtaagagttgagttgccggatgcttatccttacaaatctccttccattggatttatcaacaagatctatcacccgaatgttgatgagatgtcaggatcagtttgtctggatgttatcaatcaaacctggagccccatgttcgatctttaatgtgtttgaagtgtatctacctcaacttctgctgtatcccaatccatcagaccccttgaatggagaagctgccgctttaatgatgcgtgaccgaccaagttacgaacaaag

SEQ ID NO: 212449 - DNA, 560 bp, Glycine max
aacaaatacaaacggcatttattgagataggtcaacgagttgcattcatggagttatgggtacacacaacataatattgcaagaaatggattagttctttcaggtaatccaaaatcacatccttatcgtactctttgcacgtctgcatctctaacaatcattctggagttggcaacaacattaaatatttggcctcgtgctgagatgagaagctatcttttggcctagagaacggtcagcctgagaccagtatgatatccagacactgcggatctcatgggtgacccgtgggtcagataaagcatcaacccatcggcgagcaaatctatcttgcctgtcaggtgcccaagaccggtatctctccgggctgcttgaagttgttctccttctcaattccacacttttcacgccttccactgcagatagcaggaggtatggggaacctttctgcatgacgaacaggatcataccttgaagggaagtaattgacctcctcatccctgtgaattgaattcatgaaaccttcatgatgatttttgaggtgagcacacttgggagca

SEQ ID NO: 212450 - DNA, 567 bp, Glycine max
aaaccctgttttatttataatttgtccctataaacatttgacaaagaccgatgccactgcaacccttgactactttggaaaatagactagtgaattttgtcacattatcaaattagaggacagatggaatactcctataatatgtacaacgataattttatgtgcagtcaaaaccacttctattcagattgcaggtgtgttcattcaccaagtaccaaaactgcagccaatgtgttcttgagtgatgacttcaagacgatctttcatgacagccatagatgaataagctgggaaacacagccggaaaaagcatgtgtgagatgaaggcaggcgatcaccaggttcaagggatctgtatatgtagagtcgggaagccaaaccacggaaaccttcaactggtaaatattttacagatgtccaaaagaataaaagaaccttcctttgatctgctgtcattcttccaacaatctcccaaaaccaagatatctgaatatctgtctctttatagccattatactagtgtgcgctttccaatcttcaacagaaatggtatcttcactcccatgc

SEQ ID NO: 212451 - DNA, 517 bp, Glycine max
gtaaaaagcaagtaacattaagttggattcggatacacaagataattcacattatctgaagtacttcaccaaacacaaatctaaaaactctcaaaagtcatttcgttctttgacgctcactttccggggacgaagttggtggcataggcccaggcgttgttgttgacagggtcagcaaggtgatcggcgaggttctccaatggaccctttccggtgacaatggcctgaacaaagaagccaaacatagagaacatggccaatcgtccgatcttgagttccttcagcttaagctcatgaaaagcctgtgggtcatgatcaaggcccattgggaccaatctgccacactttgtgtacagtgttaccgactttactcgggtgacaaaccccacaaacgtactccagatatgtggctcatacgaatgctggttcattctcaagtgagtgaatgcacacatctctcttccaccagagtcaccatcaacatccaactgtgatgcccttatgatctggtcatgag

SEQ ID NO: 212452 - DNA, 517 bp, Glycine max
ttcaaaacactcataacacaaagcacaaagcaaagctcatccttgagttaaaaaatggcagcagcttcttccatggctctctcatccccatccttggctggcaaggccgtgaagctgggcccatcagccccagaagtgggaagggtgagcatgaggaagaccgtcaccaagcaggtctcctcaggaagcccatggtacggcccagaccgagtcaagtacttgggcccattctctggcgagcccccgtcctacctaaccggtgagttcccaggcgactacggctgggacactgctgggctttccgcagacccagaaaccttcgccaagaaccgtgaactcgaagtgatccactccaggtgggccatgctcggagccttgggctgcgtcttcccggagttgctgtcccgcaacggggtgaagttcggagaagccgtgtggttcaaggccgggtcccagatcttcagcgagggtgggctcgactacttgggcaacccaagcctgatccacgcccagagca

SEQ ID NO: 212453 - DNA, 510 bp, Glycine max
ggggtaacttgacactcgtactactgtcaagttctgatcttcgtctctcattcattggggatgatggtagaacagagagattattcacccttaccaacaaatcccaatgctctgctgttgtggttgatgaaatcccaactgatagttctggccgatcgttccttgtaaggactccagatagcagagctttttatttctggtgctctgaaaagtctaagcttttgggaattgaattgcttggaaaggtaattttagctattcttcttgattgaattacttggaaaggtagtgtttgatattgaatttattctgctttcttcgtcgattctcctcgattttattggtgttttgaatatatttaatgattgatattgtgtcatcaaactcatttttgttcaaatcagatgaaggatttgctcaagaggaaaccattcattgttgagctgagtggcattagcaagtcacgacttgactgctttgctactcatctttcggcttttctagtgggga

SEQ ID NO: 212454 - DNA, 559 bp, Glycine max
tgaagaagcttcagcttcaaacaaagtcagcataatgaagctgctgaaaaccaaaactgtgagaagaggtttatatgctggaatgggccttcaaatcttccaacaatttgtggggattaacactgttatgtactacagccccacaattgtgcaattagctggttttgcatcaaatagggttgcactacttctatcacttgtcactgcagggcttaatgcatttggttccattttaagcatatatttcattgacaagactgggaggaggaagcttttgttgtttagtttgtgtggtgttgtggtctcacttgttgttttgaccgtggcttttcatgagactaccactcactcccctatggtcagcacaatcgaaacctctcacttcaacaacacatgccctgattacagcactgctttcaaccctggtgaatgggattgcatgaaatgcctcaaggcctctccagaatgtggcttttgtgcctctagagctaataagctcttacctggggcatgcttgattcccatgacacaacagataatcaatgtcaaaaagaggaca

SEQ ID NO: 212455 - DNA, 363 bp, Glycine max
attgaaagtactaaattcattaaaacatgattgcaaattgtacacattcatagtcttttcaaggtccgctaatggacccgggatgcacacatacacaaagttcaggaacatataaaaagaaaagaccagattatagactttcacatacttcagttcacaccaaacaagggacctgcagaccattctcaaactcaaaacccaccacgaagacgcaagacaaggtgaagagtagactctttctgaatgttgtagtcaggaagagtccttccatcctccagttgcttcccagcaaagatcaacctctgttggtctggggggataccttccttgtcctgtatttatggcttgacattatcaattgtg

SEQ ID NO: 212456 - DNA, 491 bp, Glycine max
gaatggaatgtcttgtatatacaataaacgacatggtacgatgcaaactatgtggatcaatttacactttgcctatggggcgtctacttaatataacccagctgatttgcgaagcacatctatgaaagtgtctgtgtagtctcactgagacatcattatcgattgctcgattggtttttcacacgaactgccacctgtcacaaacttacttcatctggacattttcagcgctgaccagcttttggatcttattcatcaccattggattcttcgtgtgttcctgtgcagccttgggattttcctggaaatcaatcaatacctgtctcataacagggtcttgaaggatgttctgaatttctggatcctgcattgccttggcctgtcgctccttcaattcgtcaggacttaagtctccacggctagccttgttaatttgttggatgcatgttctgatgccttcaagcaactcctggttggtagagtcatatttc

SEQ ID NO: 212457 - DNA, 520 bp, Glycine max
  unsure (1)..(520): unsure at all n locations
agaaaaagtagttgtcaaagttcaaaggcctggcctaaagaagctttttgacattgacttgcaaaacttaaagctgattgcagaatattttcagagaagtgaaactctaggtggtccaacgagagattgggttggtatatatgaagaatgtgcaacgattttgtatcaagaaatagattatataaatgaaggaagaatgctgataggttccgccgagattttcgaaacataaagtgggtccgagtacctctggtttattgggattatactgcatcaaaggtgttgacattggagtatgcaccaggtatcaaaataaatgaagtggatatgttagcttcacgtggttatgatcgattacgaatctcatctcacactattgaggcatacttgattcagatattgagaacgggtttctttcatgctgatccacatcctggaaatcttgctgttgatgttgacgaagcaattatttattatgactntggcatgatgggggagataaaatttttacccgagagag

SEQ ID NO: 212458 - DNA, 435 bp, Glycine max
agaaaagctacaagagaagaaaaaaaaaaagagagaaaagaaaaaatttgttttataactttttaacttattgttcacttcttcttcttcttcttcttcaatatcttggttctttgatattattctattgagcaaaaaatgggagttccagagagagaccctcttgcacaattgagtttgcctcctgggtttaggttttaccccacagatgaggagcttttggttcagtacctttgccgcaaggttgctggccatcatttctctcttccaatcattgctgaagttgatttgtacaagtttgatccatgggttcttccaggtaaggcagtgtttggagagaaggagtggtacttttttagcccaagagacaggaagtacccgaatggttcacgacccaacagagtcgcgggttctgggtattggaaagcaacttgg

SEQ ID NO: 212459 - DNA, 350 bp, Glycine max
cgtcgtcctttttttttttttttttttttttttttttttttttttttttttttttttttgttttttttttttttttttttttttttttttttttttttaaaaaaaaaaacccggggggccttcccaaaaatacccaaaaaaaaagcccaaagggaaattccctggggcaacaaaatgtaaaggggaaaaccccccccccgggcccgggggaaaacacccccaaacctacaaatacacttattttctaacaacattcctccataaaaacaaaaccttttcccccccccccctcttttcaagagggggaggcaaactacacagaacaggcatttgaccaaaaaatgcccccg

SEQ ID NO: 212460 - DNA, 461 bp, Glycine max
tgaagattccacaacagtgggagggagatccaaaaagagagagtggaaaagatggcgcggttgatcacagtggtgtggtgcgcggtggcggtgctattatgcgccgcggccggtgcgtcgtgggtggaggaggcggcgaacccgatacgaatggtgtctggcgtggaggcggaggtggttcgggtgatcggggagtgccggcgtgcgttgaagtttgctaggttcgtgagcaggttcgggaagagttaccaaagcgaggaagagatgaaggagaggtacgagatattctcgcagaatctcaggttcatccgctcccacaacaaggaagcgtttgccctatactctctctgttaatcatttgctgattggacttgggaagaagttcaaaggacacagactaggagctgcccaaaattgctctgccattctaaacggcaaccacaagctcaccgatgctgttc

SEQ ID NO: 212461 - DNA, 521 bp, Glycine max
gacctactcggtggccgccctttttttttttttttttaagcctgaaattcatgtatatgcaatgtaggaatcagaatctcactataaatatattacagaggaagtcatattactgatgtttttcatttaataagagtgcatgatgctatctctgctgacaaataacaattgggtcttttacttggtcaaatccatgctgaaatcccataggttttttgccaaatcagcatcagtcccctgtgaggttgttttggccacattactggctgaaaaatacttgccactagttcccttcacttgtgggtgcaatgctacatagcatgttgttgctgctccctgctggacatttttaagcacgagtcttgcaatagctttagttagaccgttcactggactgatttgacgggaaagattggtggcaattactcctggatgaagagaatttgcagaaatatctaccccatcttccttgagacgtcttgtaagttcatttgcatgtaaaatgttggcaagctttgact

SEQ ID NO: 212462 - DNA, 610 bp, Glycine max
  unsure (1)..(610): unsure at all n locations
ggctgattccacagacacacaccgctttactattatgcaagacccttctcgccccggccctcctcccttctaccaccaaaacggcggccagcctcctccccccgccgcctccgccgccatcgccaccggctacccctacgctgcccaacaacaatactacaacaccacttaccctcctcctcgctcctacgcctcccgctccttcttccgcgctttcttcgccaccatgatctgcctcgccgtcgtcttcggcgtcgtcctcatcatcacctggctcgtcctccgcccctccctcccccacttcaccctccactccctctccgtttccaacctctccagcacctcccaatccctctccgccacgtggcacctctccttcctcgtccgcaacggcaacaagaagatgaccgtctcctacaacgccctccgctcttccatcttctaccgccaaaactacatctccgagtctcagctcgctcccttcaggcaggacaccaggtcccagaccacactcaatgccaccctcaccgncgncggcacctacctcgagcccaaactggatcgacatctcaacgccgagaggaacgccagctcggtcctcttcgacgtt

SEQ ID NO: 212463 - DNA, 645 bp, Glycine max
  unsure (1)..(645): unsure at all n locations
aaagggagcaatggaaatcttaagacttccttttgtgctgatcaatcaaggtcttctcaggcaaatgatgtccgcaagcaaatcgttggcagcgctgttccagttcttaaaggcgaaaagttttccttgcggatactggtggaccattctattgttgaaagctttgctcaaggtggaaggacggttgtgacatctcgggtttatccaacaaaggcaatctatggagctgctaggttgttcttgttcaacaatgctaccgaggccactgtgacagcctcactaaaagtttggcaaatgaattctgcatttatacgcccattccaccctgatcagaagagttaaaaatttgaattggagatagaagagctatagtcacaaaggattggaatacatcttgggttggcaatttgtacttatcagttgtaatgtcctcccctgaataaccgacataaggttatggttcttgctcaaagcgcattccttcatttttgcccagttatgtttatcagaattnttggtgtaatnttatcatatcatgtgatatgatgcttacangagaatctgttcaaagaaatatgatgttaatggtatcccattctatgctaaaaatatttacttatgggaaaagtttggttttgttctgtc

SEQ ID NO: 212464 - DNA, 554 bp, Glycine max
gacagaaacaaaaaccaaacttttccatatgtaaatatttttagcatagaattggataacattaacatcatatttctttgaacagattctcttgtaagcatcatttcacatgatatgataaaattacaacaaaaattctgataaacataactgggcaaaaatgaaggaatgcgctttgagcaagaaccataaccttatgtcggttattcaggggaggacattacaactgataagtacaaattgccaacccaagatgtattccaatcctttgtgactatagctcttctatctccaattcaaatttttaactcttctgatcagggtggaatgggcgtataaatgcagaattcatttgccaaacttttagtgaggctgtcacagtggcctcggtagcattgttgaacaagaacaacctagcagctccatagattgcctttgttggataaacccgagatgtcacaaccgtccttccaccttgagcaaagctttcaacaatagaatggtccaccagtatccgcaaggaaaacttttcgcctttagaaactgaacagcgc

SEQ ID NO: 212465 - DNA, 479 bp, Glycine max
ctctgtctctctctctccaccattgccatggatccttacaagctccggccatccagcgccttcaattctcccttctggactacaaattctggtgctcctgtttggaacaacaactcctctttaaccgttggagctagaggtccaattctgcttgaggattatcatcttgtggagaagcttgcaaactttgacagggaacgtatcccagaacgtgttgtccatgccaggggagctagtgcaaagggtttctttgaggtcacacatgacatttctcacctgacatgtgcagatttccttcgagcccctggagttcagacgcctgtaattgttcgtttctcaactgtcattcatgagcgtggtagccctgaaaccttgagggaccctcgaggttttgccgtgaagttttacaccagagagggtaactttgaccttgttggaaacaaccttaccgtcttttctgtacgtgacggcatgaaatt

SEQ ID NO: 212466 - DNA, 437 bp, Glycine max
gtcgaatgtttctagttgttttacatgtcatttcttacagctgccacactcatagtgaactaaatattgtcacactattgatcatacgaaatggtacgaaagagtacgttgagtgttatggctacgtaaagaatatgtagaataacatataatacattcagtggaacttgagactggtcaagatgttgttgtgcacggtgtcagtcaaatgatctaggaggttttggtatgggccaacacctgtgacatgagcttgtacacagcagcccaagattgccaacatagccaaccttacattcttaactggcttgagctccaaattcttcaaggacttctcatgcttaccaaagcctatagggttgaagaaagtgccttctggataagctggctcatcagatcctccaagacccttttctagtcctaggaagtattgcttg

SEQ ID NO: 212467 - DNA, 573 bp, Glycine max
gggtgaggatggtgaggacggtgaagaagaacaagctgtgattggattatggagtggcattgcttggttggtagggatgactgagttcattgctgtgttgtctgaatatgtggtggatacaattgaggatgcatcagattcgtggggtttgtctgtgagctttctcagcataatcttgctaccaatagttggaaatgcagctgaacatgcaggagcaatcatatttgctttcaagaacaagctggtgagaacttgggagagtgctataaacttttcacacttgccctcatttaacataatattcatattggccaagcaatattttttttaattaattaaaatgttaaactaaagtaatgccttgaccacaggacatttcattgggtgttgcattgggttcagcaactcagattgccatgtttgtggtacgatacacacacctttaatatgtacacggacactttcataatttcatttagttactttttgttcccttctttaatgaaagcttatgcaattacacaatataggtcccattatgtgtaatcgttgcttggataatggtatcgatat

SEQ ID NO: 212468 - DNA, 385 bp, Glycine max
taggccggccgccgcccttttttttgtttttttttttttttcttttgttttttactttttttatttttttttttttttctttttctttttttttctttttcttccaagggaatatatatggtgctggcctttcaggggacccccaaatattttaaaagatggacaagccccctggtttctacctgaacggccttacaaagtccccccacaggatccccagggcaaacacgcccacagactgtgaattgtccaaaagtggaaggtcttcacagccccgattggggccccaaaaaatgtatttgggagatctttttaacaagggggcatccacttgcccaaacggaagtcccccggtgacgggtactccccccctgacattcacggg

SEQ ID NO: 212469 - DNA, 497 bp, Glycine max
aattaacagttattcttttttttttttttttttttttttttttttttttttttttttttttttttttttttttgggtaaaaaacttttaaaaggtttatggcccctggggttttaaggggaaaaaaaacccagggggaaaaaaaaaaccccggtaaaaaaaagaagcctttttaaaaaaattctcgccatttgaaaaaaggaccctaatgggaaacgatgccgggaactaaaaatggaggggggggatgcaaacttgcatatgggcacaacctgctctaaatggtcactcctcaactgtggttgtgtctccacagaggaatccataactttaccattgaaaggctggatctgcctttgattctgctctaatacttctgcaacagtttgaagatcactggctgggtttatgccagaaccttgagcaacatcttgcattgtgtatattactgtgtcgctgtcaaattcaagatatacgcctgaatgatccttcatagag

SEQ ID NO: 212470 - DNA, 354 bp, Glycine max
caccacaataagccattgaaatataaatggactgcacctgatattcgtaaattatatgaattcactaaaacaaaacaaaggtaaaaacaactcaaaatttcccaacttttttcccagtcacatctatttaaatgtcaaaatagtcacactgagacatcattatcgattgcttgattgctttttcacacgaactgccacctgccacaaacttacttcatctggacaattccagcactgaccagcttttggatcttattcatcaccattggattcttcgtgtgtccctgtgcaaccttgggattctcctggaaactaatctatacctgttatataacagggtctcgaaggatgccc

SEQ ID NO: 212471 - DNA, 564 bp, Glycine max
agcagcagagtcgttgaatggggttaaaatggaattggtggatgctgcattccctcttcttaaaggtgttgttgctacaaccgatgtggttgaggcatgcactggggtcaatattgcagtgatggttggtggattccctagaaaagaaggtatggagaggaaggatgtgatgactaagaacgtctccatttacaagtcccaggcttctgcccttgaaaagcatgctgctgccaactgcaaggttcttgttgttgctaacccagcaaacaccaatgcattgatcttgaaagaatttgctccatctattcccgagaaaaacatttcttgtttgactagattggaccacaatagggcactgggccaaatttctgagagactgaacattcaggtttctgatgtaaagaatgtcattatctggggcaatcactcatcaacccaatatcctgatgttaaccatgcaactgttggggagaagcccgtccgcgagcttatagctgatgatgcctggttgaatggtgaattcattactactgttcaacaacgtggtgctgcaattatcaaagc

SEQ ID NO: 212472 - DNA, 524 bp, Glycine max
gcgtaatagcagtgcataatactctacgtatgagtttgcacgcttgggcatcccacatacatcaagaaatcttgtacagccaccacaagcacagcaaaaagttctagccataaaaaaggggcactaacacataaaattagaggactgatccaaaattcaatatgcggaccatgggctaattgcatgactaaaactgtaaagctcaaatatactatcctcctaaaaggattagatgttgaaatacaagtaattccaatgaaagacaaactctctcgagtgatagttccttggaatcttagaaggagcattatgcaaaattgaagctacacttctgtgggcaaaccatgggaacctactaacaaggacagtagccaataaggagcgatggtctctaatttaggcatgagtaagccaatgccttctcctcagaaagctcttctgcggtcaagtccaacttcttcctagagaactcatcaatgggaagtccttgaactattgcacattccccattggcacaagtgaca

SEQ ID NO: 212473 - DNA, 601 bp, Glycine max
agcagcagagtcgttgaatggggttaaaatggaattggtggatgctgcattccctcttcttaaaggtgttgttgctacaaccgatgtggttgaggcatgcactggggtcaatattgcagtgatggttggtggattccctagaaaagaaggtatggagaggaaggatgtgatgactaagaacgtctccatttacaagtcccaggcttctgcccttgaaaagcatgctgctgccaactgcaaggttcttgttgttgctaacccagcaaacaccaatgcattgatcttgaaagaatttgctccatctattcccgagaaaaacatttcttgtttgactagattggaccacaatagggcactgggccaaatttctgagagactgaacattcaggtttctgatgtaaagaatgtcattatctggggcaatcactcatcaacccaatatcctgatgttaaccatgcaactgttggggagaagcccgtccgcgagcttatagctgatgatgcctggttgaatggtgaattcattactactgttcaacaacgtggtgctgcaattatcaaagctagaaagctttcaagtgcactatcagctgctagtgct

SEQ ID NO: 212474 - DNA, 578 bp, Glycine max
gcgtaatagcagtgcataatactctacgtatgagtttgcacgcttgtgcatcccacatacatcaagaaatcttgtacagccaccacaaacacagcaaaaagttctagccataaaaaaggggcactaacacataaaattagaggactgatccaaaattcaatatgcgggccatggtctaattccatgactaaaactgtaaagctcaaatatactatcctcctaaaaggattagatgttgaaatacaagtaattccaatgaaagacaaactctctcgagtgatagttccttggtatcttagaaggagcattattcaaaattgaagctacacttctgtgggcaaaccatgggaacctactaacaaggacagtagccaagaaggagcgatggtctctaatttaggcatgagtaagccaatgccttctcctcagaaagctcttctgcggtcaagtccaacttcttccttgagaactcatcaatgggaagtccttgaactattgtccattccccattggcacaagtgacagggaatgaatagatcagtccagcttggacattgtaggaaccatcagaatatact

SEQ ID NO: 212475 - DNA, 441 bp, Glycine max
gaagaaagtaaaaaaaataagaataataaaagataaagataagtaaaagaatgaaaaaaatgaaaaaaaataataatattaaaggagaggaatcgaaacaaaaaaaataaggatgaatagaaaagaaaaaagaggagaaaaaagaaaatagaaaattgaaagggaggaaagtgagataagaggaggggaaaaaaaggagagaaataagatagaaaaaaaatagagagagaaaaaaaaaaaaaaagagaggaaataaaataaatgagaaaaaaaatataggtaaggtcatgaaaaggatgatgataggtggagagtaagtataataatgtttgagaagattactggaaagccgacttaatgtggaggaaacagtgacaaaaaagagtagaagatagaaaaagacaagattaagatgacagcaataaaggatagagaagtaaa

SEQ ID NO: 212476 - DNA, 478 bp, Glycine max
  unsure (1)..(478): unsure at all n locations
tgaagtcttgcccttctctcttcaactccaaacacaagacatcatcatccatggctgcctccgtctccactgtcggagctgtcaacagagctcttttgaacctgaatgggtctggacctggggtttcagctcccagttcatccttctttgggagcagcttgaagaaggttattggctcaagggtccccaacacaaagatttcctctggaagcttcaagattgttgctgtagaagagaagaaagagattgaagagacccagcagaccgacaaggacagatggaagggtcttgcctatgatatctcagacgaccaacaggacatcacaagaggaaagggtttggttgactccctttttcaagctccacaggatgctggaactcactatgctgtcatgagctcctacgagtaccttagcactggacttcgncagtacttggacaacaacatggatggattntacattgcttcagcttttat

SEQ ID NO: 212477 - DNA, 500 bp, Glycine max
agcatcacaaataacaaacgtattcacacgtcccacaactttgttttcgacgaatacacacatcaactaattagaatattataaccgtaagatattatttgcagaagcctattgtctagttacaacaacctttttacacttcaatcatttgaaactgctgtaagagatacttccccttttgctccttcttccaccttattccactgcttgtcaacatccacagaacttttcttgctctcgaacacttttgccgtgtcataagaagcatgtaaccccaatagcacatagtataccaagagaaaccctgtccagaccccaaacctgataaatgaatctttatcaatagagccaagaaggaatatgttaatagcaatagataaagaaggtagccatggaaccaaaggcaccccccaaagtttcggttgctttgcctgtggaacaaaaagccaaagacccccagtccctaaaatccacaacggtacagaaactgcatacccaac

SEQ ID NO: 212478 - DNA, 573 bp, Glycine max
  unsure (1)..(573): unsure at all n locations
gttcattctctttgcgcagttccctacctctcctttcaagatgcagatcttcgtcaagaccctcaccggaaagaccatcacccttgaggtggaaagctctgacaccatcgacaacgtcaaggccaagatccaggacaaggaaggaattcccccggatcagcaacgtctcatcttcgccggaaagcagctcgaggacggccgtaccctcgccgactacaacatccagaaggagtcaacccttcaccttgtccttcgtctccgtggtcgcatgcagatcttcgtcaagactctcactggcaaaaccataaccctagaggtcgaaagctctgacaccattgacaacgtcaaggccaagatccaggacaaggagggaatccccccagaccagcaacgtctcatcttcgccggaaagcaacttgaggacgggcgcaccctcgccgactacaacatccagaaggaatcaacccttcacctcgtcctccgtctccgtggtggcatgcagatcttcgttaagaccctcaccggcaagactataaccctagaagtcgagagnctcgacaccatcgacaacgt

SEQ ID NO: 212479 - DNA, 319 bp, Glycine max
catgccaaataggtttatttatttaagtgctaacacatgcctacggtatttattgagatagctaaacgagacgcatgcatggagtaatgggtctcaaaaaaaattgcgctaaatggataaatacaaagaaattgatcgaggatcacaaccggagggcactctttgcaagattgcaactctcacaatcatactggggtagagaacaccctttaatggccagggcttatgcttagacgagatgccttctttaggccaaagcacggggagccccaaaccactgagatagccaaacactgtggatctcatgggtgacccctgg

SEQ ID NO: 212480 - DNA, 522 bp, Glycine max
tctctctctctctctcgctctctgatctgttttgtttcaggagccacccgctcctgcagttttcttttgcggttggagtggaaggccattctcgcaacgtttgagttcagcagatccagaatttttcagaaaacaggtttaggagaatgaagaatacggaacgaattgccaatttggctttagcaggtttaaccttagcgcctcttgttgtgaaagtagatccgaatttaaatgttattttgactgcttccctcactgtgtttgtgggctgttaccgctccgttaaaccaaccccaccaactgagacaatgtccaatgaacatgccatgcgttttccctttgttgggagtgcaatgttattgtcactcttcttactcttcaagtttctatccaaggacttggtgaacactgtattgacaggctacttctttgtacttgggattgttgccctttcggaacattattaccatttattaaacgttttctgccaagcattggaatgaggacctcatagtctggcgt

SEQ ID NO: 212481 - DNA, 460 bp, Glycine max
catgatccaaaagaatagtcaaataaatattattttacagacaaagatttgtttacaccaacctattacaaaaatttagtccttttttttttctctttgttttcccgtttgtgtgagtaagtatatatgactaggaattaattgattaattttttaattaactagcagggaaccccattttgattattattttcccaataataagcgagaaaggtcttggcagcatctaagctagggaaataagtgggttcaaggaatatctgagtgaacccattatcggcctcggagctccccatcataaccgtcacaacctgcttataggcgtagaagaacctcttcatcgccacctcaatcgcctgcatcccctgcaaaacatgaaccttcttgaacccgtttcttttctctttctccgagtaaacctttatcgtcgtctgcatcatcccgggcccacccgtggggt

SEQ ID NO: 212482 - DNA, 471 bp, Glycine max
gtggggtttggtggagagagagaagcctggggagtataattggggagggtacgttgaactcatggagatggcgaagaagcatggcctgaatgtgcaggccgttatgtcatttcaccaatgtggcggtaacgtcggagactcttgcactattactttacccaaatgggttgtggaggagattgattatgaccccgatcttgcatatactgatcaatggggaagaagaaactatgaatatatatcacttggatgtgatacttcggcagtgctcaagggccgaaccccagttcaatgttatgctgatttcatgcgtgctttcagagacactttcaagcacctccttggtgacaccattgtggaaattcaagttgggatgggaccggcaggtgagctgcgttaaccttcttacccagagcaaaatgggacatggaatttccaggaattgggtgtttcaatgctatgacagttatg

SEQ ID NO: 212483 - DNA, 506 bp, Glycine max
gtggggtttggtggagagagagaagcctggggagtataattggggagggtacgttgaactcatggagatggcgaagaagcatggcctgaaggtgcaggccgttatgtcatttcaccaatgtggcggtaacgtcggagactcttgcactattcctttacccaaatgggttgtggaggagattgataatgaccccgatcttgcatatactgatcaatggggaagaagaaactatgaatatatatcacttggatgtgatacttcgccagtgctcaagggccgaaccccagttcaatgttatgctgatttcatgcgtgctttcagagacactttcaagcaccttcttggtgacaccattgtggaaattcaagttgggatgggaccggcaggtgagctgcgttacccttcttacccagagcaaaatgggacatggaatttcccaagaattggtggttttcaatgctatgacaagtatatgttgagtagcttaaaagctgctgctgaagctg

SEQ ID NO: 212484 - DNA, 550 bp, Glycine max
gatggctttaggtgttcctgctcttccgttgacatacgtggctcacgttctggcagttgttgccagcgtcttggtcgtggtctgggtcgtcaatttcaggggtggcttggcttgggattctgataacaagtccctcatcttcaacattcatccagttcttattgttattggcttactagttcatgggggtgaagctattataagttacaaagcttttcccctaaagaaggaagtgaagaaattgatacaccttgttttccatgccatcgcattaatacttggaatagttggaatttatactgccttcaagtttcacaatgaaagtgggattgccaatctctacagcttgcattcatggcttggaattggggttattgtcctttatggcattcagtggatatatgggtttgtgatctttttcttccctggtgggactccagacattagacgcgcctaacttccttggcacgcgctatttgggcctgttgtatttgtcttggctgtgggcactgctgctcttgggtttctggagaagctcacttttcttgag

SEQ ID NO: 212485 - DNA, 411 bp, Glycine max
tgctggcgctagcgaccggtcacggaacagggtcgaggagcgaccctgctcggtaggccgcccttcgtccttttttttcttttttttgtttttttttttttttttttttttttttttttttggtattttttttttatttttttttttaaaattttttaaagttaaaacaaacaaccaaacaaataacacacaaaccaaaaacaaaaattgataagaaaacaaacggaaaaagctacaccgaaacaaaaagacaaaaaaagagataaaagaactgggccaaggcaaagaacaactcacaaaacgtcaaaaaagggcggacccgctaggggagctgaggcacgacgcgagggggggccggggggcccggaggacacgggggggatcccaggactggaccggatacctggggaa

SEQ ID NO: 212486 - DNA, 432 bp, Glycine max
gatggctttaggtgttcctgctcttccgttgacatacgtggctcacgttctggcagttgttgccagcgtcttggtcgtggtctgggtcgtcaatttcaggggtggcttggcttgggattctgataacaagtccctcatcttcaacattcatccagttcttattgttattggcttactagttcatgggggtgaagctattataagttacaaagcttttcccctaaagaaggaagtgaagaaattgatacaccttgttttccatgccatcgcattaatacttggaatagttggaatttatactgccttcaagtttcacaatgaaagtgggattgccaatctctacagcttgcattcatggcttggaattggggttattgtcctttatggcattcagtggatatatggggtttgtgacctttttcttccctggtg

SEQ ID NO: 212487 - DNA, 528 bp, Glycine max
gcggccgcccttttttttttttttttagtttgaatgattcagtgttcgattaatctgactagatgctacaatggctaatcttaagagcctactggtctacaatttggctaaaacatgctgttcctgtacctcacaccttgggattacctggtcgatgatgcttatacgttcttcttggcgagatagccagatagatcacctaggggtacgctgaatggcataccggtgctttcaagcaccagcgccagcataatccaccagccacaaatgcatgtgacaaaggcgaaagccccttccgctcgtagaagcgaggtgggatcgcggccctctccaatgcggaagtatccagctgccaggaggaagaaagcaacgttcagggtgaagaagagaatcacaaaggtgacgttggtgcggagggatccgagcatgtagatgaagaccatgacgccccaaatcaagagataaactgcaacgctctctgcgaataccggatttgcactaccctcggtagcacttcccgtagcactg

SEQ ID NO: 212488 - DNA, 577 bp, Glycine max
  unsure (1)..(577): unsure at all n locations
caaaatttatgcagctgatcaatctctttctctctctatctgtctcttccatggaatggtagatttgaggtgaaaaggttccacattggtcaggttccgatctcacaatggggaagtcaccaggaaaatggatcaaaactgtattgtttgggaaaaagtcatccaaatcaaatatttcaaaaggcagagagaagcttgttaatcaagaagaaggagttgtagttacctccaaggtgctagaaactggtttggctttagaaccaacctccgatactattgccagacatgaggaagacctagagctggaaaatgaagaagcagaaaatgttatacctgggaatcaagaaatagacacagtgggatcaattaatgaagatgctgcactagatccagagaaaataaggctggaagaagctgctaccaaggcacaagctgctttcaggggttatttggctcggagagcatttanggccctaaaaggcattataaggtttgcaagcactcatccgtgggcacttggttaggagacaagctgttgcaacattatgctctatgtatgggattggcaagtttcaag

SEQ ID NO: 212489 - DNA, 540 bp, Glycine max
  unsure (1)..(540): unsure at all n locations
cagaaatcatgcttaaagcataaattaaatttaggtatagttgcatcatgcaaaaactagaaacctataatgtacaaatcaccctcaaagcccaaaatgcagcaaatgaagaaataacctgaattcaagcacacctatagtcccatcaattcaacaattctcatcaaagatacatataaaccacacagtttcaacctcctcatgttcctctccagaacatctgccttcctcaaattaccgcctccactctgcttgaattacctttccattcccatctctagaagatgatacagttctgtcacttctgtggccacctttgcctcctgattgaacttgtctcagtgtcctaggtgaatgcgaactaattttgcagttagttgaggatggcagagaatgtcgccgagtatggttgtttttttcacttccatcttgtccaaatctcggggatccttgtgccttcaactttgcctttgcagattcagttgctgccatgtaacttgtagtgctggactattctngataccattctctgacgttcct

SEQ ID NO: 212490 - DNA, 544 bp, Glycine max
tttttttttttttttttttttttttttttttttttttttttttttttttttttttttttttttttttttttttttttttttttttttttaaattttttttatttaaaaatttttaaaaaaaagaaaaactaaacaaaaggggggaaaaaaaaaacaggaaaactaaaacaccaaagggatagactgaaaagggggaaaaacaacaaaaaaaaaaaaaaaaaaaaaaaaaagggacaaaaaaaaaaaaaaaaaaaaaaaacctcataccacgaataaaaaaaaaaaaaaaaaaggaataaaaaataagagggggggccaaaaaaggaaaacccgccgaaaaaaaaataaaaaccccccaagggggaaaaagaactgataaaatttgaaaaaccccccacaaaagggaacaaaaaacaccccaaaaaaaagggggaaaataatcaccacccccagaaaaaaaaagcaccaaaaaaaaggtaaccgaaaaaaaaaaacttcaacggcgaaaacttaaaaagggcccccaattttaacaccccccggg

SEQ ID NO: 212491 - DNA, 554 bp, Glycine max
ctcgagccgctcgagccgattcggctcgagcttgaatcttcgttatccttctttttttctccttgaactcgaatattcactatggcagatgaggtggttctgctagatttctggccaagtccatttgggatgagggtcaggattgcacttgctgaaaagggtatcaaatatgagtccaaagaagaggacttgcagaacaagagccctttgctcctcaaaatgaacccggttcacaagaaaatcccggttctcatccacaatggcaaacccatttgtgaatctctcgttgctgttcagtacattgaggaggtctggaatgacagaaatcccttgttgccttctgacccttaccagagagcttaggctagattctgggctgactttgttgacaataagatatttgatcttggaagaaagatttggacatcaaagggagaagaaaaagaagctgccaaaaaggagttcatagaggcccttaaattattggaggaacagctgggagacaagacttattttggaggagacgatctaggttttgtgatatagcacttatt

SEQ ID NO: 212492 - DNA, 600 bp, Glycine max
aaaaaaaatagtgagaaaagagggaaagtctttataaggcggtaagactcgccattaccacacgaagtgatatagcgttgccattctcatcctcttctttctctctctaccattgccatggatccctacaagcaccggccatccagcgccttcaattctcccttctggactacaaattctggtgctcctatttggaacaacaactcctctttaaccgttggagctagaggtccaattctgctggaggattatcatcttgtggagaagcttgcaaattttgatagggaacgtatcccagaacgtgttgtccatgccaggggcgctagtgcaaagggtttctttgaggtcacccatgacatttctcacctgacatgtgcagatttccttcgagcccctggagttcagacgcctgtaattgttcgtttctcaactgtcattcatgagcgtggtagccctgaaaccttgagggaccctcgaggttttgccgtgaagttttacaccagagagggtaaccttgaccttgttggaacaaccttcccgcttctttgacgtgatggcatgaagttccagatatgggtcatgctctaacccaatccaaga

SEQ ID NO: 212493 - DNA, 565 bp, Glycine max
  unsure (1)..(565): unsure at all n locations
aaaaaaaatagtgagaaaagagggaaagtctttataaggcggtaagactcgccattaccacacgaagtgatatagcgttgccattctcatcctcttctttctctctctaccattgccatggatccctacaagcaccggccatccagcgccttcaattctcccttctggactacaaattctggtgctcctatttggaacaacaactcctctttaaccgttggagctagaggtccaattctgctggaggattatcatcttgtggagaagcttgcaaattttgatagggaacgtatcccagaacgcgttgaccatgccaggggcgctagtgcaaagggtttctttgaggtcacccatgacatttctcacctgacatgtgcagatttccttcgagcccctggagttcagacgcctgtaattgttcgtttctcaactgtcattcatgagcgtggtagccctgaaaccttgagggaccctcgaggttttgccgtgaagtttacaccagagagggtaactntgaccttgctggaacaaccttcccgtcatctttgtacgtgatggcatgaag

SEQ ID NO: 212494 - DNA, 522 bp, Glycine max
gaaggaagaaaacttgtttattatacagcttatgaaatctgaaaattttagagtcaccttagtgccttaatctattacaacatgcgcaaagttggtataaatatatctcaaaagagtgtcagaaacacacgataaaaattccccttcaaataacgtgtcaactacagagatttggcatgcacaccccagcttccgaattctgttgctgttgttccttccatattcttcctgtgactctgagcttcagttcctttctatccccaccagagaaaaatagggccatgtttctttgaatgatgagcccatcatggctatccctaaccttacggtgactatcccgaacacttcgtggtgtaccctcccaaatgagtttcctaccattggccccaacctctaggctatagctataattccgagcttcattctcatcacccataaaacgaaggaatgccatgtatacaggtgccatgccaagctggaaagcttcaaaatgaaggcagaaattttggccaaaacaatgaa

SEQ ID NO: 212495 - DNA, 562 bp, Glycine max
atcatccgcagctgctgttattcgcaccgcaaacaaacagtgagccatggccgtcggaaagaacaagcgcatctccaaagggaaaaagggtggcaagaagaaggcagctgatccctttgccaagaaggattggtatgacattaaggccccttctctttttcaagtgaaaaatgttggcaaaaccctcgtctctcgtacgcagggtaccaagattgcttctgaaggacttaaacatagagtgtttgaggtctccttggctgatcttcaaggggatgaggatcatgcattcaagaagattaggttgagagctgaagatgtgcaagggaagaatgtcctgacaaatttctggggaatggatttcacaactgacaagctgaagtcattggtgcgaaaatggcaaactctaattgaagcccatgtggatgtgaagacaactgataactacacattgaggatgttttgcattggatttaccaagagaagagctaaccaagtgaagagaacctgctatgcacaatcaagccagattggacagattcgtaggaagatgatggagatcatg

SEQ ID NO: 212496 - DNA, 377 bp, Glycine max
gacataatctagtgacaaaaatatatatatcaaatttctagtataattgttttcattgctagtaaacatatggcaagttatatcattcaaaatatagctacaatgacgaactttattcttctattccacgcacaattatatgacgtgccaggcccttcatgaaacgatgaagtgatggtaaaaagacaaagacaacttatgagaacaaacaggacagaatctaaaggacccaattattatgcatggtcaagaaccacttccttagttcacacttcaaagctttgatgtaaccctcgggtgatgcacgacagtgcaattgtgaccatcctgactgcggataacatcgggcattggacacgaccattggggacagcaga

SEQ ID NO: 212497 - DNA, 452 bp, Glycine max
aaagctttttgtgcgaccaagaggttggcacctaccggaggcacatattctgattgatggtgaacctgcaactggttgccttgttgattttggcctctatttctaccacagctactcagcattccggcgcactcaaggtgctggctttggccctttcttttatcttcccaagatggagcattcaagggaagctaagatttggaacaatgtgtttgagaaagctgataaggtagcaggcatctaaagaggaagcataagggcaactgttctgatagaaacacttgctgcagtgtttcaaatgaatgaaatcttgtatgaactgaaggaccattcagtgggtttgaactgtgggcgttgggattacattttcagttatgttaagaccttccaagctcatgcagatcggctattaccagataaggtcctaggtggcatgactcaacacttcatga

SEQ ID NO: 212498 - DNA, 514 bp, Glycine max
aaaaatgggagtgaaaaaattcagagcggagatttataagaattaacataaaaaaaattcttacattttcactcacattttaaagggatagtaaactcgaccttagtgaaaaatattgggaatgcagaaattcatccaccatagttctttatacatgaagtacaattctagctcgtagaggttttcactcaatcccaaaccacgaccaaagatcagtaaaagtatatctaaaatttatgattcttccggttgagcatcagaaccttggtcttcatcttcttcacttccagcatccttaatttggtcttcatcattttgacttccagcttctttattcttttcactgaattttaagcgaagcggtcgtcccattaactccttcccattcacagtagaaatggcagcctctgcatcctccctggtaagaaaagaaacaaatccggacccagcagatcgtccagaagggctgtcaaagacaaccctggctgacgatggcgttttgaaattttcagcg

SEQ ID NO: 212499 - DNA, 532 bp, Glycine max
gtctatgcataagttaattcatttaatctagttattttgtttattccgttaacacttatgtatctatgctatttataagtgtaataaataaatgaaatggcatggtggtggtggaattgagttgatttagcatcatttgcattgcagccttccgggtgactatggatttgaccctctgggactttcagaccctgaaggaacaggagggttcattgagccgaaatggctagcatatggtgagataatcaatggtcgttatgcaatgttgggtgcagttggtgcaatagcacctgaaattctaggcaaggctggtctgatccctcaggagacagcactcccatggttcagaacgggtgtgttcccacctgcaggaacctacaactactgggcagactcctacacactgttcgtgtttgagatggcactgatgggatttgcagagcacagaagatttcaagactgggccaaaccaagctctatgggcaaacaatacttcctaggactagagaagggtcttggaggttcttgtgag

SEQ ID NO: 212500 - DNA, 540 bp, Glycine max
gtgtgcaataatcataccaaggttaaaacctactcaaacctctttcatactctcaaaccttccattacgagaccgacctagtgcatttatataatgctaatctaacatatgtcatcttactcctttaatttattgtccaatcccatagttccctacttgtaccaccacattaattaacatcacaatatatttaacttattcactcaaactgactgattcttctgctttattggtatatcattagagtcaggacttgtctgccaaaacttgaagttcaaagatcttctttccagcatgttttccacttcctcaatcggaagtcctttggtttctggcacaaaaataatgacaaacacaatggctgcaacagtgatgaatatgaatatcatgaatgtagatgaggtcccaatggcttgtgtcaaggacagaaaggactgggccacaatgagattagagacccaatttgaggtagatgccatccccccacagattcctctgtatcttagaggatagatctcagagttaacaacccatggaact

SEQ ID NO: 212501 - DNA, 554 bp, Glycine max
gctggctgaccaagagaagaaactgtttcttgttgaccttggattagcaacaaaatggagagacacctccagtggacagcatgttgactatgatcaacgccctgatatgtttagaggaactgttcgatatgctagtgttcatgctcatttggggagaactgctagtagaagagatgatcttgaatctcttgcatacacactagtattccttcataagggccgattaccatggcaaggttatcagggtgatagcaaatccttccttgtttgcaaaaagaagatgggaacatctcccgagacactgtgctgcttgtgccctcccccttttagacattttcttgagactgtagtgaatatgaaatttgatgaagaacctaattattccaagctaatatctttgtttgacggtgcgattggacccaatccagcattgcggccaattaatactgaaggtgcccaaaaggttgggcaaaagcggtgtaggttgaatgttgaagatgatgattcacagccaagaaagaaggtccgtttagggattcctgctacacaatgga

SEQ ID NO: 212502 - DNA, 638 bp, Glycine max
  unsure (1)..(638): unsure at all n locations
ctctctctctctcaactcccaattactttgttgcatttcacacaccaacttcccatagaagagagaagagagaagagactcttccttccatcctgcaactcaaatcatcatgcaagactccagctcaatgaagatctcccctctggatctcatgtccgccatcttcaagggcaagctcgacccctccaacgtctcctcctccaccaacgccgccgccgccgccttcctcctcgagaaccgcgacttcctcatgctcctcaccacctccgtcgccgtcctcatcggctgcgtcgtcgtcttcatctggcgcagatcatcctcccccaaggccaagcctctcgagcctcctaaacgcgtcgtcgagaagcttcccgaaatcgaagtcgacgacggcaccaagaaggtcaccatcctcttcggcactcaaaccggcaccgncgaaggcttcgccaaggccacagctgaagaggccaaagcgcgatacgagaaggccacgttcagagtcgtcgatatggatgattatgccgccgatgacgatgaatacgaggaaagggtcaaaaaagagactcacgttctttnctttttagctacatatggtgatggtgacccactgataatgccgcgagatttttaatggt

SEQ ID NO: 212503 - DNA, 516 bp, Glycine max
gttcaacccctctgaccccattgtcattattctcagaagattatattagttatatttattattattcccttgtttaatttcttcaattttgatgttgaatctgagagaagagagagagagagtcgtgtgccacaattttcccagctttaattggagtgatttctgatattttgtgttagagttcaatccagatcgtgactagagaagcaagagatccttgattttgctactgtttgaattttggggtccatagcaaaatgggggttatgtccaggcaggttgtgcctgtctgtggcaacctctgttgcgtctgtcctgctctgcgggcaagctccagacaaccggtgaagcgttataagaagttgctagctgatattttcccacgcaatcaggaggctgaacttaatgatagaaaaattggaaaactatgtgactatgcttctaagaaccccctaagaattcccaagattactgataacttggagcaaatatgttacaaagaattgcgttatgaaa

SEQ ID NO: 212504 - DNA, 541 bp, Glycine max
ggtaaagagacaacagctaaccaaaacaaaaacaaagagagtgttcatctctatataaataaatagttacatacacatctattatgccaatcttgtaccattaacatccagcagctttcaagaatttatcaaaggggcttgcaggtggtagtttcaaagaatgttgctgtccaaagtcatatgaacataggcgaacttgatattgtgcttgaattggctgctgactcactaacttcagatcaccttctgaataatccagtgtcttaattggcagaggggaaactttcgtttcattttcacttgaaagaactagtgccctagtctcctgctggtgcttgaaactgtgaagaattgacattttctgttgtttccctgttacaagtgcctcacactggttcttcatttgatcataaggtacaggagttgaggaaatggggaaacttgccacttgtcgtgcggtttccaaaaccgattgtaagagttgattaacacttagaatgtccgggctattgctagatagtgatgatttacgatctgactg

SEQ ID NO: 212505 - DNA, 508 bp, Glycine max
ggagatacttctcaatttataccatccagggatgctgacattgctatcctggaagaaccagaacatttgaattggtatcatcatggaaagcgttggacggacaaattcaaccatgttgttggtattgtccacacaaattatttagaatatatcaagagggagaaaaatggggcactccaggcattcctggtgaaacacataaacaactgggttacaagagcatactgccacaaggttcttcgtctctcagctgctactcaggatttaccaaagtctgtaatttgcaatgttcatggtgtgaatcccaaattcttgaaaattggagaaaagattgctgcagagagggagctggggcagaaagcctttacaaaaggggcatatttcctgggaaagttggtgtgggcaaagggatataaggagttgatagatttattagcaaagcataaggctgaccttgatggtttcaaagtggatgtatttggaaatggagaggatgctaatgaagttc

SEQ ID NO: 212506 - DNA, 508 bp, Glycine max
ggagatacttctcaatttataccatccagggatgctgacattgctatcctggaagaaccagaacatttgaattggtatcatcatggaaagcgttggacggacaaattcaaccatgttgttggtattgtccacacaaattatttagaatatatcaagagggagaaaaatggggcactccaggcattcctggtgaaacacataaacaactgggttacaagagcatactgccacaaggttcttcgtctctcagctgctactcaggatttaccaaagtctgtaatttgcaatgttcatggtgtgaatcccaaattcttgaaaattggagaaaagattgctgcagagagggagctggggcagaaagcctttacaaaaggggcatatttcctgggaaagttggtgtgggcaaagggatataaggagttgatagatttattagcaaagcataaggctgaccttgatgggttcaagatggatgtatttggaaatggagaggatgctaatgaagttc

SEQ ID NO: 212507 - DNA, 358 bp, Glycine max
agtgactcaaatatatgtataatataggaaatattctgttacaaaaccaacaaacacatgaaagatacatcagaaaatttttaaaacctacgcactcctacaaaaagcatgaagtttggtacatccaagtgcctttaatttactacacaaatactatttagttgaaaggccaagaatgatcaatacgtcactatggctattaaaatccaacatgaacctactcaatgtcgaacttctttcttatgtccataatgaacttatagaccttgtgttgatcaggaagagacttggcaacactgtctttctgcatgcacttcttggcccaagaacatacttggggcactaactctctatgttg

SEQ ID NO: 212508 - DNA, 546 bp, Glycine max
gctattagctaatgttttgggaatttcagttataagactctcaggtggtggtgcatcgctgagttgtgtgagagtgagaaagagagagtgtgtgtgtgtgcagaagatgtggccattcagcagaaaaggggcttctggtttttcatcatcatccacggcagagcaagtcactgaaggaattgatggaactggtctcactgccattgtcacaggagcatccagtggtattggcactgatactacacgtgtcctttcattgcgtggtgtccatgtgattatgggtgtgagaaatatgcttgctgctaaagatgtcacagacacattacttaaagagattccctgcgctaaagttgatgccatggagttagatctcaggtcattggagtctgtcacgaaattcgcatcagagtttaagtcctctggtcttccattgaatatgatgattaacaatgcatgaattatggcatgtcctttcaagctctctcatgacagaattgaactacagcttgccacaaatcacttaggtcattgtctcttgaccaatct

SEQ ID NO: 212509 - DNA, 530 bp, Glycine max
gcaaggaaaatttaatcccctaaggtttaatttatgctatattctaaaaatcaaaccattcatagctcctaaaatgagatattgatcaactccacaagctagttaacatacttcattacttactgtcctaagagaagtatgcatatacagctcatcaatctacagattcatgcaatagtcctcatggtcctgagcttcagctagaccaggcacattgaagagttcattaacatctgcacctagtatgcatatacaactcgtcaacctactgcctactgattcaggcaattgtttacatgaccatgtgctttatccgagatctggtacggtgaagtgctcatcatcatcttcatctaggacttcaatcctaggctttttgtaagacaacaaggatttgggggctttgtgtgagccaacactgctagtcattggaagctgaggaacttcaaccgccgctaaagcttcatgaagaaactgttcaccaaaaaggcctacatctgctagccattcaaattcttcaaactcaaggg

SEQ ID NO: 212510 - DNA, 452 bp, Glycine max
gctattagctaatgttttgggaatttcagttataagactctcaggtggtggtgcatcgctgagttgtgtgagagtgagaaagagagagtgtgtgtgtgtgcagaagatgtggccattcagcagaaaaggggcttctggtttttcatcatcatccacggcagagcaagtcactgaaggaattgatggaactggtctcactgccattgtcacaggagcatccagtggtattggcactgagactacacgtgtcctttcattgcgtggtgtccatgtgattatgggtgtgagaaatatgcttgctgctaaagatgtcaaagaaacattacttaaggagattccctccgctaaagttgatgccatggagttagatctcagttcattggagtctgtcaagaaatttgcatcagagtttaagtcctctggtcttccattgaatatgttgataaacaatg

SEQ ID NO: 212511 - DNA, 530 bp, Glycine max
cacgaaccaaacagaatttataaaaagaccagaacaaacaacagtttttaaaaggccactattgaccatggaaacaatttaacaagagtaaacctttcaggaacattaaaaaaaaaatcccaaagatcttcggaacttccacatgcttagacttcaagacacctacagaacattctcagacttttaaaacccaccacgaagacgcaacacaaggtgaagagtagactctttctgaatgttgtagtcagcaagagtccttccatcctccaattgcttcccagcaaatatcaacctctgctggtctggtgggataccctccttgacctggatttttgctttgacattatcgattgtgtctgagctttcaacttccaaggtaatagtcttgcctgtcaaagtcttcacaaagatctgcatacctcccctgagacgaaggacaaggtgaagggtggactccttttggatgttgtaacctgccagtgtacgtccattttaagcttgtttccagcaaataaacctttgtggtctga

SEQ ID NO: 212512 - DNA, 371 bp, Glycine max
aaagctttttgtgcgaccaagaggttggcacctaccggaggcacatattctgattgatggtgaacctgcaactggttgccttgttgattttggcctctatttctaccacagctactcagcattccggcgcactcaaggtgctggtttgggccttttctttaatcttcccaagatggacctttcaagggaagctaagatttggaacaatgtgtttgagaaagctgagaaggtagcaggcatcgaaagaggaagcataagggcaactgttctgatagaaacacttcctgcagtgtttcaaatgaatgaaattttgaatgaactgaaggaccattcagggggtttgaactgtggccgttgggattacattttca

SEQ ID NO: 212513 - DNA, 466 bp, Glycine max
aaaaaattgagctcgaaaactcacacacaccatcaatttaaaccttgaattttaaacattgtaattggaggtcgatataatatacaaccatgacagtactctcagtagtgctaggaaagttgggtcaagggataatgcagcaacaccatgcatgaagttactaacaaaatctgagccaacaaacaaaacagaaaacaaaacactctatgactcaagctgagcataccagatgccctggatcttgacatcctttggagcctttgctcccaaatcagtgtcagatggacgaacactctcgaacacaccgataacctcacgcgtctcaagcttggtcttggtgacactcaaggtgattttgcccttggatgatgaggcacatgtattcgcttacttgacaggttcttcctaattttctgtttcactagcaggcggagcaaatgcaatgtcatcacctgcggaaacatct

SEQ ID NO: 212514 - DNA, 516 bp, Glycine max
tggtaatggcagcgtcactacaagcagcagctactttcatgcaacccaccaagttgagcaggagcaacactttgcagcaaaagtctactcagtccatttccaaggcttttggtttggaacctgttggagctaaaaaggtcacatgctcccttcaggctgatcttaaggacttggctcacaagtgtgttgatgctaccaaaattgcaggattcgcccttgccacctctgccctcgttgtctctggggcaagtgctgaaggtgttccaaagaggctaaccttcgacgaaatccagagcaagacctacttggaagtgaaggggacaggaacagcaaaccagtgcccaacaattgatggtggattggactcatttgccttcaagccggggaaatacaatgccaagaagttgtgccttgagccaacttcattcacagtgaaagccgaaggtgtggccaagaatgctccccttgagttccaaaacacaaagctcatgacacgtttgaactacactctggatg

SEQ ID NO: 212515 - DNA, 381 bp, Glycine max
acaagccgataatggaataaaaaaaccataaaaattaaaggggactatttaagcaagcgaatttgattttgggttttgaacaaaacccaaattttttaccccccaaaaatgttttttgattggctaaacaaaactgggtcacttggtttacacaaaaacattggacaaaagtttggaacttaatttccaatgataacgtaaaaaaaagaaaacctagaacaaactgaatgcatcatgaaatcaagccccaacaatttcagggggttcctttgccactatttcatcagcaggtttggttaccttggcaccaacatcctttgagtaatctccatgaacctccattagtttcccaagaacaaacttaggggcttttaggatctt

SEQ ID NO: 212516 - DNA, 588 bp, Glycine max
agcattaatagaatttttatttctcacacaataaatacaagagattctgcaaactgaaaaagggatttcttactaaagcaaactcaaacaagaacaacttccactcatttggcatctaccgtagtagaacaggatcaaaagcagctctctgatagaacacacgtatgtattatattgaacatcttgcacagtggttcatttctcacagctattgcaacttaaaatacttgcaaagcttctgcaaattccaaactttctttttctcccttctttatggatatgacaaagtgatcagatcatgaaacaataatcaatccattgaatttgaatctgatttttggtttggatcgatgccaccattcttcatcttaggaagggacaacaaataggccaaagcctgcaaaatcaagttcccaaatttaactttagatcaaattttctgtgattttacaagaagaattatatttatatttatgtgacacataacttgtaattaacttacctactaattaagcgcttaaactggattagtggttggttaagtgtgatgtagtaacataggttgactgtgaaaataccgataaattt

SEQ ID NO: 212517 - DNA, 516 bp, Glycine max
ggctcgagggcaaacaaagatggttcactccaacatgcctccaaagtcccccaaactctctctcccggataataacattccaatcccccttcgccagaacgacatcaccgcagcgtcgtctccaatctgcgctgcctacgacaactacctccgcctccctgagctcagagccctctgggcctccaacgacttccctaattgggccaacgagcccatcttaaagcccaccttacacgccctcgaaatcaccttccgcttactcgcaaccgttttatccgacccgaggccgtacataaacaagcgcgagtggacccggcgggtggagtctctcgccacggcccaaattcagatcatagctatgctgtgtgaagatgaagaagaaaaccccgagacacgtggcacgacgccaccggtgagtgacattaacggcttcatcgctcaaagcagaagctacagcgaggagagcctggctccgcgccttgccacgtggcacaaatccaaggacgtggcgcggag

SEQ ID NO: 212518 - DNA, 409 bp, Glycine max
gatttggccctgcatgcatgcgccggggagcctcccctcacattcctcgactcacttcttcttggagagtgggaagatcgcatgcagagaggactttttcgctatgatgttaccgcctgtgaaaccaaggtgattcctggtgaatatggtttcgttgcccagcttaatgagggtcgtcacctcaagaagagaccaactgagttccgagttgacaaggtccttcaaccctttgatgaaaacaaattcaactttaccaaagttgggcaagaagaggtcctcttccaatttgaagctagcgaggatggacaagtccagttctttccaaatgctccagttgatgttgacaattctcccagctttgttgccatcaatgtcagtcctattgagtatgggcatgttttgctgattc

SEQ ID NO: 212519 - DNA, 521 bp, Glycine max
cgacatttccgtcgccgagggcgaatcccccaacagcttgttcaacatcataggcaacttgctcttccccttactcgcattcgcgggcctgttcttcctcttccgcagagcccaaggcgggcccggcgggcctggcgggctgggagggcccatggacttcgggcggaacaagtccaagttccaggaagtccccgagaccggcgtgagcttcgctgacgtggcaggcgcggaccaagcgaagcttgaattacaagaggttgttgatttcttgaagaatcccgataagtacaccgcgctgggcgcgaagattccgaaagggtgtcttttggtgggcccaccgggaaccggaaagacccttctggcgagggctgtggcgggggaagctggggtgccgtttttctcgtgcgcggcttcggagttcgttgaactttttgtgggagttggtgcgtcgagggtgagagatttgtttgagaaggcgaaggggaaagcgccgtgcattgttttcattgatgagattgacg

SEQ ID NO: 212520 - DNA, 493 bp, Glycine max
gtgctaattgttttttctccttgaatttgataaaataattattgattcttacagtgtacaagtcagagcgtattttatagtacaaacataattctgtgacttgcgtgtatgattatgcaacatataattcggcttttccatcaatgaatagactcatgaactcttcaccatccacagtttctttttctatgagaagttgagcaagcttgtgaaggatatcaatgtgagttgagataatatgtgttgccctagaatatgctctctctaccagttccctcacttccgcatccactacatccgcagttgccctgggagaatccttttgcgatgacatctggtgacccaagaatgggttttcaaccaggtccaccaatggcaacttgtccaatttttttgctgaatccaaatctctcaaccatctgccttgccactcgtgaaacttgcatgaagtcgtttgatgctccggtggtgacattttcctggccaaaaataa

SEQ ID NO: 212521 - DNA, 483 bp, Glycine max
ctaccattagactctagttctgaacgacttttcaagagaatcaaaccatggcagtggaagtgtgcggtccccactgtgcttccaccaagcgggtgctggtttgactggttgagaaggaagtcgaattagaggatgtacctgttgatgtcattaagggggagcataaggatcctgagtacctcaaactacagccatttggagttgtacatgtcatcaatagatggatgattgtacgccttagcctattatgagggacaaatgaggttttatgcagatataggcagatcaaaaggcgaaggagcgtaagaaagagtattacaagagaagggtcttgtggatggatggcgaaacagctaaaaccaagtttgtagaaacagtcgcttacaacttgtggcctaatcattgagcctaaatataatgatgggtgactccaaatgccaatgagattgatgagagtgatcgtataatggaacaagtgtagaa

SEQ ID NO: 212522 - DNA, 394 bp, Glycine max
gaactgtttacgagtgaccacagtaggcacagccacaccccaatgcctttctccattctttccatcttcaagggataagcttgtcttcccaactcacagaggtttcaagaaatccttgcaaaactcaacactgtcatgcccttctctttactcaaccggtgctgcctatagaaagtcccgttttgtttgcaatgctcgtgaagcagtaaatgaagttaaagtggtgactgactcaagctggaataaccttgtgattgcaagtgagacccctgtgctggtagaagtttgggcaccgtggtgtggtccatgcaagatgatagcgcctgttatcgatgagttagcaaaggattatgctggaaaaattgcatgctacaagcttaacacagatgattct

SEQ ID NO: 212523 - DNA, 565 bp, Glycine max
aagagtacaagtattacttaaaattgtcaaatcccagaaggaaagatggtctttaaacttataaacaaacactatctattgccatttaaggaatggaaaagaattgaagagaatgaaatttgcaatgtcactattgtcacttctcccattccatcccttcaattctagcactgtaatgcatgcaattgtttatcattttctcagtttataattcaacatatttttccactgttgcggacagtgtagatttgggaacggcgccaattatgctttcttttttctctccattcttgaagaacagaactgttggtatgcttctgatgccgtactgtgttgctatgtttggagaatcatctgtgttaagcttgtagcatgcaatttttccagcataatcctttgctaactcatcgataacaggcgctatcatcctgcatggaccacaccacggtgcccaaaactctaccagcacaggggtctcacttgcaatcacaaggttattccagcttgagtcagtcaccactttaacttcatttactgcttcacgagcattgcaaacaaacgggac

SEQ ID NO: 212524 - DNA, 551 bp, Glycine max
aactgatccaattattgctctttttgttcctgagatgggaggcggtaaccagcctgccagggttagtctgattcaaatccccagcaaagaggaactcaggcagaagaaccttttcagtgtcagtgactgcaagatttactggcaaagcaatggagactaccttgctgttaatgtagagaggtacacgaaaacaaaaaaaagcacatacacaggctttgagcttttccatataaaagaacgggatataccaattgaagttttggagcttgagaataagaatgataagatcattgcgtttgcttgggagccaaagggtcacagatttgcagttattcatggtgataaccctaagcctgatgttagcatttattccatgcgtactggtcagaacagccgagtttcaaaactcattactctgaagggcaagcaagcaaatgctctgttttggtcacctgccggtcgctacattgtactggctgggttgaaaggcttcaatggacagttggaaatttacaacgttgatgaacttgaaaccatggctactgctgaac

SEQ ID NO: 212525 - DNA, 610 bp, Glycine max
aatttgaggaaaacgaaaagaggaggggaaaagagggactttgagaatggggagaaaaataggcttcgggccctattggctgaaggaagaatcttctgtgacatgccagctttagcagaccgaaacagcattcttctaaaggataccagccttgagaatgccttaatatgccagccacagcaaaggaacatccatggtcgaatatttggaggtttcttgatgcatcgtgcatttgaattggctttctcaacagcatatgcctttgctggattagctccttgctttcttgaagttgatcatgttgatttcttaagacctgttgatgtaggggactttttgcgtctcaaatcttgtgttctgtacacggaggttcacgatccagatcagccacttatcaacgttgaagttgttgctcatgttacacgacctgagctgcgtactagtgaggtatcaaatactttccacttctctttcactgtcccgccagaagccaaggcgatgaaaaatggattaaacttcgaatgtagtaccagcacagaggaagaagccgacgtatatagagcgcaagatgctgacaactgatgaattctcaagccttagagaaaacatc

SEQ ID NO: 212526 - DNA, 565 bp, Glycine max
ggagaaagttgaagaatttaacacggagaggatgatggaggaatttgagagggtgacaaaggatgctgagaggattcaaagggaaaccctgaagaggattttggaagataatgcttctgctgagtacttgctgaatttgggcttgaatgggaggacggatcctgagagtttcaaggcctttgttccacttgttactcataaagatttggagccttatatcaatagaataattgatggtgatttttcttctgttctcactggcaaacccatcacaaccatgtctttgagttctggcactactcagggaaagccaaaatatgtaccatggaatgatgaattgtttgacaccacattgcagatatatcacacctcttttgccttcagaaacagggaatttcccataaacaatggcaaggccttgggctttatctacagcagcaagcagttcataaccaaagggggtgtgctagcaagaactgccacaaccaatgtgttccgtaacccgggttccagcatgcgatgaaggcgattcagtccccaatttgcagccctgatgaagtcatat

SEQ ID NO: 212527 - DNA, 480 bp, Glycine max
ccgtgatacccctcttcacttggctgtgaaattcggggatgaagtggccaccgagttgcttatggttgctggggcagattggagtttgcagaatgagcaagggtggagtgctcttcaggaagctatttgcagtagagaagagggtattgccaagataataattaagcattaccagcctctggcttgggcaaaatggtgcagacggatgcctcgcttggtagggaccatgcggaggatgagggacttctacatggagattacattccattttgagagttctgtgattcctttcatctcaaggatcgctccttcagacacatacaaaatttggaagaggggtgcaaatttaagggcagacatgactttggctggatttgatggtttcagaattcagagatcagatcagagcattctttttcttggtgatggttctgaagatgggaaagtcccacctgggtcactctgcatgatcttacacaa

SEQ ID NO: 212528 - DNA, 465 bp, Glycine max
gagcaagttgaagagactgcttctttctgcaaataattttacagggaccataccagaaacatatagcaaactaaagaatctcactgagtttaggatagatggaagcagtttatctggaccaatacccagtttcattgggaactggaccaatcttatcagactggatttgcagggaacaaatatggaaggcccgattcctcccactatatctcagttgaaacttttgacttgaattgagaataactgatttgaatggaggaccaagtatgacattttctgaactgaagaatttgacaaaattgaaacgactggaattgagaaattgcttaatcacgggttctattccaggttacaatggagataggcaaacttggctactttagacctaagctttaacatgttgactggttcgggcccagattcaatacaaaaaatggataacctagaatacttgttactaacaat

SEQ ID NO: 212529 - DNA, 494 bp, Glycine max
aaaaaagtttcaataaccttttctttgaacactaaacaacctcatgaaaaagatgaaaaacgggatcatatagatgggaccaatctgaagttctcagtctgcaaatttcacccagtaatgaacccgaactcagtcccaagtcaccgaaatcatagagttggcaaggcctgattcctggaaggttgaattaatttcatagtccagaattttagatgctccaggaattgcatgtgttaatctaaatgaatttgtttcatcttcccctagttgagcagaaatgaaagaccacagcagctgaattggatcagtgcgtaagaagtttcgctgaacccggcgtccatctggaagccgaacaccaactctgcataggagatttctttcaaccttgggttcttcaggcagggttggatatgtgggtctcttagccatgggtgtttcttgccattgactgcacatctgatctttttggctcttcagcctagcagtgatcttta

SEQ ID NO: 212530 - DNA, 405 bp, Glycine max
tcaacattactgcactatgcttggtcaatagagcatacataattaaatgtgcaaagaatcagttatagattttatatagttaataagttgagacaattcaacatcctcagaacaagcactcttccatttgggactgaaataaaacactcccccactctcagaaccaggaataacaaaagataaaggaaacgggtgatggaccataaccagatctacttccatcattcctagccccttaaatgttgaacttttgtggaacgtcaaagtcatcaaagtcatatctttgtctctctcttccagccttagacaaatacaactgatcgcatgaaatttgttcgtctgtcgcaataagtttccttgagagtgccattattctttggattgatgaatcaatatgttcaatca

SEQ ID NO: 212531 - DNA, 596 bp, Glycine max
  unsure (1)..(596): unsure at all n locations
cttcatctcccaagggattcaatacaataccaggctagaagaaactccactcatcaccatctcaagcaactaattaacaagctagtactctttgagtgtttggcaattggcttagatttcttgtacttggaacaagatggaaagcactgtcacatttgagactgatctcaacctcaaggcaaccgagcttagattggggcttccaggaacagaagaaattgttgaaaaaccacttcctgcaagtgctagaattaccaacaaaaggcctttgtctgaaacctctgaggagtgtgcttcaaagggttctagtgctccacatgtggaaactgaagcagcccctcctgccaaggctaagatagtggggtggccaccaatcagatcctacagaaagaacagccttcaggagaatgatggtgctgggatttatgtgaaagtgagcatggatggagctccttacctcagaaagatagacttgaaggtctatggaggctacacacaactcctcaaagctctagaaaacatgttcaagttgaccatangtgagtattctgaaaaagaaagttatanggatctgactatgcacctacatatgaaga

SEQ ID NO: 212532 - DNA, 569 bp, Glycine max
  unsure (1)..(569): unsure at all n locations
accaacacttagtatattacattgtattcttgtatcaacacaaccaaaaaacttggattaaacaatattacatataacctttaattttctatctctcctctacacaaagtttcatttgaaatctctaagatttctcacatgaaacttcaaaaaggatcagtggaaacaacatcataagcatagcatccaaccacagatgccaaaataataaccataaaagttgccaaacttgaggaagatcgaaactgcaccgtatcttccatcttctcctgcttcagagtataactccatataaaggtatgccaaaagcacacactagagtgatttcaaaagtcaaaacccttcagatccgagaacacaagcttttcagcatgtttttcccttcacccccaaaacactttttttaattctctgctcatagtaatttttagtggtttggttttctcatacagcacaacccaaaccccttgcctctgatcctttcatgattcttagccttttgcaagaagtcacaaacatgtcccatggaacatctncaactaacatccagtcaccatcttttgcttcat

SEQ ID NO: 212533 - DNA, 555 bp, Glycine max
  unsure (1)..(555): unsure at all n locations
attttatgtggtctggtgtcattggccctatctagatgtacatcatatatgtttactattgttgacaatctgcacaaggccactggcattccacgatcttcattccctgtattgggaggcttatcagttgggttgatagcattgatatatcctgaaatcctctactggggttttgagaatgttgacattttattagaatctcggccatttgttaaaggcctttccactgacctattgcttcagctaatagctgtcaagatagttgcaacttctctatgcagggcttctggattagtgggagggtattatgccccgtctctctttattggtggtgcaactgggatggcttatggaaaattaattagtttggctgttgctgagtctaatcccacaattaacctctctgtgttggaagtggcatcaccacaagcttatggcctggttggaatggcagcgactcttgcaggagtttgtcaagtaccacttactgcagttttgcttctgtttgaattgacacangactaatcgattgttctaccacttcttggagcaata

SEQ ID NO: 212534 - DNA, 494 bp, Glycine max
  unsure (1)..(494): unsure at all n locations
gagaaatagagagagaacttcaagtgagggtgagagtgacacaaatctagagagagcactagtactctaaaagtctattatattcttcaaaatatgaccatgcatcgcgagtcttgggcttttgtcttcggcgttatgggcaacatcatctcctttggagtgttccttgctccattgccaaccttttaccaaatctacaagaagaaatccactgaaggtttccagtcacttccttatgttgttgcactgttcagtgcaatgctttggatttactatgctttcgtgaaaagggaaactgccctccttctcattaccattaacacatttggaattgttgtggagtcaatttacctttctatcttcctaatttatgccccaaggaagccaaggcttacaaccatcaagcttcttctcttactgaatgtgtttggattcggggccatgctnctatcaactctctacctgtcaaagggagcaaagcgttttgctatcat

SEQ ID NO: 212535 - DNA, 418 bp, Glycine max
agaaaaacaaggcaaagtttttattcaattgagaaagggaactatataaatatatctatatatagatagatagatcgatatacctattcttacaactcaattgaaggcagtactgagatagttcttgacaacattttcattcaatatttgcaacactttggtgtttgtagggcctacacatcttgatgtcttgaactggctcacagcagctcctaatgcacgggaatgctcaagtatcttctggaatgttcctgtgcaaacaactcggaattcgagggcacctatgcagttgactttgcgtgagcttgtgtcgccagcatcaacaaaagacttgtccaaacagttgcagcatccacacaagcacttcatcacttgctttaccacttatttcccacaagattacatagtgccctggctc

SEQ ID NO: 212536 - DNA, 447 bp, Glycine max
ccgtgatacccctcttcacttggctgtgaaattcggggatgaagtggccaccgagttgcttatggttgctggggcagattggagtttgcagaatgagcaagggtggagtgctcttcaggaagctatttgcagtagagaagagggtattgccaagataataattaagcattaccagcctctggcttgggcaaaatggtgcagacggttgcctcgcttggtagggaccatgcggaggatgagggacttctacatggagattacattccatttagagagttctgtgattcctttcatctcaaggatcgctccttcagacacatacaaaatttggaagaggggtgcaaatctaagggcagacatgactttggctgggttttgaaggttttagaattcagagatcagatcagagcattcttttccttggtgatggttctgaagatgggaaag

SEQ ID NO: 212537 - DNA, 412 bp, Glycine max
ataggatctcacatggacactgttgttgatgctgggatgttagatggatcactatgatattgtctctgcaatatcatgtcttgaaggctatgcatgtcaatggaaagctacataagctaaagcgccccgttgaggtgattgcatttagtgatgaagagggtgttagatttcaaactactttcttgggcagtggtgctatagctggtattttgcctggcacaatattggagatatctgataagagggaggtgatgattaagattttcttatggagaactcaatagacattacagaagaaagtcttttaaagctcaagtatgacccaaagtctgtttggggctatgttgaggtttacattgagcaaggtcctgtgctagaacaagttggtttcccacttggtgtggttaaaggc

SEQ ID NO: 212538 - DNA, 473 bp, Glycine max
acacaagcaactaaaagaaaaagagttaactcatgaattaacttacgttaattaacctataattacaagctataatatctatttattgctttacacagttaccatatcacttatgataggttttccagaaatgacaaggttgctaaactggccgcccagacatcattgtctagcacatgctcttgtggagaatgacttattcctccgagacaacgcacaaacagcattcccacctttgttaagtgagatattgccattgcatcatgccctgctccactcattaacgttggcacttcatcttgaatgtcaccctccatcttcttgagtgcacaataagctgcagacttgagctgtgaactcagatcagaatcacaaatcacagcacctgcatcatgcttgtgttcaataatacaggagaccgaacgcttgtcacatatttggtaaatctgtttagaataatcatagataacagc

SEQ ID NO: 212539 - DNA, 434 bp, Glycine max
ggcagatagaaaaaaagagcgacttttgagttcaaaagatgactaacttcccattgatcaacttggagaagctcagtggtgaggaaagaaacgataccatggaaaaaattaaagatgcttgtgaaaactggggattctttgagctggtgaatcatggcattcctcatgacatattggacactgtggagaggttgtccaaagagcactacaggaaatgcatggaagagaggttcaaggaattagtggcaagcaaaggtctagatgctgtccaaactgaggtcaaggatatggactgggagagcacctttcacttgcgtcacctccctgaatcaaacatctcatagattcctgatctcattgatgagtacaggaaggtgatgaaggattttgctttgaggttagagaaactttgcagagcatctgctggacttgtt

SEQ ID NO: 212540 - DNA, 586 bp, Glycine max
gttcaggtctacccagagaaaggaacagttgctttttctgctggtttgcatggctgggcttttaccctgactaactttgccaagatgtatgcatccaagtttggagttgatgaaggaaagatgatggaaaggctctggggtgaaaacttttttgatccagccacaaagaaatggaccagcaagaatagtggttctgctacctgcaagcgtgggtttgttcagttctgttatgagcccatcaagcagattattaacacttgtatgaatgatcagaaggataagctgtggcctatgctgcaaaagcttggggtcaccatgaaatctgaggagaaggacctcatgggtaaagcattgatgaagcgtgtcatgcaaacctggctttcagcaagtagtgctctattggaaatgatgatatttcatctaccctttacattaacagcccagaagtatcggggggagaacttggttgaaggttctcttgatgatcaaatgcttctggtattagaaattgtgatcctgaaagttctctgatgctctatgtcatcaagaagattccagcatttgtaaaggtgagatttttggcttt

SEQ ID NO: 212541 - DNA, 462 bp, Glycine max
acatcgatgcaaggaccaaataacagcattacaacattcacgggcaaaaccacaaacaaaactaacagaaattaaatctaaagtagcattgttcacaagagaaaataaattcgactaagttcaaagtaaaataattcatgaaacaaatttaaagcttgtcttcaaactcggagagaggagtcatctgttccttcaagcccttcctcttgcgaatgtcagtgacaagctgtgcagcttgtgatccagcctccaatgggtcagaagacatcatgtcccagtgatcaaacacacattgtgggaaggcctggcctgatgttgcagccctcaatgtgctcgagaaaccaaaggactcgatgacagggaggtatgccttgatgttgtatagtggggtacctggcctctgcatttcctcgaacacgtgtccacgcttctgttaagaacactgtagattccaccaagagc

SEQ ID NO: 212542 - DNA, 484 bp, Glycine max
cgatttctcaacactgtatgctcctctcatccgtgatgggcgtatggagaagttctactgggcacctacaagggacgatcgtgttggcgtctgcaatggaattttccgcactgacaatgttcctaaggatgacattgtcaagcttgttgacaccttccccggccaatctattgatttctttggtgcactcagggctagagtatatgatgatgaggtgaggaagtggatttctgttgttggtgttgacttcattgggaagaagcttgtgaactccaaggaaggacctccaacctttgaccaaccgaagatgactttgagcaagctcttggagtatggtaacatgcttgtccaagaacatgagaatgtgaatagagtacaactggcagacaagtacttgaaagaagctgctcttggtgatgcttatcaagatttcatcatacagaggaactttctatggcaaagcagtttagctagtaaacatttc

SEQ ID NO: 212543 - DNA, 458 bp, Glycine max
aggttctcagggtgtgtataagcaggttccatcatcacttcttgcagttgggtcgaagtttgaggcatttggatcagtacaaccttcaggaacgggaatgtttacttgctgagctgctttgccatagaaagttcctctgttgatggaatcttgattagcatcaccaagagcagcctctttcaagtacttgtctgccagttgtactctcttcacattctcttggtcttggacaagcatgttaccatactccaagagcttgctcaaagtcatcttcggttggtcaaaggttggaggtccttccttggagttcacaagcttcttcccaatgaagtcaacaccaacaacagaaatccacttcctcacctcatcatcatatactctagccctgagtgcaccaaagaaatcaatagattggccggggaaggtgtcaacaagcttgacaatgtcatccttaggaa

SEQ ID NO: 212544 - DNA, 601 bp, Glycine max
  unsure (1)..(601): unsure at all n locations
gctgcagaggaggaaattgaggtcctggggaatattcttctccaccctttgtttggtggggagaagagaacggaatcagaattgagattggatgggaaatactttgtgaggcttaaggatcgtgattggtattggagagcttttctacctgaaggagagaatagagaccaccctgcttgcaacccttttggaccaagggggagaagcattgaaggactcaaattccctaaaagtcttgtttgtgtggctggtttggatcttctgcaggattggcaattggcatatgcaaaaggtcttgaggattgtggacaacaggtcaagcttctttttctcaaggaagccactattggcttctacttcttgccaaacaatgaccatttctattgcctcatgaaagaaatcaacaactttgtcaattctgattctgactgttaatatactattagtactaagacgacagacgactactactactactgctactacttaaccttaccttacctacaggaggcatacataactaaagcttgacattttacttgggttcctcttttttntttttctctcccccacttttggatcctgtcttttctctttttct

SEQ ID NO: 212545 - DNA, 604 bp, Glycine max
  unsure (1)..(604): unsure at all n locations
gtcaaaagcttgtcacccaaggttgtgacccttgttgagcaagaatccaacaccaacacttctccctttttccaaaggtttgttgagaccttgagttactacactgctatgtttgagtccatagatgtggccctccccagagatgataagcaaaggatcaatgcagaacaacactgcgtggctcgcgacatcgtcaacatggtagcttgtgagggggatgagaggctggaaaggcatgaactcttagggaagtggaggtcaagattttcaatggctggttttgcaccatgccctttgagttcctcagtcacagctgcagttaggaatatgttgaatgaattcaatgaaaattataggcttcaacatagagatggcgctctttatctaggatggaagagtagagctatgtgtacctcttctgcttggagatgttactgactcattgtcattgtcattggtatatgtatttttttttatccacaaatattatntgttagtaatatattagcttttattagcggngaatttgaacccatcacctctccccattcccatcattggtatatgcatattttccctcttgtaatttcttccttttatgaca

SEQ ID NO: 212546 - DNA, 524 bp, Glycine max
attctttagaataatcaaaaagaatattaaattcaaataaattttagatagaaaaaagacttaaaaaggaggatttgaaatgcgagatctaaaaacatatctttccgtggcaccagtagtaagtactctatggttcggggctttggcgggtctcttgatagagatcaatcgtttttttccagatgcattgatattcccttttttttcattctagttattgacacggaaaggggtgaagaagattatagatccaattaagtattaaatatatgtaattaatatgtaattaatctcctcttctttatttcgtcttttatttcttcttttttttacaattgtaatagaataagttaggaaagagaaagaataagggttaatttggcctaattgaaattcggagtgaaactcgggatctcgtccaggcttccatggaattgaattaataattcaattccatttctattaataaaagagtgaaagcagaaatttaaatggaatgtataaggtggtcggcaacatttcat

SEQ ID NO: 212547 - DNA, 357 bp, Glycine max
cttaaagtagtagttctagcggttgactcgcttttttcaaattgtttttcattattaagaaaaggtaacaaagataaaatacgagcttgttttatagcaattgttattaatcgttgttgttttaaggtcaatctatttacgcgtctggataatatttttccttgttcactaataaatcgactaattaaacccatgtttttataatcaattcggtcccccgattggatcggtggcaaacgcctacgaatagatcgtttgaatttcattaagagtcgcttaaattttttccatggttaattgatccttattccaaaattcactttgattccaggaattcctataagggattggcttttt

SEQ ID NO: 212548 - DNA, 557 bp, Glycine max
cataatcattgcaataaacaagatagataaagatggagcaaatccagaaagagtcatgcaagagctttcttcaattggtttaatgccagaagactggggcggtgacatcccaatggttccgataagtgctctcaaaggaaagaacatagatgatcttttggaaactgttatgcttgttgccgagttgcaagaactgaaagctaatcctgatagaagtgcgaagggaactgttgttgaggcggggctagataaatcaaagggaccattcgcttcatttattgtgcagaatggcaccctcagacggggagatatagtagtttgtggagaagcttttggaaaggtgcgggctttatttgatgatggtggaaagcgggttgatgaagctacaccctctatacctgtacaggttattggattgaataatgttccaattgctggtgatgactttgaggttattgaatcccccgatactgcacgtgatagggcagaaactcgtgctgagtcattgcgtaatgagcgtatttcagcaaaggcatgggatggaatgtcaccctttc

SEQ ID NO: 212549 - DNA, 476 bp, Glycine max
gagaaggtttggttgatttgatagggaaattgatattggtgttcccgatgaagttgggagacttgaagtccttcgcatacatactaaaaacatgaagctatctgatgatgttgatttagagagaattgcaaaagatactcatgggtatgttggtgctgaccttgctgccctttgcactgaagctgctttgcaatgcattagggagaagatggatgtaattgacttggaggatgagactattgatgcataagtactgaattccatggcagttacaaatgagcatttccagactgcccttggaacaagcaacccatcagctatacgtgaaactgatgtagaagtgcctaatgtcagctgggaagacattggaggccttgaaaatgtcaagcgtgaacttgcagagactgtacaatatccagttgagctcccagaaaagtttgagaagtttgggatgtcttcatctaaaggagtacttt

SEQ ID NO: 212550 - DNA, 491 bp, Glycine max
  unsure (1)..(491): unsure at all n locations
gtaacagactacanatccgtcaaatcttattancagaccatgtgcttttatgcagctctatacgaccactcttgaagaaagtgcctagagtaaatagcatagcagcagtctaacgattaccacattcacctagacgtatcatatgcaacgttcggatctagtttcagacacactcttcagcgaacacgaactcatttacattgctcaagtatggcgtttagactcccaattgcaagacctgagtaatgaaagactcctggtaagcctaacttcacttgctagcattatcaagagcatgctcgttcaagcacttgccagacaattggactctcttgacattctatcgctcttggacacgcatgttaccgtacagtaagagcttgtacacagtaatcttgggctgttcaaaggtacgaggtccatattctgagcccacaagcttcttctacaacactgtctatagctacacgtgataatcactgcctcactta

SEQ ID NO: 212551 - DNA, 504 bp, Glycine max
cactctcatagctgtagcggcgacactaagatcggagaaagaatggcgaaaacgacgtcgttgctgctctttacactgctcctcttcggaaccctagctctcatccaggcgaagaaatcgaaggaggatttgaaggaggtgacccacaaggtttactttgatgttgagattaatggaaaagaagcaggtcgtattgtaatgggtctttatgggaaggctgttccaaaaactgcagaaaacttccgagcactttgcacaggggataagggaactggtaaaagtggaaagcctctccattacaaaggtagctcattccatagaattattcctagctttatgcttcaaggaggtgattttacacaaggaaatggaatgggtggagaatcaatttactgagagaagtttgctgatgagaacttcaagttaaagcatactggaccaggacttctatcaatggcaaatgctggtcctaataccaatgggttacaatttttcattacaact

SEQ ID NO: 212552 - DNA, 420 bp, Glycine max
cagccatgttcacttagatttccctctacaatgttatgttacaaatgccattttccatattatcattagggggaaaaactttatctaataagtatcacaaacatacaactagtcattgatctattagaacatgcttataaaagataagtagtctcgtagatggaattgaaatgaaaactgggaacaccttcaacaagtcctgattgagaatcaagaagtacaattatagagggagttcaccactgtcaacaatcacaaccttgctcttgggagtgccactttgtgttccttcagcttcaatcttgtaaacaacatccattccagaaagaactttaccaaaaacaacatgccttccgtccaaccagctagttgtcacagttgtaatgaaaaattgtgaaccattggtattaggaccagcat

SEQ ID NO: 212553 - DNA, 511 bp, Glycine max
  unsure (1)..(511): unsure at all n locations
acatgacactcagttgggaatgagaggttttctgattacagggctaaagaatgttcatcaacaagttacacagggaaaaaggcagatgcacactgctaagcatgataatgacttctgtttgctttttgattcatcctattcattattcgggaagcatcattaagtctatctgctctctcataaatgctagcaacaacaagatgcaactctttcttgttgatattaggattggaatccagcttctcaaacaatgactctaccatcacgaaatcttttcttgcaccatatagactcagcatctggaaatgaacttcatctggaaaaacacacccttcttcatgcatctgtctatataaagcatctgctntatcaaattcacgcaactttccaaaagcattcaacacaagagcaataacatcagaatcaggaaaatatcccaccactctcatcttctcaacactttaactacattgccatactttttgtcttagagaanagataatcatgcacc

SEQ ID NO: 212554 - DNA, 421 bp, Glycine max
ggagtacgtgcgtggcggcgaactcttcaacaaggtcgcaaagggaagattaaaagaagaagttgcgagaaattactttcagcagttagtttccgcggtggagttttgccacgcgcgcggcgtgttccacagggacctgaagcccgagaacctgttgctggacgaggatgggaaccttaaagtctccgactttggtctcagtgccgtgtcggatcagataaggcaggacgggctgttccacacgttttgtgggacacctgcgtatgttgctcctgaggtcttgtcgcggaaaggctacgatggtgcaaaggttgatatttggtcttgtggggttgttttgtttgttctgatggccggctatttgcccttcaatgaccgtaacgttatggctatgtataagaagatttacaagggtgagttt

SEQ ID NO: 212555 - DNA, 542 bp, Glycine max
cagagattcaagagaatggagggtgtgagccccgagcccctgagatcagaattggattccaaatccaaacatgacacagcaaaagaagatgatgacgctttgaaagacagcactgaagccgaagtcaccaaaattcgtctcatgagagcctttgttgaaagccgagatccctcttccaaggaagaaatagattaaatgaagagaagattcttgcgggctcgtagtttggatgtggagaaggcttcggcaatgttccttaagtacttgaaatggaagcgttcatttgttccaaatggttgcatatcaccgtcagagattgccgaagatattgcacaggacaaggtgtttacgcaaggactcgacatgaagggtcgacctatagatgttacctttgctgcaaaacattttcaaaggcaaaaaggtgccgatggtttcaaacgggatgtggggtttgttcttgagaagctttgttaaggatgtcaacggggcaagaaaagttatttggcattgcagacattaaaggatgggcatacgtaaacagt

SEQ ID NO: 212556 - DNA, 431 bp, Glycine max
ctaaagaataatctgaccaactagagaactccaatctgcatttaactcctggtacagaagttgaaattatttggagaaaataaattggccaaaaaggctttcaatgattttaatcagctattctggataggaactaatggcatttggcctccgtatatatccgggatttgactctcctctatctcttctagcaatgttgatttcagctttttgttctccacgaatacgatctttttcttggtattttcatcaatgaaagggtaaatcattttccaaattttcataaacatataaggtgcgtgtacaataagcatcttccccaatctttcagggtagcaatcctgcaaaatggatagagaattaaggtatccacgaaggtcactgtttacgtatgcccatcctttaatgtctgcaatggcaagaaacttttc

SEQ ID NO: 212557 - DNA, 281 bp, Glycine max
gtacattctccttgggaatatgaatgctatatgaatctagagtcacattgctggctagaggcgttgggaatgcagatcacggtcattgcagaaaacatcgtgtataggaacaatttttttttattaaatgtattgcacattcaaataagaggatcctcttggttaaattaagaaggaaatacatatttttttggttcaaaaaaaaaaaaaaagaaaaatacattaaaaataaatagaataaaaaaaaaataaaaaaaaaaaaaaaaaaaaaaaaagggtgt

SEQ ID NO: 212558 - DNA, 562 bp, Glycine max
atccaattgaaattttaaaaatgactgggataaacttaagaattcaattattgaaattgaataagtaaacaatttaattggattggtcgaatggtatcaaaaaaatggagtactaactcccatttcttatttattattgaattaaccgatcaacttgctttgttatcgaacatttctttttgatttcaaaaattttccggaaaaaatttgaatctatttttatatgcgaatcaatcctactacttctggtcctgaggtttctgcgcttgaaaaaaaaaatctgggacgtatcgcccaaataattggtccggtactagatgtagcttttcccccaggtaagatgcctaatatttacaacgctctgatagttaagggtcgagatactgttggtcaacaaattaatgtgacttgtgaagtacagcaattattaggaaataatcgaattagagctgtagctatgagtgcgacagaaggtctaatgagaagaatggaagtgattgacacaggagctgccctaagtgttccagtaagtggagcaactctaggacgaattttcaacgtg

SEQ ID NO: 212559 - DNA, 354 bp, Glycine max
gttaggaattcccatgttcggacgcaaaaactgggtaagaaaacacattggtgggccttaatgggggcccagctcggaaaaaagctcaatttgccccaaaaggggggcttttggcctccgccttattcaaaagaccctccgggatttcaagagttgggggggcttttggggggaaaagggggctacccttttccggagtatttactaaaaccgggggcccattatgggttattatcccaaaaccgcccattggggcccccggtaaccctggggttttaaaaaagccgtttctcaaagagcctgaatttacgggggggggaaaagggccctgattggggaaaacccccaattggc

SEQ ID NO: 212560 - DNA, 534 bp, Glycine max
gcatctcattaaaaatgctcatagctatatctaatgagcatctcattaaatatagctatgaaaaattactgcgccaggctaaagctccaagtatgtttttacaatccttcaaaaattttgattctttgtgtgtgtatggtgatgataacttaattagtgttcatgaatatgtcaagccttactttagtggttctaaattgaaaagctttctagctggtcataatatcaccattactgatggtattgacaaaactagtgcaactttgcaatttagaaagttagcagattgtgattttctcaagagaaactttaagcagatgtctaatgttttgtgggtggctcctgaggataaggcgagtttatggtcacaacttcattatgtttcgtgtaataatctggaaatgcaagatgcttatcttgtcaatctcgtaaatgtgttacgagaatcgtatttgcacagtccataggaagctcgccaattgagaaggaaagctctctctcgtatcgaatggctgcaaaaagctgatgtgccta

SEQ ID NO: 212561 - DNA, 515 bp, Glycine max
ctcactagtcggcggtcgcccttttttttttttttttaaaacgtaaaaatgaaaatttattcccacgaaagaaaatataattagatctctggtgttagttacaaagtaatacaaggaaaatcctcagccggggtcaaagattatgtaatgtagcagtgtgcaaacatttggaacagagagatcccatcccctgtatgtaactttggtaacatctttgaataaatatttggcaagatctcacaatggcacccgggatagctgactgaggccaaacgaacatttacatgtgagggttctattctgatggaggtctgtaatcaagcatctccctgatatttaacctgattgaaggtcccatggctgagcatatgtgagcacttttccagtacacacctttagcacctgaaggtttgtttgcctctactgatttcactgcagcaagcacgtttacaagaagatcctcttctggaaagtcagcttttccaaaaggtaagtgcacgattccagttttgtct

SEQ ID NO: 212562 - DNA, 420 bp, Glycine max
gtcctggacaggcaaaggtgttttcaaagatttttgggcatgagttaagcctgggggatacaaaatctcagtctataactattagtatctccccataggtggaagacgatccgggtttcacttcagactcctatgaagttcaagcactaggggtgaaccatgcttatggaaatttcttccaatgggactttaggtgacggtaatgaaggaacattggttcctcaattgaatcaaatgatggctgggaatattaatgctcaagcaagggttccttgtctagatcttggtaatgtagactcatcatcaatttatgcagatgagcggaagcccaaaaaatgaggtaggaaacctgccaatgggagagaggagctcgtgaaccatgatgaacttggagcaaagacgtgaggaagcttaatagag

SEQ ID NO: 212563 - DNA, 508 bp, Glycine max
tactgtaaaaacaaagtgcactaagaacaatattatgttagccacttaacctacaagacagagtatttctaacatggtttacaatatcattgagatgctacacataaatatgatctgacaatcaacttttggatagggatgcttcaagcttttctttcaactgtatagcagcagcctcccctccctcagttcttatggagaatgtatgaattattttatcatctgcagttgaaacattagagtcttgagccacaatttgatgctccctgaacgttttaacaacattcgaaacagggtgaatatctaaggggcatctcactgtcacaactgtgtcatcctctctttcctgaaaatccatatctggcaatgacaatttttgggccttattgttacccatgttcttctcaagcttcaacaccttgatcttcatctgcagatcagtgataaaggtaatggcatcaccaagcaaagatgccttgtccatcttagatatattagggacaacagc

SEQ ID NO: 212564 - DNA, 422 bp, Glycine max
ggagtacgtgcgtggcggcgaactcttcaacatggtcgcaaagggaagattaaaagaagaagttgcgagaaattactttcagcagttagtttccgtggtggagttttgccacgcgcgcggcgtgttccacagggacctgaagcccgataacctgtcgctggacgaggatgggaaccttaaagtcttcgactttggtctcagtgccgtgtcggatcagataaggcaggacgggctgttccacacgttttgtgggacacctgcgtatgttgctcctgaggtcttgtctcggaaaggctactatggtgcaaaggttgatatttggtcttgtggggtttgtttgtttgctctgatggccgggtatttgccctttaatgaccgtatcgttatggctatgtataagaagatttacaatggtgagtttc

SEQ ID NO: 212565 - DNA, 462 bp, Glycine max
aaatacaatggaggacttgagacagaggaagcatacccctacactggaaaagatggtgtatgcaaattctcagctgaaaatgttgccgttcaagtcattgactcggtcaatatcaccttgggtgctgagaatgaattaaaacatgcagatgcatttgttcggtcggctagtgtggcctttcaggtggtgaatgggttccatttctacgagaatggagtttacactaatgacatttgcggtagcacttcccaggatgtgaaccatgccgtccttgctgtggggtatggagttgaaaatggctgtccatattggctcataaaaaattcatggggagaaagttggggtgagaatggctactttaaaatggaattggggaagaacatgtgtggtgttgcaacttgtgcgtcttatccagttgtggcataaattgcataataatattggccctggtgactaccacct

SEQ ID NO: 212566 - DNA, 493 bp, Glycine max
  unsure (1)..(493): unsure at all n locations
ctatcaatatatgatcgttatttatgtctgtgatacacacaattcaggccatgatattcttacgtgatttacagcaacttctaacttatttaatacatcataccaacccaactaggagcaattttcattatacaatgacacttatctttaaactctgaagcatgacaaggtggtagtcaccagggaccatattcttatgcaatttatgccacaactggataagacgcacaagttgcaacaccacacatgttcttccccaattccattttgaagtagccattctcaccccaactttctccccatgaattttttatgagccaatatgggacgccattttcaactccataccccacagcaaggacggcatggttcacatcctgngaagtgctaccgcaaatgtcactagtgtaaactccattctcgtagaaatggaacccattcaccacctgaaaggccacactaaccggctcgaacaaatgcaactgcatgttta

SEQ ID NO: 212567 - DNA, 474 bp, Glycine max
cccaaaatttgttcttcaggtgtatcgagattttgctaccacaggtgatttgcaatttggagtaaatgtgtggcctgctgtccgtgctgctaatggagtacatggaacaatttgatagagatggtgatggtcttattgagaatgatgggttccctgatcaaacatacgatacatggacagtccatggtgtgagcacttactgtggttgtctttggcttgctgctctacaagctgtagctgtaaatggcccttgaactaggtgacagagaatttgcagaatcatgtaaaaggaagtttttgaatgctaagccagcatttgtagaaaaattgtggaatgtgtcgtattttaactatgacagtggattaagctggaacatgtaattcattcaagcagatcaattggctgggcagttggttacatcatttttcaggctgtcctatctttttgaggattctaaaatcaaaagtgctcat

SEQ ID NO: 212568 - DNA, 561 bp, Glycine max
gtggaaaggaagatagtcctatgtgtgacgtgccagggtttgaaaacagcaagatgaaattgctaaggcatgtttcatttgtggattgtccgggacatgatattcttatggctacaatgcttaatggagcagcaatcatggatggagcgttgctactcatagctgctaatgaaagctgcccacaaccacaaacatctgagcatttagctgctgtagaaatcatgcgtctacagcacataataatccttcagaacaaggtagacttgattcaagaaaatgtcgcaatcaatcagcatgaggcaatttcaaagtttatacaaggaactgttgctgatggtgcaccagtagtacctatttcagcacagttgaagtataatattgatgttgtgtgcgaatatattgtgaagaagatcccaatccctgaaaggaactttgtttctccacctaacatgattgttattcggtcatttgatgtcaataaacctggttatgaggttgatgaaattaaaggaggtgtagctggtggaagcattctgaggggtgttttgaaggtcaatcaat

SEQ ID NO: 212569 - DNA, 562 bp, Glycine max
aagaggtacagttgggaaaataaaccaataacgatgtgaaaacaaaatagaagacaacaatcaaaaaacgttttcttctccacctcacaaaaatggttcccaacaattgcctcccttcccacatatctaaattcatctcagttttttatagctgctggtgtttcttgtgatcagtgttcaactcagatggggggcgggagggacatcaagagtgattccagcttggatttgtccccacccgataagacgccaatgcttctcaacacgtcgactaagtgcaatcttctcacccttgctagtgcacacaggggaagtaagttgcaacttcgccaagtcattcttcacagcaactactctagcccccgtcgacattgatccaatgttcaacattagcatctctcctttggccagcttggataccttcccctgtctctcagacccttttgttcggacaccaagaagtcgtcgaagcaggaaaaagtttacctccagttcaacaaaaacctcaggtagtgatccaacctctcctaaaacttgacctaccaacctatcagcgcgtgtc

SEQ ID NO: 212570 - DNA, 540 bp, Glycine max
  unsure (1)..(540): unsure at all n locations
aagctgagttcgatgtaagtgcaaaagaggcaactcttgctgaagccaagggtatcaatggtttgcgagctgtttttggggaagtctatcctgatcctgttagagttgtgtcaattggacaaaaagttgaggatctccttgctgacccaaagaatgaaaaatggttatctttttcgtcagagttatgtggaggtacccatatttcaaacacacgagaggcaaaagcttttgcacttttatctgaggagggaattgcaaaaggaatacgcagaataacagctgttacaactgatcgtgcttatgatgcaatgaaagtggcagatgaatttgatcagcaagtagacgatgcggctaagttagaaggaagtttgctagaagagaaagtttcatcattgaaaagcaatattgaaactntatctattcctgctgccaagaaagctgacatcaagaccaagatagcccgacttctggatcaagtaagaaaagcacaaaagctggttgctgatgaaaacaagcttaaagctttaacgattacagcag

SEQ ID NO: 212571 - DNA, 477 bp, Glycine max
aaaagccttagccttccctacaactccaaacacaaagacatcatcatccatggctgcctccgtctccactgtcggagctgtcaacagagctcttttgaacctgaatggttctggagctggagcttcagctcccagttcagccttctttgggaccagcttgaagaaggttattgcctcaagggtccccaacagcaaggtttccggtggaagcttcaagattgttgctgtagaagagaagaaagagattgaagagacccagcagaccgacaaggacagatggaagggtcttgcctatgatatctcagacgaccaacaagacatcacaagaggaaagggtttggttgactcccttttccaagctccacaggatgctggaactcactatgcagtcatgagctcctacgagtacctcagcactggacttcgccagtacttggacaacaaaatggatggattctacattgctccagcttttat

SEQ ID NO: 212572 - DNA, 176 bp, Glycine max
ctgaaaatgcggaatcctctgcatgatctggaatttgtgttttctttcgtttgttcgtttgtttaattcaataaaggaaattagacatgaccctcttgttgagtatgctctgtctatttgaaaatttccacacctcttttaattgtcgtaatgatgtgtgaagtgtgtgttatttt

SEQ ID NO: 212573 - DNA, 461 bp, Glycine max
actagattcatttgagattgttcttgcaggtgctggtggtcacagtaaggaattggatggtgaaagtacccttggattctgatgagttgtatgaaatacaaagtcatgaatctagtttaaagaaaaaactcatccctcacactaaccaattcagggttctagacaaagctgctgttctacctgaaggcaatgaggcaaggagatggaaagtctgcacagtgacacaagtggaggaagtgaagattctgacaaggatgatgcctattcttctaagtacaatcattatgaatacatctttagcccaattacaaaccttctacatccaacaaggtaccttaatgaacacatacattggcaaactgaacatcccagcagctttcattcccataattccattagtattcatgacccttttgatctcggtttacgaatttgctttcataccactttgtccggagaat

SEQ ID NO: 212574 - DNA, 555 bp, Glycine max
catgggcccatgatgagagatatgcgcacaaatcatcacgctattaatactactgctccgctacttgctgcctaggctagtgcgcacccctgtcttcaacctcttaccgtgcgaatctctcaattcatcaaaactaacaacatcatcaccatcgtcgcaccgaaatcaatcgccacaacctcgggatctcagattcgacgcgccaaatcatgtcgaaggcgcgtgtctacaccgatgtcaatgtccttcgccccaaggagtattcggattacgagtctctcacccttcaatgggggtaatgttccgaaccctaatttttatgtttctcttattcttttctgatccccaaagtgaacaatccacaatgaaggggaattttattgtctgatcttagagttagtagataggttcttagctgctggtctgttgcattcttccccattccttgtgaattccaatggcatagtgcaattttatctagcatttcgtggtaactaactgattgacgaagaattatgccaatttcgtagctctgaaatgtcctttttattggat

SEQ ID NO: 212575 - DNA, 426 bp, Glycine max
tgatacacttccccaggaaaactaatctctaataaactgaatgtatcggaggtgcgctgttagggtatcatacaacaatcccgaatatattaacttaagtttatggatccatatgtgagcaagttactgtgtcctcattctgctactctcagctgcccttacctgagagaaatatggatgtgccattgcttctctagctgttagcctgtcctggtgatcatatcgaaggagcttatcaagaaaattaattgcctcaggagacacatgatgctgattatctggattgatgaatttagaccagggctttcgactgtgtcttccaacaagtgcatcaagttgaggatcaagctccagatgatacttagtaagatatgcattcaattcatcagtcccaagcaccttaactattctgacaagctgatcatg

SEQ ID NO: 212576 - DNA, 596 bp, Glycine max
ggatcatacaaagttgctgtggttaacaggaagagaccctcaattcttgcactttctaggcaaaagttgacccaacttccaggaacttctattgagggagttgaaaagggtggctacattatttcagacaactcgtcaggtaacaagcctgatgttattttgattggaactggttctgagttggaaattgctgctgctgctgctgaggatctaaggaaggaaggaaaagctgttagagttgtttcttttgttagctgggaactttttgatgagcagtcagatgaatacaaagagagagttctccctgcttcggtaacagttagagttagcattgaggcaggatcaacatttggttggcaaaagattgttggaagccaatgaaaggccataagcattgatcgatttggagcaagtgctccagcaggaaaaaattacaaggagtttggattcaccaagaagctgtaattggtgctgccaaagaactttcgagaacatatgttgacttctttaagtttatctcattctaaacttgtgggttttatggtggtggtttgggtactattacattaattcgttttgaaaatcactttagcccc

SEQ ID NO: 212577 - DNA, 343 bp, Glycine max
tacccaaagccaccaccagtgaaaaccacaagttctagatgagataaaacttaaaagaaagtcaacaaatagatctaccaaagttctttggcagcagcaataacagcttccttggtgataccaaactccttggatatttttcctgctggagcacttgctccaaatcgatcaatgcctatggcctttccttggcttccaacaatcttttgccaaccaaatgttgatcctgcctcaatgctaactctaactgttaccgaatcagggagaacactctctttggattcatctgactggtcatcaaaaagttcccagcttacaaaagaaacaactttaacagcttttc

SEQ ID NO: 212578 - DNA, 441 bp, Glycine max
cataccgaacactcttcttcaatcaagcgaaggtggtctcgattgcaagtgatccacgatacactctacgcttcacaaaaccttcaaacccaattccacagaattcttctgcttcaccatgccaccaaagcctttagactatgggtcaataaatgaaaacgtgaagaagagtcaatatgctgtcagaggtgaattataccttcgagcttctgaacttcagaaagagggcaaaaagattatctttactaatgtttggcaaacccgcatgcattgggacagaaaccactgagcttcccttgccaggttgttgctttgtgccaagctccattcctacttgaagatcctaatgttggactgctattccctgctgatgcaattgcaagagctaaacactatctttcattgacctcgggtgggttaagtgcttatagtgaactccgt

SEQ ID NO: 212579 - DNA, 591 bp, Glycine max
  unsure (1)..(591): unsure at all n locations
ctcgagccgctcgagccgtgctcatggaaaagctcaagaatccatttaccgccagagaaatccagttgctccagaggtgcagggcaatggaagaggaaatgagaggatagtagacctacatgggttgcacgcaagtgaagccattcatgtgctgaaacatgagttgagtgtgctgaaaagcactgccatagctgccgagcagcgtttgcaggtttatattcttgtggggacaggtcatcataccaggggttctcgcactcctgcgagacttccaatagctgtacagcgttttcttcttgaagagggcattgacttcatggaaactcagccaggcctactacgtgttgtgatatattgaaccagccaagaatgtgtacaagttttttgacacagtataaagtccaccaacacggacattttagttattgttgtatctgtatatgcccgaagaacaggaaaaaaatagaagaaaaaaacagttaggggagaaggaaagagaatggttgtagcagaattgtatcgttaaggttaggggcagcgtcattttcttccgtaatntgtaccctaatttttttttttattagatgtact

SEQ ID NO: 212580 - DNA, 482 bp, Glycine max
  unsure (1)..(482): unsure at all n locations
gagcactaagttttctgatgtgttggcattcagtgggccagcacctgagaggatcaatggaaggttggccatgattgggtttgtggctgcaatggcagtggaagtagccaaagggcaaggtgtgttagaacaaatatccaatggtggcatcccatggttcttggggacaagtgtggtccttacccttgcttccttgattccactcttccaaggtgtcagcgtggagtctaagtccaaagggttcatgtcctcagatgcagaactgtggaatgggagatttgctatgttgggtttgattgctctggcttttactgagtatgttaagggtagtactttggtataattcagtcatgaaggcacaccacaatggacttaatctcctttgtgattagagagaccaatgtttatttgtacttcgtgtgtttatttaatctacatatcanaattatttcggtaatcataaccaaacttcttcacattga

SEQ ID NO: 212581 - DNA, 494 bp, Glycine max
acacgaggcaaacagcaattcaatgtgaagaagtttggttatgattaacgaaataattttgatatgtagattaaataaacacacgaagtacaaataaacattggtctctctaatcacaaaggagattaagtccattgtggtgtgccttcatgactgaattataccaaagtactacccttaacatactcagtaaaagccagagcaatcaaacccaacatagcaaatctcccattccacagttctgcatctgaggacatgaaccctttggacttagactccacgctgacaccttggaagagtggaatcaaggaagcaagggtaaggaccacacttgtccccaagaaccatgggatgccaccattggatatttgttctaacacaccttgccctttggctacttgcactgccattgcagccacaaacccaatcatggccaaccttccattgatcctctcaggtgctggaccactgaatgccaacacatcagaaaactt

SEQ ID NO: 212582 - DNA, 554 bp, Glycine max
  unsure (1)..(554): unsure at all n locations
gccataagtcccttccctattgtaatttctgccagcctcaaaaaagacttgctctgcctctgccactctctgagtaggactacactgccatggctgcctcagtctccactgttggagctgtcaacggagctccactgagcttgaacagctctggagctggagcttcagttcccagttcagccttctttggcaccagcttgaagaaggttattgcctcaagggtccctaacgtcaagatttcttctggaagtttcaaaatcgttgccgcggaaaaagagattgatgagaaacaacagacagacaaggacagatggaaaggtcttgcctatgatgtttcagacgaccagcaagacatcacaagagggaagggtttggttgattccctcttccaagctccacaggatactggaactcactatgcaatcatgagctcttatgagtaccttagcactggacttaaacagtacaacttggaatacaacatggacggtttttacattgctcctgctnttatggacaagcttgttgttcacatcaacaagaacttcatgacc

SEQ ID NO: 212583 - DNA, 176 bp, Glycine max
aaaataacacacacttcacacatcattacgacaattaaaagaggtgtggaaattttcaaatagacagagcattctcaacaagagggtcatgtctaattccctttattgaattaaacaaacgaccaaaccaaagaaaacccaaattccacatcatgcacaggattccgaattttcag

SEQ ID NO: 212584 - DNA, 527 bp, Glycine max
taattctcctctcctcgcactccaccacgacctccacggcttctccacacctcgcaccctcgcactcgcagtctctctctctcatgctctcgccaccacaaaaatggtgcttccttgaaacttggtgaaacctagtttcatttttctaccattcttatattgattttgtgttggaagcagctcgaattttgtgagtgacgggtgtcttgatagagtagctatagtatccgattatgagagtaaaagtggggactattctaatccatggagactttgcaccgagacccaggtggaggaattgaaaatcttgatctgcgtgtgtccaatttgggccaccaggatcatttttgctgcagtctatgcccagatgtcaacattgtttatggagcaaggaacaatgatgaacacatgcattggttccctctaactacccctctcaacatttgatgtcatgagtgaggatttgagggtccctttctatgacaggataattggtccaatcataaggaaagtcacaggcaatgaaa

SEQ ID NO: 212585 - DNA, 456 bp, Glycine max
aaagtaacgggtagataactttaactcattcacaaatatggagcaagcttgatagggcattctgtattctaagataatacatattaaagatgttacatataggctattcaaacagtggctggtactggagttgaaggagggacacggttttcaactggaatttcagcaaactcagacaatatagcacggaattcatctccggtcagtgtctccttctccagaaggacttcgacaatcttgtcaatcgcctcacggttgttccttatatggactagtgcaatttcatatgcttcatctgagatcctcttgatggcagcatcgatgtcttctgcaagtctctctgacattgagttccttgccatcattctcatgatgacatccccactttgtgctgatgcttccataagtgaccaaggaccattatcagacatttcagatgtggttaccatctgtttt

SEQ ID NO: 212586 - DNA, 523 bp, Glycine max
aaaataatgatgattcttcatgttaaatctttgcccttctgattaaccttgcaacttcgagaaatttcaaccacctctctctcccaaaatctcagagtgtgctgcttcagtgtcttggtatcaaagatggcaacattgactgcttcaagtaacttagtctctagaaattctcatgtccatcatggaccaacaactgcttcatatgagtctaaagcagtagcaatgggacttagatctctaaagcagacaaatactcatagtggacttagaatttttaacccggtggatgagctacttaacagaaccccaattaaaaccaatgcaatgcaagctatgaggaagggacctcaaggcaagaatgcctggcctaaaggtataatcacatgtggcatgactttcataattataggaacggaagtggctccatggtgcaaaactggagggttaggagatgatcttggaagtctaccaccagcattggcaggtttcgggcatcgagtatgactattgtgccacgctatga

SEQ ID NO: 212587 - DNA, 449 bp, Glycine max
acatgcactcactacactgatttgaatagtgtaatttccgtgtccatgtacatttctataatatatttagaagaaaacacaaattggaagaaggataaaacataatattaataagaagcaaggagctgggggaacttcatgagactaagattccctcacatctttgttctcattattatggtgttgccacattttcctttgcctgtggagcaatttcttctccatcacttccaggttcactgccaggaactcccaggcttagcagcacttcctcccacttcttagcaggccccttccaggaaagatcttgagccatgcagttctttattatttctgtaaaagctggagttccatagactgcaagggcccttttgacagtctttgctatagcatccacatcagctggatccacagcatcacattcaacactgaaggcacccatctgaaat

SEQ ID NO: 212588 - DNA, 528 bp, Glycine max
aaaataatgatgattcttcatgttaaatctttgcccttctgattaaccttgcaacttcgagaaatttcaaccacctctctctcccaaaatctcagagtgtgctgcttcagtgtctggtatcaaagatggcaacattgactgcttcaagtaacttagtctctagaaattctcatgtccatcatggaccaacaactgcttcatatgagtctaaagcagtagcaatgggacttagatctctaaagcagacaaatactcatagtggacttagaatttttaacccggtggatgagctacttaacagaaccccaattaaaaccaatgcaatgcaagctatgaggaagggacctcaaggcaagaatgcctggcctaaaggtataatcacatgtggcatgactttcataattataggaacggaggtggctccatggtgcaaaactggtgggttaggagatgttcttggaggtctaccaccagcattggcaggtttctggcatcgagtaatgactattgtgccacgctatgaccagt

SEQ ID NO: 212589 - DNA, 454 bp, Glycine max
acatgcactcactacactgatttgaatagtgtaatttccgtgtccatgtacatttctataatatatttagaagaaaacaaaaattggaagaaggataaaacataatattaataagaagcaaggagctgggggaacttcatgagactaagattccctcacatctttgttctcattattatggtgttgccacattttcctttgcctgtggagcaatttcttctccatcacttccaggttcactgccaggaactcccaggcttagcagcacttcctcccacttcttagcaggccccttccaggaaagatcttgagccatgcagttctttattatttctgtaaaagctggagttccatagactgcaagggcccttttgacagtctttgctatagcatccacatcagctggatccacagcatcacattcaacactgaaggcacccatctgaaatccagt

SEQ ID NO: 212590 - DNA, 481 bp, Glycine max
aaaagccttagccttccctacaactccaaacacaaagacatcatcatccatggctgcctccgtctccactgtcggagctgtcaacagagctcttttgaacctgaatggttctggagctggagcttcagctcccagttcagccttctttgggaccagcttgaagaaggttattgcctcaagggtccccaacagcaaggtttccggtggaagcttcaagattgttgctgtagaagagaagaaagagattgaagagacccagcagaccgacaaggacagatggaagggtcttgcctatgatatctcagacgaccaacaagacatcacaagaggaaagggtttggttgactcccttttccaagctccacaggatgctggaactcactatgcagtcatgagcttctacgagtacctcagcactggacttcgccagtacttggacaacaaaatggatggattctacattgctccagcttttatggac

SEQ ID NO: 212591 - DNA, 457 bp, Glycine max
taagatcatctcaaacttagcatcttctctttgcacctaagacattgagaatgctaagaatgttacacgcaagttccatcacaacttctagcacttggattagtacaacaaccttcacgaacagaaatatttacttgccaagtttgctttgcctccaattcaagactggaagaaagttcccctctgaatagcatcctcgttagcatttccaagagcagcctcgttcaagtacttgtcagccaattggactctcttgacattctcttgttcttggacaagcatgttaccatacagcaagagcttctccagagtcatcttgggctgctcaaaggttggaggtccatcttttgagttcacaagcttcttcccaacactgtcaacaccaacaccagaaatccacttcctcacttcatcatcatatactctggccctcagtgcaccaaagaaatcaatggat

SEQ ID NO: 212592 - DNA, 501 bp, Glycine max
ctttcattcacccttggtgtgaaacagatgatttgctgctgtaacaaaatggatgctactacacccaagtattccaaggccaggtatgtatgaaattgtgaaggaagtctctttctacttgaagaaagtatgattcaaccctgacaagattccttttgttcctatctctggttttgagggagacaacatgattgagaggtccacaaaccttgactggtacaagggtccaactctgcttgatgcacttgaccagattagtgagcccaagaggccctctgacaagccccttatgcttccccttcaggatgtgtacaagattggaggtattggaactgagccagtgggacgtgttgagaccggtgtcttgaagcctgtatggtggggacttttgcaccaattggactgacaactgaagtcaagtctgtggagatgcaccatgaatctcttacagaggcacattctgttgacaattgtggattcaatggtaaaaatggtgctggt

SEQ ID NO: 212593 - DNA, 432 bp, Glycine max
cgggggttccgacaaacacaacacattaaaacacagataaataaaagcaattttgccaccgtcgatcaagaacccagttctgggaacaacagttgcgagatgatggtggagacttcaaactttgtccgaaaaacaagctacctagaaaagaagacacaagagtacagaaaagaaaccaacatttattgtaaccaacatcccctgatgaaccagcccgcacgattcacttcttcttctgggcagccttggtgaccttggctccggtaggatccttcttctcaacgttcttgatgactcccacagcaacagtttgacgcatgtccctaacagcaaacctaccaagtggaggatactcggagaaagtttcaacaaccatgggtttggttggaatcatcttaacaaaaccagcatcaccgttcttcaaaaacttgg

SEQ ID NO: 212594 - DNA, 603 bp, Glycine max
  unsure (1)..(603): unsure at all n locations
aactagcagagctattttccaaagaatgaagaactacaccatctatgcagtatctatcacaatccgtatagtgtttggcttcatgtttattgcactgatctggaaatttgacttctcacccttcatggttttgattattgccattctgaatgatggaacaatcatgacaatttcaaaggacagggttaagccatctcccttgcctgatagctggaaactgaatgaaatctttgctactggggttgtgcttggaggttacttggcactgatgactgttatattcttctgggcaatcaaagagacgacattcttccccgacaaatttggagttagaccaattcatgacaatccagatgaaatgactgctgctttgtatctacaagtcagtatagttagccaggctttgatatttgtcacccgttcgcgcagctggtccttcatcgaacgccctggattgctgttagtgactgctttcgttattgctcagctgattgctacagtaatagcagtgtatgccaactggngctttgcaggatccaaggattggttggngtgggcaggatgattggctctacagtattgctctatttccactgacatatg

SEQ ID NO: 212595 - DNA, 544 bp, Glycine max
gcaagatgccgttaaagcttttccataaactcttattctccaaccacaaaattcccaataagctcattggctagtcacttgccacttcaaagtgacatacatcaattaacaccaccctggttgagggaaggacccaaaagcatatgaaaatcaaggattgaagctaacaccacttttccccaagcatcaaagcaaaaatttagaccaaaacatctgaaaagacatgaaagaaagataaacagactgagagagagatatatcacaggcttcctctcccaaccgagtaagcataaatagagttaggccttctccttgtctctccgttcattttaatcattgaattttggcccttttggtatctacatcgttcttgtgtaactattacacggtgtaatgctgctggattgtgtcaatgtccagacccttcagcttcaccacagactcaacatgtcccttaagtgtgtaaagctcacgaagccttgcaacttcagctctcctcttggcctgctcagcaatctcagtgagttctctataactgctcttt

SEQ ID NO: 212596 - DNA, 562 bp, Glycine max
tttcccaccaaccctcctctccattcctcaaaacaatcgttaatctcttctccattgtgaactctgatattctccaagtacacaacacaaacacacatcaatttatagcacccgatttctcttttccccctcaaattcagctccattttgttacagattcaaataataagccaagcagccacaccatgatctcgtcaatgaaatgcacagcctcatctctcacatgttctgctttctcaaacagaaagcttcccattgcaaggcctcaactcgtgacattaccaaccatcaacaacgttgaacaaaacatgggtccctctcagttgtgttcacagaagcctctctacctttcatccaccgagaacttggcattggtgaggagaaggagagtgacggagtgccaggcctatgaagctgacaggtcacggcctctggagatcaacattgagctgccggctgaagaggcggcgcagaggttcaagattggtgtgtattttgctacatggtgggctttgaatgtagttttcaacatttacaataagaaggttttgaatgcttttcc

SEQ ID NO: 212597 - DNA, 470 bp, Glycine max
aataataagtactgctctacatgattatttttcaagaaattcttcatagactttcagcctcaagattaagtacagtttagtgcattccatccttctaaagctaatttacaaagatcaaaacgtgattacaaatgctgctgctatggcccaaaagaaataaacttaaattcctattaacaacaaaacatactagctaattaatgccatagtcctcatcagtgacactttgagctccaaccatgagtcatcgtttccttgtgttacataaaagcttcaaaataaccaccttactgtttagcctgtgaatagaggaaggtgccaagaattgcaatggcagcaccaagagcattgatgggctgaacaggcgtgtgaaagataaggatggaagaaacaatgaccgaaatcctcttcattgtggttccaatgctaaatgttaagggagatatctgatcaagagacatgtatgagac

SEQ ID NO: 212598 - DNA, 220 bp, Glycine max
gaaaaaaaagcaaaagaaaaaaaaagaaaaaaaaaaaaaaaaaaagaaagaaaagaaaagaaagaaaagaaaaaaaagagaaaaaaaaaagaaagagagagagcagtaagaaagcagacaaaggaaaaaaagaaaagaaaaaaagaagaaaaaagaaaaagagaaaaaaaaaaaaaaaaagaagaaaaagaaagagaaagaaaaaagaaaggggaagagg

SEQ ID NO: 212599 - DNA, 569 bp, Glycine max
cttagctccaaaaacccatttctgtttctttctgttgatttgatggatccgcagatctaatgatttcacacactttcctcactacggatcattgtcttcttcatctggggcaccccaatagcttcttctaatcgacagtccaattttgttggtttgtggtggatcatcttcgtcgttgtggtgactagtgaggagtgcaggactatacctatctatatagtgtatgaaaattcaggggggtgaagtcgtttttggagtagttgataaatgttgaaatccttgacggttgtttggtgaaatgagggatgttatcggggttgatgaacttattgagggcctgctttcggccgggttcagatggatttacacttgcaggttcggatgctggaggtagacaggatggactgttgtggtacaaggactcggggcagcacttgagtggtgaattttcaatggctgtaatccaagccaataacttgctggaagatcagagccagattgaatcaagctgtttgagctcccatgagtctggcccttacggtaccttcgtcgtatctatgatggccatg

SEQ ID NO: 212600 - DNA, 391 bp, Glycine max
gggaaaaaaacctcggaagaaacctaaaaaagaaggggattcctaaaactaaccccatttcgccgtgcacaacgggacaaaaaggaaggggcgcccccagaacaatttccccaaggccagggcccaaattccccacaggaccctacaacagacctctgcaaaggggcaacccaccccgggttcccaaaccccaagataacgcaactcccaaaaggggggggccccgcaccccccccgaggaccgttccttccccggaaccgggcacccctcggctaccaaacatttcgagtcgctggggccctcgcctgggaaacccccccgggggaaaacccccccgcatctccccagattgaaaaagggccaccggcccgggctatcccaggcgggccc

SEQ ID NO: 212601 - DNA, 568 bp, Glycine max
  unsure (1)..(568): unsure at all n locations
cggaagcaatctggtgggaagaaaaggagtagaggtgatttttttggtaaattacaggtaatcaaggagtggagcaatgtttctgaaatgttttggctgcacaagttcatctcagagaaagtatccaacaataatagaagagttgtgccatcaattttctctggccgatgttaggaaatcaaccaacaactttgataaaaacagattaataggatgtgatggaattagtgaagtatataagggttgtctccaacataatgatcgttctgattatacagtcacatttaagcgatttattgcagaacgttgttatccaccactggacgacctgttcaagaatgaaatagaattgctctgccagatgcgtcaccctaattgtgtctctcttataggattctgcagccacaaaaatgagagaattagtgtgtatgagtacatgtccaatggatctctagatcgataccttgaaggatctatagatcgacatttacaaggtggngatatggaagcactgtcatggaagataaggctagagatatgcataggggcagctcgtggattacactac

SEQ ID NO: 212602 - DNA, 469 bp, Glycine max
acaaaaaataaactttattaactaaaacgaacaggtagcataacattaatatcgtgtcaaggaaaaaattaaatgtagaaaagcaacaaatgcgcaagcggaaagagaaagacatcaagactttaacattgcacacattgtaaaatgtagacaatgtaactcaaaattatacaggataacaatccaatatgaacaagataacttattttattatctcaactcttagcttctctccaagtggagaatgcttaggttctcagggtgtgtataagcaggttccatcatcacttcttgcagttgggtcgaagtttgaggcatttggatcagtacaaccttcaggaacgggaatgtttacttgctgagctgctttgccatagaaagttcctctgttgatggaatcttgattagcatcaccaagagcagcctctttcaagtacttgtctgccagttgtactctcttcacattctc

SEQ ID NO: 212603 - DNA, 440 bp, Glycine max
caagtttcaaatggaaccaaacaccggagagacatatgatgatgttgctggggtggatgaagccaagcaggacttaatggaggcggtggagttattaaagaagcctgagaggtttactgctgtaggggctcgcattcctaaaggagttcttcttgttggtcctccaggaactgggaagaccttgttagccaaggctattgctggagaagctggtgttccatttttctctatatcaggttctgagtatgttgagatgtttgttggtgatggtgcttctcgagtacgtgatttgttcaagaaggcgaaagagaatgccccttggattgactttgatgatgaaattgatgctgatggaagacaaagagggactggaattggtggagggaatgatgaaagagagcagaccttcaaccaaatattgacagaaatggatgggtttg

SEQ ID NO: 212604 - DNA, 451 bp, Glycine max
  unsure (1)..(451): unsure at all n locations
aaagtaaggtagaaatcttataatcattcacaaatatggagcaggctgcagagggcattctgtattctaagataatacatatgaaagatgttacatatataggctattcaaacagtggctggtactggagttgaaggagcaacacggttttcagctggaatttcaacatactcagacaatatagcacggaattcatctccgctcagagtctccttctccagaaggacttccacaatcttgtcaatggcctcacgggtgttccttatatgctccagtgcaatttcatatgcttcatctgagatcctcttgatggcagcatcaatgtcttctgcaagcctctctgacattgagttccttgccatcattctcatgatgacatccncaccttgtgctgatggttacataagtgaccaaggaccaatatcagacatttcaaatgtggtcaccatct

SEQ ID NO: 212605 - DNA, 513 bp, Glycine max
gcatattcccatgggaagagttggggatgacttatggttccaagaccccaatggggacccaatgggagtgttctggttacaaggggtgcacatgattcactgtgcctacaacagtttgtggatggggcatatgattcagcccgattgggacatgttccaatcggatcatgtgtgtgccaaatttcatgcgggttcgagggctatttgtggcggtcctgtctatgtaagtgacagtgtgggctctcatgactttgatctgattaagatgcttgtgttacctgatggtaccgtgcccaaatgcatacattttgcactttcaacaagagattgccttttcaagaaccctttctttgaccaaaaaaccgtttttaaaatttggaacttcaacaaggtacttatgttactcacatacatttgttacacaaaattgccatttaggttaaacacaaatttgttaattaacattatggagaggtattggtgctttcaactgtcaagggctggttgggaccc

SEQ ID NO: 212606 - DNA, 452 bp, Glycine max
aaacaatcagattcactttactaaaagaaaacgagctagtttccaattttttaagtgcaaccagtttttgctataaacaacattcaagcctatcaacggtagaaccacaggacaaaacctagaagaaaattgccaaatcagaaaccccgccattctcttcaatccaagcaaggttgagagtgagttttccatcagggagccactcaaaagcaacatcagaaccattcagttggaacttctttggagattcacttgagtaagcaaggaatctcccatcacccttaaccttaacctttgcacccttctcaacacactccaattcttgaattggccctccactgttgaacatgtttgtgagcccaattggtgcaaatttgatgctgccacctagcttttcaactgggacacagttgtagatctcaaaagtggaaggttgaatagtaaaattgagt

SEQ ID NO: 212607 - DNA, 420 bp, Glycine max
cacgctctttcctcgttgaggcgtataggttcgggtgctgctcctctcgggaaagacttgatggaagagtgtggcaggcgttttcctcatgttgccatttgtcagggttatggtatgacagaaacttgtggcattgtttctgtggagaatccaagagtaggggttcgtcatactggctcaacgggaacgctagtttcaggagtcgaagctcaaatagtgagtgtggatacacagaagcctctccctcctagacagttgggagagatatgggtgcggggacctaacatgatgcaaggctatcacaacaatccagaggccacgagattgactatagataaaaaagggtgggtacatacaggagatcttggatattttgatgaagatggacaactttatgtggatgaccgtatcaaagaactg

SEQ ID NO: 212608 - DNA, 425 bp, Glycine max
caaattacagtaatggcccatgccacatttacagaaccagcacccaacaatcccatccgttttacgatacacattcattattattattccttatcaccatatggtagtgattacaatttctcaacagactcaaacctagaagaagaagaagaaatcctcatcaaatctcagactcagagaccatggatctcaatactgcaatatatccgcagaagccataatagggtggttcagataccccatattcaacgggttgaagaagctattattattaattggctcaacgaaggtgctcgatgttgctgctgctccaaaacccgccacagtggtggcattcaacacgtcaacgatctcattcagagactctaacctgtgactaagctcacccacctgagccctaagcaccgagttctcagcctcaacgc

SEQ ID NO: 212609 - DNA, 462 bp, Glycine max
aaaacatctcaatgggttcttcttctattacaacatcgcccgcaaccatgaccatggctgcgatcgtgctcctgttcacggtctttgccgtttcctccgccctagacatgtcgataatctcgtacgacagcgcccacgcggacaaggccgccacgttgcgcaccgaggaggagctgatgtccatgtacgagcagtggctcgtgaagcacgggaaggtgtacaacgcgctcggcgagaaggagaagcgcttccagatcttcaaggacaacctgcgattcatcgacgaccacaactccgcggaggaccgaacctacaagctcggactgaaccggttcgctgatctcaccaacgaggaatacagggccaagtacttgggaaccaagatcgatcccaaccggaggctcggtaagaccccgagcaaccgctactcgccacgtgtcggcgaacaattgcctgattccg

SEQ ID NO: 212610 - DNA, 451 bp, Glycine max
tattgctgctgcattgtcacataatctacagaaccttgaaaactaacagcaatcaaatatgttcgccatttggaatttgaatacaaatacagtgcatcgataatataaccctatgtacagagccaatgtctgactgaaatttgatacagaacattatctattttgtatcataataaaatggtaaagatctttatgttacgtgcagcattatgtgaagaagggggaagtgcatccagctggtgctttagtccttcgtcttcccttttacttcatcattggctccttctgcacgttcacatttccttaaactgcttaagcactgctgaccttgttcttacgtccgaaggtccaatggggtttcgctggagtacgccttaatgccttcactccaaaggggttgttcttgctcctgagacaagttccagcgtaagtgttgcagatgggatagtct

SEQ ID NO: 212611 - DNA, 500 bp, Glycine max
agttattccgatattcggacgcatcaacttgttatgaaatcacattgatagcctctactcgtgtcctagctcgtctaagagctagatttgcctcaattgtttgtctcttgccttccgccttattcaaattagcttctgctatttcaagagtttgctgtgcttcttgtggatcaatgtcactacccttttccgcatcatttactaaaacagtgatctcattattgtttattctagcaaaaccgcccatcagagccatcgttaaccattggtctttaagaagacgtattctcaaaatacctatatctacggctgtggcaataggcgcatgatttggtaatactccaatttgtccgctattagtagataaaatgatttccttcacttccgaatcccaaacaattcgattgggggtcagtacacaaagatttaaagtcatttcttcaaattgctctccatttctaagttcgtagctttcgcagtagcttcatcgatattaccta

SEQ ID NO: 212612 - DNA, 562 bp, Glycine max
gagacagggtgttaacggctagaaacgaaggaaggagtaacataaaatggaggttcaatttgccctcccattccactaacacacatcacatctccctctcgcacgcgacgagggagctccgcttcggaatctcactccctctttctgctaattgacaagatggttgctcagaaattcgttgttgatttgaacaagccccttgtgttccaggttgggcatcttggggaagcctatgatgagtgggttcacgatcctatcgtaagcaaggaaggccctcggtttttccaaaatggttttctcgagttgttcacgcgcaccgcgtggtgggtgattccaaccgtttgggtgccggttgcaagttggttcatttccaactccgtaaaatcaggcctcccttctcttgatgtagctctgctcgtctttcttggcatcttcgtttggactttggccgaatacacattgcaccgtttcctcttccatgtcaaaaccaagagctactggggaaataccttgcattatcttctccatggctgccaccacaagcaccccatggatagctata

SEQ ID NO: 212613 - DNA, 576 bp, Glycine max
  unsure (1)..(576): unsure at all n locations
ctcgcagccccgagtctgtgcaagacactatcaaagagcttgaggaaaatctaaaggaaggcattgccaatgcagttggctcttctctgacaaagctttctcaagcaaaagtgataggcatttcttgtgatgtttgtgagcctcatgatgtgcagagactggctaacttcgctgtcaaagaacttggtcatattgacatttggataaacaacgccggaacaaataaaggttttagaccattgcttcagtttagtgatgaagatattaaacagattgtctcaacaaatttggttggatctatcctctgcacacgagaagctgtgcgtattatgagaaaccaagccaatgcaggtcacatatttaatatggatggtgcgggttctggaggctctagcacacctttaactgccgtatatggttctacaaagtgtggccttaggcaacttcaaggatcactattaaaggagtgcaagcgatccaaagtaggtgtccatactgcatcttctggcatggttcttacagatctgcttttaagtggctcaacggtccanaacaagcagatgtttaacatcatct

SEQ ID NO: 212614 - DNA, 544 bp, Glycine max
cataatcattgcaataaacaagatagataaagatggagcaaatccagaaagagtcatgcaagagctttcttcaattggtttaatgccagaagactggggcggtgacatcccaatggttccgataagtgctctcaaaggaaagaacatagatgatcttttggaaactgttatgcttgttgccgagttgcaagaactgaaagctaatcctgatagaagtgcgaagggaactgttgatgaggcggggctagataaatcaaagggaccattcgcttcatttattgtgcagaatggcaccctcagacggggagatatagtagtttgtggagaagcttttggaaaggtgcgggctttatttgatgatggtggaaagcgggttgatgaagctacaccctctatacctgtacaggttattggattgaataatgttccaattgctggtgatgaatttgaggttattgaatcccttgatactgcacgtgatagggcataaactcgtgctgagtcattgcgtaatgagcgtatttcagcaaaggcaggggatgga

SEQ ID NO: 212615 - DNA, 506 bp, Glycine max
ggtgccgaggcaactcttataatggtcatcagaagatctcttctgttcttttggttttgaggggaagggaaaacaaaaaagaaaaaaaacctaaacatgagtattagtatcctagtaagttacagttcacattcaaagaattgaagtgctgctcctctcagtgctattttgaagataactggtattcacacaagaaaatgatacaacaaagaagaaaataaaagatacaacttagatcaggtaccaccaatctctgttggtgtggtacaaggtgccagtgtgttatgaggcaggttaataccaccccctctaacagaaatgccagggaacttcacagtgctggccctactcacgagatttgagtcaagatacacaacaatcaccgtggtatcatcatggaaatgacgacgaactccgtgatcaattttctttaaatctgaatatctcatttctctcttctttgcaacttcttgaagcgcagcttttaccagcctcctaacgctttc

SEQ ID NO: 212616 - DNA, 482 bp, Glycine max
cctgtatcgacctccatctattttctcgttccttctgggagtgtgtctcgcctccatcgcataccctgcgccgaaacctggcatcattacatcggcgaccctctcaccgtagtggaattgaatgagaaagatgggagcgtaaaattcacttgccttggatcagatctgactcagaatcaggtgccgcagtacacggtgcctcccaacgtctggtttggctcttttcctaccaaggactatacctactctgcggacggggtattcggaagtgctgaagctgaagctgaagctgaagctagagatagtgagaggaactacactcttgtaggatgcacttgtgcccctgcgtttcagtaccaggactttgagctcgctaaaccttcttatatactcggtcgttttccccaattccaccctctcgtcactgttctcacatttctcgagtgactcacactatctatctgttctgctttacggctttc

SEQ ID NO: 212617 - DNA, 542 bp, Glycine max
cagctatcggggaagcaattggtttaggagcagccattgattacttatctgggattggtatgcaaactatacatgattatgaggtggagctcggtagatatctgtatgagaggcttctttcagtcccaaatattcgcatctatgggccagcaccttcagaaaaagtcgaacgagctgccctttgctctttcaatgttgagaatttgcaccctactgatcttgcaacacttctggatcaacagcatggagtggctatcagatcaggtcaccactgtgcccaacccctccatcgctatttaggtgtcagctcaagtgcacgggctagtctctatttctataacacaaaggaggatgtagacaactttatccatgccctcaaatgacacagtcagctttttcaattcattgatgtaactgatatgtattattatgtatattatatttagtttataccagaatgagagggttggcttaattggtaagacaaacttgattaatgaaatggtcctgaatttcattcttcctggtcatatcattggctg

SEQ ID NO: 212618 - DNA, 471 bp, Glycine max
  unsure (1)..(471): unsure at all n locations
atttagtgcgttaagagcattttctttacacaaaaattcaggaggtagataggttgcaatactgcaattagtggatgcctattaccagccaatgatatgaacaggaagaatgaaattcaagaacatttcattgatgcagtttgtcctaccaactaagccaaccctctcattcttgtataaacaaaatataatatacataaaaatacatttcagttacatcaatgaattgaaaaagctgactgtgtcattgagggcatggataaagttgtctacatcctcctttgtgttatagaaatagagactagcccgtgcacttgagctgacacctaaatagcgatggaggggttgggcacagtggtgacctgatctgatagccactccatgctgttgatccaaaagtgtngcaagatcagtagggtgcaaattctcaacattgaaagagcaaagggcagctcgttcgactttttctga

SEQ ID NO: 212619 - DNA, 492 bp, Glycine max
cagctatcggggaagcaattggtttaggagcagccattgattacttatctgggattggtatgcaaactatacatgattatgaggtggagctcgtgagatatctgtatgagaggcttctttcagtcccaaatattcgcatctatgggccagcaccttcagaaaaagttgaacgagctgccctttgctctttcaatgttgagaatttgcaccctactgatcttgcaacacttctggatcaacagcatggagtggctatcagatcaggtcaccactgtgcccaacccctccatcgctatttaggtgtcagctcaagtgcacgggctagtctctatttctataacacaaaggaggatgtagacaactttatccatgccctcaatgacacagtcagctttttcaattcattgatgtaactgaaatgtatttttatgtatattataatttggttatactagaatgagagggttggcttagttggtatgacaaactgct

SEQ ID NO: 212620 - DNA, 447 bp, Glycine max
aaaaatttagtgcgttaagagcattttctttacacaaaaattcaggaggtagataggttgcaatactgcaattagtggatgcctattaccagccaatgatatgaacaggaagaatgaaattcaagaacatttcattgatgcagtttgtcctaccaactaagccaaccctctcattcttgtataaacaaaatataatatacataaaaatacatttcagttacatcaatgaattgaaaaagctgactgtgtcattgagggcatggataaagttgtctacatcctcctttgtgttatagaaatagagactagcccgtgcacttgagctgacacctaaatagcgatggaggggttgggcacagtggtgacctgatctgatagccactccatgctgttgatccagaagtgttgcaagatcagtagggtgcaaattctcaacattgaaagagc

SEQ ID NO: 212621 - DNA, 422 bp, Glycine max
ggttcttctacttcccaggatgctttcaatttatcaattataccacaccacagaggattccagtgattgagtgagtggatatgaatatggaaggaccttatgatttattatgcaatggaaaagctggtaacaataagcctgtagatcattaaatactctccttataaaccctgcaccatgatatcatcattaccttggtttgatctaagagtgttttatgtgagagtgtgtggcattcaggttgatgaatccactccagagtttctctctctcaatcatattcctcttaggcctgatacccttgtaaaggtgaacggggttaggagaagcatttactctgatggagaagagtttttagatctgggaagggatagagtggataagaaattcgaggaagctacctttgtgaacactgatagtat

SEQ ID NO: 212622 - DNA, 324 bp, Glycine max
gttcaagcaaggtcagctgtgcaagcattgcttgtccgtggtgagaggagctactaccgacatctctcaacggcgggtatcgtggaacatagacaccatcacggtggctgagcgtttgtaagctctcactggcggaggatgtccactcttccataggtaaaggatcagcactcataggacaaatagaacgaggccaacgacaccactgactctggtgttacgagttaatggggaatcacaacgcccaaggttaggaatgaggactgtacagactggccgtcgaactgctttatgccatgggattgttaccactctgttgtgtca

SEQ ID NO: 212623 - DNA, 442 bp, Glycine max
attttgcatactgaaaaagggattcttactaaagcaaactcaaacaagaacaacttccactcatttggcatctaccgtagtaacacaagatcaaaagcagcttctctgatagaacacacgtacgtatgattcaacatctttcacagtagtggttcatttctaacagctagctattgcaacttaaaataattgcaatgcttctgcaaagtgctaactttttttcccccccttctttatggatatgacaatgtgatcagaatgaaacaataaccaatccattgaatttgaatctgattttgggtttggatcgataccaccattcttcatctcaggaaaggacaagatataggccaaagcctactaattaagcgcttaaaactgcattagtggctggtttaagtgtgatgttagtaacatcagcttggttattaaagggtgatct

SEQ ID NO: 212624 - DNA, 576 bp, Glycine max
gaattgtactatataatataaccaaaattaaaaaaaaagaaaagaaaaaagaaacaggagcagaagaggaagatgctggtgagtgaatcgagtggttcgaaggtggatcttccggaggagttgctaaatgttctaccgtccgatccttacgagcagctcgatgtggcccgcaagatcacctccgttgcgctgtcgacacgtgtcgacgcgctccaatcagagtcgtccgctctacgcgccgaactcgccgataggaaccggctcatcgccgagctccagtctcaggtggagtccatcgacgccgctctctccgaagccgccgataagctagcccgagccgaccaagacaaggagaatttgctgaaggagaacgcttcgctttccaacacagtgagaaagctcaccagagatgtctccaagttggagactttcagaaagacgcttatgaaatcacttcgcgaggatgatgatacttctgaaggaacgccggacactgcaacttagttacacagtcaagcaagtttcactttcacatcgcaatttggagatgatgatgcatcttcaacgctttcttct

SEQ ID NO: 212625 - DNA, 437 bp, Glycine max
cctaaaaggacaccaatggtcgacctgttaacagacttgctcttgtcaagaaaagtcattccccaattcaaatttacaggcttggaaattcaaataaaactttatcacgcaataataagtaatatgtaatttacaatgggaaaaggttgctaaagtagggggaatatcagttgttacaaattaactaggaagttggaacaaaacttcagtcatgaaattaatttccgcatgatagtgctaatggacattgcgcgttatcagtccctcaaatatagtataaaggtccttgttttcaggcccaaataactcattagctttctgtagggtttcctctttagtttgtttatgagaattcagttccttaacatttgccaaaaatgcaccaaactgctcataagataaacgactcctaacttggcgaaaaaactcttttccat

SEQ ID NO: 212626 - DNA, 563 bp, Glycine max
  unsure (1)..(563): unsure at all n locations
caatcccacacgcttcctactcctccctttcaccacttttctgctcccccttgagaaagaatttgaatcatcaaaattaaaaactcgcaccaacaatggccccaagagacagccgagccaccgcgttcgccggaccaggcccaggccccatcaccggcccacaaagagatccgctaccgaggcgtccggaaacgcccctggggccgctacgccgtcgagatccgcgaccccggcaagaaaacgcgcgtctggctcggcaccttcgacacagccgaggaagccgctcgagcgtacgacaccgcagcgcgtgagtttcgcggtgccaaggccaagaccaattttccgacaccctcggaactcatccttaacaacaacattcgcagtcccagccagagcagcaccctcgactcttcctctcccccgtcaccgccaccgtcgcttgaccttaccctaacccctctctccgtggccgtcaccgtcttcccggtggctcgtccggttctattctttgacgcgttcgcgcgtgcggacgccatgatcgncgtctnccgccgcgagatgtg

SEQ ID NO: 212627 - DNA, 534 bp, Glycine max
aaactttcgaaagattttatccaattgaaattttaaaaatgactgggataaacttaagaattcaattattgaaattgaataagtaaacaatttaattggattggtcgaatggtatcaacaaataatggtagtaccttaacttcccaatttacttaatttattaattgaattaaccgatcaaacttgcttgttatcgaacattttctttttgatttcaaaaattttccggaaaaaatttgaatctatttttatatgcgaatcaatcctactacttctggtcctgaggtttctgcgcttgaaaaaaaaaatctgggacgtatcgcccaaataattggtccggtactagatgtagcttttcccccaggtaagatgcctaatatttacaacgctctgatagttaagggtcgagatactgttggtcaacaaattaatgtgacttgtgaagtacagcaattattaggaaataatcgaattagagctgtagctatgagtgcgacagaaggtctaatgagaggaatggaagtgattgacaca

SEQ ID NO: 212628 - DNA, 425 bp, Glycine max
tttttttttttttttttttttttttttttttttttttttttttttttttttttgggtttttttttatttatgaagaattcccatattcgggcccctcatttttttttgaaggggaaaaaaaaaacccaaccccgggccttatttgggaaaaaaacaaatttggccgaatggggcggcactagccaaacgccttaaaaaaaaaaaaatttgggtaggaaaaaattgttttgttttttggggttaaaagaaaaaaaccttttccgcaaaaatttctaaaacgggggaacaatttttggggggtatagggaaaccccccaaaaaaaccctgggtaacacaaggttcttaaaaaaaaggtttttccccacaccctttttccccgggggggccatgggggcccgtttttgttataaaaaaaattggccgg

SEQ ID NO: 212629 - DNA, 548 bp, Glycine max
attgaagtcaaaagccttagccttccctacaactccaaacacaacgacatcatcatccatggctgcctgcgtctccactgtcggagctgtcaacagagctctttggaacctgaatggttctggagctggagcttcagctcccagttcagccttctttgggaccagcttgaagaagggtattgcctcaagggtccccaacagcagggtttccggtggaagcttcaagattgacgctgtagaagagaagagagagattgaagagacccagcagaccgacaaggacagatggaagggtcttgcctatgatatctcagacgaccaacaagacatcacaagaggaaagggctcggttgactcccttttccaagctccacacgatgctggaactcactatgcagtcatgagctcctacgagtacctcagcactggacttcgccagtacttggacaacaaaatggatggattctacattgctccagcttttatggacaagcttgatgttcacatctccaagaacttcatgacccttgccaacatcaaggttcctc

SEQ ID NO: 212630 - DNA, 453 bp, Glycine max
aaaaaataaaaaaaaaaaaaatttaatctatataaatataaaaataatatatataaggggcaaatagtaaatcgaggtacccattttatgataaactttccttccatttttgttcctctagtaggcctagtatttgcggcaattgcaatggcttctttatttctttatgttcaaaaaaacaagattttttagatacagaaaacaaagtaaaattctggggttttttattccccaattataatactaaattcaaaaaaaggagagtaatgagtataatctttcgctcagacgatgtactgatatattctatggcggaggttcgaagaacaagcaatgtattttgggccgctttcactttgttaggatcattggggttattgttcgttgcaatttccagttatcttggtatggatttgttctttatttctgagaaaattagtgatttttctttta

SEQ ID NO: 212631 - DNA, 520 bp, Glycine max
aaaacactcataacacaaagcacaaagcctagctcatccttgagtttaaaaatggctcctaccttcttccatggcttcctcattcccatccttggcctgtcaaggatcccaaaactctggcctcatcaatctcctataaagggctctgcttatcctactgcaaaccctgagtgttcgatgactcgcttgtcaaatagtttcctaacaaaaagcgacacgaggcggggtgggactcgaagaaagccggatatgatggactaatcgaaattgccaatcgtataactgattaagggcactaccaattctgataccgtacaagcagcggtacgaatattcgaggtctctgttcccttcatatctattggagctctataaaatgctcatagcttctataggaggaggcaaaattgccgctatgatggttgcaatggttactgtactgacttgtcaatggctcatgggcccctgcaaagaccaattctgtagacctacccgatggaaccctatgcagtaatgggtg

SEQ ID NO: 212632 - DNA, 447 bp, Glycine max
tacttcaccaaacacaaatctaaaaactctaaaagtcatttcgttctttgacgctcactttccggggacgaagttggtggcataggcccaggcgttgttgttgacagggtcagcaaggtgatcggcgaggttctccaatggaccctttccggtgacaatggcctgaacaaagaagccaaacatagagaacatggccaatcgtccgttcttgagttccttcaccttaagctcagcaaaagcctctgggtcatcagcaaggcccaatgggtcgaagctgccacctgggtagattgggtcagtgacctcaccgagggggccaccagcaatacggtaaccttcaacggcaacccattaggataacttgtgtggcccagatggcgaggatgctctgggcgtggatcaggcttgggttgcccaagtagtcgaagcccaccctcgctgaagatc

SEQ ID NO: 212633 - DNA, 472 bp, Glycine max
caacaggggaaagtggaaggagaacgcaaaagggtacccttgttttcattgtctcgattgttttcctattgtcatttatcatcataaaccttcagagccatgagcccagctttgaaaacaatatcacaacggtgccattactacctatagctagaggggtcgctgagggtgtatcagccaagtcaaatccatatctatcacagaaagcttcatataattggacaaatgccatgttatcttggcaaagaacagctttccattttcaacctcaaaggaactggatgaacggtccattgttttacatggggtggtaccatatattttaccaatacaatcctgattcagcagtgtggggcaacataacatggggccacgctgtatccagagacttgattcactggctctacctttccattggcgtggttccagattagtggtttgacatcagtggcgtttggtcaaggtcagcaac

SEQ ID NO: 212634 - DNA, 501 bp, Glycine max
atgtatataatatgatatgaaaattaagataaaaataaaataaaacaatagaaggctcttttgtatataattactctagtggtagactttaatgactcttgacaaattccaaataatatggatatccatggcatgggtatgcctacaagctgtaggataactcaagctaattaaacttatcagctttatgcctttatgcatgttgatgccacaagactttcattgtttccttagttggcaggggcaatagtaataaccgtttacaaaatatataatgcaaatgtgcatccatagctttgactttcacaacttctggtcaaaggggaaggggcgtatgaaagctgagttcaattgccaaatcttgagcgaggccttgatgtttatgtccgtcgcgttgttgaacagaaacaatcttgcagctccatatattgcttctgttggataaactctagatgtgatcactgttctccctccctgagcaaagctctcaatgatagaatg

SEQ ID NO: 212635 - DNA, 614 bp, Glycine max
  unsure (1)..(614): unsure at all n locations
ctccgctttccctgcaaccaaacagcacctaattccttccaaactcgagccattcttctctgtcatgaaccgcttgtcgcagctctcatcgtacaccgtcgccatagtcaggaagcaccgttcgcctcatcgcgaaccgctccctgcgccaccggtgctgctcgttcccggcgaaaccagagtaccgcggaattaggtctttccgttcagaattcgcgttgaccgccgctcgctgctactccgccaagaaagggcgcaagagcaaggcggagcctgaagtgccggcggtggtgatggagcaggagaaagacgctttctacgtcgttcggaaggggacgttgttggaatctataacagtctcgctgattctcaagctcaagttggatcttccgtatgcaatcctcctgttagtgtgtacaagggatactcgttgtcaaaggacaccgaggaatatcttgtctcacatggactgaagaatgctttatacacaattagagctactgatttgaaagaggatttgtntggcatgcttgttccttggccctttcaggaaccttctaccaaagagggcacatcaaattaggacgtatctaaacagagtatcttgggagtgc

SEQ ID NO: 212636 - DNA, 579 bp, Glycine max
  unsure (1)..(579): unsure at all n locations
caattatgcatatctgttacatgatgtagatatcgggtacacgttgagtgtctgtgtgataccttgctgaatgctgtgctctgtcatacgatgcccttgagtagagaaacaatcgataatcttgacactacataccctcaacatctcatccattcattcattgattcaccacccgggttggaacatggtttaaattgaaaagcaagaatcgggggcaaaggtgattgggtcaggaactgacaagaaaaggattcctggcattgatatccacttgaacgatggtgataagtggatgtttgctggccatgaggtgcgtgtaatggacactcctggtcacacccaaggccatataagcttctattttcctggatctggggcaatntttactggagacactttgttcagcttatcatgtggcaagctctttgaaggaaccccacagcagatgctatcttctcttaaaaagatcatgtctttgccagataatacaaatatatactgtggacacgagtatacattgaataatacaaagtttgcattgtctatcgaacctgaaaacgaggaacttcaatcctatgc

SEQ ID NO: 212637 - DNA, 485 bp, Glycine max
acatcgagaacatagcatcaagcatatattattccacggatggatttatatcctaccctacatagaacaagtttcttcaaacgttcaaaatattgtaagtcaaaaatctaaaaattatcctttgcttgccggatgccaccaagggcttctgcatcatttgctgtggctgcaatgtttagtgattgccggattgcagcactggatgtacgaaggaatggattacaagccttttccatcttcagtgtggagggaatcgggggcaggcctttacttcgaaggtaagctacttgggcagcataagattgaagttcctcgttttcaggttcgatggacaatgcaaactttgtatgattcaatgtatactcgtgtccacagtatatatttgtattatctggcagagacatgatctttttcagagaagatagcatctgctgtggggttccttcaaagagcttgccacatgataagctgaacatagtgtctcc

SEQ ID NO: 212638 - DNA, 587 bp, Glycine max
  unsure (1)..(587): unsure at all n locations
cttgctctacctctgccactttctgagtacaatacaacactgccatggctgcctcagtctccactattggagctgtcaacagagctccactgagcttgaacagctctgaagctggagattcggttcccagttcagccttctttggcacaagcttgaagaaggttactgcctcaagggtccctaacgtcaagatttcttctggaagtttcaaaatcgttgcggcggagaaagagattgatgagcaacaacagacaaacaaggacagatggaaaggtcttgcctatgatatttcagatgaccagcaagacatcacaagaggaaagggtatggttgattccctcttccaagctccacaggagactggaactcactatgcagtcatgagctcttntgagtaccttagcactggacttaaacagtataacttggataacaacatggacggtttttacattgctcctgcttttatggacaagctngttgttcacatcaccaagaacttcatgaccctgcctaacatcaaggttcctctcattcttggtatttggggaggcaaaggtcaatgaaaatcctttcaatgcgagctc

SEQ ID NO: 212639 - DNA, 473 bp, Glycine max
agtaaaacaccttctattatttgaagccacaaagttcagcagaaccacaatgaacaccaggaaatattaattgattatctcaagtgttttttttagtagtgagacaatgtaactcaaaattataaaggataacaatccaatatgaacaagataaattatttgattatatcaagtcatagcttctcttcaagtggagaatgcttaggttctcagggtgtgtataagcaggttccatcatcacttcttgcagttgggtcgaagtttgaggcatttggatcagtacaaccttcaggaacgggaatttttacttgctgggctgctttgccatagaaagttcctcttttgatggcatcctgattagcatcaccaagagcagcctcgttcaagtacttgtctgccagttgtactctcttcacattctcttgttcttggacaagcatgttaccatactccaagagcttgctcaaagtcat

SEQ ID NO: 212640 - DNA, 592 bp, Glycine max
attctagcgagcagagcttttgtcaattttctattgaccttctcggtggaggaattttagtggacaaaactggagattggatcacacttatacaaaattctccaattagtaacttgttgagagttgctgcttggaagaaaaggcttgtttatgggttaaaattgtgatgtctggggaatgcagcagtcaaaaaggagtgattgggcctcattggtacaagtgtttttaacaaacagcaacagtacagagcatttcgatgcatgtaagtggacaaaatcggaaccacattcctgggaattgatcttcccaatagaggtatgtggtcctaataatggttttgaaatgtggagttctgagtgggcaaatcaaacttcatggcacttgagtttccttattgacaatcccaaacagtctacagtttttgatattctcttgggaatttctcaagattttgaaattgctggtaatactcttatgccagctttttctgttccacaggctactgccagatcttctgaaaatgcggaatcctctgcatgatctgggaattgtgttttctttcgttgggtcgttggttaattcataaaggaat

SEQ ID NO: 212641 - DNA, 558 bp, Glycine max
  unsure (1)..(558): unsure at all n locations
ccttccttttcttcttctccttcatatgttctctctcaccattctcttcttcttctccctttcttagattctccctcttttctctctgccctccgccatgactgaggataaggagatgtcttcctctgtcaccaatggcgatgattccctcactggtcacatcatatctacaactattggaggcaaaaatggggaacccaaacagactattagttacatggcagaacgggttgtaggaactggatcatttggaattgttttccaggcaaaatgcttggaaactggggaagcagtggctattaaaaaggttttacaggacagaagatacaagaatcgcgaactacagttaatgcgtgttttggatcatccaaatgtgatctctntgaagcattgtttcttttcaactacaagtacagatgagctttttcttaatttggtgatggaatatgttccagagtctatgtatagagtcattaagcactataccaatgctaatcaaagaatgcccatcatctatgtaaaactttatatgtaccagatttcagggggctgcttata

SEQ ID NO: 212642 - DNA, 518 bp, Glycine max
gtttgggctcttccaacattggctcttacattaatggccagtggaaagccactggttcttctgtcacttctgttaatccttctaacaatcagagtatagctcaagtgaccgaagcaactttgcaagattttgaggaggggtttgcgagcttgcagtgaagcagctaagacatggatgactataccggcaccgaagagaggtgagattgtgagacagattggtgaagcattgagggccaaattggatcctttgggtaggctggtgtctcttgagatgggaaaaattctcccagaaggaattggggaagttcaggaaattattgatatgtgtgattattgtgttgggctaagcagacaattgaatggatcaattataccatcagaacgtccagatcatatgatgtttgaggtatggaacccactaggaatagttggtgtaatcagtgctttcaactttccatgcgctgttctaggatggaatgcttgcattgctttagtctgtggttactgtgttgtgtg

SEQ ID NO: 212643 - DNA, 496 bp, Glycine max
  unsure (1)..(496): unsure at all n locations
aaacatcaaacactttttgactgggaaaagaattctcagcttattcatttaacatttatttaagatatcttatacattgaaactgtcatatcaaggtgccatccttacagcaagcatgtcttgttaagacaacactttgaacccatgtcagccagactaacatctcggtatatatagaactctcttcagactgcaaaatcgcattattttgtgcagcctcatgtgctaggatagctttctagccaaagtttatcccctgagctaatggtagttcacttccataattaatggtacatgtagaacgccgcatgtattgcttccatgagtcacttcccgcttcacggccaccacctgtcgccttttctccaccaaaggcaccaccaatttcagctccatttgtaggtatgtttgcattcactataccacaatcactacctcgtggcccgatccatttgaatatagttccaggtctttgggtaaagatngaactacttaa

SEQ ID NO: 212644 - DNA, 614 bp, Glycine max
cgtgatattctctgcgtatattactgggatgcctcgtgctttgacactgtttgacgctcgtgaatgtgtgaatatgattgctcatgacttatagctgtaggtacttggttaacgtagaggtgtccaccagtcttcggcatcaacgggctcttcagcatataggattgattgcgcccattgcatggctgccccatagaggcttgcctgaacgagctgttgccattcttcgggcttggcttttgagcattaccttcacccatatccaaaggactccgataaagttatgcttgctaaacaaactggactttctaggagccaggtgtcaaactggtttatcaatgcccgagttcggctttggaagccaatggttgaagaaatgtacttggaagaaatcacggaacatgaacaaggtaatgcctcagaaaacaccaaatcaaaggaatcgagcaaggagttgggttcaacagcaaatgttgcacccgaatcaggtgccattaaactcgatcatctacaatcaaagcaagatagcttcatacaccataacacttcttcaaccgagatctcaacatactcttcaatgtctccaatgggaaggtcccttcaatccccctctg

SEQ ID NO: 212645 - DNA, 451 bp, Glycine max
ttatttgttcactacgtattatatgcaataaaatattatatggcagaaatattctaagttggaaaaaatagaaactaagatataggatttttcaggaaggggttaaaaaagattattttattgatatttttagaatatttctatttcgacacaaacaagaaggaataggaatcggactctaggaaaagacaaaaaatcccccctagagtaccttttccatattttaattgattttgtttcaaattatctatctatatagatatctattttatgtttagtatcgaatccaattttattgtattttacaatcgaaatttctataatagaactctctattatagaaaaatgaaatctgaaaaaaacagtgtcataaccataatattcgaatttattggggggttgaaaaaacatagtcaaatagtcttcctgacaatatccatactcgagttta

SEQ ID NO: 212646 - DNA, 472 bp, Glycine max
  unsure (1)..(472): unsure at all n locations
gtaaacggctgttttgtatacgagctgtcccggtctcagcctctacatcccaaaacatcaaaacaactggttgggctccttgtatggcttcttcctcagttggtagaagagctacatattcaacacaatctgtatcgacaaatgagccagttgtatctgtagattggctntatgataacctgaaggagccagatatcaaggtactagatgcttcgtggtacatgccggatgagcagaggaatccaattcaagaatatcaggttgctcacattcctggtgcccttttctttgatgtagatggaatagcagatcggactacaaaattaccacacatgctgccatcagcggaagcggttgctgctgctgtttctgctcttggcatagagaacaaagatgatttggctgtttatgatggaaaaggattatctagtgcagctcgtgtttggtggatgttcccagtatttgggcatga

SEQ ID NO: 212647 - DNA, 353 bp, Glycine max
ataagccacatgataggatttaatattagtaacatttgaacatattagcaattctcaagaatctcaaccacaactaaaccaaaacaacaaacagtaaagcatacaaaaattggtgtgttcaaaatgtttgacaaatgaaaacagccccttcacttgcagatactttttggtggcatgcaaatttagctgtattgaattcataaagtgtcaacaggtgtatttgattgtgctccccattcagtccaagatccatcataaactgcaacatcagactttctaagacgatgaagacccaatgcaagaatgcaagcagttacgcctgttccacatgaagtcacagctgggctttccag

SEQ ID NO: 212648 - DNA, 428 bp, Glycine max
cgcgcgtgcacgtgtttaaattcaggtcggagagatacgctggagttcgtgagggatggtttgaagtcgatgcgcgtgaacccggggctgtcggtgttcgcggcggatccgcaggtcacgtgggggttaatggctgagttggcgaattctggaaccggtgatcccagggagagctgcggggagacggacataatgctgatggccacggaggtgcatgagatgctggacgcatgagagcatgaaaggattctggcgtagtgcacgaaggtgctgagagacgtacggttcaagttaagggacgaatgggcttcatgttatcacaggttctgataaagaatgtatgcttgtgttgttgcttattatgcacttggcactattggatgtgatcctttggaaactactgagattattgaacttggtggtgctta

SEQ ID NO: 212649 - DNA, 552 bp, Glycine max
aatctctagttcacaggagaggggacagatgtttattggtcctggagtggatgtttataaaggtcaaattgttggcatccatcagcgacctggggacttgtccttgaatgtttgcaagaagaaagctgcaaccaacgtacgtttcaacaaggaacaaacagtgattcttgatacgccatttggactatagtctggatgactgcattgaatacatccaagaagatgaactagtagaggtcacccccgcaagtatccgaatgtgcaagaatccaaaaattacaaacaagaaaacaaggtagactctcactgtgaagcagtaacttgcgaatgctttttgagttaaccagtgactgctggtgtgctgaagctgcataactcatcaatgctgttgctgctaaagtgatgaagaaacaaatcattaccattgatgtaatgtcacatatattcttccgaagatgcaggcagaataatatagaagctggctgaaagccctattcattatagctattggtcattacagttgattaaagggatgaagttatactgaatttt

SEQ ID NO: 212650 - DNA, 517 bp, Glycine max
  unsure (1)..(517): unsure at all n locations
ggcaatggcggaggaagcacagtactcatcgggacccgattccgcgcccctcaagcgcaagtacgaagaccaaccctccggcatcgagcttgccaagcagcgtgctcaggaagtcgccgcacgcctnctcaacgccgctcctcctccgccactcgacgccaagcgtnccaaacccgacaccggcttcgattctctcgatttgaagcctctgtattccgcatctcctcctcccgtctcctacggtcaccaaggttccagcaagaagattgatatccctaatggcagggttggtgtgattattggtaaaggcggagagactattaagtatctccagttgcagtctggtgccaaaattcaaattactcgtgatattgatgcggaccctaattcttccactaggacggttgagcttatgggcactcctgaagcaatttcctctgccgagaaactcatcaatgaagttcttgctgaggctgaatctggnggttcttggcattgtactcgaagatcacgggac

SEQ ID NO: 212651 - DNA, 428 bp, Glycine max
tgagaactaagaaggagaagcaaatggcttcctcaatgatctcttccccagctgttaccactgtcaaccgtgccggtgccggcatggttgctccattcactggcctcaagtccatggttggctttcccaccaggaagaccaacaatgacattacctccattgctagcaacggtggaagagtgcaatgcatgcatgtgtggccaccagttggcaagaagaagtttgagactctttcctacctgccagaccttgatgatgcacaattggcaaaggaagtagaataccttcttaggaagggatggattccttgcttggaattcgagttggagcacggtttcgtgtaccgtgagcacaacaggttaccaggatactacgatggacgctactggaccatgtggaagctgactatgtgaggttgcacatgatgc

SEQ ID NO: 212652 - DNA, 484 bp, Glycine max
  unsure (1)..(484): unsure at all n locations
gtgtccgaaaacagaaaccaaaaatacaggatgatgaaatctcaaaaagcaaaaacaaatgggaatgtagtttaagtacaaacaaacaaagtggggtggcggctacaaatgctttgcaaatttttcacacttagaagcctgggggcttgtaggcgatgaagctgatgcactgcacttggcgaacgttgtcgaatccgatgatacggatgaagccgttggggtatgcagtcttagcctcttgaagctccttcaacacctgagaagcatcagtgcaaccaaacataggcagcttccacatggtccagtagcgtccatcgtagtatcctggtgacctgttgtgctcacggtacacgaaaccgtgctccaactcgaattccaagcaaggaatccatcccttcctaagaggtattctacttcctttgccaattgtgcatcatcaaggtcttgcaggtangaaagagtctcaaacttcttctttgccact

SEQ ID NO: 212653 - DNA, 555 bp, Glycine max
aaaaagagtagctagcactagctagctaaacacagtacgagtagtgatcataggcaagcaaaagcatattcataatatggcaaccatggaagacatgaacaacatgagtggtgaaattacacttccaggcttccgattccaccccaactgaagaagagcttcttgaattctacctaaaaacatggttgttggcaagaaacttcgttacgatgtcattggtttcctcaacatctatcagcatgatccatgggacttgcctggtttggcaaaggttggggaaagagagtggtacttcttcgtgccaagggacaaaaagcacggaagcggaggaaggccaaaccgcacaactgaaaaagggttctggaaagccaccggttcagaccggaaaatagtgaccttatctgatccaaagcgcataattgggttaaggaagacactggttttctatcagggaagagctcctaggggatgcaagaccgattgggtcatgaatgagtaccgtttacctgacaattgcatactacctaaggaaatcgtgttatgcaagatatatcg

SEQ ID NO: 212654 - DNA, 633 bp, Glycine max
catctatgatctaggagtgaactatacaatatcaaacttctcacctctgtatcaaacctgagaagaatcacactatagcggatttctgttcctcacttaagggcattgaaaaatcttggaaagatatccctctacatgtgtagtaacataagtcaagcttttggaaatgtaccatcacagttggattcatttcatactatcagatttgaacattgactattgcaaggatatggtgaaattgcctactgggatctgtgatattgtctcactaaagaagctcagtattactaattgacacaagcttagttctctgccccaagaaattggacagttgttgaatttggaactcctgaacataagttcctgtactgatttggaagagataccagattctattgtaaaactttctaagctaagacttcttgacctctcaaactgcataagcctttcaagtttaccagaggacattggtgatctatgtaatctcaggaatctcaatatgacaagctgtgcaaggtgtgaattgccatactcagtaaccaatcttgagaatttcgaggtggtcgtatgtgatgacaaaccagctgttcatgggaagccattcaagctatgctttcaaatctgaagtagagg

SEQ ID NO: 212655 - DNA, 541 bp, Glycine max
  unsure (1)..(541): unsure at all n locations
gtgtgaactagacaatttcaaactactcagctctgtatcaaacctgagaagaatcagactagagcggatttctgttcctcacttaggggcattgaaaaatcttggaaagttatccctctacatgtgtagtaacataagtcaggcttttgaaaatggtaccatcacagttttggattcatttccaaaactatcagatttgaacattgactattgcaaggatatggtgaaattgcctactgggatctgtgatattgtctcactaaagaagctcagtattactaattgtcacaagcttagttctctgccccaagaaattggacagttgttgaatttggaactcctgaacataagttcctgtactgatttggaagagataccagattctattgtaaaactttctaagctaagacttcttgacctctcaaactgcataagcctttcaagtttaccagaggacattggtgatctatgtaatctcaggaatctcaatatgacaagcttgtgcaggtgtgaatngccatactcagtaaccaatcttgag

SEQ ID NO: 212656 - DNA, 474 bp, Glycine max
ggctcgagtgagaactcattctcaggaccaatgcctgagagtttttttgagagctgctcttcccttcatcacatttctctagctaggaacatgtttgatggtccagatcctggctcactgtctagatgttcctcattgaagagcattaatctttccaataatcatttctccggtaatgtggactttagtgggatatggtcattgaacaggcttaggactttggatctatctaacaatgccttatcagggtctttacctaatggaatttcatccgtacataacttttaagagatcttattacaaggtaaccagttttcatgtccattatccactgatttttggattctgcctgcatctgtatatgttggatttcagtgataattagttcagtggataactgcctgaatcactagggatgcttagttctttgagctatttcaaggcattaaattatcatttccacagttgattccc

SEQ ID NO: 212657 - DNA, 460 bp, Glycine max
  unsure (1)..(460): unsure at all n locations
acataaaccaaatagccaaggaaattaaaaaggatacacaacataaaggaaaaaagaaaagaaaaaaatctcatcagtcacagattttctatatgtcaagctagttcaacagagaagcatatctcatcaaaatacttccatcctttgaggaactggggttttaatgacctgcagtatttgcaccacttcagccatagtaggcctgctagaaggaatttgagaggtgcataccattgctagcttcagaacaggcaatacctcatcttcaggatactcactcatgctttgatccacacactccaacacattcccttgctcaagcagcaccctcacatggtcattcagtatcagcacattgtcttctccatactccactggtctcctacctgtcaccagctcaaggatcatcaccccanaaccatacacatcacatttctcattgacccttaagctcttgcat

SEQ ID NO: 212658 - DNA, 454 bp, Glycine max
taaaaaagtggatctgtttgagaatggaacctctgctgttgtggaggctgtttctcctgagttgggtaatagggtgcagcgagtgcgtgttcaatttcctggacttagccaagagctccttcagaaattcagggaaaagaacattgactttgccgctcataatggtcaagaagagacaggttctccattagctaacctgattgggaacctggcttttcctctgattttgattggaggattgctccttctctcgagacgatcatcatgagggatgggaggtcccggtgggggctttccttttgcttttggtcaatctaaagccaagtttcaaatggagcccaatactggagtgacatttgatgatgttgctggagtggatgaagccaagcaggattttatggaggtggtggaatttcttaagaagcctgagaagttcactgctgttgggctcgca

SEQ ID NO: 212659 - DNA, 512 bp, Glycine max
gtgaagaaacatacattttctgttgccaacacaagaaaaaagaaataaagaagcaagctaggatcttttgtcattactaaaattaagagtcaagggtatattacaaatattttacaattttagaaaaattcagtatgtggagagctacactacattgcagtggcatataggctattcaaacaacaactggtgagggagttgaaggagggacccgattttcagcaggaatttcaacaaactcggacaggagagctcggaattcatctccagacattgtctccttctccaatagaacttccacaattttgtcaattgcctcacggttgctccttatttggctcaatgctatttcatatgcttcatctgagagtctcttgacagcagcatcaatgtcttcagcaagcttttctgacattgagtttcttgccatcattctcatgataacatcactttgagctgatgagtccatgagtgaccaagggaccatatcagacatttcaaatgtggtacca

SEQ ID NO: 212660 - DNA, 494 bp, Glycine max
ctcaaccgaacctaaattctctcaccaaatcctcacttatccaaattcgatactccaatccccacccaaattccccgcatcgactcccctccccaaaattcccccatcgccggcgtctcccgcggccgaacgcatcacatcgccgattcggctacggcgctaacagtggctatcgtatgggtaagattctccaagaaaccgcgaagccgtcggcgaattccacatcggcgtacccctctgcggcgcccggcaccacgtcgtcgatgtcggtgacggagacggtgagggggtcgcaccagttcaagattacggggtactcgctctcgaaggggatcgggattgggaagtacatggcctgcgacgtgttttccgtcggagggtacaattgggcgatttatttctaccctgatgggaagagcgtggaggacaatgcgacctacgtgtcgctcttcatcgcgcctgccagcgaaggcaccgacgttagggcacttttc

SEQ ID NO: 212661 - DNA, 289 bp, Glycine max
ccgactaggccggcggccgccctttttttttttttttttttttttttatttttttttttttttttttttttttttttagggaccaaccgattcttttttttaaaaaataaaaaatcaaaaaatcaaatttgggcaatttaacataacagaagcccacataacctacgacaattttcaccatggtggggggtaaaacaaattggtatcattttagaatcacctttgcctaaaaaaaatattatgcttttgggtccgtcccaaattttcatgttcatgggcaatttcatct

SEQ ID NO: 212662 - DNA, 602 bp, Glycine max
atcgccaagctcgccgaacaggccgagcgatacgaagagatggtggaatcaatgaagaacgttgcgaatctcgacgttgaactgactgtggaggagcggaatttactttctgttgggtacaagaatgtgattggtgctcggagagcaatctggaggatcctggctttcattgagcaaaaggaagaaacaaaagggaacgagttgaatgcgaagcggattaaggagtacaggcagaaggttgaattggagctttcaaacatctgtaatgatgttatgacagtgattgatgagcaccttatcccttcggctgcagctggtgaatccactgtgttttactataagatgaaaggagattattatcgttatcttgccgaatttaaggcaggcaatgagaagaaggaagctgctgatcagtctatgaaagcatatgagtctgctaccactgcagcagaggctgatttacctccaacacatcccatccgattgcgtctagctttaatttctcaggtttctattacgagatcttgaactcttcagaaagagcctgtcattttgcataacaagcttttgatgaagctatttttgagcttgacaccttgaat

SEQ ID NO: 212663 - DNA, 442 bp, Glycine max
  unsure (1)..(442): unsure at all n locations
gcagtaaaggttgtagcatttcattggaaaaggaaatacaccataagcaattctcatcaatcaaatcccccagagactggaggaaaaggattgggaatgaaataggccatttccagacaccacacaaataaaaacataccataaatatagcacaaatggagtatctctttcccctatcgggaagtatggggcaatcaacaagaaacaaagagaaaacaatggaaccctatctctagctaatacacggataagtaacggccctcatgtttcattcccaaacgcatgcatcgaatcctaaggaagatcccatcaacaatcggactcactctgcctcctcacctncaccaagcttggcagtgccattcactttctgggcatcttctccatcttctgggatgtcagaagtccacaaagttaggttgtccctgagaagttgcatgat

SEQ ID NO: 212664 - DNA, 612 bp, Glycine max
gactttattcatactgcgaactatgactacgcatgcacgcgtcctgaatctatagatatagctataggtgagaactaaacaatttcaaacttctcaactctgtatcaaacctgagaagaatcatactagagcggatttctgttcctcacttaggggcattgaaaaatcttggaaagttatccctctacatgtgtagttacataagtcaaggctttgaaaaatggtaccatcacaggtttaggattcattttcccataactataagatttgaacattgactattgcaaggatatggtgaaattgcctactgggatctgtgatattgtctcactaaagaagctcagtattactaattgtcacaagcttagttctctgccccaagaaattggacagttgttgaatttggaactcctgaacataagttcctgtactgatttggaagagataccagattctattgtaaaactttctaagctaagacttcttgacctcttaaactgcataagcctttcaagtttaccagaggacattggtgatctatgtaatctcaggaatctcaatatgacaagctgtgcaaggtgtgaattgccatactcagtaaccaatcttgag

SEQ ID NO: 212665 - DNA, 509 bp, Glycine max
aggacatcgacgaagtaattcgaaggtcaaacgcaacgcactatggtctagctgcaggagttttcactaagaatgtgcacacagccaacactttgatgcgagcactgagggttggaacagtatggatcaattgctttgatgtttttgatgctgcaattccctttggagggtacaaaatgagcggcattggcagggagaagggtatctacagtctcaacaattacctgcaagtgaaagctgtggtttcaccagtgaagaaacctgcatggttgtgatttgtgaattgctcaaactgctatgaccgaaatcctacgtggctatcatctttttccgctgaggcaatggcatgcaataaataatgtgatgttactaagataaaacctgattaggtacctgaacattataccagttgaatttatgtatttttcacttgttaattgctcaaacacaaacttggatactgtaatgacactgttgctgtaggatataaattttgcaccattcacact

SEQ ID NO: 212666 - DNA, 467 bp, Glycine max
agtgtgaatggtgcaaaatttatatcctacagcaacagtgtcattacagtatccaagtttgtgtttgagcaattaacaagtgaaaaatacataaattcaactggtataatgttcaggtacctaatcaggttttatcttagtaacatcacattatttattgcatgccattgcctcagcggaaaaagatgatagccacgtaggatttcggtcatagcagtttgagcaattcacaaatcacaaccatgcaggtttcttcactggtgaaaccacagctttcacttgcaggtaattgttgagactgtagatacccttctccctgccaatgccgctcattttgtacccttcaaagggaattgcagcatcaaaaacatcaaagcaattgatccatactgttccaacccttagtgctcgcatcaaagtgttggctgtgtgcacattcttagtgaaaactcctgcagctagaccat

SEQ ID NO: 212667 - DNA, 476 bp, Glycine max
ctcataacacaaagcacaaagcaaagctcatccttgagttaaaaaatggcagcagcttcttccatggctctctcatccccatccttggctggcaaggccgtgaagctgggcccatcagccccagaagtgggaagggtgagcatgaggaagaccgtcaccaagcaggtctcctcaggaagcccatggtacggcccagaccgagtcaagtacttgggcccattctctggcgagcccccgtcctacctaaccggtgagttcccaggcgactacggctgggacactgctgggctttccgcagacccagaaaccttcgccaagaaccgtgaactcgaagtgatccactccaagtgggccatgctcggagccttgtgctgcgtcttcccggagttgctgatccgcaacggggtgaagttcggagaaaccgtgttggtcaaggccgggacccatatcgttagcgagggtgggctcgactactt

SEQ ID NO: 212668 - DNA, 429 bp, Glycine max
taattcacattatctgaagtacttcaccaaacacaaatctaaaaactctcaaaagtcatttcgttctttgacgctcactttccggggacgaagttggtggcataggcccaggcgttgttgttgacagggtcagcaaggtgatcggcgaggttctccaatggaccctttccggtgacaatggcctgaacaaagaagccaaacatagagaacatggccaatcgtccgttcttgagttccttcaccttaagctcagcaaaagcctctgggtcatcagcaaggcccaatgggtcgaagctgccacctgggtagattgggtcagtgacctcaccgagggggccaccagcaatacggtaaccttcaacggcacccattaggataacttgtgtggcccagatggcgaagatgctctgggcgtggatcaagcttggg

SEQ ID NO: 212669 - DNA, 458 bp, Glycine max
tttatatacccatgacaactagtgatcccaatgtaacatagtacaaaatgatgaattggctgacacatcagcactaaactaccctttctttcaactgttaaacattgaaaagaaagtgtgatataaggaaattgaatgttcaagaagcagttcccatggactcctccaaatccaactcatgttctgctaccattatgcatgaatctgcttccagagatgagactgaggccttgtctttggttgaatttgaaatatccttggttgaattgagcatttctgttgtgcattgcacatctggtgttatcccaacctgatctatgtcatgaagggctggtgatagatattttgccactgtaacaaagagtgctgacccatcatgaagctgagtgacactctgaatctttcctttaccaaatgttttgtgccccacaagaatagctcgaccgttatcatgtaat

SEQ ID NO: 212670 - DNA, 430 bp, Glycine max
tttctttctttttttttttttttttttttttttttttttttttttgtttttttttgtttgtgttttttttttttcatctaattcttgttttttacttatgaaatttttcaccaggacggggccctacaccgaaagaaaaggaccgcggactgaccaccttctaaaaaaaaaaaaaaccccactttcctttccagaatgccgtcaaaacccaaagaaaggatgttttatgacaaaaaaaatgctgaattccccctaaacagggcccgaaaaaaaagagtcaccccctatagccaaaaaggacgccgactaccgccaaaaaaatcaaaaaaaaatggccgcccgggggaatgaaaaacaaaaaaccctcccactggtaccaactgaccccagaaaaaaaaaaactctttttcgggggtaacaacccccgaac

SEQ ID NO: 212671 - DNA, 594 bp, Glycine max
gtcgcgtgagcgaatcgatacaccaccaagctatctctatacatttctagatcggagctccttgtgcagcgcccgacccccatcaccatgtcttacgacaagaacccatcgccggtgccgacgagcacgacgggcgatgaggagaagaaagtcaccggcggcggctacgacgtcggcgtctactctgcccacggacgagtcgaccacaatgcgcgtgcggttgacgggcacgacctcaacgactcgtacgacccgtccaaggagtcgctgctcacgcgattgggtctcaacatcgagagtttcaagcgggcacccggtaccacgcgcggtctcgtcgcccacggtgacatcccacccgagtacctgcaacacgacaacccgctgctgcagcagaagatgaagccgaggcatttgcagatgattgctgtcggtggatctatcggtactggtcttttcgtcggttccggagctttccttggaaacggaggttctgctgcggtgctcatggcctggattatcatgggtgtcatgttgatcatggtcacccaggctctcggtgaaatggctatcatctaccccgtttctggaggttct

SEQ ID NO: 212672 - DNA, 509 bp, Glycine max
gatgactagcaacatgcatgtatcggaagatacaattagatgcgtcgactacaagtgcttcactctcccggcttactcttcttccccaatccctcccgtgagctgatacttttggtgtcgatgacgacaggaaaaggagagacgccacgcgacgcttagctgctggtaaagagcatgcggtatatcctcttccaccacggagccagtcgtcgctcggccttgtactgcctcatctcctcgacggtgagccaagactttcggccggtgtccaggtcgatttcggtcgtctttcggggcagagttcgcttccaggcgtaaccgacaacccagaatgcgagcaggatcgggaaggccaggtacgagaggaagaagctctcagcacgggcgttgccgctctcgacgcctccgagggggaagagaccgatgtagaactgagcgatgaggacgatcacgatgaggatggcaccgagccacgagccccacacgccggcgatggcggtaacggcagc

SEQ ID NO: 212673 - DNA, 615 bp, Glycine max
ctcaaccccaacaaagcaagagaagtagggtttttgtgcttggcaaaagaaagagaagagaagatggtgtcaggttcggggatctgcgcgaagcgcgtggtggtggacgcccggcaccacatgctgggtcggctcgcctcgattgtggcaaaggagctgctgaacggacaaaaagtggtggtcgtgcgatgcgaagagatttgcatctccggtggtctggtgaggcagaaaatgaagtacttgaggttactccgcaaacgcatgaacaccaagccttcccacggtcccatccacttccgcgcaccctccaagatcttctggcgcaccgttcgtggaatgataccacacaagacatagcgtggggaagccgctctcgctcgtttgaaggtttatgagggaattcctccttcatatgacatgataaagagaatggttgtttcagatgctctgaaggtgttgagactttagaaaggacacaagttcttgatactgggcaggttgtcatctgaagttggatggagctactatgataccatcatggagctagataagaagagtaatgataaaggcacaattgtttatgagagaaagaagcagctcaacaaattaatggtg

SEQ ID NO: 212674 - DNA, 527 bp, Glycine max
gttgttgttcttgtttctttagtacctttagtagttcctatacctgtcatgttccttggattattcacaagcggtattcaagctctcatttttgctactttagctgcggcttatataggtgaatccatggaaggccatcattgaccagttttctacaaaatagtccttttcgtttagcttgccgcacatatattgcggctcaatataatctacttagtaaacatctatatctatctacctatatctatatagatataggtagatagatatagatagatattcgattagcatatattagcatatattagtatatattggatattcaaaaaaaaaataataaataaaaaaattaagagccataattagaattctgtatgatatttacgtttacggcgtgtggataaaagatactatatagaactaaaggagattcccgtttcagttacattcaattcaacgatggaccaaatgagaattcataatataacatttagatcacccaattccaatatttctatgaaacaata

SEQ ID NO: 212675 - DNA, 475 bp, Glycine max
agtcattgaatattcaattcacaattcgagatgaaacggaaaggctttgttttttaatccctatcgaaatttacagtagtagcggggcaattttagatataaaatattagttattttatataatatatatggatatggttagttcatatataactagttcatatagaatatcctatcacatatacgtgggtttcttctatcctgtaaaccaattcttttgtgttttagattcaatcgaattcgaaaatcattctttgaaacctcaaaagaaagagttgtcttatagtgatccgattatatacacccagtttgaccccccgcacttatactttatttgatatcttgtttttttaagctctcctcccccttttattattaccccatatggatacaatcaatcgaaataaattcgttagatttaattattgtttcatagaaaaattggaatttgggtgatctaaatgttattttttga

SEQ ID NO: 212676 - DNA, 461 bp, Glycine max
gttgttgttcttgtttgtttagtacctctagtagttcctatacctgtcatgttccttgcatgattcacctccttgattcaagctctcattcgtgctactttagctgcggcttatatcggtgaatccatggaaggccatcattgaccagttttctacacaatagcccttttcgtttagcttgccgcacatatatagcggctcaatataatctactttagtaaacatctatctctattctacctatatgtatatagatataggtagatagatatcgatagatattcgattagcatatattagcatatattagtatatattggatattcaaaaaaagaatatatactaaagaaatttagaacccttattagaaatctggatgatatttacgattacagcgtgtgataaaaagattccttttaggacttaaggagattcccggttcaagtacctttcattcaacg

SEQ ID NO: 212677 - DNA, 453 bp, Glycine max
agtcattgaatattcaattcacaattcgagatgaaacggaaaggctttgttttttaatccctatcgaaatttacagtagtagcggggcaattttagatataaaatattagttattttatataatatatatggatatggttagttcatatataactagttcatatagaatatcctatcacatatacgtgggtttcttctatcctgtaaaccaattcttttgtgttttagattcaatcgaattcgaaaatcattctttgaaacctcaaaagaaagagttgtcttatagtgatccgattatatacacccagtttgaccccccgcacttatactttattaggtatcttggttttttaagctctcctcccccttttattattaccccatatggatacaatcaatcgaaataaattcgctagatttaattattgtttcatagaaatattggaatttggg

SEQ ID NO: 212678 - DNA, 545 bp, Glycine max
cggctcgagcggctcgagcggctcgaggggttactgaagagggcggcgcagcgtgtcccctcctcgccggcgttcaagctggccattctccgggcccacgcgtcggaggcgcaggcccagcaggtggagcccaaggcccgcgaaaacccccgaccctcaaaaaccttccaaatctaccggtggaaccccgaaaacccctcaaagcccgagctcaaggactaccagatcaacctaaaggagtgtgggcccatggtcctcgacgcgctcatcaagatcaagaacgagatcgacccgagcctcacgttccgccgctcgtgccgcgaggggatctgcggctcctgcgcaatgaacatcgacggctgcaacggcctggcgtgcctcaccaagatcccctcggaaaaaaactccgtcgccacgacgatcactcctctgccggacatgttcgtgaacaaagacctggtcgtggacatgacgaacttctacaatcagtataagagtttcgagccctggctgaagaagaagaacccaccggtgccgggaaaaga

SEQ ID NO: 212679 - DNA, 409 bp, Glycine max
acaaaaggggctcaggttttattaatcaagaatatagctaaatcatccccaactttgaagaaatacaaagttccaacacaaatgatcaaatgcaaacatcatcatgcctctaaaaatagaattttaagctttaggctgaagtgacttgatatgtgagatttgctttcctgggttcaacccctttgggcaggcacgagcacagttcaatatggtgtggcagcgatagagcttgaattcatcattaatggcatccaatctctccttagtgtactcatcacggctgtcgcttatccacctattagcgtggagcaacgcagcgggaccgagataggactcggggttccaccagtagctggggcaagaggtgctacagcaggcgcagagaatgcactcgtacatcccgtcgagc

SEQ ID NO: 212680 - DNA, 479 bp, Glycine max
gccaatttactcatccttcctgcgcggtatcctacctctcctagcaagatgcagatccacgttatgacccttacccctaagaccatgacccttgacgtgcaaagctctgacaccatcgacaacgtccaggccaatatccaggacaccggatgcattccccccgatcagcaacgtgttatcttcgccagaaaagcagcatcgaggactgtcgtaccctagtcgactacatcctccagaatgagtcaacccttcacgcttgtccttcgtatacgcggtggcatgcaaatcttcgtcaagactctcactggcaaagccataacccttgaagtcgaaagctatgacaccattgacatcgtcgagggctcgatccaggacacggaaggaatccccccagacgcagcaccgattcatcttcgtcggatagcaacttgatgacaggcgcatccttggcgactacaacatcctgattgaatcaaccc

SEQ ID NO: 212681 - DNA, 499 bp, Glycine max
gtcgcaataaatatttgaacgattcgcatggattattcacttagtaaggtgaggaaaattaaatgtactacacatgataagagttacaccttacgagttattctcatggtgaacagaggaaagaagcttaccaatataaattaaacaaaccaaattgcgtcaatgttgtcttacgatgtaatggggatctacggggataatcaagttactcatcaaacagaaacattcatgacaggtttatgttgttccctcatttaaggagagtcttcgcaattgacttgacgttgagtttcttgaggtcagtataggactgtccgcagcccacaaacattactggagctccagatacgtaaaccattgagagtgcagctcccaccttatcatcgatagtgtcaaacttcgtgagcaagatcccatcgatcaatctgggtgtgggaagatgtgagaggtcggctaatttctggttgaatttcgaaagctgatcaactggattattacc

SEQ ID NO: 212682 - DNA, 485 bp, Glycine max
atctcccgttgtaaataaatcaataagttaatttctcattcttgaattacttccaattccaaaggtagtcttgccgaagtcaatccactaggaatagtggaagtggatgagtgaaatggattaggaggaacagttaataggtcttcctctttactttccaacatttgtatgacagattttatggatggccggttcaatggctgccactgaatgcaccaaagtccaacaattgctagttttcttgcaattttaacatcaccttcatcctcaacatggatatgtacatctccatgaactaggtcatgcatccaatctgggtacaacacatggaaatcttctgcagaagacgtgtctacattcttccttcctccaaccatttctaacaacaacattccgtaactataaatatcagacttataagacacattcccaaagtttctggagaaaactttaggtgcaatgtatcccagggtcccctagcagct

SEQ ID NO: 212683 - DNA, 446 bp, Glycine max
atcccatctgtgcccttcaggctctcatggaaggccttcaggttctgaccttggaggatgttgtttctgaggctgatatctttgtcaccaccaccggtaacaaggacatcatcatggttgaccacatgaggaaaatgaagaacaatgccattgtttgcaacattggtcactttgacaatgagatcgacatgcttgggctggagaactaccccggcgtgaagcgcattaccatcaagccccaaactgacagatgggtcttccctgaaaccaacaccggtatcattgacttggctgagggtcgattgatgaacttgggatgcgccactggacaccccagttttgtgatgtcctgctccttcaccaaccaggtcattgctcaacttgagttgtggaaagagaagagtaccggctagtacgagaagaaggtttacgttttgcccaagcac

SEQ ID NO: 212684 - DNA, 455 bp, Glycine max
ttttagtatttaataaagcaaaatgcacacatcccccaaacaaaacaagccttattcaacccaaattggtttcatatcacagaaaccaacaggatgccgccttcctccttactggtcccacccactcgaacaaaagttctacagaaataaaaatggctacaattcttctaccacaaatctgaaaagtctaacaccaaaaatcaaaaaaaggaaaattaaacaatcaaatccgattgataaaaccgatttttgtctttccctcactcacttttcagttgatcatctcaatcacttagtacctgtagtgagcaggcttgtatggaccctcaacaggcacactgatgtaatcagcctgggacttgctaagctgggtcagcttagctccaagtttgcccaggtgaagtgcagccaccttctcatcaaggtgctggggcaaaacgtaaacccttcttctc

SEQ ID NO: 212685 - DNA, 467 bp, Glycine max
  unsure (1)..(467): unsure at all n locations
cttcacaccattctcacaaaacaactttcaaactctgagaaagaatggctgccaacacattgatgagtactgctatctcagccttcccatctctcctttcttcctcaaaatccagatttgccaccgcagttcctctttctagctttggtgtcaccaatgcctcttcttctcgcttttctatgagtgctgactggatgccaggccagcctagacctccttaccttgatggttcagcacctggtgactttggattcgaccctcttcgtcttggtgaagtaccagagaatcttgagaggttcaaagagtcagaactcattcactgcagatgggccatgcttgctgttccagggattttggttccagaggcattgngcttaggcaactgggtaaaggctcaggaatgggcagcagtttctgggggccaagcaacctacctaggcaatccagtttcatggggcaccctaccc

SEQ ID NO: 212686 - DNA, 455 bp, Glycine max
ctgtcataccaacgagttgccagagtatgagtttgaattcgaagtttaattacaacacagagataccaacgtagcaacccgattcgttacaaaatgttacatggaattatacaggtagctattgaaacaaatatttgattttttttttttcaaggcaaaatcgattgtggaataatgatgtttccaatgttgttgtgccatgggtcagccaagtgagcagccaagttctccaaaggtccagtgccgggataagctgattgttgaacacagaatcccacaaaagccaacaaagcaagacgtccattcttaagttctttgactttgtattcatggaatgttttagggtccttagagtatcccaaaggatcaaaagcaccaccagggtatttcttcttctctgggtccttctccatgctcctttggtgctccacaaaggaaatagcaaggaattcaat

SEQ ID NO: 212687 - DNA, 504 bp, Glycine max
agacagtccaatactgtctggaggaaaacccggccctcataagatccaaggaattggtgctggcttcatccctggtgttctggatgttgatttacttgatgaagttgttcaaatttcaagtgaagaagctattgaaactgcttagcttcttgcattgcaagaaggtttactggtgggaatatcatctggtgctgcttgagctgctgcagttaagatagcgaataggccagaaaatgctggaaaactcattgttgcggtcttaccaagttttggagagcgttatctatcgtctgtgctctttgaatccgtgaagcgagaagcagacagcttggtctttgagccttgaatgtcaagtcatacgagccatttgctgcttctcaagttgcattctgtccttgggttgtgtatatattatttctcttatggatctaaaaaatcaatacgatttctgtttgcttgttaattgactaagattcaataaaaatatagtaggtttgctgaaaa

SEQ ID NO: 212688 - DNA, 499 bp, Glycine max
cagcaaactactatatttttattgaatcttagtcaattaacaagcaaacagaaatcctttttattttttagatccataagagaaaaaatatatacgcaacccaaggacagaatgcaacttgagaagcagcaaagggctcgtatgacttgacattcaaggctcaaagaccaagctctctgcttctcgcttcacggattcaaagagcacagacgatagataacgctctccaaaacttgggaagaccgcaacaatgagttttccagcattttctggcctcttcgctatcttaactgcagcagctgcagcagcaccagatgatattcccaccagtaaaccttctttcaatgcaagaagcttagcagtttcaatagcttcttcacttgaaatttgaacaacttcatcaagtaaatcaacatccagaacaccagggatgaagccagcaccaattccttggatcttatgagggccgggttttcctccagacagtattggactttct

SEQ ID NO: 212689 - DNA, 519 bp, Glycine max
agaaagtccaatactgtctggaggaaaacccggccctcataagatccaaggaattggtgctggcttcatccctggtgttctggatgttgatttacttgatgaagttgttcaaatttcaagtgaagaagctattgaaactgctaagctttcttgcattgaaagaaggtttactggggggaatatcatctggtgctgctgcagctgctgcagttaagatagcgaagaggccagaaaatgctggaaaactcattgttgcggtcttcccaagttttggagagcgttatctatcgtctgtgctctttgaatccgtgaagcgagaagcagagagcttggtctttgagccttgaatgtcaagtcatacgagccatttgctgcttctcaagttgcattctgtccttgcgttgtgtatatattttttctcttatggatctaaaaaataaaaaggatttctgtttgcttgttaattgactaagattcaataaaaatatagtagtttgcttgaaaaaaaaaaaagaaaaa

SEQ ID NO: 212690 - DNA, 462 bp, Glycine max
attaaactactatatttttattgaatcttagtcaattaacaagcaaacagaaatcctttttattttttagatccataagagaaaaaatatatacacaacccaaggacagaatgcaacttgagaagcagcaaatggctcgtatgacttgacattcaaggctcaaagaccaagctctctgcttctcgcttcacggattcaaagagcacagacgattgataacgctctccaaaacttgggaagaccgcaacaatgagttttccagcattttctggcctcttcgctatcttaactgcagcagctgcagcagcaccagatgatattcccaccagtaaaccttctttcaatgcaagaagcttagcagtttcaatagcttcttcacttgaaatttgaacaacttcatcaagtaaatcaacatccagaacaccagggatgaagccagcaccaattccttggatcttatga

SEQ ID NO: 212691 - DNA, 514 bp, Glycine max
cttacaagctccggccatccagcgccttcaattttccttatggactacaaattctggcagctcctgattggaacaacaactactctataaccgctggagctagaggtccaattctgcttgaggattatcatcttgtggagaagcttgcaaactttgacagggaacgtatcccagaacgtgttgtccatgccaggggagctagtgcaaagggtctctttgaggtcacacatgacattactcacctgacatgtgcagatttccttcgagcccctgtagttcatacgcctgtaattgatcgcttctcaactgtcattcatgagcgcgagagccctgaaaccttgaaggaccctgcaggttatgccgtgaagatttacaccacagagggtaactctgaccttgttaggaacaacctttccgtcatctttgtaccggactgcatgaaattaccagatatagttcatgctcttaaacgcaattccaagagccacattccagataaatcggaggatccttg

SEQ ID NO: 212692 - DNA, 424 bp, Glycine max
aatacttactttcttaattaagtggattacaaggaacacatagtccacaacaatagcagcgaaacatgccgaaaaggtatataaatataaatactaacacatacaaacggcatttattgagatagctcagcgagttgcatgcatggagttatgggtacacaactaaaattgcaagaaatggataagacctttcaaattgatcgaaaatcacattcttatcgcactctttgcacgtctgcgactctaacaatcattctggggttggcaacaacattaaatatttggcctcatgctcagacgagatgctatcttttgggctagagaacggtcagcctgagaccagtaagatatccaagacactgcggatttcatgggtgacccgtgggtcagataaagcatcaacccatcggcgattaaatctatc

SEQ ID NO: 212693 - DNA, 513 bp, Glycine max
cttacaagctccggccatccagcgccttcaattctccttctggactacaaattctggggctcctgtatggaacaacaactcctctttaaccgttggagctagaggtccaattctgcttgaggattatcatcttgtggagaagctcgcaaactttgacagggaacgtatcccagaacgcgttgtccatgccaggggagctagtgcatagggtacctttgaggtcacacttgacatctatcacctgacatgtgcagatttgcttagagcccctggagttcagacgcctgtaattgttcgtttctcaactgtcattcatgagcgtggtagccctgaaaccttgagggaccctcgaggatctgccgtgaagttttacaccagagagggtaactttgaccttgttggaaacaaccttcccgtcttcttttacgtgacggcatgaaattcccagatatggatcatgctcttaaacccaattccaagaaccacattcaagagaattggaggatccttgac

SEQ ID NO: 212694 - DNA, 483 bp, Glycine max
cttaattaattggattacaaggaacacatagtccacaacaatagcagcgaaacatgccgaaaaggtatataaatataaatactaacacatacaaacggcatttattgagatagctcaacgagttgcatgcatggagttatgggtacacaactaaaattgcaagaaatggataagttctttcaaattgatcgaaaatcacatccttatcgtactctttgcacgtctgcaactctaacaatcattctggggttggcaacaacattaaatatttggcctcatgctcagacgagatgctatcttttggcctagagaacggtcagcctgagaccagtaagatatccagacactgcggatttcatgggtgacccgtgggtcagataaagcatcaacccatcggcgattaaatctatcttgcctgtcaggtgcccaagatcggtatctctctccgggctgcttaaagttgttctccttctcaattccaca

SEQ ID NO: 212695 - DNA, 443 bp, Glycine max
gttgtactgcttacaacctgggatctggtcgtggaacatctgtgcttgaaatggttgcagcatttgaaaaggcttctggcaagaaaattccagtaaaattatgtccaagaagaccgggagatgcgactgaggtttatgcatctacagagagagctgagaaagaacttggttggaaggcaaactatggtgtggaggagatgtgcatggaccaatggaattgggcaaagaacaatccctggggttacgcggggaagccttgaattagcttgagaaatatactgctcatctacgaatgcttttcacataaataggcatctcttatatagaatactttcatgttggatgatttgtttaggcagttcgttgtataatcttgacaataaaaatttggcagcatttctagaaataatactgtcctattttcttctctcatgaaataaata

SEQ ID NO: 212696 - DNA, 403 bp, Glycine max
cttgaaaggcggccaaatttttattgtcaagattatacaacgaactgcctaaacaaatcatccaacatgaaagttttctatttaagagatgcctatttatgtgaaaagcattcgtagatgagcagtatatttctcaagctaattcaaggcttccccgcgtaaccccagggattggtctttgcccaattccattggtccctgcacatttcctccacaccatagttggccttccaaccaagttctttctcagctctctctgtagatgcataaacctcagtcgcatttcccgggctttttggacataattttactggaattttcttgccagaagccttttcaaatgctgcaaccatttcaagcacagatgttccacgaccagttcccaggttgtaagcagtacaac

SEQ ID NO: 212697 - DNA, 430 bp, Glycine max
taggatgtactgattacaacctgggaactggtcgtggaacatctgcgcttgaaatggttgcagcatttgaaaaggcttctggcgagaaaattccagtcaaattatgtccaagaagaccgggagatgcgactgaggtttatgcatctacagagagagctgagaaagaacttggttggaaggcaaactatggtgtggaggagatgtgcagggaccaatggaattgggcaaagaacaatccctggggttacgcggggaagccttgaattagcttgagaaatatactgctcatctacgaatgcttttcacataaataggcatctcttatatagaatactttcatgttggatgatttgtttaggcagttcgttgtataatcttgacaataaaaatttggcagcatttcaagaaaaaaaaattacagttcatcact

SEQ ID NO: 212698 - DNA, 403 bp, Glycine max
cttgaaatgctgccaaatttttattgtcaagattatacaacgaactgcctaaacaaatcatccaacatgaaagtattctatataagagatgcctatttatgtgaaaagcattcgtagatgagcagtatatttctcaagctaattcaaggcttccccgcgtaaccccagggattgttctttgcccaattccattggtccctgcacatttcctccacaccatagtttgccttccaaccaagttctttctcagctctctctgtagatgcataaacctcagtcgcatctcccggtcttcttggacataattttactggaattttcttgccagaagccttttcaaatgctgcaaccatttcaagcacagatgttccacgaccagttcccaggttgtaagcagtacaac

SEQ ID NO: 212699 - DNA, 576 bp, Glycine max
tcaaattatttcattctatttgctcagtaccctacctctcctttcaagaagcagatcttcgtcaagaccctcaccggaaagaccatcacccttgaggaggaaagctctgacaccatcgacaacgtcaaggccaagatccaagaccaggacggaattcccccggatcatcaacgtctcatcttcgccggaaagcagctcgaggacggccgtaccctcgccgactacaacatccataaggagtcaacccttcaccttgtccttcgtctccgtggtggcatgcagatcttcgtcaagactctcactggcaaaaccataaccctagaggtcgaaagctctgacaccattgacaacgtcaaggccaagatccaggacaaggagggaatccccccagaccagcaacgtctcatcttcgccggaaagcaacttgaggacgggcgcatcctcgccgactacaacatccagaatgaatcaacccttcacctcgtactacgtctccgtggtggcatgcagatcttatgtaagacccttaccggcaagactataaccctagaagtcgagagctccgacaccttcgac

SEQ ID NO: 212700 - DNA, 382 bp, Glycine max
gcccccatacagttgataattttttttcagctccacaaattgataacaaacagtggtaacattaatgggacaatagagttcaacacaaaccaaacttattttcaaagggcattacaaacccattacacatcacatttttttttaaaatggttgggaaaatccaacatcgaacatcacacagaaatcagctccagcttaaaaccccccacgaagacccaacaccaagggcggaggggactccttctggatgttggagtcagcgaggggccttccatcctttatctgtttgccaacaaaaataaacctctgctggtccggggggaatccttccttggcctaaaacttcgccttcacattgggaatgggggcggagctctccccc

SEQ ID NO: 212701 - DNA, 421 bp, Glycine max
ggcctcagccgcatcccccaccactttctctctacttcactccgccaccccttcctcctcctccaccgccacctccgactgcccctccccctcgagcgtgcagagcacctactccctccgcagcccgcccgctgcgcacgcctgggcttggccgaggcggacccgctgctcgcggcgagtagtatcggcgcgcgtggcggcggtgacaggacgacgaaagggcgcgaggggggtggtgtcgatggcgaacaagagcgtgggggacctgagcgcggcggacctgaaagggaagaaagacttcttcatggccgacctcaacgtcccgatcgacgacgaccagaacattaccgacgacaccaggatccgagccgccattgcgacgctctaacatctgatccaaaacggcgcacaagtcattctc

SEQ ID NO: 212702 - DNA, 506 bp, Glycine max
  unsure (1)..(506): unsure at all n locations
ctggcaccggcatccacccataccaccagcaatgggctccggcggctgccgctcctcctcctcctccggcagccgcgggcggtcctcctcctcaccctggggaggaggttcgaacgatattcataactggtcttccggaagacgtgaaagagagagagctgcagaatctgctgagatggctgcccggtttcgaagcatctcaactgaatttcaaagctgagaagccaatgggttttgctctcttctccgcaccacaccaagcactcgccgccaaagacattcttcaggacatgctcttcgatccagacaccaagtccgtcctccacactgagatggcaaagaaaaatctattcgtcaaaagaggaatcggagctgctgatgcgggcggtgcttttgatcaaagtaagcgcttaaggacagccggagattatacacacagtggctatacaagtccatctncttttcatcctcccncgcctcccgtgtggngaccacatggatacatg

SEQ ID NO: 212703 - DNA, 584 bp, Glycine max
caactcctccgaggctgagcttttccgaagctgaggcactgatactgaaatggaaccctgacacttccgcttacgccaaagtcacttccctcttctacgaggacaaaaccgaagccaaacactacattgactccgttaaccagcttcagaaatccatgcattccttgctctctcagaacccttcctctgagaaactcattctcgctcataacctaatgcagatggctatgaagaggctcaagaaagagttctaccagatcttatccatgaaccgcgcacaccttgatccagaatccgtctccgccagatcctctcgcacctccgacaactccagcgcctccgattacgacgacgacttcgctgctgaggacgacgatatccgcgccgccggcgactctatctccgaagtcgagcaggtttcttccggcgccatggcagatctgaaactaatcgctgactgcatggtatcttccggttatgccaaagaatgcgtcagcgtttacatcttaatacggaaatccataatcgacgaaagaatctaccgcctcggcgtggagaaactgagctcctcgcgcgccaacaag

SEQ ID NO: 212704 - DNA, 382 bp, Glycine max
gaaaaagacgttatcgcttttgttggctatgtcaaaactattactacaaccaagaaaaataacggcgtagaaaactcgccgttcaaactgggcacttagctccaacgccggagaggcgaggacgatacagcactggatgaggttccaaaaaagaagaggttaaccaggtaattttcaatatcctcaggggtaaaggtcacgtactccgtcgccgtcaaatccctcactgttcccaccgtagcaagaacaacattataccactcgcgatatcttggcactatgcttctcgcgatcgaaccttttatttcgtctcgtaattcgcggtcagctacgacgaatgagttctgtttccgatacccttcctcgaatttgcggttgaagc

SEQ ID NO: 212705 - DNA, 430 bp, Glycine max
agcgtgctataattcccggtcgacgagctacacgccctttttttttttttttttttttttttttttttttttttttttttttttttttttttttttttgttttccggggagcctaacccggacctgaaacccgcaagcagacgaataatgtccgctaaaatggggccactgaatcgcaatttacagggcgttggttaaaaactccccggcgggacccaccttggagtctccgcataaaatccatctagcagaaaatcctcctataagctagggggctattaacgaaggggcctcccaaaagctgccctaacaaaagggcgacgggaaggagggctgtaggggcgccctttgggggggggaattaagggcggcggtaggggggaccccccccctggccatcgtactattgaccgcctcattagcggccgtt

SEQ ID NO: 212706 - DNA, 515 bp, Glycine max
  unsure (1)..(515): unsure at all n locations
cacgaagaaccagggcttcgagctcactaagcaaagatacggcaaggccaacgttaaatttttacgcgtatatcgtgagggtggaaagcatgaagtcaaggaaatacgtgctcgcgttctcttagaaggtgctttcgagatcagttacacaaacggtgataactctaccatcgtcgcgaccgatacacagaaaaacactctcttcgccctcgccaaacttcatccaattgaacccttagagcaatggtgtctgcaagtagccaatgattttctgtccagacataagcacatctcagctgtcaatctgaaggtagaagagcacccttgggacaggatccaggtggcgggcaaggaacacccccactctttccagaaaggaagcggcggtatccgtattgtgaagcttcgcatgcctcgtaatggcacaccttcactctcctncggcttcagagagttggagatcatgaagaccacccaatctggctttgagggttcatcagagacgactacacaac

SEQ ID NO: 212707 - DNA, 369 bp, Glycine max
ctgaaacacatgattttgttatctaataataccgacttggtttctttgatgatctcctctagaactgcatccaccgtcaaacgtggccgtgccggcttggccgctcctttcaccggtcaccaattcctggctgattcaaacacgaggctgacctacactgacatttcctccgtagctactaccgtcggcagagtacaatgctcgccggtgtggccagcggtcgaacgcatgacatccccgactctgctatacttctcacaccgggtttatgccgggttggattctgaaggaaactgccttgtcaggagaggatggctcatttgcgtgccattctggtgggcgcacggccacgtgtaccgtgagcacgac

SEQ ID NO: 212708 - DNA, 548 bp, Glycine max
  unsure (1)..(548): unsure at all n locations
tatattgcaggttacaaagcctaagcaaaaggttgaagatggtatctttggcacttgtggaggatttggttttactaagcagaacgagctctttgtgggtcgtgttgctatgcttggttttgcagcatcactgttgggtgaaggaataactgggaaaggaattctagcacaattgaatctggaaactggaattcccctttatgaagcggagcctcttcttctgtttttcatcctcttcaccctgctaggagccattggaggtttaggtgaccgtggaaaatttgttgatgacgaacctactactggaggtgttattcctccaggcaaaggctacagggaagctcttggtcttggttcaggtcctttatttggattcacgaaagcacacgagctattcgtgggacgattggctcaattgggtttcgatttctcattgattggagaaattataaccggaaagggagcactagcccaactcaacattgagactggngtaccaatcaacgaaatcgagcccctagtgttgttcaatgttcttttcttcttca

SEQ ID NO: 212709 - DNA, 529 bp, Glycine max
  unsure (1)..(529): unsure at all n locations
tgcggtcgtccgtggccgcccttttttttttttttttatgatgaactcaatgcattttatgatagatgagcaaacgagtatttgtttaaacacaaacaaacaaaagggttagtgtctaatcatcctccccctcatctgtaacgaatttgccagttccaggattcaaagcagcaatgaagaagaaaagaacattgaacaacactaggggctcgatttcgttgattggtaccccagtctcaatgttgagttgggctagtgctccctttccggttataatttctccaatcaatgagaaaacgaaacccaattgagccaatcttcccacaaatagctcgtttgctttcgtgaatccaaataaaggacctgaaccaagaccaagagcttccctgaagcctttgcctggaggaataacacctccagtagtaggttcgtcatcaacaaattttccacggtcacctaaacctncaatggctcctagcagggtgaagaggatgaaaaacagaagaagaggctccgcttcataaagggg

SEQ ID NO: 212710 - DNA, 418 bp, Glycine max
catgactctggagaaccaccacgagcgctagccagatctggcaattatacttggactcgacacctcggtcatttcattctcacaccatcatccatatgcacactcgcagccagcctttgatttactcaacactagccacaatctgactacctgcagcagcgagaatcactggctacacccacttatggagctctaaatacaccaccgatggcaccatcgaggagggttccgagaaatgctacctgaacctctcagacgaggagctcatgcgggagtgcgaaatggacacgtttaaggcctcggcaccaggtggtcagcaccgtaacaagcgtgagtgcgtagtgcgcctcacacacctacccacacgaatcattgctcatgcttcagaagagcgctcgcagcacaagaaccgcgcttc

SEQ ID NO: 212711 - DNA, 530 bp, Glycine max
  unsure (1)..(530): unsure at all n locations
caactcctccgaggctgagcttttccgaagctgaggcactgatactgaaatggaaccctgacacttccgcttacgccaaagtcacttccctcttctacgaggacaaaaccgaagccaaacactacattgactccgttaaccagcttcagaaatccatgcattccttgctctctcagaacccttcctctgagaaactcattctcgctcataacctaatgcagatggctatgaagaggctcaagaaagagttctaccagatcttatccatgaaccgcgcacaccttgatccagaatccgtctccgccagatcctctcgcacctccgccaactccagcgcctccgattacgacgacgacttcgctgctgaggacgacgatatccgcgccgccggcgactctatctccgaagtcgagcaggtttcttccggcgccatggcagatctgaaactaatcgctgactgcatggtatctntccgttatgccaaagaatgcgtcagcgtttacatcttaatacggaaatccataatcgac

SEQ ID NO: 212712 - DNA, 542 bp, Glycine max
  unsure (1)..(542): unsure at all n locations
atcaagtgtagtatctgttcttatcagtttaatatctgatatgtgggccattggtccacacgatattaaattacttttttaatggggagagaccaacacagtagcttgctattgggtctctcgcgtgtcgtccatgcgttgcactatagcttgggcctggcacaccctacgtttagtcaaactttttcagttagtttgggttttctaatctcgtatgtggtgggagtgccacggtatgggttgctataggcagaaactgattatggtcaggtttagatctctactttagctaataatagtgagattatttgcttctcttcgtgacgtattttcatatgacaatctccttcagcttgttttatgtattattcattgagattatcagcattattattgcagtcagttataccgttattgatttacttggttagtaaccagttttacagctgcatttatgtaaaaaccgaagttgcattaaattatatttttacgtagttgatctgannaaaaataattataaaaattaataaaatattaataat

SEQ ID NO: 212713 - DNA, 369 bp, Glycine max
gtcaacctttcctatctaccattctgcctcaccattcgtacttgatcatccaacgatacctctgtgaacatgataggacggacaaagccccaacctatcccaccaggtggcacataccctgcgactagatcattagaatgagctgaggatcgtgtgacacttactatattgcccatgttatgagggcatgtgctttctggggagatggtattgataatatagaaagaaaggaacctgttgttcatgtgatgaaggcagaagactgataacttggatgagacctacttaagggtgtatgtggaactgctatgtgctcggaaacttaaccctgtggtatgagctcaatgtactgggatcgtacgaccattg

SEQ ID NO: 212714 - DNA, 516 bp, Glycine max
  unsure (1)..(516): unsure at all n locations
cacgaagaaccagggcttcgagctcactaagcaaagatacggcaaggccaacgttaaatttttacgcgtatatcgtgagggtggaaagcatgaagtcaaggaaatacgtgctcgcgttctcttagaaggtgctttcgagatcagttacacaaacggtgataactctaccatcgtcgcgaccgatacacagaaaaacactctcttcgccctcgccaaacttcatccaattgaacccttagagcaatggtgtctgcaagtagccaatgattttctgtccagacataagcacatctcagctgtcaatctgaaggtagaagagcacccttgggacaggatccaggtggcgggcaaggaacacccccactctttccagaaaggaagcggcggtatccgtattgtgaagcttcgcatgcctcgtaatggcacaccttcactctcctncggcttcagagagttggagatcatgaagaccacccaatctggctttgaagggttcatcagagacgactacacaac

SEQ ID NO: 212715 - DNA, 535 bp, Glycine max
  unsure (1)..(535): unsure at all n locations
tccaaggccaggtatgatgaaattgtgaaggaagtctcttcctacttgaagaaagtaggatacaaccctgacaagattccttttgttcctatctctggttttgagggagacaacatgattgagaggtccacaaaccttgactggtacaagggtccaactctgcttgatgcacttgaccagattagtgagcccaagaggccctctgacaagcccctcaggcttccccttcaggatgtgtacaagattggaggtattggaactgtgccagtgggacgtgttgagaccggtgtcttgaagcctggaatggtggtgacttttgcaccaactggactgacaactgaagtcaagtctgtggagatgcaccatgaatttcttacagaggcacatcctggtgacaatgtgggattcaatgttaagaatgttgctgttaaggatttgaagcgtggttatgttgcctcaaactcaaaggatgaccctgcanaggaggctgctaacttcacagcccaagtcatcatcatgaaccaccctggtcaga

SEQ ID NO: 212716 - DNA, 523 bp, Glycine max
tatattgcaggttacaaagccaaagcaaaaggttgaagatggtatctttggcacttctggaggatttggttttactaagcagaacgagctctttgtgggtcgtgttgctatgcttggttttgcagcatcactgttgggtgaaggaataactgggaaaggaattctagcacaattgaatctggaaactggaattcccctttatgaagcggagcctcttcttctgtttttcatcctcttcaccctgctaggagccattggaggtttaggtgaccgtggaaaatttgttgatgacgaacctactactggaggtgttattcctccaggcaaaggcttcagggaagctcttggtcttggttcacgtcctttatttggattcacgacagcaaacgagctatttgtgggaagattggctcaattgggtttcgttttctcattgattggagaaattataaccggaaagggagcactagcccaactcaacattgagactggtgtaccaatcaacgaaatcgagcccctagtg

SEQ ID NO: 212717 - DNA, 407 bp, Glycine max
ttgccgcccttttttttttttttttatgatgaactcaatgcattttatgatagatgagcaaacgagtatttgtttaaacacaaacaaacaaaagggttagtgtctaatcatcctccccctcatctgtaacgaatttgccagttccaggattcaaagcagcaatgaagaagaaaagaacattgaacaacactaggggctcgatttcgatgattggtaccccagtctcaatgttgagttgggctagtgctccctttccggttataatttctccaatcaatgagaaaacgaaacccaattgagccaatcttcccacaaatagctcgttagctttcgtgaatccaaataaaggacctgaaccaagaccaaaagcttccctgaagcctttgcctggaggaataacacctcca

SEQ ID NO: 212718 - DNA, 513 bp, Glycine max
tatattgcaggttacaaagccaaagcaaaaggttgaagatggtatctttggcacttctggaggatttggttttactaagcagaacgagctctttgtgggtcgtgttgctatgcttggttttgcagcatcactgttgggtgaaggaataactgggaaaggaattctagcacaattgaatctggaaactggaattcccctttatgaagcggagcctcttcttctgtttttcatcctcttcaccctgctaggagccattggaggtttaggtgaccgtggaaaatttgttgatgacgaacctactactggaggtgttattcctccaggcaaaggcttcagggaagctcttggtcttggttcaggtcctttatttggattcacgaaagcaaacgagctatttgtgggaagattggctcaattgggtttcgttttctcattgattggagaaattataaccggaaagggagcactagcccaactcaacattgagactggggtaccaatcaacgaaatcga

SEQ ID NO: 212719 - DNA, 491 bp, Glycine max
  unsure (1)..(491): unsure at all n locations
atgatgaactcaatgcattttatgatagatgagcaaacgagtatttgtttaaacacaaacaaacaaaagggttagtgtctaatcatcctccccctcatctgtaacgaatttgccagttccaggattcaaagcagcaatgaagaagaaaagaacattgaacaacactaggggctcgatttcgttgattggtaccccagtctcaatgttgagttgggctagtgctccctttccggttataatttctccaatcaatgagaaaacgaaacccaattgagccaatcttcccacaaatagctcgtttgctttcgtgaatccaaataaaggacctgaaccaagaccaagagcttccctgaagcctttgcctggaggaataacacctccagtagtaggttcgtcatcaacaaattttccacggtcacctaaacctncaatggctcctagcagggtgaagagggatgaaaacagaagaagaggctccgcttcataaaggg

SEQ ID NO: 212720 - DNA, 463 bp, Glycine max
tgccccctaggatcgattccatcatgacccgacgcacgctacaatgctctaagtgcatatccatacgctctgccaccaggtgaatggaaggaactggcggacgcggagctgcaccgtgtgcaccggcgaagcaatatttgcacgatcacttgaagctgtaacagtgctatctggataaatacactacacattacacacacagatggattggtactttcgagatagcatacatatacgtagagcgcgtagtttataggcagggcatttacactgtatattatggactcggaatctaccttcagaatctcttgactggcattctctcccctaaggaagataactggctcgatccctactactgagctttgcttccaaccaaatgctacgatgagttgaaacccttgattcgccgccttccggagatcaagttctggtattctttcaccaaggctctctgcatagc

SEQ ID NO: 212721 - DNA, 571 bp, Glycine max
  unsure (1)..(571): unsure at all n locations
attgtatgcccatttttggaaaatttacacttgcagtgaaagttgttgagtgagatgattacattcatggacacaaaggagaaatcaaaagaggtggagagttgtttggatcctcagctatggcatgcatgtgcaggtggtattgtacaaatgccagcagtgaactctaaggtttattacttccctcagggtcatgctgagcatgcatgtggaccagttaacttcaggacttgtcctaaggttccaccttttgttccatgtagagtgactgctgtcaaatacagggctgatcctgagaccgatgaagtctatgccaaactcaagctcattcctctgaatgccaatgatgttgattatgatcgtgatgttgttggtggggctgaaactcaagacaagcctgcttcatttgcaaaaaccttgacccaatctgatgccaacaatggtgggggattntctgttcctaggtattgtgcagagacaattttccctcgtttggactactcagttgaccctcccgttcaaaacatccttgccaagggatgtcatggagaaaacatggaattcagacaca

SEQ ID NO: 212722 - DNA, 546 bp, Glycine max
ctcagtagggtttgcggtttcagagtttgtgacgcacgcatccatggccaccaccaccaacgccgccgcagccccgccgcgccagctctcccagaaggaagccgacatccagatgatgttagccgccgacgtccacctcggcaccaaaaactgcgacttccaaatggaacgttacatcttcaagcgccgcaacgacgggatttacattattaaccttgggaagacatgggagaagcttcagttagcagctagggttattgttgcaattgagaaccctcaggatatcattgttcaatccgcaaggccttatggtcaaagagcggttctgaagtttgctcagtacactggtgctcatgctattgctggaaggcacactcccggtaccttcaccaatcagcttcagacttcgttcagtgagcctcgtctccttatcctcactgatccaagaacagatcaccagcctattaaggaagctgctcttgggaatattcccaccattgctttctgtgacactgattcgcctatgaggtatgtggacattggaat

SEQ ID NO: 212723 - DNA, 300 bp, Glycine max
ttttttttttttttttttttttttttttttttttttttttttttttttttcttctttttttgttttttttttttttcttttattttcttttcttcgttttttttgccttttctttgggggaaaaaaaaggggggccccaaattaactacccccaactttgctaaactacacctcaatccaaaaagatataacctcgccactcatcccgaggcaaaaaaatcatgcgcccccacctataacacctaaaaaaaaaatccccccgggtctctcactaaaaaaaacccacccactttctaccct

SEQ ID NO: 212724 - DNA, 539 bp, Glycine max
gtggaaatgccagagcattgaggaggttgagaacagcatgtgagagggccaagaggactctctcttccactgctcaaaccaccattgagattgattccttgtatgagggtattgacttctacacaaccatcacccgtgcccgtttcgaagagcttaacatggacctattcaggaagtgcatggagcccgtggagaagtgtttgcgggatgctaagatggacaagagcaccgtccatgatgttgttcttgtcggtggttctactaggattcccaaggttcaacagttgttgcaggacttcttcaacggaaaggagctttgcaagagcattaacccagatgaagctgttgcctatggtgtagcagtgcaggctgccattctcagtggcgagggtaatgagaaagtgcaggatcttctgttgttggatgttactcctctctcccttgggttggagaccgcgggaagagtcatgactgtgttgattcccagaaacacaaccattcccaccaagaaggagcaggtattttcgacctattccgac

SEQ ID NO: 212725 - DNA, 489 bp, Glycine max
ctcccttttttttttttttttttttttttttttttgaccatatgcaacttatatcattggtaaggggaaacgtgcagattgacatcttatatatcaaaattattgttcactgcacctgaaccatgtgacaatactggttattatctaaacttcaaaagggtcttcacaaaatcaagaacaacccatgacaattggtctgcttaatcgacttcctcaattttgggtccagcaccgtttccactgccagcagcaggaccatcctcatccatggtttcacccgcatcaccaccagctccttggtacatctttgctatgatggggttacaaatgctctccaactccttcatcttgtccttgaattcgtcagcttcagcaagttggtttccatcgagccattggatagcctgctcaattgcatcctcaatattcttcttatcatcagcagacagctcggaagcaatcttatcatctttaattgccgtcctcatg

SEQ ID NO: 212726 - DNA, 520 bp, Glycine max
cactgatcccgccaagggtatgaaaggagctgttcagaaggcagaagagataagggataagactcccaattcttatatgcttcagcaatttgaaaatcctgccaacccaaaggtccattatgaaaccactggaccagagatctggaagggctctagtgggaaggttgatgctcttgtctctgggattgggactggaggtacagtaacaggtgctggaaaatatctgaaagagcagaatcctgatataaagctatatggcattgaaccagtagaaagtccaatactgtctggaggaaaacccggccctcataagatccaaggaattggtgctggcttcatccctggtgttctggatgttgatttacttgatgaagttgttcaaatttcaagtgaagaagctattgaaactgctaagcttcttgcattgaaagaaggtttactggtgggaatatcatctggtgctgctgcagctgctgcagttaagatagcgaagaggccagaaaatgctggaaaactcatt

SEQ ID NO: 212727 - DNA, 472 bp, Glycine max
tggtcgtttttttttcagcaaactactatatttttattgaatcttagtcaattaacaagcaaacagaaatcctttttattttttagatccataagagaaaaaatatatacacaacccaaggacagaatgcaacttgagaagcagcaaatggctcgtatgacttgacattcaaggctcaaagaccaagctctctgcttctcgcttcacggattcaaagagcacagacgatagataacgctctccaaaacttgggaagaccgcaacaatgagttttccagcattttctggcctcttcgctatcttaactgcagcagctgcagcagcaccagatgatattcccaccagtaaaccttctttcaatgcaagaagcttagcagtttcaatagcttcttcacttgaaatttgaacaacttcatcaagtaaatcaacattcagaacaccagggatgaagcccgcaccaattccttggatc

SEQ ID NO: 212728 - DNA, 340 bp, Glycine max
ctattcatactggaacgaatggttatcttgattcattagaaattggacaggtaaggaaatttcttgttgagttacgtgcttacttaaacacgaataaacctcaattcaaagaaatcatatcttctaccaagacattcactggggaagcagaagtccttttgaaggaagctattcaagaacagatggaactctttttactacaggaacaggtagaaaaaaattgattaatcatttaataactttataatttcactttcaaattcttataattagtatcttttaatatctttttatttcatttgaatataatattaatatataaataaaatgaattcgaatg

SEQ ID NO: 212729 - DNA, 340 bp, Glycine max
cattcgaattcattttatttatatattaatattatattcaaatgaaataaaaagatattaaaagatactaattataagaatttgaaagtgaaattataaagttattaaatgattaatcaatttttttctacctgttcctgtagtaaaaagagttccatctgttcttgaatagcttccttcaaaaggacttctgcttccccagtgaatgtcttggtagaagatatgatttctttgaattgaggtttattcgtgtttaagtaagcacgtaactcaacaagaaatttccttacctgtccaatttctaatgaatcaagataaccattcgttccagtatgaatag

SEQ ID NO: 212730 - DNA, 340 bp, Glycine max
ctattcatactggaacgaatggttatcttgattcattagaaattggacaggtaaggaaatttcttgttgagttacgtgcttacttagacacgaataaacctcgattcaaagaaatcatatcttctaccaagacattcactggggaagcagaagtccttttgaaggaagctattcaagaacagatggaactctttgtactacaggaacaggtagaaaaaaattgattaatcattgaataactttataatttcactttcaaattcttataattagtatcttttaatatctttttatttcatttgaatataatattaatatataaataaaatgaattcgaatg

SEQ ID NO: 212731 - DNA, 256 bp, Glycine max
ctattatcattcgaattcatttcatttatatatgaatattatattcaaatgatataataagatattccgagattctatttataatacttcgaacgtgaaattcttaaggtattaagtgatcaatcaagtgtgttctacctgtccctgtagaaaaaagagttccttctgctcttgaatagcttccttcaaaaggacttctggttccccagtgaatgtcttggtagaagatatgacttctttgaactgaggtttattc

SEQ ID NO: 212732 - DNA, 546 bp, Glycine max
cattagaagtggtacacaaacatgggccatgctcccaactgaataatcatgatggcaaagcaaagtctaaaacaccacacagtgagattctgaaccaagacaaagaaagggttaagtacattaactcaaggatctcaaagaacttgggccaagatagtagtgtgagtgaattggactcagttacactaccagccaagtctggtagccttattgggtctgggaattactttgtggttgttggtcttggaacacccaagagggacttgtcactcatctttgacactggcagtgatctcacttggactcagtgtgaaccatgtgctcgttcttgctacaagcaacaagatgctatctttgatccatcaaagtctacatcatattccaatattacatgcacatctacgctttgcacccagctctctactgctacaggtaaatattaatttgattctcaacatttcaagattattattatatgtgctggaaacttaattagccacagaatgatggttatatgttgtttacatatagaagaaacattttgac

SEQ ID NO: 212733 - DNA, 494 bp, Glycine max
gtttttcgtcctttttttttttttttttttttttttttttttgaaagaaaaatgtattgcttttctatcaactcaagtagcccaaacgaccaaacattaattaaatatttagtgtatatttggatttctaaattttagaatcatcattgttttctatctaaacatataattcaatggtatcaaagacgcaagtcccttggcaatcttgagtcaaaatgtttcttctatatgtaaaacacatttaaccatcattttgtggctaattaagtttccagcacatataataataatcttgaaatgttgagaatcaaattaatatttacctgtagcagtagagagctgggtgcaaagcgtagatgtgcatgttatattggaatatgatgtagactttgatggatcaaagatagcatcttgttgctttgagcaagaacgagcacatggttcacactgagttcaagtgagatcactggcagtgtcaaagatgagtgacaagt

SEQ ID NO: 212734 - DNA, 464 bp, Glycine max
  unsure (1)..(464): unsure at all n locations
ttgtcgctnnnnncgatggaatgcgtatatcaacgatgctatgactgtgcgcatcgcaacgcgtagcgtatagctctgaatgcttgctcgagcctcttatttagtgttgcggataattttagaactagtgcacgggaaaaagggattcagattcgtgactttgtatacagtccataaacacctgagaaccggatgcgggagttagattgaatgtggcacgcatcagagagattgagggctaatgtgtagcgatggtgctataccagctatggagaggtttacagatcctggatgcactttagcgctgtgcgtttattggctgagagcattctgagatatggtctgacaccatctttcttggcatgatgaatagctccttctgtacaatgcgagaagaaagtacgttctatacttgaagggttgactgatatcacagacaagtgcattactggatgaccgaggat

SEQ ID NO: 212735 - DNA, 458 bp, Glycine max
gaatcgaggacttgtgatgttcttaactctgttggaatccagatacttcaaaaaatgatgtcacttgagcgaaatgaacctggtttgactctggatggaagccttgtcagttaaattgaaggagaaagcgctgtcgacaggctaaaaagacacgctgaccatgacaggagacttatgaatgctttgtataaagagctgcaggaagaaagaaatgcttctgcagttgctgcaactgaagcattagccatgatcacaaggctgcaagaagaaaaggcaacattacatatggaagccttgccgtacttaagaatgatggatgaggagtctgagtactaaacagaagctctgcagaaagctaatgaccttcttgttgagaaggagatagacatcgaatagttggaagctgagctcgagttctatacgacgacgttccctgatgaatctgtgctggacaacat

SEQ ID NO: 212736 - DNA, 545 bp, Glycine max
ctcagtagggtttgcggtttcagagtttgtgacgcacgcatccatggccaccaccaccaacgccgccgcagccccgccgcgccagctctcccagaaggaagccgacatccagatgatgttagccgccgacgtccacctcggcaccaaaaactgcgacttccaaatggaacgttacatcttcaagcgccgcaacgacgggatttacattattaaccttgggaagacatgggagaagcttcagttagcagctagggttattgttgcaattgagaaccctcaggatatcattgttcaatccgcaaggccttatggtcaaagagcggttctgaagtttgctcagtacactggtgctcatgctattgctggaaggcacactcccggtaccttcaccaatcagcttcagacttcgttcagtgagcctcgtctccttatcctcactgatccaagaacagatcaccagcctattaaggaagctgctctggggaatattcccaccattgctttctgtgacactgattcgcctatgaggtatgtggacatggaat

SEQ ID NO: 212737 - DNA, 503 bp, Glycine max
caaaggttgctgtaggagataagattgcagtagtgctaagtgctaacacctgcagtgaacaatggcctctgcatcagcatctctgctcaagtcttcacttgttcttgacaagtctgagtgggtgaagggacaaacccttcgccaaccttctgcatcagttgtgagatgcaaccccaccaccccatcaggcctcaccatcagagctggttcctatgctgatgagctcgttaagaccgcgaaaacagtggcttcaccagggaggggtattttggccatggatgagtccaatgctacctgtgggaagcgtttggcttcaattgggctagagaacactgaagctaaccgccaggcataccgtaccctcctcgtgacagttccaggccttggtcagtacatctctggtgccattctctttgaggaaacactctaccaatccacaactgatggcaggaagattgttgacgtgctgcttgagcaaaacattgttcctggtattaaagtcg

SEQ ID NO: 212738 - DNA, 425 bp, Glycine max
cattgattgccgagcttaaaccattttgttatatattgagacataatcaagtacacaactcatagcaaaaggtttattaagctgtaaaggtgcatttaaccataaacaaaaatagtctccaagactataaaaacattacattttagacaaattagtcttccacttcatcgtccgtcaacacctactgtaactgctggtgttgctgcctaacaagtatcatattcactgcaaacatcttagtaggagtagcttttgacgaacaactccttcttggcttcctcggattcaccctcaccagtgtacttcccaagctgagcgagtgagttggacttggcacggaatgcgagtgcatcttgtgctgacttcacgttctctgggcggacttcccatgtcttcaaggcagtgttttggagggctctggcata

SEQ ID NO: 212739 - DNA, 557 bp, Glycine max
cactgatcccgccaagggtatgaaaggagctgttcagaaggcagaagagataagggataagactcccaattcttatatgcttcagcaatttgaaaatcctgccaacccaaaggtccattatgaaaccactggaccagagatctggaagggctctagtgggaaggttgatgctcttgtctctgggattgggactggaggtacagtaacaggtgctggaaaatatctgaaagagcagaatcctgatataaagctatatggcattgaaccagtagaaagtccaatactgtctggaggaaaacccggccctcataagatccaaggaattggtgctggcttcatccctggtgttctggatgttgatttacttgatgaagttgttcaaatttcaagtgaagaagctattgaaactgctaagcttcttgcattgaaagaaggtttactggtgggaatatcatctggtgctgctgcagctgctgcagttaagatagcgaagaggccagaaaatgctggaaaactcattggtgcggtcttcccaagtttggagagcgttatctatc

SEQ ID NO: 212740 - DNA, 511 bp, Glycine max
ctgaagcgtaccggatttcattgtgatatcatttgtgtcactggatggactgccactccaatgcaggatgttcaggttacaattgattggtttatttcctctcaggaatgtgttcccaggacttattgtgttttaaatccacaaaatccttttgtgttgaataggtggatggggaaactgactttcccccagggcacttcccgaagtgttaagagaatgcctctttctatagggggaggagctggtgcaaagaatgctattctcatgaatatgccaaatgctgttctttcaatgtggagatattttgttggagatctcgtctttgaagtttctaagatgacttctccctacattaaatgtacagtctctttcttcatagcatttggaaatttggctgatcacaccatcaattttgaggcttttccccacaagctggtgcagtttggagagattcaggaaaaagttgtattgaaattttcacaagaggaatttcttacagcttggtcaactc

SEQ ID NO: 212741 - DNA, 396 bp, Glycine max
aaaataacacacacttcacacatcattacgacaattaaaagaggtgtggaaattttcaaatagacagagcatactcaacaagagggtcatgactaatttcctttattgaattaaacaaacgaacaaacgatagaaaacacatattccagatcatgcagaggattccgcatttacagaagaactggctagaatcctggggaacagaaaaagctggcataagagtatgaccagcaatttcaaaaacttgagaaattcccaggagaatatcaaaaactggaaactgtttgggattgtcaataaggaaactcaagtgccatgaagtttgatttggccactcagaactcccatttcaaaaccattattaggaccacatacctttatttgggaaagatcaat

SEQ ID NO: 212742 - DNA, 311 bp, Glycine max
ctatccatactggaacgaatggttgtggtgactcatgagaaactggaccggtactgaaatgctttgcagagacaccagcttactcagacactaatatacctggatcaaaagaaatcatatgtgctaccaagacatggagtggggaagcagaagtcctttggaaggaagctatgcaagagcacacggaactttctgtactacatgaacacgtagaaaaaaatcgactgatcattgagtgtctgtatgataacactttaaaatactaatcacaagtatcttttaagatctgtatatgccatttgcatataata

SEQ ID NO: 212743 - DNA, 340 bp, Glycine max; identical to SEQ ID NO: 212728

SEQ ID NO: 212744 - DNA, 340 bp, Glycine max
cattcgaattcattttatttatatattaatattatattcaaatgaaataaaaagatattaaaagatactaattataagaatttgaaagtgaaattataaagttattaaatgattaatcaatttttttctacctgttcctgtagtaaaaagagttccatctgttcttgaatagcttccttcaaaaggacttctgcttccccagtgaatgtcttggtagaagatatgattactttgaatcgaggtttatgcgtgtttaagtaagcacgtgactaaccatgaaatttgcttacctgtccaatatctaatgaatcatgataaccattcgttccagtatgaatag

SEQ ID NO: 212745 - DNA, 421 bp, Glycine max
tttttcgtcctttttttttttttttttttttttttttttttttttttttttttatcagtgacaataaataatataagaaatcaaaaaatctgccgctaacaaaaaaagacaaatacactgtacaagtttgaaatgtaccaatagttgccaaaaagaaagtgatagatccatatattctctcctataggggggaaaaacaatgaaagaataagcaataaagcttgccttgatcacaaactccattttactgtaccagagaatctgggcttcatgagaattccatttaggcttcaaatgattgttttactgaccactaattgccagtttattacgtttcttatgggcgtgcgagccattgaaaagctgctgataaaatagcttgcaagtgagggattcttgaaaacagaaggaagtgataatt

SEQ ID NO: 212746 - DNA, 535 bp, Glycine max
ccttgactaattaattatccctcacaactaccaatggccgaagagaaacaccacaagcaccgcctcttccaccaccacaaggacgaggataataagccagtagaaaccgatactggttacgacaacacatcatattccaagccttctgatgactatgactctggtttcaacaagccatcgtatgagtcttctggcggtggctatgaaggtggttacaacaaaacatcttattctagtgatgagccagcttctggtggtggctatgaaggtgggtacaagaaaacaggttattctggtggcattgatgagacttctggtggctatggcgctggtggtggtggatactctgacgtcactgatggtggctacggcaaaccaagtggtggctatggcgccgctggtggtggtggtgtgtaccctgacactaccactgatggtgggtacagcaaaacaagtggtggtgggtatgatgatgaggttgactataagaaggaagagaagcaccacatgcatcttgagcaccttggtgagttag

SEQ ID NO: 212747 - DNA, 487 bp, Glycine max
tacgcccgtggccgcccttttttttttttttttttttttaatctcaaaccatttgagtatatattattttatgtacttaacacttaacacagtacacatgcatatatagagcaacacatttcaaggaaacattctccaaaccatactgatctcccaaaataaactggaagatgattaacttaaagacacacatatatatataagccaaaagcatatatatatataagacaagtagaaggaatatgctcataattggttgcttatgcttcagccaaagagatggtggtgcttctttccatgagcttcctcatcttgctcctttgcttcctttttctcatgatgttcatggaaggcaaacccaccagatcccactgcagctgctgctgcaacctcctcttctatcttgtgcctgtgagcatgctctgggtctttctctgccttgtgcttctcatgcaaggcgtaagcagcagcagatgcagcacctaac

SEQ ID NO: 212748 - DNA, 542 bp, Glycine max
gctgggtcgagctctggagcttaaatcttaatctttcacttcttcgctaatctctagagtactccacatgcattccattttgtttcatgaactaaccaaataaaaaacgatgagcacttctcatggacaacgctatctcctcttggctttcactacgtagataggtctctgtagctacaacactacaccagttgcggctcgtatgctgcccaacgtgttctccatcccaaggtggaacacatcccacgcgccacctgatagcgcgtggaacgcgtatcgcaatttcactgggtgccgcccggggaaaacatataacggtctttcgaatctgaaaaactactttcattattttggctacatctccaacgtgtactcgaagtcgtcgaataatagcgacgatttcgatgatgcgttggaggcagccgttagagcctaccagatgaacttcaaccgtaacatgacaggggagctcgacgaccccacgatgaaccaaatcgtcaagccacgcttgggcgtggatgacatgatcaacgggaccacaa

SEQ ID NO: 212749 - DNA, 530 bp, Glycine max
actactccttaatttctctcttcacttatcatcatacttatatattatataacccaataattaaattaaatacatgttagcactttaacattcctttctctaacctcgttcccactctcatattttcccttctgctgatattcagctaaactaagtcaataagatgactcagggaaagatagttgaagctgcagaagctcataaaacacttgaggatttcgatcctccaaagaagcgcaaaaggaacaagtatgcttttgcttgtgctgtgctggcctccatgacttccatcttgcttggctacgatattggtgtgatgagtggagcagccttgtacataaaaagggacctgaaagtgtcggatgtgcaaatcgagatcctgctcggaatcatcaacctctactctctgataggctcatgcctcgccggcagaacctccgactggataggtcggcgttacacgattgttttcgccggcgccatcttctttgtcggagcacttctcatgggtttctcccccaactattcct

SEQ ID NO: 212750 - DNA, 511 bp, Glycine max
cgcaccctgcgcccgcagcctcaacgggaagatctcagaactataaacccacgtgatgggacccgcaccaatggagaacgtggccacgtaagccaacaccatggctatgctcaatgcaacggcccacattagtttcctctcggagtgaccaatgatcgtgaggctgatagcgagcgtgaggagagagagcaccatgcccccgacactagacaacaacaacggacgacgacccacgcggtccaacgtaaaagtagccgccaagatgaaaacggttttgacgaatccaacggccacggttgcaagaagtttatgcgtgtcgtctttgatcccagccttctcgaagatcctggggctgtacaaaacgacggcgtctacgcccgacgcttgttggaagaagtgaatcccaagggcagcgattacgatgtgacgaattgtgggcgttggatagaggaagagttctttccatacgccttcacctgtgcttcgtttggttacctgaacgacttcgtcg

SEQ ID NO: 212751 - DNA, 533 bp, Glycine max
gtgggaagagtgaaagaagaagcgcagttaatgaaggtataagactgcagaaactgagagagaaagagatctggaagagatgagtgaagcgcagaagcaggtttggaaaggggccattcctctccagattcacctccacgaatccgaagtcaccactctccctcctcctccacccgctctcgtgttggcacctcggatagggtacttacctttgctgatttcgctcttgaagcctcagttcagcaccacgcttccccctggagtcgacaccatttggtttgagtacaaaggcctccctctcaagtggtatatacctactggagttctttttgatcttttgtgcgtggagccagagaggccgtggaatttaactgtacactttagaggatatcctagtattgtattgcttccctgtgaaggtgaagacagtgtaaagtggagctttattaactcactgaaagaggctgcatatgtaataaatgggaatagcaaagatgtgatgaacatgtctcaaactgatcaggtggagctct

SEQ ID NO: 212752 - DNA, 551 bp, Glycine max
tacaattttaaaatattggatttttcgttatttaaatcgcgtatctccatcacttgtagtgatttatcattcaatgaatgattgactgacaaaatgattcacttatcaaattttaatttaaagttttttagctaaaaagaaaataactttgctttttcccttctttttaacccccttaaatgaaaaaaggggttccccgacttggatagggaactatgcgagtgacctacctaatcttattgtagaaattttcaggatcaatgattagaccatgcaaactagaaatgctttttcttgtataaaggaagggattactcgatccatttccatatcgatcatgatatatataataattcgagcacccatttcaaacgcatatccaatttttgcacagcagggttatgaaaatccccgagaagcaaccggtcgtattgtctgtgccaattgccatttagctaataagcccgtggatattgaggttccacaagcggtacttcctgatactgtatttgaagcagttgttcgaattccttatgatatgcaagtgaaac

SEQ ID NO: 212753 - DNA, 441 bp, Glycine max
acaagttaattgaagaaattcaatttgtttaatcaaattccccaaccccctctctttttatttgttcactacgtattatatgcaataaaatattatatggcagaaatattctaagttggaaaaaatagaaactaagatataggatttttcaggaaggggttaaaaaagattattttattgatatttttagaatatttctatttcgacacaaacaagaaggaataggaatcggactctaggaaaagacaaaaaatcccccctagagtaccttttccatattttaattgattttgtttcaaattatctatctatatagatatctattttatgtttagtatcgaatccaattttattgtattttacaatcgaaatttctataatagaactctctattatagaaaaatgaaatctgaaaaaaacagtgtcataaccataatattc

SEQ ID NO: 212754 - DNA, 581 bp, Glycine max
  unsure (1)..(581): unsure at all n locations
aattgaggatgcatcatattcgtggggtttgtctgtgagctttctcagcataatcttgctaccaatagttggaaatgcagctgaacatgcaggagcaatcatatttgctttcaagaacaagctggacatttcattgggtgttgcattgggttcagcaactcagattgccatgtttgtggtcccattatgtgtaatcgttgcttggataatgggtatcgatatggacctgaacttcaacctcctagagacaggttcccttgcgttggcaataatagtcacaggcttcactttacaggatgggacttctcactacatgaaaggccttgttctcctgctgtgctacattgttattggggcatgcttcttcgtacaaagaacaccctttaataatcaagctgatgttactaacatcacacttaaaccaaccactaatggcagtttaagcgcttaattagtaggctttggcctatttgttgtcccttcctaagatgaagaatggtggcatcgatccaaaccaaaaatcagattcaaattcaatggatggatatngttcatgatctgacactttgcatatccataaa

SEQ ID NO: 212755 - DNA, 460 bp, Glycine max
ggaagacagtgatggtgtagttgttgcacagggtgagagtcctgatctgcagactcttttcagaaggttctggaaggtggcagctccttactggacttcagatgacaagggaccggcaaggttgcagcttgctggtgtttttgctctcactttggccaccactggaatcagtgttggcttcaatttcttggggagagacttcttcaattcacttgctaacaaggatcaagagcaattcacgaagcaactactttactacttgggtgcctttgctggaggaatcccgatttttgtgttgagagattatgcaagagaaactctgtctttgagatggagatcttggatgacaagatattacattgatcgctatctgaagaatcaaactttctataaaattcagtcacaatcaatcattgataatccagaccaacgaagtggtgatgatctaagttctttcact

SEQ ID NO: 212756 - DNA, 512 bp, Glycine max
tttgtcgccctttttttttttttttgattctaataaaatattatagcagcaagttgcaagggaaaatgtacagattgacatcttatatatcaaaattattgttcaatgcaattgaaccatgtgtgtctcatgagatggtaagcagcaaagcattgctagctcaaagatttgtaaattttaaagaggactcgggtctagtgggttcaatgggttcaatgcaccaatttagctgttcactgtcagaattaaatgtggatatgcttaagatcttgtcgtggtaagcacataaggatgaccgatggccaatgctgacatatgttatgttagctgctccaatcttttggtacaaatgtacctcattgacttcatcaagtgcacttgtagactcatccagtaaagccaattgaggctttgaaagcaaaagacgagcaaatgcaaggcgttgctgctctcccagagaaagaacactagaccattcatgtattgaatccaaactgaaacgagccaataaa

SEQ ID NO: 212757 - DNA, 332 bp, Glycine max
gaaaaacggtaatcttcaaagttacgtccatggtccgaaatctgatcatattgctgtgcgaggactgaaccaagtctatgctgctcactgctgtactccctagaaaacctgagcgtctaggttagcatattgatgccactaataatcacccttggagctcgatggatactttgcctgcatcagctcatgtgataaactctcttttgatgctgttgattaccaagatgaccattgatgcaggaatgaacaatggttataccgttgtcgtcaccgtactaagacatcctaatgatgcgaagagagcttccatagatattactctgaaatcgtat

SEQ ID NO: 212758 - DNA, 268 bp, Glycine max
gaatgcttgattgttaaatagctcacttcttggacttggacctcatcaggcacatacgagcgcccccgataggtgcatcgagatgagactatttatcgatctcttgacaccaaacggagcgagcacgttagaaaaggaactacacgtgctacggttgggcacacacggtctcttattgccttacttattgttgtgactggtgtaatatcacacagacttggcatgtgaaagaagaagggggaacaagcacacttggagagcgcagggc

SEQ ID NO: 212759 - DNA, 533 bp, Glycine max
gtgggaagagtgaaagaagaagcgcagttaatgaaggtataagactgcagaaactgagagagaaagagatctggaagagatgagtgaagcgcagaagcaggtttggaaaggggccattcctctccagattcacctccacgaatccgaagtcaccactctccctcctcctccacccgctctcgtgttggcacctcggatagggtacttacctttgctgatttcgctcttgaagcctcagttcagcaccacgcttccccctggagtcgacaccatttggtttgagtacaaaggcctccctctcaagtggtatatacctactggagttctttttgatcttttgtgcgtggagccagagaggccgtggaatttaactgtacactttagaggatatcctagtattgtattgcttccctgtgaaggtgaagacagtgtaaagtggagctttattaactcactgaaagaggctgcatatgtaataaatgggaatagcaaaaatgtgatgaacatgtctcaaactgatcaggtggagctct

SEQ ID NO: 212760 - DNA, 504 bp, Glycine max
ggtcgtccttttttttttttttttttttttttcagagacccaaactgagcgcagctttcacgtctagcctccatgcaaacccgccacagtccaatctccaaacatcacacggcaccatcttcgtgcacttctcgttccgccacgtgtactgcagcctcacaccgcaggtgaacgccgggtgagagtagcaccaccacgaagcgatggcactatccttcactttcaaccacaccacgatattctcaccctcaccctcacgcccctccagcatcatcctcttgtacgcgtcattcacccaccgtaccctaaggcttccgtcacagacaaaagcaggacacgtgtcagcttctaggctcttcaccttctccgcgtccgtacaatctaataacccttgccctccctctccgtctccctcccccatgcacgtgcctgtcacgctctccactgtcacccaagactccgtcacctttgccgtcgaacaagatctgaacgcttacctccctc

SEQ ID NO: 212761 - DNA, 528 bp, Glycine max
tcgtcggcggccgccctttttttttttttttttttttctattttcattcgaattcattttatttatatattaatattatattcaaatgaaataaaaagatattaaaagatactaattataagaatttgaaagtgaaattataaagttattaaatgattaatcaatttttttctacctgttcctgtagtaaaaagagttccatctgttcttgaatagcttccttcaaaaggacttctgcttccccagtgaatgtcttggtagaagatatgatttctttgaattgaggtttattcgtgtttaagtaagcacgtaactcaacaagaaatttccttacctgtccaatttctaatgaatcaagataaccattcgttccagtataaatagttattatctgttcttccacggtaagaggagctgattgggattgtttaagcaactcgcgcaatcgttgacctcttgctaattgattttgagtagctttatcgagatcagaagcgaattgggcaaaagcttctaattctgcgaatt

SEQ ID NO: 212762 - DNA, 270 bp, Glycine max
ggcattgctgctggacccaggggtgatcctaaaacaacagcgtgcttggacattgcggccaatggtatgttgaatggatctggcgactataaatccactggccagataaataaaatcactatcaccaatgacaggggcagattgacaaaggaagatattgataagatggttctcgaggcctgcaactacaggcctgaggacgaagagcactcgcacagagttcgggccagaagcgctgtggaaagctatgcctacaacatgaggaacacc

SEQ ID NO: 212763 - DNA, 529 bp, Glycine max
ggaagacagtgatggtgtagttgttgcacagggtgagagtcctgatctgcagactcttttcagaaggttctggaaggtggcagctccttactggacttcagatgacaagggaccggcaaggttgcagcttgctggtgtttttgctctcactttggccaccactggaatcagtgttggcttcaatttcttggggagagacttcttcaattcacttgctaacaaggatcaagagcaattcacgaagcaactactttactacttgggtgcctttgctggaggaatcccgatttttgtgttgagagattatgcaagagaaactctttctttgagatggagatcttggatgacaagatattacattgatcgctatctgaagaatcaaactttctataaaattcagtcacaatcaatcattgataatccagaccaacgaattggtgatgatctaagttctttcactgggacatcccttgctttctccctgactctctttaatgctgctgtagacttaatctcatttagtaatatc

SEQ ID NO: 212764 - DNA, 439 bp, Glycine max
  unsure (1)..(439): unsure at all n locations
cctttccttttttttttgattctaataaaatattatagcagcaagttgcaagggaaaatgtacagattgacatcttatatatcaaaattattgttcaatgcaattgaaccatgtgtgtctcatgagatggtaagcagcaaagcattgctagctcaaagatttgtaaattttaaagaggactcgggtctagtgggttcaatgggttcaatgcaccaatttagctgttcactgtcagaattaaatgtggatatgcttaagatcttgtcgtggtaagcacataaggatgaccgatggccaatgctgacatatgttatgttagctgctccaatcttttggtacaaatgtacctcattgacttcatcaagtgcacttgtagactcatccagtaaagccaattgaggctttgaaagcanaggacgagcaaatgcaaggcgttgct

SEQ ID NO: 212765 - DNA, 542 bp, Glycine max
  unsure (1)..(542): unsure at all n locations
ggaagacagtgatggtgtagttgttgcacagggtgagagtcctgatctgcagactcttttcagaaggttctggaaggtggcagctccttactggacttcagatgacaagggaccggcaaggttgcagcttgctggtgtttttgctctcactttggccaccactggaatcagtgttggcttcaatttcttggggagagacttcttcaattcacttgctaacaaggatcaagagcaattcacgaagcaactactttactacttgggtgcctttgctggaggaatcccgatttttgtgttgagagattatgcaagagaaactctttctttgagatggagatcttggatgacaagatattacattgatcgctatctgaagaatcaaactttctataaaattcagtcacaatcaatcattgataatccagaccaacgaattgttgatgatctaagttctttcactgggacatccnttgctttctccctgactctctttaatgctgctgtagacttaatctcattaagaatatcttggatggatctat

SEQ ID NO: 212766 - DNA, 380 bp, Glycine max
tgggtagtgaagctcgaggggagacgaaaattaagcagcgagaaacgttgacttttggtgtataacttttaaacttattggccactgcttcttcttcttcttcttaagaactcatggctactatgatattattctagtgcacaaaaggatgggagttccagagagagaccctgctgcacaagcgagtcaggctaccgggtgtaggtcttaccccacagatgatgagcgtttggttcaggtcctttgccgcaaggctgctggccatcatttatctgttgcagtcgttgctgacgatgacctgtacaagtatgatccatgggctctttcaggataggcagtgtttggagagaaggagtggttctttcttagaccaggagaca

SEQ ID NO: 212767 - DNA, 553 bp, Glycine max
ccacgacaacgtatcacaagctcccaatatagcaagcagcaaacatgatttcttccgtgtcctttccagcgtctcttcccgccgttaacttctccggcaacgccatggcttcgccgtcgtgccgcgtcaaatcccggccaatagtcgccttcgccaccgccactgccaccgctgaagctcgctcttcctggacggagcaaccgagaccttcctatctgaactcctcttgctcttcgctttacgatatcctcggcatccccgctggcgcctctaaccaagaaatcaaggccgcgtaccggcgactagccagagtctgccaccccgacgtggcggccatcgaccggaaaaattcgtccgctgacgaattcatgaagatccacgccgcgtactctactctttctgatcccgacaagcgcgctaactacgatcggagcctattccggcgacaacggccgttgtcgacggcggcggtgttctcccgttacacgcgtcggaactgggaaacggatcagtgctggtagtgagtcactgagtcgactcgctcgagtgaatg

SEQ ID NO: 212768 - DNA, 495 bp, Glycine max
gagaaaatgtctctaatcccaaatttcttcggtggcagaaggagcaacgttttcgatcctttttccctcgacgtctgggaccccttcaaggatttttctttcccaaacactctttcttcagcttcctttcctgaattttctcgggaaaattctgcattcgtgagcactcgtgtggattggaaggagaccccagaagcacacgtattcaaggctgatattccagggctgaagaaggaggaagtgaaggttcagattgaagatgataaggttcttcagataagcggagagaggaacgttgagaaggaagataggaataacacgtggcatcgcgtggagcgtagcagcggcaagttcatgaggaggttcagattgccggagaatgcaaaagtggataaagtgaaggcttctatggaaaatggggttctcactgtcactgttcccaaggaagaggttaagaaggctgatgtgaagaacattcaaatctctggttaagca

SEQ ID NO: 212769 - DNA, 495 bp, Glycine max
tcaccaactgcaactattttatttctttatacaatcacacctcctacgatacattctcccaagcatatcactcacaatagaacatagaaaatcacacaatttctcaaacaacaaagataaacacaaaagaccaacaacaatttgcttttgcttaaccagagatttgaatgttcttcacatcagccttcttaacctcttccttgggaacagtgacagtgagaaccccattttccatagaagccttcactttatccactttggcattctccggcaatctgaacctcctcatgaacttgccgctgctacgctccacgcgatgccacgtgttattcctatcttccttctcaacgttcctctctccgcttatctgaagaaccttatcatcttcaatctgaaccttcacttcctccttcttcagccctggaatatcagccttgaatacgtgtgcttctggggtctccttccaatccacacgagtgctcacgaatgcagaat

SEQ ID NO: 212770 - DNA, 495 bp, Glycine max
gtacacttctggatcaacgggcacgccaaagggtgtgctgatcaagcaccgcaatatcgttgcagccatcgctggtgtcgatgtcattgtcggcaagtacctcggacccggtgacgttctcctcgcctacctccccgctgcccacatcctcgaattcgtcttcgaaaacgcgaccctgttctggggtggcacgctcggctacggcaccatccgcaccctctccgatgcctccgtccgcaactgcgctggtgacattcgcgagctgaagccaactgtccttgttggtgtgccgcaggtgtgggagactgtgaagaagggcatcatgtccaaggtccaggctggcggcgccgtcaagagcaacatgttctggggcgcattcgcagccaagaacttcttgctaggctctggcctgcccggcagcggtatcctcgatgccattgtcttcaacaaggtcaaggaagccacgggcggtaagctgagaaatctgcttgagcg

SEQ ID NO: 212771 - DNA, 561 bp, Glycine max
attatcatgtttatacaaatgcgaatgacatgttttctagagctaatgcatttgatcatacatctcgaaatggtccaaaggcttttgtaagtgagtatgctgtgactggaaaagatgctgggacaggaagcctcttggcagccctagctgaagctgggttccttattggactggaaaagaacagtgatgttatccaaatggccagctatgctccactttttgttaatgccaatgataggaggtggaacccagatgcaattgtattcaactcctttcagctctatggaactcctagctattgggtgcaagtatttttctcagagtcgagtggagcaacacttctaagtacatcacttcaagcaccttcctcaaattcacttgttgcatcagcaattacatttcaaaattctgtagataagaaaaattacatacgaataaaggttgtgaacttcggtaccactgccgtgaaccttataatctctcttgacggactagaaccaaactcattgcagttatctgggtcaacaaagactgtgcttacatctgcaaatgtaatggatg

SEQ ID NO: 212772 - DNA, 601 bp, Glycine max
  unsure (1)..(601): unsure at all n locations
aaaagatggtgtatgcaaattctcagctgaaaatgttgccgttcaagtcattgactcggtcaatatcaccttgggtgctgagaatgaattaaaacatgcagttgcattgttcggccggttagtgtggcctttcaggtggtgaatgggttccatttctacgagaatggagtttacactagtgacatttgcggtagcacttcccaggatgtgaaccatgccgtccttgctgtggggtatggagttgaaaatggcgtcccatattggctcataaaaaattcatggggagaaagttggggtgagaatggctacttcaaaatggaattggggaagaacatgtgtggtgttgcaacttgtgcgtcttatccagttgtggcataaattgcataagaatatggtccctggtgactaccaccttgtcatgcttcagagtttaaagataagtgtcattgtataatgaanattgctcctagttgggttggtatgatggtattaaataagttagaaagtgctgtaaatcacgtaagaatatcatgggctgaattgtgtgtatcacagacatanatacgatcatatattgatagtcatagtacatattggattg

SEQ ID NO: 212773 - DNA, 469 bp, Glycine max
atcttaattcttataactgataattaaagcggggcgcatcaatacaatacaatacaatatgtaactatgaactatcaatatatgatcgttatttatgtctgtgatacacacaattcaggccatgatattcttacgtgatttacagcaacttctaacttatttaatacatcataccaacccaactaggagcaattttcattatacaatgacacttatctttaaactctgaagcatgacaaggtggtagtcaccagggaccatattcttatgcaatttatgccacaactggataagacgcacaagttgcaacaccacacatgttcttccccaattccattttgaagtagccattctcaccccaactttctccccatgaattttttatgagccaatatgggacgccattttcaactccataccccacatgaaggacggcatggttcacatcctgggaagtgctaccgcaaat

SEQ ID NO: 212774 - DNA, 461 bp, Glycine max
gtctagcttatagatatggtagagggataaatttgactttgttgcttgcatgggagcattttttggggttgtctttgcctcggttgagataggacttataattgcagactctatctcctatgcggagattctattacaggtcgcagggccacgaactgcacttttggggaaaatccttatgactactgtctacacactcatccaacagttccctgaagccacaagggtgcctggagtacctattataagagttcacactctgctatactgatacaactccaactatgttcaagaaaggatattcacacagctggtgtatgaggaacacctagtgaacggttactaccatacaagaatccaatttgtgatgggcgagatgtcaatcgttaccgacatcgataccagcggtatacataccctcgaagagttatctagaagtcttcagaagagaaacgttcagc

SEQ ID NO: 212775 - DNA, 607 bp, Glycine max
  unsure (1)..(607): unsure at all n locations
ccacgacaacgtatcacaagctcccaatatagcaagcagcaaacatgatttcttccgtgtcctttccagcgtctcttcccgccgttaacttctccggcaacgccatggcttcgccgtcgtgccgcgtcaaatcccggccaatagtcgccttcgccaccgccactgccaccgctgaagctcgctcttcctggacggagcaaccgagaccttcctatctgaactcctcttgctcttcgctttacgatatcctcggcatccccgctggcgcctctaaccaagaaatcaaggccgcgtaccggcgactagccagagtctgccaccccgacgtggcggccatcgaccggaaaaattcgtccgctgacgaattcatgaagatccacgccgcgtactctactctttctgatcccgacaagcgcgctaactacgatcggagcctattccggcgacaacggccgttgtcgacggcggcggtgttctccggttacacgcgtcggaactgggaaacggatcagtgctggtagtgagtcactgagtcgactcgctcgagtgaatgagagaagaacgcgttatngaagcgcctttctttgcatataagtaataaatcact

SEQ ID NO: 212776 - DNA, 504 bp, Glycine max
  unsure (1)..(504): unsure at all n locations
caacgaactactccgaagccgctcacgttatccacacaacaacactccttaaaccctaaccaaccatggcttcttccaccttcaccgcaatgtccgcttgcaagctttcctcctccgccgccatctcctccttccccacccaccgncgcaccaacgccgtccttctgtccagacgcagccgcgccgccagggtctccgccatggccaaggagttgcacttcaacaaagacggcaccgcaattaggaagctccagagcggtgtgaacaagctcgcggatctggttggggtcacgcttggtcccaagggaaggaatgttgttctcgaaagcaagtacggctcgccgaaaatcgttaacgacggtgtcaccgtcgccaaagaggttgagttggaggatccggttgagaatattggcgccaagttggtgagacaagcagctgccaagacaaacgacttggctggtgatggaaccacgacttcggttgttctagctcaaggtcttattg

SEQ ID NO: 212777 - DNA, 573 bp, Glycine max
tgcaaaaaaattattattaacttaaaaaaaataagggaggagaggatgcatcactatctagttcaccacacttcaatacatttcgactcttgctatatggctataccaaattttgcatttcatccgatgagaaaaaaaatactcttctcactgaagcagccgttgctctagataccatatcctgaattgtccatggggtttccagcaggtacaggctcaggttcctttatctcgacaaccacacaatctgacattaagaaggttttggctacagaggctgcatgttccaggcaacatctgaccacctttgttggatcaatgatcccagcagacatcaaatcttcatattttccggtggcagcattatatccatatcttggattgtcgctggacaataccttctcactgacaacactaccattgacaccagcgtttttggcaattaaatttcaaagggtaactaagagctctcttcacaatatcagctccaacttttacttcatcattatcaaagctatccttgattagtgccacctttgatgcaagtctcagatgagtgcaaccatcacccac

SEQ ID NO: 212778 - DNA, 546 bp, Glycine max
  unsure (1)..(546): unsure at all n locations
ggctggttttgaagcctatgaaaagaaggcaaagaagtcttgcatggattatggtttccatatggctattaccaaatgggatgaaactgtgtcaagagaaatggagctcatggtcaaggagaaaggtcatgatttatttccttgataatttggctgattatgtggcaataaccctttggttttgagtttatgtggaatttatttcagctattgcatctatgttttgtaattgcaggcatcaactcttttaagtttttcatggcatacaaaggagctcttatgatcaatgatgagcttcttctggaaggatttaaaaagtgcaagtctcttggtgccttagctatggtccatgcagaaaatggagatgctgtgtacgaaggtcaggaaaaaatgatagaacttggaataactggtcctgagggacatgctctttcacggcctgcagtgttggaaggagaggcaactgcccgtgctattcgtttagctgattntgtgaacactcctttatatgtggttcatgntatgagcattgatgcaatggaagaa

SEQ ID NO: 212779 - DNA, 497 bp, Glycine max
caccagccctcaattggagggacagtttcatgtgttacctggctcctaatcctcccaaacctgaagacttgccagtagtatgcagggatatacctttggaatatgggacatatgtaatgaagcttggaattgctctatttgaattattatcagaagctcttgggctgcacccagaccatttaaaagacttgggttgtgctgagggacttatttcactttgccattactaccctgcatgccctgaaccagatttaactttgggaaccacaaagcattctgataattgtttcctcacagtgcttctacaggatcatattggtggcctgcaggttctttaccagaacatgtggattgatataaccccagaacctggggctcttgttgttaacattggtgatcttctacagcttataacaaatgacagattcaagagcgtagaacatagagtacaggcaaatctcataggtccaagaatatctgttgcatgctttttcagc

SEQ ID NO: 212780 - DNA, 472 bp, Glycine max
agctcacgtatggtgtttttggcttaggtaaccggcaatatgaacattttaataagataggtaaaatagttgatgaagaacttagtgagcaaggtgcaaagcgtcttgttccattgggactaggtgatgacgatcaatccattgaggatgattttgttgcttggaaggaatctctatggtctgagttggatcagttgctccgggatgaggatgatgtaaatactgtatctactccttataaggctgctattcctgaatatcgagtggttattcatgattccaccgtcacatcttgcaatgataatcacttaaatgtggcaaatggtaatgctgtgtttgatattcaccatccttgcagggttaatattgccgctcaaagagaacttcacaaacctgagtctgatcgttcttgcatacatttggagtttgacatatccgggactggcataatatatgaaactggtgaccatgt

SEQ ID NO: 212781 - DNA, 386 bp, Glycine max
catcaactagaagaattatttcattaatcgagtgcttattcattgccaattcctacaatttgatacatggccattggaaataaactagtgcgacctatacgtattaaatcatctatgaagctatctatcagtccccctaaaaataatcctagttcaaatatcatgacaagagagaatatcaaggcggcgaaaaatataagaaaaccacacaaatgtccacgaaaacgatttgctttctcaaggaaatttcagcctccatcattggtgtcccaaaactccgtgatagaagagtatcaaatatccttcaaccaatctggaacttaacagaccaaatagcatggaaggcacaacccagaaagatgaataatcagaatatttaccagaca

SEQ ID NO: 212782 - DNA, 554 bp, Glycine max
ctcttattgttttcttaaaatttcttccttgccactgccagtgtgtcaccaccatggccaccgtcacaacccaagcctccgccgcgattttccggccatgtgcctcgaaatcgaggtttctgaccggctcttccggtaaactcaaccgggaagtgactatgaggccaatggggtgccctccttctgcctctttcaaggttgaagccaagaagggagagtggttacctggcttggcctccccaacttacctcaatggcactcttcctggtgacaatggatttgaccctctgggactagctgaggacccagagaacttgaggtggtacgttcaagccgagcttgtgaatggacgttgggccatgtcgggtgttgcaggaatgctacttcctgaggttttcaccaagattggaatcatcaatgcccctcaatggtatgatgctgggaaatcggagtactttgcttcatcgtcgaccctctttgtgatcgagttcatcttgttccactacgtcgagatcctgagatggcaggacatcaagaacccctgctctgtcaac

SEQ ID NO: 212783 - DNA, 510 bp, Glycine max
  unsure (1)..(510): unsure at all n locations
ctgccactttctgagtacaatacaacactgccatggctgcctcagtctccactattggagctgtcaacagagctccactgagcttgaacagctctgaagctggagattcggttcccagttcagccttctttggcacaagcttgaagaaggttactgcctcaagggtccctaacgtcaagatttcttctggaagtttcaaaatcgttgcggcggagaaagagattgatgagcaacaacagacaaacaaggacagatggaaaggtcttgcctatgatatttcagatgaccagcaagacatcacaagaggaaagggtatggttgattccctcttccaagctccacaggagactggaactcactatgcagtcatgagctcttttgagtaccttagcactggacttaaacagtataacttggataacaacatggacggtttttacattgctcctgcttttatggacaagcttgtngttcacatcaccaagaacttcatgaccctgcctaacatca

SEQ ID NO: 212784 - DNA, 562 bp, Glycine max
  unsure (1)..(562): unsure at all n locations
ttccaaannntcggattctgctntcacgtgctatgctctcgcatgcacgcttgcgatagctctggagacgggatggggtctgcaaattctcacctgataatgttgccgttcaagtcattgactcggtcaatagtcaccttgggtgctgagaatgaattacaacatgcagttgctttgttcggccggttagtgtggcctttcacgtggcgagtgggcttcatttctacgagaggtgggggtacactagtgacatttgcggttgcactgcccaggatgtgaaccatgccgtacttgctgaggggtatggagatgaaaacggcgtcccatattcgctcataaaaaattcatggggagaaaggtggggtgagaatggctacttcaaaatggacttggggaagaacatgtgtggtgttgcaacttgtgcgtcttatccacctgtggcataaattgcataagaatatggtccctggtgactaccaccttgtcatgcttgagagtttgaagagtagtgtcattgtataatgaaaattgctcctagttgggttggtgtgatgtattaaat

SEQ ID NO: 212785 - DNA, 445 bp, Glycine max
gtgacttgagaatggccttgccagtggtcgtcgacgcatagtaccttaaagaggtcgacacggctctgccgcgatctccgcgcactcatcgctaacaggaactgcgctcctctcatgcttcgattggtctgacacgatgccggaacttactatgctaagaccaagactggtggacctaacggttctatccgtaacgaggaagagtattctcacggcgccaacaatggcttgaagaatgctattgatttctgtgaggaagtgaatgaaaaacatcctaaaattacatatgcagatctctaccagctcgcgggtgttgttgcagttgaggataccgggggtcccacaatggataacgctcctggtcgaaggaattcaaaaatctctactaatgaagggcggctacctgatgctaaaaaaggtgtttcacatctccatgatatctttt

SEQ ID NO: 212786 - DNA, 521 bp, Glycine max
  unsure (1)..(521): unsure at all n locations
cactcgtgcgttaggagtcattgtacctggtgttgtacttactgtaaaggaaagtgtcagaataggattgcttgtatcccaaggatgcgagtttggatatgttgttttctctttagcaaatacgcttggggtgcttcctcttgagctcaacaagctgctcataattgtggttgtattgtcaatggcattaaccccatttctgaatgaagctggaagaagggctgctagctttattgaagacaaatttgatgctgagaataaacagaatgcttctgagaccgttaacttcaatgttagtgaacctgctgttatccttggatttggacaaatgggccagcttcaggaggagatagtgatgaagtatgatggccttatgtggcatttgatcttgacccctcagtagtaaaggcagctagaaaaataggctttcctgtactctatggngatggatcacgcccagatgttcttcactctgccggtgtctctattccaagagctttcatgattatgtacactgggaa

SEQ ID NO: 212787 - DNA, 558 bp, Glycine max
  unsure (1)..(558): unsure at all n locations
ctcacaagtcacttcgaggaccacgtggagctatgatattctacagaaaaggggttaaagaaattaacaaacaaggaaaagaggtattgtatgactacgaagacaaaatcaaccaagctgtgttccctggactgcaaggtggtcctcacaaccacactattactggtttagctgatgcgttgaagcaggccactactcccgaatatagagcatatcaagagcaagttctcagcaacagctttaaatttgcacaggctctgagtgagagaagctatgagcttgtctctggtggaaccgagaatcacctggttttggtgaatctgaagaataagggtattgatggctccagagttgacaaggtgttggaagcagttcatattgcagctaataaaaacactgttcctggagatgtgtctgccatggttcctggtggcatcacgatgggaacccctgctcttacttctagaggatntgttgaagaggattttgtcaaggtagcagagtattttgatgcagcagtgaagatagctgtgaagattaatggagagagcaaaggaa

SEQ ID NO: 212788 - DNA, 475 bp, Glycine max
attacatatgcatctatacatttcaacatatcgatcaagattttctggattcttacatataaaggcttttgacattgtttttaaaatatgttgacgtcctctaccatggatcaggaaaactgatcttgctgaattgcttgccagtaagaccatgggatgacctaatggaaaattttcttttctcaattcttgtgcttcatggttgctttatcaaaaccaatggttggaaattgttttgcatactcctcaacatcaaggcggagctttgctatctccgattgaaaggtagaagatgactcaattgtggccaagaagtccttcagctttgttcctttgctctctcccttaatcttcacagctatcttcactgctgcatcaaaaaactctgctaccttgacaaaatccttctcaacatatcctctagaagtaagagcaggggttcccatcctgatgccaccaggaaccatggcagaca

SEQ ID NO: 212789 - DNA, 544 bp, Glycine max
  unsure (1)..(544): unsure at all n locations
tgcttgccaaagctattgctaaggagtctggagcagttttcattaatgtcaggatatcaaacctgatgagcaagtggtttggagatgcccagaaactcgtgactgccatatttagcctagctcataagctccagcctgccatcatattcattgatgaagttgacagctttttgggtcagcgtcgtacaacagatcatgaggctttgttaaacatgaaaactgaattcatggctttatgggatggctttactactgatcagaatgctcaagttatggtccttgctgcaactaatcgtccttcagaacttgatgaagcaatacttcgacgtcttcctcaagcatttgaaattggtattccagaccaaagagagagggctgacatattgaaggttatcttgaagggtgagagggttgaagaaaacattgactttgaccatatagcttacttatgtgaaggttacactggttcggatctatntgacctctgcaagaaaagctgcctatttccaattagagaactgctggacgaagagaagaaagggag

SEQ ID NO: 212790 - DNA, 521 bp, Glycine max
aaaatatgatgcttcataacaaatgttgtagcattagtatacaagtgtataactatgagatcggtgcctttacaagacggactaagctagacgactgtaaaagaatggtctaaagaaactatgaaagatagcattttaaagatctttggcatctggctggcggttaatcatgtgagaaaccacaaacttgagttcatttattgcagcttgaacctgataatcatcttgttccccctgccctgaccatcttagagcatctgcactcaatccattgtattcaaatgcagcaacggtagtcttccgggaagtggcaaggaccttctccaagtctaactgggacaatggtctgggagcagaaaaacttctccctttcttctcttcgtccagcagttctctaattggaaaataggcagctttcttgcagaggtcaaatagatccgaaccagtgtaaccttcacataagtaagctatatggtcaaagtcaatgttttcttcaaccctctcacccttcaagataacct

SEQ ID NO: 212791 - DNA, 537 bp, Glycine max
ttcctctccttcttttctcttctttcttcttcttccatctctttttttctgcttaaggtctacaaaagttctcttcttcttctcctcctattgaactttggtcatcacacgagaaaacccacgtctggatcttctggtgtaaaggccattagaagccttttagaaattttcaaagtgaggttggtgaatactgttgaagggggtgaaattgggagcccagattgctacttcattagaaaggtcatagctcgaaccctctttttctggagatttacctgggaaaagatgatgatgtttgaagatatgggattctgtggcgatttggatatgatatgtgggtctcttggggatggcgatattgctgtgagacaaactgaaccggatcctgtagctgaggatgactacagtgatgaagaaattgatgtggatgaactcgagatgaggatgtagacggacaaaatgcgtgtcaagcgattgcaagaactaaccaagttcaaggaagggactgatgcagcatagcttaggcagtcccaagag

SEQ ID NO: 212792 - DNA, 508 bp, Glycine max
ttcctctccttcttttctcttctttcttcttcttccatctctttatttctgcttaaggtctacaaaagttctcttcttcttctcctcctattgaactttggtcatcacacgagaaaacccacgtctggatcttctggtgtaaaggccattagaagccttttagaaattttcaaattgaagttgtgtatagtgtcgaagggggtgaaatttggagcccagtttgttacttcatttgaaaggtcatagtttgaaccctctttttctggagatttacctgggaaaagatgatgatgtttgaagatatgggattctgtggcgatttggatatgttatgtggttctcttggggatggggatattgctgtgagacaaactgaaccggatcctgtagttgaggatgactacagtgatgaagaaattgatgtggatgaactcgagaagaggatgtggagggacaaaatgcgtctcaagcgattgaaagaacaaccaagttcaagggagggactgat

SEQ ID NO: 212793 - DNA, 501 bp, Glycine max
gaagagtgggtgttggtggttgtcctcctccctcctcatgggtatggcaaccctctcctcctctcttcctcttttccatcgctaccctaaccctaaccctaatccttcgctctttcgcccctccctttccctctccttctccttctctcgcactaaaccccgtcgtgccccctttctcgttctcgcttcctcttcccacgatttcacctccaactccaagaaatcagtgctcactgagttgatacaagagatagaacctctggatgttagccacatccagaaagatgttccgccaactacaacagatgccatgaaaaggactatatctggtatgctgggcttgcttccatctgatcagtttcacgttgtcattgaggccttgtgggaacccctttccaagttactaatttcttcaatgatgactgggtatacgctgcacaatgttgaatatagactttgtcttgagaaaaaccttgatatgtttgaaggagatatagagaa

SEQ ID NO: 212794 - DNA, 314 bp, Glycine max
gctctgaatgcggctcgagggaacagctagcagtagaaacaactttacaagtcaagttaattaagaagatcattaatggcttttcttgcaaccttagctgctgatcaaccagctgcgctcaatggccttgctggaactaccctacttggaactaacgctctctatcaagccctctggccacactgacaaatacaaaaactgtatgagtggtgcacgggtagcaaagaatgggacaagagtgtgacttgatttgaggatctgtgcaacactactgtgcagtgagacttgtattgatcaaatgcacctttacccta

SEQ ID NO: 212795 - DNA, 447 bp, Glycine max
attgggactgggactaataacaatagctctacaccatttggtggtggacagagactatgccctggctatagaactctcaaggctagagctctctattttccttcatcatcttgttacaacttacagatgggttgctgaggaggatgaaattatttactttccaacagtgaagatgaagaggaaactcccaattagtgtaacaaccattaattaacacctgattggattgaagaatcaacaaattcttgtacagtactagtagtatagatagatgtagatatttggttcactctacatgggaaaaaatttaaggggataagaggggtgtgtgtattctttcttttcggtagctataccgtcacatctattttcagaggagaaaggtgcctttgggccctactattatactgagaaattgactcgaatgcaattattgatgctaactct

SEQ ID NO: 212796 - DNA, 327 bp, Glycine max
tagcgaaaaatgacaatcaagaacacattcattccccttctatatcttacatcgatagtcggttcgccctgccgcatgcctttcacatttaagaaaagtctcgaatcttggttcatagatgggcggaacactaagcaatccgaaattctctcgactgatattaaagaaaagagtcttctaagaaaatgcatgcaatctgaagaactgatattcttagatgacacgttaaaggaatgtccggaaacacatctgcagaacctgcgtactggaatctataaaaacaccttccagttgatctatacgcacaactgctatcgcatgaacacg

SEQ ID NO: 212797 - DNA, 482 bp, Glycine max
tggcttctcctcttcttactccttacaagatgggcaaattcaatctgtcccatagagttgttttggcaccgctgaccagacagaggtcttacgacaacgtcccacaaccccatgccatcctctactactcccagagaacttccaacggaggccttctcattactgaagccactggcgtctctgacacggctcaaggctatccgcaaacccctggcatatggactaaagaccatgttcaagcttggaaacccattgtcgatgccgtccacgccaaaggcggtgttttcttctgtcagatttggcacgttggaagagtttcagattcagtttatcagccaaatggacaagcacccatatcttctacggacaagccactcacaccccaaattcgaagtaatggcattgatcaagtacaatttacccctccaaggagattaaggactgatgaaattccgcatattggaaatgacttcagacttgct

SEQ ID NO: 212798 - DNA, 562 bp, Glycine max
  unsure (1)..(562): unsure at all n locations
agcccaacacttattaggatccagtgatattaatacaacaataatagttctacatattacactcccttacaatttagaaaatgtgtaagggggatccaaaaccatagcaggagaagcatgtaaagaacacgcgaatgaaaatccgaccaaccaaattgcaaatatgaatttgcaggggaagataaggttattaaaaatggaggttctaccctaggatgctacggcattggattcttcatcatcaagaaaggggtagtcagtataaccaagaaccggatcagaagtgtagaatgtctcccggtgatacttgttgagaggggcattgagagcaaatctttttggcaaatctggattagccaagaaccaacggccataagcaacaagatcagccctgttttcagctacagcgttgatcccatcttggcggtcataacctcctgcggctataaaagtgccattgaaggcctttctcataggcaccaggctatgagggcattcagttttttctccaacagtcttcattcttgggtccaccatgtgacagntaagaataccatactta

SEQ ID NO: 212799 - DNA, 519 bp, Glycine max
  unsure (1)..(519): unsure at all n locations
gggaagtctttatgtgacctgggtggaatgattctgtgtctgcatgtgtgaattctggcaagggaactagggatctgaagataagatatgcaatctaaatctgaaactgcaaatcaactgaggtctgatccacattcctttacacctaacaatgcttattctgaaccctggtggcgaagtattcagtacaatcctgtcccccaagcaatgttaggagtgaatgcatctaattcatcttcacttgaacgccctaatggtgattcggaatccagtgaagaggatgatgatgccactaaagaatcacaacccactgctcctaatcaatcaggaaattatggacaggaccaccaagcgatgcaacattcttcatcatctgcacctttgggatacactccttttataggaatgccccatgccagaatggctntgccccttgagatggctcaagagcctgtttatgtgaatgccaaacaataccaaggaattctgagacgaagacaggctcgtgctaaagcagag

SEQ ID NO: 212800 - DNA, 572 bp, Glycine max
agagcatcaatgttagtgggcacaagtatggtttggtctatgctggaatcggttgggttatctggagaagcaagcaggacttgcctgaggaactcatctttcacatcaactatcttggggctgatcaacccaccttcacccttaacttctccaaaggttctagccaagtcattgctcaatactaccaactgattcgccttggttttgagggatatagaaacgtgatggaaaactgcagggacaacatgctggtgctgaaagagggactcgagaaaacagggcgattttcaattgtgtccaaagacaatggtgtgcctttggtggctttcacactgaaagaccacacccactttgacgaattccaaatctcagactttttaaggcgctatgggtggatagtgccagcatacaccatgcccccagatgctcaacatgtcacagtgcttcgtgttgtcatcagggaagacttctcaaggaccctcgctgagcgtctcgtgtccgatgtggagaaggtgctgcatgagcttgattcacttccttgcagggtcatcagcagcaccactgtgacactc

SEQ ID NO: 212801 - DNA, 514 bp, Glycine max
gaacatatcataggggagataaatataattcatgattgagagaaaatagtcaaaatacagtgaatcatacttgtacaaacgaaaacacaatttaatatttgcctctcatcaataaacaactgaaacagataaatagcttgactcaatcaaaagtacttactgcccaaattatatatataataaagaagtacaataaggcagaggcataggcacaacacccccttgaagctaacactaacaaacaccattcatcttgtcattgttcttcttcctctccaacacaaacttcttccaaatggcagtgatttccctctgagtctccataggattcttcttagcaaccactaccttgccattttcttctgcactgagtgtcacagtggtgctgctgatgacccttgcaggaagtgaatcaagctcatgcagcaccttctccacatcggacacgagacgctccgcgagggtccttgagaagtcctccctgatgacaacacgaagcactgtgacatgttga

SEQ ID NO: 212802 - DNA, 439 bp, Glycine max
gaacacttcctcaagctccatttggtatgagttggcttacattgaagccaaagggaggatcaagaagggtaacaggatttggcaaattgcgtttggaagtggtttcaagtgtaacagtgcggtttggcaggctctgaggaatgtgaggccttctcctaatggaccatgggaagattgcattcataagtatcctgtggaaatagtcacatagtgatcatagttcagttcagttctcagtcacatactctggctgctacaacttaattcagggtacccttcattagtttccagatccattgtctctctctctgttgtagatttcattgcgtaattcactgcctcttttgtgtttgatgattgtggattttcattgggttaaattcatgtatctggagtaatatgatatggggaattcctgaattctttttcttcctagaag

SEQ ID NO: 212803 - DNA, 434 bp, Glycine max
aggaagaaaaaaaattcaggaattccccatatcatattactccagatacatgaatttaacccaatgaaaatccacaatcatcaaacacaaaagaggcagtgaattacacaatgaaatctacaacagagagagagacaatggatctggaaactaatgaagggtaccctgaattaagttgtagcagccagagtatgtgactgagaactgaactgaactatgatcactatgtgactatttccacaggatacttatgaatgcaatcttcccatggtccattaggagaaggcctcacattcctcagagcctgccaaaccgcactgttacacttgaaaccacttccaaacgcaatttgccaaatcctgttacccttcttgatcctccctttggcttcaatgtaagccaactcataccaaatggagcttgaggaagtgttc

SEQ ID NO: 212804 - DNA, 498 bp, Glycine max
ctttaatattagagttctttctctttcattcatccttggtaatggcttgtgcattgcaagcaaccttagcagccaacacctatgccttttcttccaggagattctccttgaagcaccaaaagaacagtaagagaaggttttctttgttcactgttagagctgattctgatgactctgactgcaatgaggaagagtgtgccccggataaggaagtagggaaggtcagtgtggaatggttagctggggagaagacaaaagtagtgggcacattcccacctcgtcgtaagccgggttggactggctatgttgagaaggacactgctgggcagacaaacatatattcagttgagccagcagtttatgtggcagaaagtgctataagttcaggaactgctggctcttcttctgatggagctgagaacacagcagcaattgttgcaggccttgctctgatatcgattgcagcagcatcgtcgatactgctacaagttggtaaga

SEQ ID NO: 212805 - DNA, 284 bp, Glycine max
gtctctcgtcgctctcatgctcgtggaagacgaccggttcaattacgacctctgggacctacccggtgcggctacctaccgacagaaagcgtggtccttgtttccaccacgggaccggccatacccgagcgggagcgggctgatcctgtcgaggggaaccgggatctgcaaggcaaccggggcggataatcccatcgatcaccccataccggatggtgataaaaaaggctcaggtgttgtacggcgggaaagctccgtaaggggacaagagacattcgatcatg

SEQ ID NO: 212806 - DNA, 586 bp, Glycine max
  unsure (1)..(586): unsure at all n locations
ctcgagccgctcgagccgaatcggctcgagcttttttttacttgaattttcttcatccttctctgttctcctagaacttgattacttgaacattccctatgacagatgaggtggttcttctggatttctggccaagtccatttgggatgagggtcaggattgcacttgctgaaaagggtaatcgaattttgagtacaaagaagaggacttgaggaacaagagtcctcttctcttacaaatgaacccggttcacaagaagattccggttctcatccacaatggcaaacccatttccgaatccctcattgctgttcagtacattgaggaggtttggaatgacagaaatcccttgttgccttcagacccttaccagagagctcaggctagattctgggctgattatttgacattaagatacatgatcttggaaagaagatttggacatcaaagggagaagaaaaagaagctgtcaagaaggagttcatagaggcccttaaattggtggaggaacagctgggagatangacttattntggaggagactatattggtttgttgatatagcacttgttccattctacacttg

SEQ ID NO: 212807 - DNA, 498 bp, Glycine max
aatacggaaaatactctattgcaaaaccaacaaacacatgaaagatacatcagaaaaattttaaaacctacacaatccaacagaaagcatgaagtttggcacatccaaatgcctttttattacacaaatattatttagttgaaaggtcaagaacgaccaatacttcactatggctattaagatccaacatgaaacctactcgatgactaacttctttcttatctccacaacgaactcatagaccttgtgctgatcaggaagagactttgcaacactctctttctgtaggcacctcttggcccaagcaacaaacctggggcactcattctcaatgttgaggctgccaaaagtctcatagactttgaaccaagtgtagaatggaacaagtgctatatccacaaaaccaatattgtctcctccaaaataagtcttatctcccagctgttcctccaacaatttaagggcctctatgaactccttcttggcagcttctttttc

SEQ ID NO: 212808 - DNA, 544 bp, Glycine max
  unsure (1)..(544): unsure at all n locations
gtaaggtttgtttcatcaaaaagatggtggcacccattgctgtttcttctccaaagtccacacttttgcagaaccccatctgttttggtgactcaagttcaagttttgttggggggtctttgaagggtctttgcttcaatctgaaacgaaggcaacaaagaagagaattgacccatttggttgttgctttatccacctcaagtgttacaaatagcaatgctagtggcaggttttacttcaacatcactggttttcctttcccacttggtccttttctcaacaggcgcactattaggactgaggctgtgaaggattgtatatggctattcgaacaagagcaggcattaggcttcagcagtgtttccacaaacattagaatgacagttatcaaactcaaatctgggggcttatggatccatgcacccattgctccaactgatgagtgtattcagcttattaaagaattgnggcttcagttgaatatattgttctccctacttttgcttatgagcacaaagtatttggttgtccattttctagaaaa

SEQ ID NO: 212809 - DNA, 537 bp, Glycine max
  unsure (1)..(537): unsure at all n locations
cttcgaatggaatccgcagctctgtcgcgcataggcctggcgggcctggccgtgatgggccaaaacctagccctgaacatcgcggaaaaggggtttcctatctccgtctacaaccgcacagcctcgaaagtggacgagaccgtagatcgggcccgcaacgagggctccctacctctcacgggccaatacacccctcgcgacttcgttctctccctccagcgccctagatccgtcatcatcctcgtcaaggccggcgcccccgtcgaccaaaccatcgccgccctctccgaccacctcgaccccggcgactgcatcatcgacggcggcaacgagtggtacgagaacaccgagcgccgcatgagcctcgtcgccgacaaaggcctcctctacctcggcatgggcgtctcctgcggcgaagacggcgcacgccacggcccctccctcatgcccggtgggtcccaccaggcctactccacgtccaggacatcctacacagaatcgccgnccaagtcgaggacagcccctgcgtcacttaca

SEQ ID NO: 212810 - DNA, 456 bp, Glycine max
ggaagccaaatgacacgcctttgttttattaagattaaaaacagttatagcaagaaaacaatagctgctctctgcctaccaaagatcctcaaaagaaacaaacaattacaactcaaatgctgcactgcacgacaatcaagcaaacaaccaaaacccatcatcaatcaattgagtgcaccaactccagtcccactcttgcgggcgagcttcgtccactcggtatgaaaagccccggggcgatcaaccctctcataagtatgcgccccaaacaagtccctctgagcctgaacaaggtttgccggcagccttgccctccgataggtatcaaagtaagcaagactggcacacattccgggagtactaatcccagctgaaaccgccaaccccacaaccctcctccacgcagcctgcctatgcaccatttccctggcgaactgcgggtccactatcaagcta

SEQ ID NO: 212811 - DNA, 496 bp, Glycine max
  unsure (1)..(496): unsure at all n locations
attgaatctcagaattctctaaaagagatctttttctgctctttgaagaaagaagggtctttgcttgattttggagatgtctctgctctcagatctcatcaaccttaacctctccgataccaccgagaaggtgatcgcagagtacatatggatcggtggatcaggaatggacctgacgagcanagcaaggactctcccaggaccagttagcgacccttcagagcttcccaagtggaactatgatggttccagcacaggtcaagctcctggtgaagacagtgaagtgattttatacccacaagccattttcagggatccattcagaaggggtaacaatatcttggttatctgtgatgcctacactcctgctggagaacctattcccactaacaagaggcacgctgctgccaaggttttcagccatcctgatgttgttgctgaagtgccatggtacggtattgaacaagaatacacctttgtgcagaaagatatccaa

SEQ ID NO: 212812 - DNA, 455 bp, Glycine max
gaacatgacaatttcatatattattattatacttcacaatcagcatttctttgttcaagactgataataaccattaaattattgtcattgtaacaatcggaaaacgagggaaaggaatagaagaaaacaatgaacaacccttgccagttagttgcaccaaccaacaaggcaccaaccatagtaccaatcaaaaggtaaaaagagagagagaccaaatcctactaagaaaagcataactgttcctttccatccaaagggagaaaacatgcaggttttgctcatggcttccacagaatggttgtgtctgcaatcatggaagtaaccacgtatgggtccatgttggaagctggccttctgtcctcaaaatatcccttccctgctttctctgtgtctctcccaaccctaacagaagctccacggtttgcaactccccataagaaggtgttgatgtcagc

SEQ ID NO: 212813 - DNA, 293 bp, Glycine max
gcctatcgccgttcccatcatcgccgaaatcgacctctacaaatacgacccctgggacctacccggattggcttcctacggagagaaagagtggtacttcttttcaccacgggaccggaaatacccgaacggatccaggccgaaccgggcggcgggaaccggttactggaaggcaaccggggcggataagcccattggccaccccacaccggttgggataaaaaaagctttggtgttatacgcagggaaagctccgaaaggtgacatgagcaattggatcatgcacgagtatc

SEQ ID NO: 212814 - DNA, 307 bp, Glycine max
ggtaatggggatagagcatgactctgggaaaccaccacgatcttttgcctggtctcgtacttatactcagactcgacacctcagtcatttcattctcgcatcatggaccatatgcatgggatggggaggccacatattaattcactactgaccaccctgtgcaaaactacaaaggttgatccaatgtcgaaaactacttacgcatcttggatacatccccaatgcaccacacttagacgacaacttagatgacaccctcgtaactgccatcgaagcctaccaagcgaattacaacatcgacgtctcc

SEQ ID NO: 212815 - DNA, 564 bp, Glycine max
  unsure (1)..(564): unsure at all n locations
ctcgagccgctcgagccgaatcggctcgagcttttttttacttgaattttcttcatccttctctgttctcctagaacttgattacttgaacattccctatgacagatgaggtggttcttctggatttctggccaagtccatttgggatgagggtcaggattgcacttgctgaaaagggtatcgaatatgagtacaaagaagaggacttgaggaacaagagtcctcttctcttacaaatgaacccggttcacaagaagattccggttctcatccacaatggcaaacccatttccgaatccctcattgctgttcagtacattgaggaggtttggaatgacagaaatcccttgttgccttcagacccttaccagagagctcaggctagattctgggctgattatttgacattaagatacatgatcttggaaagaagatttggacatcaaagggagaagaaaaagaagctgccaagaaggagttcatagaggcccttaaattgttggaggaacagctgggagaatagactctatttggaggagacaatattggtntgtggatatagca

SEQ ID NO: 212816 - DNA, 578 bp, Glycine max
aatacggaaaatactctattgcaaaaccaacaaacacatgaaagatacatcagaaaaattttaaaacctacacaatccaacagaaagcatgaagtttggcacatccaaatgcctttttattacacaaatattatttagttgaaaggtcaagaacgaccaatacttcactatggctattaagatccaacatgaaacctactcgatgactaacttctttcttatctccacaacgaactcatagaccttgtgctgatcaggaagagactttgcaacactctctttctgtaggcacctcttggcccaagcaacaaacctggggcactcattctcaatgttgaggctgccaaaagtctcatagactttgaaccaagtgtagaatggaacaagtgctatatccacaaaaccaatattgtctcctccaaaataagtcttatctcccagctgttcctccaacaatttaagggcctctatgaactccttcttggcagcttctttttcttctccctttgatgtccaaatcttctttccaagatcatgtatcttaatgtcaaataatcagcccagaatctagcctgagc

SEQ ID NO: 212817 - DNA, 546 bp, Glycine max
ctcgagccgctcgagccgaatcggctcgagcttttttttacttgaattttcttcatccttctctgttctcctagaacttgattacttgaacattccctatgacagatgaggtggttcttctggatttctggccaagtccatttgggatgagggtcaggattgcacttgctgaaaagggtattcgaatatgagtaccaagaagaggacttgaggaacaagagtcctcttctcttacaaatgaacccggttcacaagaagattccggttctcatccacaatggcaaacccatttccgaatccctcattgctgatcagtacattgaggaggtttggaatgacagaaatcccttgttgccttcagacccttaccagagagctcaggctagattctgggctgattatttgacattaagatacatgatcttggaaagaagatttggacatcaaagggagaagaaaaagaagctgccaagaaggagttcatagaggcccttaaattgttggaggaacagctgggagataagacttattttggaggagacaata

SEQ ID NO: 212818 - DNA, 562 bp, Glycine max
aatacggaaaatactctattgcaaaaccaacaaacacatgaaagatacatcagaaaaattttaaaacctacacaatccaacagaaagcatgaagtttggcacatccaaatgcctttttattacacaaatattatttagttgaaaggtcaagaacgaccaatacttcactatggctattaagatccaacatgaaacctactcgatgactaacttctttcttatctccacaacgaactcatagaccttgtgctgatcaggaagagactttgcaacactctctttctgtaggcacctcttggcccaagcaacaaacctggggcactcattctcaatgttgaggctgccaaaagtctcatagactttgaaccaagtgtagaatggaacaagtgctatatccacaaaaccaatattgtctcctccaaaataagtcttatctcccagctgttcctccaacaatttaagggcctctatgaactccttcttggcagcttctttttcttctccctttgatgtccaaatcttctttccaagatcatgtatcttaatgtcaaataatcaggcc

SEQ ID NO: 212819 - DNA, 544 bp, Glycine max
  unsure (1)..(544): unsure at all n locations
cttcgaatggaatccgcagctctgtcgcgcataggcctggcgggcctggccgtgatgggccaaaacctagccctgaacatcgcggaaaaggggtttcctatctccgtctacaaccgcacagcctcgaaagtggacgagaccgtagatcgggcccgcaacgagggctcccttccttttaccgggccaatacacccctcgcgacttcgttctctccctccagcgccctagatccgtcatcatcctcgtcaaggccggcgcccccgtcgaccaaaccatcgccgccctctccgaccacctcgaccccggcgactgcatcatcgacggcggcaacgagtggtacgagaacaccgagcgccgcatgagcctcgtcgccgacaaaggcctactctacctcggcatgggcgtctccggcggcgaagacggcgcacgccacggccccttcctcatgcccggtgggtcccaccaggcctactccaacgtccaggacatcctncacanaatcgccgnccaggtcgaggacggcccctgcgtcacttacatcggc

SEQ ID NO: 212820 - DNA, 465 bp, Glycine max
  unsure (1)..(465): unsure at all n locations
ggaagccaaatgacacgcctttgttttattaagattaaaaacagttatagcaagaaaacaatagctgctctctgcctaccaaagatcctcaaaagaaacaaacaattacaactcaaatgctgcactgcacgacaatcaagcaaacaaccaaaacccatcatcaatcaattgagtgcaccaactccagtcccactcttgcgggcgagcttcgtccactcggtatgaaaagccccggggcgatcaaccctctcataagtatgcgccccaaacaagtccctctgagcctgaacaaggtttgccggcagccttgccctccgataggtatcaaagtaagcaagactggcacacattccgggagtactaatcccagctgaaaccgtcaaccccacaacccttctncacgcagcctgcctctgcaccatttccctggcgaactccgggtccactatcaagctagccaaatta

SEQ ID NO: 212821 - DNA, 505 bp, Glycine max
  unsure (1)..(505): unsure at all n locations
gaggtcctggggtgctcgggatgcctgctggtccttacttatacgcggatgatctgattgaagtcttgaagaaaaagcatgcttctggaacatataaaaacctagtattttatctggaggcatgtgaatctgggagtatctttgaaggtcttcttcctgaagatatcaatatttatgcaaccactgcttccaatgcagaagaaagtagttggggaacatattgccccggggagtatcctagtcctcccccagaatatacaacctgtttgggtgacttgtacagtgttgcttggatggaagacagtgacagacacaatttgcgaacagaaactctgcaccaacaatataaattggttaaagagaggactatatctggagattcatactatggctctcacgtgatgcagtatggtgatgtagggcttagcagagatgttctcttccattanttgggtacagatcctgctaatgataatttcactttggtggatgaaaacttcttatg

SEQ ID NO: 212822 - DNA, 517 bp, Glycine max
acaaaaataaatacaagttgtcattaatattaaacaataattttggcatcataaattcttccggaataattatacaaaagtgaccagggaaaacccgatctgccagttgcccactgaataaaaacacacatcatattactatgtgttgtcatacatgcattgtaatgagtggatattccaaagcaattggtccctttatccctccttaatccttatgccgtaaatggcaccatcccttgtaaattgtaattgcttcttcagaaatagaattatacaaaggtagttgcaatatctatttgccaaactataaatgtaaagacccttcttcccaatcctagtagtgtcccaattgtatttacaaaggtgggacaagatatgtatatacaagtacaaccatgtaacataatgtaacaataatcatactttggtctttactagtgcacattacagggagttattatgcactgaaacccctttgcagagaactccagggattggaaggaatactgacacaagc

SEQ ID NO: 212823 - DNA, 511 bp, Glycine max
aaaaataatttacacataaatccaatttgcaaaggcaataataaggtgggcataataatatcacagaagggacaaatatacatttgagtaaatttaatttgaatacccaacaaaagatccatttttttttataaaatgaacaaaaacctttaaaactatatcgctaacaaacactgagaaatgacatcaagaacatacacgtcatcactgaacaagagaaaccgagtctcttaacggggcactctttttctacttagtatctcttgttcttttagtcgatgttggaatcttgcaaggcgtgcttggagactgacgagactagctgctttgcgagaaagcacgaaactcaactgggtcacgtagttgtcaataagacttcccggctggtccacttctgccagtagtttcatttcttcacgaacaatctccattgtgtcttcaatttccttcctatgagcagcaattagtgcttcttcctcctcaagtattgcgctgatattcacattagaag

SEQ ID NO: 212824 - DNA, 372 bp, Glycine max
ctctgcagtcgtgttgcggataattttagaactagtgcacgtgaaaaagggttccagattcgtgactttgaatacagtccagaaacacatgagaaccgaaagcaggagttagataaattggtacaagatcaggaaagattgagggcttctgtgttgcgatggtgctataccagctatggagaggttttcagatcctggatgcacttttgtgctgtgcgtttatttgctgagagcattctgagatatggtctgccaccatctttcttggcatgtgttttagctgcttctgtaaaatccgagaagaaagtacgttctatacttgaagggttgactgatagcacagacagtgcatactggaagaccgaggatgaa

SEQ ID NO: 212825 - DNA, 556 bp, Glycine max
tggctccaaaaagctggaaggaggatatttttgctgcaatcgatttagaaattcttttgcaggtgctgaaatcaggtaacctggacattgattaccttgcaaaaattctcgagttttcactcgtcagtttgcagaagctctcagctccagcgaatgaggagatgatgaaagccggtcacaagaaactatttcatgatttgagtgaaaattggcattcaagggatgagtcaaacaattcatgtgttgtagccttggtgaagggcttgcaatttgtcttcggacagattcagattcttaagaaagagataagcaaagcacgaataagattaatggagtctttggtgaaggggtctgctggtctggactaccttaggaatgcctttgctaacaaatatggatctccatctgatgccaatacctctctgccttcaacattgagatggatttcatctgtttggaattgcaaagatcaggaatgggaagaacatgtgagttcctcatcagcattggcttctaattcatcccaagaatggcttccttcaactactctcagaac

SEQ ID NO: 212826 - DNA, 389 bp, Glycine max
ctcctccctcactcactcatcaatggcatcaacaatatcagcaatggccatgatcaacgccaaatgcgtcaacccaaagttccccaaccccaccaagctcgtaccatcaaaaccttcccttcaggtcaaccttccaaagggcctaatagcctcacccgaaaacaccaaactttccactgcgacagcaatcgcaggagcaatattcacaaccctcggaacctgcgacgccgctttcgccgttcaacaaatagccgacatagcagaaggcgacaaccgcggtctggcactgatgctgcccataattcctgcaatagggtgggttctgttcaacattctgcagccggcgctgaaccaactgaaccgcatgcgcagcaccaaaggcgtgatca

SEQ ID NO: 212827 - DNA, 509 bp, Glycine max
aataaaagaaaagcggatatagcattagatacaagttgcaggaagcaagttacatgaaaactattagtatgatcatatgatgataattgatatcccacagcatttaattaagccccttccctatttaaatttcacaaacattaaatcactgggatctcatcctgttgagctggttaagagcaggctgcaagatgttgtaaagaacccaagcaatagccggcgtaaccacaaacagcagaagctgtcccctgttgtcgttcgaggcagcttcagccatcgccgccacttcagaagccgccgccgccgatgcatgcggcgcagccaccaagccagccaagccgccaagccccaacccaatgatcacgcctttggtgctgcgcatgcggttcagttggttcagcgccggctgcagaatgttgaacagaacccaccctattgcaggaattatgggcagcaacagtgccagaccgcggttgtcgccttctgctatgtcggctatttgttgaacg

SEQ ID NO: 212828 - DNA, 328 bp, Glycine max
aggacatcgacgaagtaattcgaaggtcaaacgcaacgcactatggtctagctgcaggagttttcactaagaatgtgcacacagccaacactttgatgccagcactgagggttggaacagtatggatcaattgctttgatgttgaagatgctgtaatgacctttggagggtacaaaatgagcggcattggcagggagaagggtatctacagtctcaacaattacctgcaagtgaaagctgtggtttcaccagtgaagaaacctgcatggctgagatctgtgaattgctcaaactgctatgacgcgaaatcctacgtggctatcatctg

SEQ ID NO: 212829 - DNA, 509 bp, Glycine max
agtgtgaatggtgcaaaatttatatcctacagcaacagtgtcattacagtatccaagtttgtgtttgagcaattaacaagtgaaaaatacataaattcaactggtataatgttcaggtacctaatcaggttttatcttagtaacatcacattatttattgcatgccattgcctcagcggaaaaagatgatagccacgtaggatttcggtcatagcagtttgagcaattcacaaatcacaaccatgcaggtttcttcactggtgaaaccacagctttcacttgcaggtaattgttgagactgtagatacccttctccctgccaatgccgctcattttgtaccctccaaagggaattgcagcatcaaaaacatcaaagcaattgatccatactgttccaaccctcagtgctcgcatcaaagtgttggctgtgtgcacattcttagtgaaaactcctgcagctagaccatagtgcgttgcgtttgaccttcgaattacttcgtcgatgtcct

SEQ ID NO: 212830 - DNA, 473 bp, Glycine max
aggacatcgacgaagtaattcgaaggtcaaacgcaacgcactatggtctagctgcaggagttttcactaagaatgtgcacacagccaacactttgatgcgagcactgagggttggaacagtatggatcaattgctttgatgtttttgatgctgcaattccctttggagggtacaaaatgagctgcattggcagggagaagggtatctacagtctcaacaattacctgcaagtgaaagctgtggtttcaccagtgaagaaacctgcatggttgtgatttgtgaattgctcaaactgctatgaccgaaatcctacgtggctatcatctttttccgctgaggcaatggcatgcaataaataatgtgatgttactaagataaaacctgattaggtacctgaacattataccagttgaatttatgtatttttcacttgttaattgctcaaacacaaacttggatactgtaatgacact

SEQ ID NO: 212831 - DNA, 477 bp, Glycine max
agtgtgaatggtgcaaaatttatatcctacagcaacagtgtcattacagtatccaagtttgtgtttgagcaattaacaagtgaaaaatacataaattcaactggtataatgttcaggtacctaatcaggttttatcttagtaacatcacattatttattgcatgccattgccttagcggaaaaagatgatagccacgtaggatttcggtcatagcagtttgagcaattcacaaatcacaaccatgcaggtttcttcactggtgaaaccacagctttcacttgcaggtaattgttgagactgtagatacccttctccctgccaatgccgctcattttgtaccctccaaagggaattgcagcatcaaaaacatcaaagcaattgatccatactgttccaaccctcagtgctcgcatcaaagtgttggctgtgtgcacattcttagtgaaaactcctgcagctagaccatagtgcgttgc

SEQ ID NO: 212832 - DNA, 439 bp, Glycine max
gagaaagtagagagagagacacacacaactcccataattgctttgcctaaccttaatttcaggacacttcgaagctaccaggaccaattgttgttgttcttccctttttgtgctttttgattcagagatttttggttttcgattttttttttcacatggagaaagttcggtgtctttaaaatggaattatctagttgggacatatttgaattggcgccttgtcttttggtgctggcctcatgggaaacagtgatgaagagaaatctgttaaaactggaagtccttcttcttcacctgcaacaactgagcagaccaaccaacctaatattcacgtctatcctgattgggctgccatgcaatattatgggccatgagtcaacattccaccatactttaactcagctgtggcttctggtcatgctccacacccatacatgtt

SEQ ID NO: 212833 - DNA, 546 bp, Glycine max
aacaaacacaacaacactctctcttctcgctcttggcttttcgctcttcactcactctcattcattcatttccaccgttcatggatccagtaagcgtgtggggtaacacgcccttggcgacggtggatcccgagatccatgacctcatcgagaaggagaagcgccgacaattgccggggaatcaagcttatcgcctccgagaacttcacctgcttcgccgtcatcgaggccctcggcagcgctctcacgaacaaatactccgagggcatgccgggcaaccgctactacggcggcaatgaatacatcgaccagatcgaaaacctctgccgctcacgcgcccttcaagccttccacctcgacgcccaatcctggggcgtcaacgtccagccctactccggctccccggccaacttcgccgactacacacgacgtcttaacccccacgaccgcatcatggggctagatcttccctccggtggacacctaaccacggctactacaccttctgcggaagaagatcttcgcaccttcatttacttcgagagt

SEQ ID NO: 212834 - DNA, 417 bp, Glycine max
tgcatatgttcaattcgtaatttgaatttatttcggcatggacgatgctactagtccgcggtcgccctttttttttttatactttaaattttctattgtaaaaccaacatactcatgaggagaggcatcatataagtattaatacactcgcaaaataacaaaaaatatgtaagattggcacatccaaatgcctttttattacacaaatattattaagttgattggtacttatcgaccgaaacttcactgtggcaatccctatccatcctgaaaactgatgaatgatctactccttttttatcttcacgaccaatgtgtagaacttgagctgcacaagatgagactatgcggcactgtataacctgatgcttctactgtatttagcatcccacctggggcaccatttctaaaagggga

SEQ ID NO: 212835 - DNA, 432 bp, Glycine max
  unsure (1)..(432): unsure at all n locations
ggggtgtattgtcccccnggcgatgtaaccgactatactggcgtacgcacgctacaaatctctaatctgctaggcgcattatctatgtcgtgctttgattggagaaaaatgatttctcattggctacttggcaccctgaaatcatagatgagtcattgacaaccttgtgacatgtttgaggaaacaggagagacagatgcactgaaaagaacaaattggcatatgctgactgaggatgcgttagagagcactttggtgtgaagaaggctttggtgttctacaaaggaagacccccaaagggtgtcaagaccaattgcatcatgcatgaatatcgctttgttgacaccaatagacccattttgatcaaagacacctacatgaggctggatgactggattctatgccggatatacaggaagaccaaacatgctg

SEQ ID NO: 212836 - DNA, 474 bp, Glycine max
ctcaggagctgaaatgctaatcttgcacttcttagctaagcgctagagtacgcccatgcattcgacttcggtggaggcaccaaccacattagcaacgatgagcacttctcatggcaacgctatctgctcttggcttgcactacgatgatagatttcttgagctacaacactacaccagttgcagatcggtagctgcccaacgtgttctccatcgcaaggtggaacacatcccacgcgccacctgatagcgcgcggaacgcgtatcgcaatttcactgggtgccgcccggggaaaacatataaccgtcttccgaatctgaacaactacttgcattgttttggcgacatctgcaacgagtactcgaagtcgtcgaattacagcgacgatgtcgatgatgacatggaggcagccgttagagcctaccagaagaacttcaaactgaacatgacaggggagctcgacgaccccacgatg

SEQ ID NO: 212837 - DNA, 513 bp, Glycine max
aaacactcataacacaaagcacaaagcaaagctcatccttgagttaaaaaatggcagcagcttctgccatggctctctcatccccatccttggctggcaaggccgagaagctgggcccatcagccccagaagtgggaagggtgagcatgaggaagaccgtcaccaagcaggtcttcctaagaagcccatggtacggtccagaccgagtcaagtacttgggcccattctctggcgagcccccgtcctacctaaccggtgagttcccaggcgactacggctgggacactgctgggctttctgcacacccagaaaccttcgccaagaaccgtgaactcgaagtgatccactccaggtgggccatgctcggagccttgggctgcgtcttcccggagttgctgtcccgcaacggggtgaagttcggagaagccgtgtggttcaaggccgggtcccagatcttcagcgagggtgggctcgactacttgggcaacccaagcctgaaccacgcccagagca

SEQ ID NO: 212838 - DNA, 455 bp, Glycine max
gtaaaaagcaagtaacattaagttggattcggatacacaagatgattcgcattatctgaagtacttcaccaaacacaaatctaaaaactctcaaaagtcattccgttctttgacgcttactttccggggacgaagttggtggcataggcccaggcgttgatgttgactgggtcagcatggtgatcggcgaggttctccaatggaccctttccggtgacaatggcctgaacaaagaagccatacatagagaacatggccaatcgtacgttcttgagtgccttcaccttaagctcagcaaaagcctctgggtcatcagcaaggcccaatgggtctaagctgccacctgagtagattgtgtcagtgacctgaccgacggggccaccagcaatacgggtaccttgaacggcacccattaggataacttgcgtggcccagatggccaggatgctctgggc

SEQ ID NO: 212839 - DNA, 539 bp, Glycine max
  unsure (1)..(539): unsure at all n locations
caatgaagctgaatgcaacaactgaaatgatgcctgtgacatggcccagctttagtgatattcacccttttgcaccagttgaccaggctcaaggttatcaggaaatgttcaacaatttgggtgaactgttgtgcaccatcactgggttcgactccttctctttgcaaccaaatgcctggtgctgctggagaatatgctggacttatggttattcgtgcatatcatttggcaaggggagaccaccaccgcaatgtttgcattatacctgtctcagcacacggaacaaatcctgctagtgcagctatgtgtggaatgaaaattgtctctgttggaactgatgccaagggaaacattaatatagaagagctgaagaaggctgctgaaacacacaaggataacttatctgcacttatggtaacatatccttcaacccacggtgtttatgaggaaggtattgacgaaatttgcaatattattcatgataatggaggccaagtatatatggatggtgccaacatgaatgctcangtgggactcac

SEQ ID NO: 212840 - DNA, 551 bp, Glycine max
acatgaatcaaatccattttttcacattactgtaacagataggcctaaaatacattcctaaaatccaatagcagcagcaattatacgaattactttttttttttttcctgtgattggatgaaacttaagagcagtggattatcatcattgtcacatatgatgaagcaatattcaacaagtgcaagaactgtatgaataggaataagagtttatgtacaacgggaaatgaaaatagttgtcatttgaacacattatgctgtggcagctgcttgttcttcaacagcctgtgatgctgggagaagggtgcaaatgaggttgcggtcaccgtacacattatcaacacgtcctgtggtaggccagaactttgcagtacggagccaaggagctgggaaggctgcatattccctggagtatggttttgtccatgcatcagccatgagcagtgatggtggatgaggggcgcccttaagtacattggtgttaatggcaacctttcctttgtcaatctcagcaatttcttggctaatgggatatagagcatcacagaacct

SEQ ID NO: 212841 - DNA, 563 bp, Glycine max
tgtgaagctttaatgctgcttcagaagaatggtttacgaaagaagaatccttcaatttctgttgttgctacactgtttggagatggggaagatgttgcatggcttgagaaaaatcatttggctgactgggcagaagaaaaattggatggaagattaggaaatgaaacctttgatgattctcaagtgagagcaattgcaatgggtttgaataaaaagaggcctgtattggttatccaaggccctcctggtacaggcaagactggtttgctcaagcaacttatagcatgtgctgttcagcaaggtgaaagggttcttgttacagcacctactaatgcagctgttgataacatggtagaaaagctttcaaatgttggattaaatatagtgcgggttggaaatccagctcgtatatcaaaaacagtgggatcaaagtctttggaagaaattgtaaatgctaagcttgcaagttttcgagaagagtatgagaggaagaagtcagatctaagaaatgatctaagacattgtttaagggatgattcactagcttcaggcatacgccaact

SEQ ID NO: 212842 - DNA, 165 bp, Glycine max
tcaagctcgtgccgtgccggatgacacgcgtggctgacaagatgcttgccagagagatcaatgagggcgactctgatatagtggatgttgattctgatggtcctgtgattgtgctcaatggtagcagccgagcccgagaatatttgtcagagacgctgcctgttt

SEQ ID NO: 212843 - DNA, 470 bp, Glycine max
aattccagcatcgtccatctccgtaggtcgcgcgtcgccctttttttttttttttatttctgaaagtatagtgtttgttcatcttcattggagggtaaaatagggcaatatatatcttactgaattatcgaccgagcagaaataaggaagttaagacaagaatgacttgtgactcaaatcctgtaagggatcataggaatagtgtccttgaagtatgcactggcagtagcaacttcacttccaagctttacaggatagcccacatctttcagtatcatcttcacaccagctagacatcccaacagttgcaactcattcaagttgccaggatgtccaattctgaaaaccttaccagcaactttgttcagtccatgacctaagctcagattgtatctcttccatgcccttctaactatttcagtactatcaatgtaagcaggaacaagaacagcagtcacagtgttactgta

SEQ ID NO: 212844 - DNA, 530 bp, Glycine max
agagaaactaagacagaaagagagagaaagagtggttgaaagcgtccattgaaggtatagagagagaggttttgtgaattggtgctgcttcgtgtctgtttatttcctcgcgaggtttgaattccggaacagttaagagaaacggaggttccgatcctgcgatgtgatatatgagagatctgtgaaggaaattgaactggaaaaaaaaaatggcgacgtcggaggtatccatcaagggaaattcggtgaacggaaaaggagataatagttctggtggctacaccaacgatgttaggaacggttctggtggaggcgaggctcggaattcttcttcttcgtcttcatccgcgagagacgcggaagctgcgctttacagggagctgtggcacgcgtgtgcaggtcctctggtgacggtgcccagagaaggagagcgcgtgttctactttcctcaaggacacatcgagcaggttgaagcgtccacatatcatgtagcggaacagcatatgccggtttacgatctaccacccaag

SEQ ID NO: 212845 - DNA, 449 bp, Glycine max
  unsure (1)..(449): unsure at all n locations
ctaggacgcagagaagctgatatcaagaacagattcacattgccgccatttttgacattgaagaactttgaaggattggaccttggaaagatggacaaagctgatgactctggacttgcttcatatgtttctggtcaaattgatcgtactttaagctggaaggatgtgaagtggcttcaaacaatcaccaaactgccaattctggtgaagggtgtgctgactgctgaggacacaaggatagctatacaaagtggtgcagctggaattatagtgtccaatcatggagctagacaacttgactatgttccagccaccatatcagccttagaagaggttgtcaaagctgctgaaagtcgccttcctgtatttctggatggtggtgttcgccgtggaactgatgtcttcaaggcattagcactaggtgcctatggcatnattattggacgccc

SEQ ID NO: 212846 - DNA, 455 bp, Glycine max
agagaaagttaataaatggctcaaaattaagaatatacaatgagtgaattaatgcagcagcagcagtagtcacacaagtatcatcatataatgcttaaaagaaattaagcatagagttttccaaatacaaccttaaatgagttctccaaaaaggaaaagaaaggaggttcatgaaacacatatagaactgtttcctccattggtctgcaccacattatacaaacttggctcaaatgaggagcaaatttttcataatcttggcaatgcgcggggaagaatgcgaggttggtcccaatcagtgacaatgtgatcacgagtgatatccttgagtgaggtgcaaccactcaaggccatggttagctcaaactcctcacgtagcatccgcagcacgtttcttacaccagcctctccttcagcagccaaggagaacaccacagggcgtccaataaatatgc

SEQ ID NO: 212847 - DNA, 548 bp, Glycine max
ttccattccaattatcgctacctcctccttcttcttcttcaaatattaaatttcacagaggatgggtggtgaggaattgagtttgatggagaacgaaaggaaagggaggaggctgtggaagaaggtgaagtaccagctggtggagtaccactccttgcccggttatttgagagacaacgagtacattctcgctcactatcgatccgaatggccaatcaagcaggttttgttgagcgctttcaccatccacaacgaaaccctcaacgtttggacgcatttgatcgggttcttcatatttctggcattgaccatatacactgccatgaaaattccgaaggttgtagatcttaattcgctacagcattttcctgacatgctcaagaaggccgacctgcacaaattacaatcagaaatcttgacgtgtctcccttccatgcctgatttgcacagactcagggatgaaatctcaagttggcatattaaagaatatctgtacaattgtttgccagtaagattttccagtagcaatcatactgatgcatgtgttc

SEQ ID NO: 212848 - DNA, 539 bp, Glycine max
  unsure (1)..(539): unsure at all n locations
agaccaaatgaaatttttattgctgactagtgatttgtgctaagggttctaagtgtgtacataatccctatggctgcagaaacatcccctgctggaatcacaaattcacaccagttagaggagtgtatactaacacatactagttacataacagcagagtattcaaccactgtttgctcatagatgcatattaaatcaacaaccttgaaggtcacgccacctgagataaactaaccctgcccgataatgagcgtatgcccccgccaccaccaatatatgaaacaattggtgactgtgtccggcaatgtcaaatttcccgggcatccatcgttctggaatcctagtggcataaaccaatgctccaattccatagagaacacccatcagaatctcgtaagcagttgtgtgaaacacttctggctggccccagaatagataaagcttgtgcagaataggtgctgcaccagacaaacccattccaaagaagagagatgctcngatggtgcggaattctggattttggaacactgngagaagag

SEQ ID NO: 212849 - DNA, 529 bp, Glycine max
ggtgagtaattataggtatattatatatacaagattttacctatgattctaaagcatttgtgtttgttttctctttatacaaactatgaaagagaagacagtatacaaagttgatttatatttgaagatgccatatgattcaccctgtcattgaggtttggctgccagaatattactgaacttggattgagatctgatgaaagatcttatcctgtcccaaagtgagaaattggaagcgaaatatctgaccatcactgacttttttgaaccttctctgggaaattctaattccctgtcaataatagagtgcttcatactgtctagatcttcaagcaatggtaatgacacagaaccctgagactctaggtttctgatccacccgcgaagtaagaaatttatgatctcaggaacttcatcatgagggcagtgaccagcagggctgatttgataatatggagcttcaggcacctgccttttaacctggagaccccaaattggccccacccagggatcttctcttccatacatg

SEQ ID NO: 212850 - DNA, 442 bp, Glycine max
ggaatccagttctgcttgatggtctgtggcgcctccggcacgggcaggaccacctttgtcaacactttgtgcggcaaacaggtcttgcagccaatggacgccgatgacccgaccaccgcacacattgaggagggtgtcaagatcaagcctgtcactgtggaactggagcttgacgaaggaagcactcgcgtgtcgctgacaattgtcgacacccctggctttggcgatagcatcgacaacgaagctgccttccacgagatagtagacttcttggagaggcagtacgatgacatcctggctgaggagagcagaatcaagcgtaacccaaggttccgcgacaatagaatccacgtgctgctctacttcatccagccaactggtcacggtctccgcgagctcgacatcgagcttatgcgccgcttgagtcttcgtgtcaacgtca

SEQ ID NO: 212851 - DNA, 430 bp, Glycine max
ttgaagttaaaagccttagccttccctacaactccaaacacaaagacatcatcatccatggctgcctccgtctccactgtcggagctgtcaacagagctcttttgaacctgaatggttctggagctggagcttcagctcccagttcagccttctttgggaccagcttgaaaaaggttattggcctcaagggtccccaacagcaaggtttccggtggaagcttcaagattgttgctgtagaagagaagaaagagagtgaagagacccagcagaccgacaaggacagatggaagggtcttgcctatgatatctcagacgaccaacaagacatcacacgaggatagggtttaggtgactcccttttccagctgcacaggatgctggaactcactatgcagtcatgagctcctacgagtacctcagcactggac

SEQ ID NO: 212852 - DNA, 449 bp, Glycine max
ggacaaaaggaaaaggccccaaattcaatttaaggggacactgtaactcaaaatttttgaggaagacggtccaatttgaaaaatatagtaagatcatctcaaacttagcattttctttttgcacctaagacattgagaatgctaaaaatgttacacgcaagttccattacaacttttagcacttggattagtacaacaacctttacgaacagaaatttttacttgccaagtttgctttgcctccaattcaagactggaaaaaagttcccctttgaatagcatcctcgttagcatttccaagagcagcctcgttcaagtacttgtcagccaattggactcttttgacattctcttggtcttggacaagcatgttaccatacagcaagagcttctccagagtcatcttgggctgctcaaaagttggaggtccatcttttgagttcacaagc

SEQ ID NO: 212853 - DNA, 588 bp, Glycine max
  unsure (1)..(588): unsure at all n locations
tgttttcctatatattcgatgacgtcgcatgcattcgatgcacgcgttcagtaatgctgtgaacttcggattgagggcggctcgtgagagactaagggcataaataaacccttagagaggaaacgtggaaaaactgagaaatgtattaggcttgaagacttgcaacggtattgtgctgggagtctaaaagatgctgcaaagagcctgggtgtttgccctaccacagtgaagcgcatctgcatgcagcatgggatatcccgttgccatctagagagatcaacagggttaaccgttccctgtctaagctcaagcgtgatattgaatctgtccaaggtgctgaaggagcatttggtttgaattctctgagcaaaagtccacttcccattgctgttggatcctttcctgagccttctactccaaacaagttcagcctgccagcctcattaagtattaatccatcagagcctcagatcagagagaatgaattgaatgcctncaaagcattagaaacaaacagtcgggctgtaatggaagatgatcgattgctaggaggcatgacaccacatcttgagaaagtattaacgataa

SEQ ID NO: 212854 - DNA, 409 bp, Glycine max
gaatgccaacacgattttatttcaaaagctgaccacgttatgtgtcaccaaagaatcctcgcttttcctcatgatgagtcaggaacttacttttgttgagtgataccaaagattcaaactccttttatctgatctaaacctctcaagtttcttacaatttgagcagatcaccaaacctattttccttccctattgtcctaaacaccacaagaacctatataattagagtagagactcaacctatatacagccagttctcactcccccgagctctcgcatgagcttccaagatttgaagttatgtcatgcaccaaaaccctgattattttgcttcctgatgatcttgaaacatccatgcactcctgtaggtctgcatcacaggctatcaaaacccattcgtgatcatcat

SEQ ID NO: 212855 - DNA, 539 bp, Glycine max
  unsure (1)..(539): unsure at all n locations
ttgttccttttggttgcagaaaggaacatggaagctgtgtgtgctttttctgttggcacacttcacatcccaacagcacatgaaacatcaaactcctttaggaaatccatattcttgagcaaccaagtggcttcaccagtttcattggtttttctcaggggcagttcaaaatccaagcttttaacctgcctttgccaccccctccattgacagaatccagtaaccaacctgaggctgagccagaatttgaaagtcatgcagagaaatttgactggtactctcagtggtaccctntgatgccaatttgtgaccttgacaagaggaagccacatgggaagagggtgttgggaattgatgtggttgtgtggtgggataggaataganggttgcttggcaggttcatgatgaagcttgtcctcatagattagcaccctggtctgatggaaggattgatcaatggggcatgtngcagtgtgtgtaccatggttggtgtctcatggcaaacgagaatgccagttaatcctcaggcactcctgatg

SEQ ID NO: 212856 - DNA, 520 bp, Glycine max
gttattttcagaatacagcaagaaggagcatcagattcaagcatttccttgcttcagaggtcaatttccgaaagaagtattgcccattatattcttcactatcaagggtcaagcaagtaagtaggagactactttgttcagttgccacagaggattcaccaaagcaagttgaagaatccaaaatggagacaccaagggaaatattcttaaaggattacaagatgcctgattactactttgacactgtagatctgaaatttaccttgggagaggagaagaccatagttagttctaaaattgctgtgtatcctcgcattgaaggttctactcccccactagttttagatggacaggacttatctttagtttcaattcacctgaatggcaaggctttgaaggaagaagattatcatttggatgcacgccatctcacaatccaatcacctcctagtggtaaatatgatcttgaaattgttacagatatttgtccacagaacaacacatcattagagggacttta

SEQ ID NO: 212857 - DNA, 508 bp, Glycine max
  unsure (1)..(508): unsure at all n locations
aacaaacgaatatccactgaatcacattttaaagttacgtagataaactagttcagcttttattgcataacgccctacacatccttgggaaaaagataaagaaatcaccccgagttaagacatggatgcaaaaagagagctacccattgtggcgccaaagctttgcaaaagatattgggatcgttgctgcaattgctttcgccactaacacatcatggcagtttttcatacgccattaacacttttaggcagctaagcttttcgaagctatctcaaacacattctccgatagtccattagtagacatgatcctctccaactgcgcctttgcaagcttttgtctgtcttcatcataacgcctgcatcttgagaaggctgacaccattctcgaggctacctgaggatttagcttgtcaagttgcagcacaatctctcccaaaacttgtagcctgacccatcctttgcatganagttcaccggagacccacagaaacctncaatgagagag

SEQ ID NO: 212858 - DNA, 494 bp, Glycine max
  unsure (1)..(494): unsure at all n locations
gcgttgccattctcatcctcctctgtctctctctctccaccattgccatggatccttacaagctccggccatccagcgccttcaattctcccttctggactacaaattctggtgctcctgtttggaacaacaactcctctttaaccgttggagctagaggtccaattctgcttgaggattatcatcttgtggagaagcttgcaaactttgacagggaacgtatcccagaacgtgttgtccatgccaggggagctagtgcaaagggtttctttgaggtcacacatgacatttctcacctgacatgtgcagatttccttcgagcccctggagttcagacgcctgtaattgttcgtttctcaactgtcattcatgagcgtggtagccctgaaaccttgatggaccctcgaggttttgccgtgaagttntacaccagagagggtaactttgaccttgttggaaacaacctttccgtcttctttgtacgtgacggcatg

SEQ ID NO: 212859 - DNA, 567 bp, Glycine max
  unsure (1)..(567): unsure at all n locations
cttaattaattggattacaaggaacacatagtccacaacaatagcagcgaaacatgccgaaaaggtatataaatataaatactaacacatacaaacggcatttattgagatagctcaacgagttgcatgcatggagttatgggtacacaactaaaattgcaagaaatggataagttctttcaaattgatcgaaaatcacatccttatcgtactctttgcacgtctgcaactctaacaatcattctggggttggcaacaacattaaatatttggcctcatgctcagacgagatgctatcttttggcctagagaacggtcagcctgagaccagtaagatatccagacactgcggatttcatgggtgacccgtgggtcagataaagcatcaggtgcccaagatcggtatctctctccgggctgcttaaagttgttctccttctcaattccacacttttcacgccttccactgcagatagcaggaggtatggngaacgtttctgcatgacgaacaggatcatacctttgaaggaagtaatttaacctctcatccctgtgaatgaaattcat

SEQ ID NO: 212860 - DNA, 468 bp, Glycine max
acttgctccctcagaagcgaataagaagccacagagaactagtctcctactctgacccgcaagaaaaaaatggcatctcacatcgacggatacccccgtatgggtcccaagagagagctcaagttcgctctagagtctttctgggatggcaagagcaccgccgctgatttgcagacggtgtcttctgatctcacggcatccatctggaagcagatggctgatgctgggatcaagttcatccccagcaacactttctgtcactatgaccaggttctcgacgccaccgacaccctcggtggcgttccaccaaggtacggctggaccggcggcgagattgggttcgatacctacttctgcatggccagaggtaatgctaccgtgccagctatggagatgaccaagctggttcgacaccaactaccactttattgtccctgaattgggccctgatgtgaacttcacctatgc

SEQ ID NO: 212861 - DNA, 601 bp, Glycine max
gcacaaaactggtaaaattccagatcaataaggattgcggcgaagccgcaaagatacaacattcattagggaaaacaggagtggggaaaaataaggggggaggggttgaggaagaatcaattgctcacagagcatgctaagacacctaaatattccacacacagttattgaaacaacccaatatagagaaaatttttctttggtgtattataatataaagcagaaccaaatgacttggaagattctactttcttataccattcacttggcaagttcgttgcggatgagttttgctgcggcaaccatgtttgtgagggctggcttcacctcagtgtacttacgggtcttgagcccacagtcagggttcacccacaagatgttcttctcgagcactgccagcatcttgttgattctgtcagcaatttcttcagttggtggtattcttggggagtggatgtcatagacaccagggccaattccagcaccatacttcacaccttcgcggaagactgacagaagcttctcgtcggagcgagagttctcaatggtgataacatcggcgtccatgtcgatgatggagggatgatgtcgtgaagtcgag

SEQ ID NO: 212862 - DNA, 491 bp, Glycine max
cttcaaagggaatcactaagactaaaagaagagaattgcaaactgagaactatgttggaccaaatcaccaaaaactacaaccagttacaattgttcattgctttgcagaagcagaagcagtggcagaagatggagacaaatttaaatgggatgatgtttggtcaacattgattggacccacgaggaccattcaccaaattagacgctcaaggtgcaccatttgcagatgataaatctggtcaacggggtcatcctgagactgatcctgtagaagatgttcttgaacaatcaacctcacagagttggggctcatacaagagtcccaagtttgaagagtccaactgtagtgagcttcctttaaaaaaaaccagggtttgcgtgcgtgcaagatcagaagctcctctgattagcgatggatgtcaatggaggaaatatggacaaaaaatagccaagggtaatcctggtccccgtgcctattatcgttgcactat

SEQ ID NO: 212863 - DNA, 390 bp, Glycine max
ggaagctctcacggtcaatccttgcacttcagatggcagtggaagccgaaaataaggattatcggctgggacacaacagcttgggtgcttgtgcaactatcaaccatcttcacttgcaggcttattatttggctctgcccttcccaattgagaaggcccccactaagagaattgcaagtgtaaatggtggggcgaacatatctgaactgttgaagtatccggttagaggctttagctttgagggcggcgaaatgctggaagaactatccaacgttgttttaaatgcctgtttatgtcttcagaacaacaacatacctttcaatgtccttatctctgactgtggaaagcaagtgtttctgttaccaccgtgttttgcagagaaaccagctc

SEQ ID NO: 212864 - DNA, 531 bp, Glycine max
aaaaaatctcaaaataaaacaaccaaaccacacacttcacaccctcttcaacatcctcagcaagtacaagaacaagaagaaacaatgtcttgctccaatctcacaatgttggtgtcctcaaaaccttccctttccgatccctccaatctctccttccgctctgtcctcaacccttttcagctcccttcacaaaacccaacttcatgcactccttcacgctcctcaaccacccaaattcagtgtggtctgagagaactcagaacccgcattgattccgtgaagaacactcagaaaatcaccgaggctatgaagcttgtggctgcagccaaagtgagaagagctcaagaagctgttgtcaacggaagacccttctcagagaccctcgttgaagtcctctacaacatcaacgagcagctcctaactgaggacgtagacatccctctcacaaaggttaggcctgtcaagaaagttgcacttgttgtggtcacccgcgaccgtggtctctgcggcgtttcaacaacgcaatcataa

SEQ ID NO: 212865 - DNA, 533 bp, Glycine max
cctattgcacaaagcctgcgcatttcattcaagtttcaacagaagcgtaaaaattgcacaagtgtcttagataaccacattagaaaatgaaaagggcaaccaccacccatcattataataagtaaacaatacctacaaattgcactattgcaaggcattggcaccagccacaatttccagaatttcaccagtgatcttagcctggcgctccctattgtacacaatggacaagttcttcttcaactcaatagcattatctgtggcattgctcatggcactcattctggcggcgagttcactcgccaaggactcctgcaatgccctcagaacctggctgttcaaatacagtggcagcagtgcatcaaggatctgaacggggtcttgttcaaactgcaaaattggcgaaaaatccgcggttttagtcctcacaacatctctctccacagtcaactttccttccttggtagtcaacctgaagaactcatcctcagcagcatcaacacacacaccattcacatcacaaatctctccct

SEQ ID NO: 212866 - DNA, 420 bp, Glycine max
gagaaatatgagaattccaagcaattgcgagttcacacgaatcacgccctctgctttcagctaccaccgtctcaaatcctacgtttccgactgcagagccgtgcttctcccctcattcggcggcccgcacgtgctccagcttcgctcgcacgtgccagtccctccgctcaagcctcacgatgtcctcgttcgtgcgcgcgccgtctccgtcaaccccttggacacccgaatgcgtgctggctacgggcgttccatcttcgagccgctgttgcctctcattttggggcgcgacgtcagcggcgaggtttcggcggtcggagataaggtgaggtcggtgagtgtgggagaacaggttttcggggcactgcatcccactgccgtgagaggcacttactcggattacgcgattctctccgaaga

SEQ ID NO: 212867 - DNA, 548 bp, Glycine max
cagagagagagagagagagagagccaccctttcttacaacaaacaacaactcattcttcaaggcttcaacaacagaacctttcatagtttttcactccttctccctgtgtcggtgtactcttcttctgggggcattcgttttttgcttcttcagctccaacttcaaacgcgcttttggtagaagaagcttcaccgggatcactggggtgtgtgtgagagagagggattacggattagtgagttttttgtcactaagttagagctacgtcgtttcatgattgtgggctggtagcagtttggtattgagattgaaagtggtggggctttatttggattctgtgcttgttgaaggagctgggaattgtagtagctgttgcctcagaatgcagcaagatcaaagaaaaaagggttcaatggagatggaatttttctccgattatggtgatgtcagcaggtacaaaattcaagaggtcattggaaaaggaagctatggtgttgtttgttcagctattgacagtcatactggcgaaaaagtgcaattaaaaaga

SEQ ID NO: 212868 - DNA, 463 bp, Glycine max
ggaaagtggaggtgcaggagagctagccaatctgatcaggcagagataccgggaagctgcagacatgatcaatatgggaaagatgtgcgctctcttcatcaccgatcttgatgcaagagctggtcgtctaggtggaaccacacagtacactgagaacaaccagacggagaatgtcactctcatgaacattgctgataaccccaccaatgtgcagcttacaggtatgtacaacaaggaagagaacccacacgttcccatcattgtcaccggttacgagttctcaacactctatgcacctctcatccgcgatgggcgtatggagaagttctactgggcaccaacaagggaagatccgattggcgtttgcaccggaatgttccgcactgatggtatgcctgaacaggacattgaccagcttgttgacacctttcctggcaatgcatcgattactgtggtgcactga

SEQ ID NO: 212869 - DNA, 641 bp, Glycine max
ggaaagtggaaatgcaggagagctagcaaaactgatcaggcagagataccgtgaagctgcagacatgatcaagaagggaaagatgtgcgctctcttcatcaacgatcttgatgcaggagctggtcgtcttggtggaaccacacaatacactgtgaacaaccagatggtgaatgtcactctcatgaacattgctgataaccccaccaatgtgcagcttccaggtatgtacaacaaggaagagaacccccgtgttcccatcattgtcaccggtaacgatttctcaacactctatgcacctctcatccgtgatgggcgtatggagaagttctactgggcaccaacaagggaagaccgcattggtgtttgcaccggaattttccgcactgatggtattcctgaacaggacattgtcaagcttgttgacaccttccctggccaatccattgatttctttggtgcactgagggccagagtatatgatgatgaagtgaggaagtggatttctggtgttggtgttgacagtgttgggaagaagctttgtgactcaaagatggaccttcacctttgagcagccaagatgactctggagaagctcttgctgatggtaacatgcttgccaagaacagagattgtcagagagt

SEQ ID NO: 212870 - DNA, 317 bp, Glycine max
aaggggaccctggaactcaaaattatagaggaagacggtccaatatgaaaaatattgtaagatcattttaaacttagcattttttttttgcacctaaaacattgagaatgctaagaatgttacacccaagttccatcacaacttttagcacttgggttagtacaacaaccttcacgaacagaaatatttacttgcccagtttggtttgcctccaattcaagactggaagaaaggtcccctctgaatagcatcctcgttagcatttccaaaagcagcctcgttcaagtacttgtcagccaattggactctcttgacat

SEQ ID NO: 212871 - DNA, 506 bp, Glycine max
tctctctcccttagtcaaagggattatcgtcttcttccaggtattaaaagcaaatggtgaagattgtgatgtctggattggggggtcctactatggagcattgcactaagtgcccatccttgaagcgctgtgtgaatctctaaatccgattgcacctgtgacagcgaccagcttcctatctatgaacctggccttgatggtgttgtgaagcaatgccgtggcaagaacctcttcttcagcactgatgttgaaaagcatgtctttgaggctgacatagtgtttgtctctgtcaacaccccaaccaaaactcagggtcttggagctggcaaagcagcagatttgacatattgggagagtgcagctcgcatgattgctgatgtctcgaagtctgacaagatcgtggtggagaaatccacagtccctgtcaaaactgctgaagccatagagaagattctgacccactatagccagggaatcaaattccagattctatcaaacccttgatt

SEQ ID NO: 212872 - DNA, 482 bp, Glycine max
aaacaaaacaagtttccccagtacatgcataaaagattggagtacaaaacaacatagaacataaaccctccccagttcccacaatttataccccaattatgtcaactattatgagaacgttaaagaggaaaagaaaaactcttacaaaaaataataaagaatcaaactgactgcctcaacacttgactgatattgcattgtacttgatcaatgatctattttatgccacagcaggcatgtctttgagccatgggtccagtggcttaccaattgagtaaactatgaagccaatctcacgcaacttatcagcatccacaatgtttctgccatcaaaaacaaatgctggtttttgcatgttgtcaaatatcttctggtaatcaagagtcttgaactcatcccactcggttagaatgcaaaggccatgtgcatcctttgttggcttataggcatcccaaacaacactgaccttcttcacagtagta

SEQ ID NO: 212873 - DNA, 445 bp, Glycine max
tgccacattacacaagaactctccaaggatcctccttcccacgaaattcatttggtgggaaaatccaagaagagggtggaatttcaagccagggaagatggattatttcaatgcaccaggaagaaaccatctctttgttccggggccggttaacatcccggaccagatcattcgggccatgaacagaaacaatgaggactaccgttctccagcaattccagctatgaccaaaacactgcttgaggatgtcaagaagattttcaagaccataactggaatcccatttctcatccctacaactggtactggtgcttgggagagtgctctcacaaacacactgtctcctggggatcgaattggatctttcctgattggccaattcagcttgctttggattgatcagcagcaacgcctggaatcaatgttgatgttgtagagagtgaat

SEQ ID NO: 212874 - DNA, 333 bp, Glycine max
aaagctgaaagtagagtgtatgttcatcttcaaaggagggcactagagggcaatatctattttacagactttccgaacgagcagaactatggacgtagagacaagaatgacttgtgactcagatgctgcaagggatcataggaatagtgtgctgcaagtatgcactggctgcagcaactccacttccaagctttacaggatagcccacatctttcagtatcatcttcacaccagctagacatcccaacagttgcaactcattcatgccgtccatatgtccatttctgacaaccttacgagctactttgatcagtccaagacctaagctcaaat

SEQ ID NO: 212875 - DNA, 446 bp, Glycine max
taagtgagatacacagtagttaggtagcaagcataagtgtctaaccttagaaacatatctgctacatatcgtgtgcattttggaattgtgccactaaaattctattcatctatggctgcctcatcttatgctatgcaatcaatccttgcaaaccctatgatccgcatttccagcgggtctagggagaaccattttggtgttcctgcttatcacatgagaaggaatgttggcctgagagttaggtccatggctgaggaagagcaaccaagtcagcctgcgaccccagttacaccaccaccagcagaacccaaaccacagcctgtctctactccttcaccaaaggtgagcaccaagttttctgatgtgttggcgttcagtgggccagcacctgagaggatcaatggaaggttggccatgattgggtttgtgggtgcaatggcagtgga

SEQ ID NO: 212876 - DNA, 522 bp, Glycine max
gataaaaaaaaatgataattttatatgctgattaaataaaggcaccaagtacaaaaagagattggtctttctaaccacgaatgacttaagaccattttggtgtgcattcatgactgaattacaccaaggtaccacccttaacatactcagtaaaagccagagcaaccaaacccaacatagcaaatctcccattccacagttctgcatctgaggacatgaaccctttggacttagactccacgctgatcccttggaagagtggaatcaaggaagcaagggtaaggaccacacttgttcccaagaaccatgggataccaccattggatatttgttcaaacacaccttgccctttggctacttccactgccattgcacccacaaacccaatcatggccaaccttccattgatcctctcaggtgctggcccactgaacgccaacacatcagaaaacttggtgctcacctttggtgaaggagtagagactggctgtggtttgggttctgctggtggtggtgtaactg

SEQ ID NO: 212877 - DNA, 485 bp, Glycine max
caggcttaaagaagatgcactggatggcagcctatcttttccgtaccatacagaagttccaagaatcttactgtttggattcctcgggttcacttgtgctattctggcacccctaatgttgcccttcttgttggtctactttttcattgcttaccttgtttatcgaaaccagattatcaacgtatacattacaaaatacgatagtgggggacagttctggcccattgttcacaacacaacggttttttcgttgctattttctcaacttatcgcactaggggtgtttggactcaaacgctcatcagttgcatctggattcaccattcctctgctgattggtacgcttctatttcaccagtattgtaggcaacggtttctcccagtatttaggagcaattcagcacagattcttattgacttggatcggagagatgggcacagtggaaggatggaagaaatttatgaacatttgcgttcagcctaca

SEQ ID NO: 212878 - DNA, 476 bp, Glycine max
ctcactcctcccaccaccccttccaccaccaccaccaccttagcctgcgactctaatgctcaatacatcggcaccgtcaccgccaccactccctccatcacgtgtccaccgcgttcccctcgacgaactccccttcaacacccccttgctcccccctcacctgctatccctcgaactcacccgccacagcacgcaaaacatcgccgatgcactccaaaccctcgccaaagcttcgaacctcaaagccatcgtcattgacttcatgaacttcaacgaccccaaagccgttactgaatatctcaacagcaacgtccccacttacttctactacacttctggcgcctccactctcgctttactactttactaccccaccattcacccaacccttatagaaaaaaaggatacagaccaacctttgcagatccaaatccctggattatccacacttacagccgatgattgtccaaacgaat

SEQ ID NO: 212879 - DNA, 538 bp, Glycine max
ggtacgacactcggcttaccgagaaattattactacgagcgatttggtacacttgccaaagagctaacaggcatcataaatttttagatgagcaaggatcactaatctgaaacaaattcaacttaaaaaattaagtctacaagtttaaagtttggaaaccaaatggtagaatttttagaggacaagtcaatgtcaaactgagaatcaactctgtttccacagcttagccaacttatccaacgaagcacgtgatgttccgccttcagccattgcttccgcagcactcattttcatcttgaaaatcctctgacgaatctctttccctttgtctgattccatgagttccctaactcggtcccccaactcagtcgaactcacgaacccatccttgttctcgttcaccgtcaaagccaccttcatttccttcaccataaccatcctgttcatcttctgctccgcgtagagaggccacgccaccatcggcaccccttcacacaccgcttccaacaccgagttccaaccgcagtgagtcacgaac

SEQ ID NO: 212880 - DNA, 497 bp, Glycine max
gtcaacttttccgattttttcctcacttgttgtgaataatctggcagaggcggcagcaaataagaatggcttcaaatcccaaacctttgacttttgaggaggtggctaatcacaacaacaaaaaggattgctggattattatcaatggaaaggtgtatgatatcacgccatttctggatgagcatcctggaggagatgaagttttggtaacgtcaacagggaaggatgccaccattgattttgaagatgtgggccacagtgattctgccatagaaatgatggaaaaatacttcgtcgggaaggttgacacttccactcttccagcgaaagttaaccatagtctgccacaacctacacaagcaggtggcgctggcaatcaatcttctggatttgttgtaaagatcttgcaattcctgttgccattcttgatattgggccttgcctttgccctgcagtactatggcaaaaagaagcatgctagcacctcatgaaatatg

SEQ ID NO: 212881 - DNA, 439 bp, Glycine max
  unsure (1)..(439): unsure at all n locations
aagctgaatgagagaattgctaaattgtctggtggtgtggctgtgatacaggttggcgcacaaactgagacagagctcaaggaaaagaaattgagagttgaagacgctcttaatgctacaaaggcagctgtagaggaaggtattgttgttggtggtggttgcactcttctgagacttgcatcaaaggtggatgcaatcaaggatagccttgataatgatgaagaaaaagttggagctgatattgtgaaaagagctcttagttaccctttgaaattaattgccaagaatgctggtgtcaatggtagtgttgtcagtgagaaggtattgtccagtgacaatccaagatatggatataatgctgccactggtaaatatgaagatttgatgtctgctgggatcattgatccaacaaaggtggtcagatgttgnctggagcatg

SEQ ID NO: 212882 - DNA, 518 bp, Glycine max
aagcaaaaaaaaattattattaacttgaaaaaaataagggaggaaagggtgcatcactatctagttcaccacactaacaatacatttggactcattgctaaatggccaccaaattttgcatttcatccgagggagaacaaaatactcttctcactgaagcagccgttgctcgttgctctagagtccatatcctgaattgtccatggggtttccagcaggtatggcctcaggttcctttatctcaacaaccacgcaatctgacattaagaaggttttggctacagaggctgcatgctccaggcaacatctgaccacctttgttggatcaatgatcccagcagacatcaaatcttcatatttaccagtggcagcattatatccatatcttggattgtcactggacaataccttctcactgacaacactaccattgacaccagcattcttggcaattaatttcaaagggtaactaagagctcttttcacaatatcagcttcaactttttcttcatcattat

SEQ ID NO: 212883 - DNA, 556 bp, Glycine max
  unsure (1)..(556): unsure at all n locations
gatcggaagatgcaataatatattcaagtaacaagaatacaatttggtttacatattttgcctaaaaataagtgcacgagatagatcaaacatatgcaactttacctcagcggagagaacatttctgcaattaaaatttcagcctaccatatcacaaggcaacatcgttgtgccaagacctctaatatgatgaagggccagtaatatgatgttgtacaacatttataacttagatgttccaaaaacggtttccgagctaatcaaaccgctcccattcttgagttacttttgtggaagacgggttatcggatggagcatccaagctttccattccagagtcaaaggtttcccattgggttgttactttgacagcattgctactgttgctaaaagggttggcgttccttgcctttagagaatctaatttatccacaaggttctgcacacgattcacctattcaatggtggaaaagcttgtgtcagtccgtcacagcaataatccatataattgcatttccacaagaaatgagcatttgnngtgtataatttaagagca

SEQ ID NO: 212884 - DNA, 598 bp, Glycine max
gatcggaagatgcaataatatattcaagtaacaagaatacaatttggtttacatattttgcctaaaaataagtgcacgagatagatcaaacatatgcaactttacctcagcggagagaacatttctgcaattaaaatttcagcctaccatatcacaaggcaacatcgttgtgccaagacctctaatatgatgaagggccagtaatatgatgttgtacaacatttataacttagatgttccaaaaacggtttccgagctaatcaaaccgctcccattcttgagttacttttgtggaagacgggttatcggatggagcatccaagctttccattccagagtcaaaggtttcccattgggttgttactttgacagcattgctactgttgctaaaagggttggcgttccttgcctttagagaatctaatttatccacaaggttctgcacacgattcacctattcaatggtggaaaagcttgtgtcagtccgtcacagcaataatccatataattgcatttccacaagaaatgagcatttgtgtgtataatttaaagagcagtttgtgacagatgtgcatttactaccatactaccaaatggg

SEQ ID NO: 212885 - DNA, 550 bp, Glycine max
  unsure (1)..(550): unsure at all n locations
ggaaagtggaaatgcaggagagccagcaaaactgatcaggcagagataccgtgaagctgcagacatgatcaagaagggaaagatgtgcgctctcttcatcaacgatcttgatgcaggagctggtcgtcttggtggaaccacacaatacactgtgaacaaccagatggtgaatgtcactctcatgaacattgctgataaccccaccaatgtgcagcttccaggtatgtacaacaaggaagagaacccccgtgttcccatcattgtcaccggtaacgatttctcaacactctatgcacctctcatccgtgatgggcgtatggagaagttctactgggcaccaacaagggaagaccgcattggtgtttgcaccggaattttccgcactgatggtattcctgaacaggacattgtcaagcttgttgacaccttccctggccaatccattgatttctttggtgcactgaaggccagagtatatgatgatgaagtgaggaagtggatttctgggtgtggtgtnacagtgttgggaagagcttgtgactcaaaagat

SEQ ID NO: 212886 - DNA, 331 bp, Glycine max
aaaggggaccctggaactcaaaattatagaggaagacggcccaatttgaaaaatattggaagatcatctcaaacttagcattttttttttgcacctaaaacattgggaatgctaaaaatgttacccccaagttccatcacaacttttagcacttggattagtacaacaaccttcacgaacagaaatatttacttgccaagtttgctttgcctccaattcaagactggaagaaaggtcccctctgaatagcatcctcgttagcatttccaagagcagccttgttcaagtacttgtcagccaattggactcttttggcattcttttgtttttg

SEQ ID NO: 212887 - DNA, 499 bp, Glycine max
tgtgtgtgtatggtgatgataacttaattagtgttcatgaatatgtcaagccttactttagtggttctaaattgaaaagctttctagctggtcataatatcaccattactgatggtattgacaaaactagtgcaactttgcaatttagaaagttagcagattgtgattttctcaagagaaactttaagcagatgtctaatgttttgtgggtggctcctgaggataaggcgagtttatggtcacaacttcattatgtttcgtgtaataatctggaaatgcaagaagcttatcttgtcaatctcgtaaatgtgttacgagaattgtatttgcacagtccagaggaagctcgccaattgagaaggaaagctctctctcgtattgaatggctgcaaaaagctgatgtgcctaccatagcacagattgaagagttccattcgatgcagaggatgatgaatgctcctgattcaaatgataatattgatctactgttgagcattga

SEQ ID NO: 212888 - DNA, 538 bp, Glycine max
  unsure (1)..(538): unsure at all n locations
ngattatgggtacgtccggaattaataataattcccgggtgcgacgatgctccgcggccgccctttttttttttttttatatttaaacacactcattgcacatagtaatgcgctttatttaagtgaataaaatattacatactagttcacaaatgcaaaaggacactcatcaaccagatatttgagactcttacagttctcaagaagtcgcgtcagcatagggttagtggcgttagaactcagaatttcattcttaacgccaaaaagaacagccagtaaagctactggaaaaggatcaactctagtaagaaaaacaattttcttacctctcccaagtgctgtgcgaatccttttgttgatatatgaggagcgattgttaactgcagaactaatccaagcagtggtgggtaaaccaccacgtccactaccacatgtaacatttacaacgacagctgttgaaggtaattgacttacaggataaagacaattcacaaaaattggtaaccaagaatccactggaaaatttccatcaaagaat

SEQ ID NO: 212889 - DNA, 518 bp, Glycine max
atacttaatcgatcatcacttcactttactaatacatcatggcagacgagacccagaacaagtatgagagctctgaggttgatgtccaggatcgtggtgtttttgactttctcggtaagaaaaaggatgaagaagacaagcctcatcctcaggaggaggtcatcggcactcgagtttcaaacagtcactgtctcagaccaaggagagaacaagcacagcctcttagaaaagcttcaccgatctgacagcagctctagctcttcaagtgaggaggaaggagaagatggagagaaaaggaagaagaagaagaatgaatagaaagggctgaaagagaagatcgaggagaaaatagagggtgatcatcatcatcacatggatgaggacacaagtgtcccttgtgagaaagttgaggttgttgaaacagcacatgctgaggaaaagaatgggttcctcgacaagattaaggagaagctaccaatgcacaagatgacagaggaggccacagctactactccttc

SEQ ID NO: 212890 - DNA, 546 bp, Glycine max
cagtacatatttaatttctttttacttcaaagaaggaaacctacacaaacttttttttttgtaaatggaagagataaatacacaataataaagtaaattaagtatgcatcaagaaacaccaaagaaacccacaaggctgtcatatgatgaaatgaaaacaaagcacaccacaatcatgcatctccaaccaacaaaaaagccttgtctcaatcttaaatatcaatgagcaccactctccttttccttttccttttcctcctctgtcttggagtgataaccaggaagcttctcttttatcttttctaatatacctttcttctccttggcctctccttcatgatgagcaccttcaccatgctccaatgatgcaacaggtggtggtggaggaggagtagtagctgtggcctgctctgtattcttgtgccctggtagcttctccttaatcttgtcgaggaaccccttcttttcctcagcatgtgctggttcaacaaccttaactttctcacagggacacttgagtcctgatccttgtgatgatgatgatca

SEQ ID NO: 212891 - DNA, 508 bp, Glycine max
gaacaagtagttgagaactaagaaggagaagcaaatggcttcctcaatgatctcttccccagctgttaccactgtcaaccgtgccggtgccggcatggttgctccattcactggcctcaagtccatggctggcttccccaccaggaagaccaacaatgacattacctccattgctagcaacggtggaagagtgcaatgcatgcaggtgtggccaccagttggcaagaagaagtttgagactctttcctacctgccagaccttgatgatgcacaattggcaaaggaagtagaataccttcttaggaagggatggattccttgcttggaattcgagttggagcacggtttcgtgtaccgtgagcacaacaggtcaccaggatactacgatggacgctactggaccatgtggaagctgcctatgtttggttgcactgatgcttctcaggtgttgaaggagcttcaagaggctaagactgcataccccaacggcttcatccgtatcatcgga

SEQ ID NO: 212892 - DNA, 393 bp, Glycine max
attcattagttctcatccattaatttccattgaagtccgaaaacagaaaccaaaaatacaggatgatgaaatctcaaaaagcaaaaacaaatgggaatgtagtttaagtacaaacaaacaaagtggggtggcggctacaaatgctttgcaaatttttcacacttaaaagcctgggggcttgtaggcgatgaagctgatgcactgcacttggcgaacgttgtcgaatccgatgatacggatgaagccgttggggtatgcagtcttagcctcttgaagctcctttaacacctgagaagcattagtgcaaccaaacataggcagcttccacatggtccagtagcgtccatcgtagtatcctggtgacctgttgtgctcacggtacacgaaaccgtg

SEQ ID NO: 212893 - DNA, 588 bp, Glycine max
  unsure (1)..(588): unsure at all n locations
ctctctctcaccaaagccttcctagaacgaaaaaaaaaagaagagcaattttccctcaccaaagaagaagaagcaaacaatggccgatcaacttaccgatgaacagatctccgagttcaaggaagccttcagcttgttcgacaaggacggcgatggtttgttctctctctctctctctcaagttttgtgtatttgatttgatttgatttatgcgtttgtggtttttgtagatcggtgttccttttcgtgataatggattaggaaaattagatgaattctgattctattttagaatcctttttttgttgttgttaatttggtagagttagatcttggataagctgaactttgtagaaagggtaagagataaagtgttaacgttagttttttttctggcgattattttcttgtctctgtttggnggacgaggagagagagaaggacgaattaaactgttgaagggaatttgtttgtttcattttttggttctttgcatatgtgaatggcatgtttggtttggtttatattttttaagggaaaaaaaggttatgtggagttctctggttttttttttaattaatatttctt

SEQ ID NO: 212894 - DNA, 569 bp, Glycine max
ggcagaaagtgaagagacattaacattacaaccctttttttggataaaattacaagacaaactaagaaggttcagttccactacagcctagtagcaggacttgccactaattgacattttaaggttggattcaaaaaccatcaaataaaaatgtaggaagaagaaaggtcaaggactactacatcactgttataccacccaaacccttggccttcctcctacccctttttttgtcgtttccttttaatcaacatttcttcatttaggtttttgtggccataatgtgatgatcacttggccatcatcaccttaacgaactcctcgtagtttatttggccatcgccatcaacatcggcctcgcgaatcatctcatcaacctcttcatcggtgagcttctccccgaggttggtcatcacatggcggagctcagcagcagagatgaacccattctggtccttgtcgaaaacccggaatgcctctttcagctcctcctcagaatcagtgtccttcatcttcctggccatgagatttaggaactcaggaagtcaatggtaccattcccatcagca

SEQ ID NO: 212895 - DNA, 587 bp, Glycine max
  unsure (1)..(587): unsure at all n locations
ctctctctcaccaaagccttcctagaacgaaaaaaaaaagaagagcaattttccctcaccaaagaagaagaagcaaacaatggccgatcaacttaccgatgaacagatctccgagttcaaggaagccttcagcttgttcgacaaggacggcgatggtttgttctctctctctctctctcaagttttgtgtatttgatttgatttgatttatgcgtttgtggtttttgtagatcggtgttccttttcgtgataatggattaggaaaattagatgaattctgattctattttagaatcctttttttgttgttgttaatttggtagagttagatcttggataagctgaactttgtagaaagggtaagagataaagtgttaacgttagttttttttctggcgattattttcttgtctctgtttggtggacgaggagagagagaaggacnaattaaactgttgaaggaattgtttggttccattttttgtttctttgcatatgtgaattgcatgtttgtttggtttatattttttaggaaacaaaggtatgttggagtttctgttttttttttaataaatattcttcctgaa

SEQ ID NO: 212896 - DNA, 570 bp, Glycine max
  unsure (1)..(570): unsure at all n locations
ggcagaaagtgaagagacattaacattacaaccctttttttggataaaattacaagacaaactaagaaggttcagttccactacagcctagtagcaggacttgccactaattgacattttaaggttggattcaaaaaccatcaaataaaaatgtaggaagaagaaaggtcaaggactactacatcactgttataccacccaaacccttggccttcctcctacccctttttttgtcgtttccttttaatcaacatttcttcatttaggtttttgtggccataatgtgatgatcacttggccatcatcaccttaacgaactcctcgtagtttatttggccatcgccatcaacatcggcctcgcgaatcatctcatcaacctcttcatcggtgagcttctccccgaggttggtcatcacatggcggagctcagcagcagagatgaacccattctggtccttgtcgaanacccggaatgcctctttcagctcctcctcagaatcagtgtccttcatcttcctggccatgagaattaggaactcacggaagtcaatggtaccattcccatcagca

SEQ ID NO: 212897 - DNA, 432 bp, Glycine max
tccacttcatgtgtcacatatgctaacagtgctagagaatcttccttttttgatcttgtagcttcccaactcactcccaagaccaatggatcaactcctgtgaggggagagacagtggccaagttgaaggtggcaatcaatggtttcggacgcattggtagaaacttccttcgctgctggcacggccgaaaagactcaccccttgaagtcgttgttgtcaacgacagtggtggtgtcaagaatgcttcgcacctgctgaaatatgattctatgctgggaacctttaaggcagatgtgaaaatactagacaatgaaaccatcactgttgatggtaagtccatcaaggttgtttcaagcagggaccctcttaagcttccatgggctgagcttggaattgacattgttattgagggaacgggagtgtttgtggat

SEQ ID NO: 212898 - DNA, 562 bp, Glycine max
gattaaaagattcgaagaattgcaaatcagttacaagaattcagaaattcaatatcaatcaatatatgggtgatattcattcagtcacgccaaaacttattattggctgcaaataaatataaactttgaaaatctctcctcagatagactgtctgaacaatttccttctttttcacatgatacgttagaaaaggagctctcctctattcataaactttgcattcctcatcagcagggtttgtctcgcagaaatcctccaatgggtctccactccccgctttaggtgcccctggccacttgcttgctactagatgtgccaaatcgaccactctttggctgtaaccccattcattgtcataccaagcaaccactttaaccatatcatctcccatgaccatagtcaaggaggagtcaatagtagaggaaacatcagagcagcggaagtcgatagacacaagtggaacatcacacacgtccaatacacctttgagcggccctcagctgcctttctgaatgctgcattcacatcttcagcagtaagacccttcttctaacattcaca

SEQ ID NO: 212899 - DNA, 526 bp, Glycine max
  unsure (1)..(526): unsure at all n locations
gagagtgagagagcacacttcaactattgagaaccgttgacctccatggctgtgacagtaggtggactcgcaagttctcaactttggtgtcacaatttgagaatcagacacagtgctcttacactgagttggggaaaaaaagcagctgacgagagcacagaaatgtggtggggacgagaatccatggaaggcagtgaagatagtgatgcgtgtggttgatcatcctcaaatggatgattatgtctcccgtggagtgcataaggattcggtctcccttccaaagccattatccatatctgatattgtggctgctttggatgatggtgctaaagtacagatatcatataaggggataccaggatcatacagcgaggatgctgcactcaaagcttaccctaattgtgaaacagtttcatgcaatgactttgaagaagcttttaaggcagttgagatatggtgggctgancaagttatccttccaatagaaaatacatctgggggaagcatttcacggactatgatttac

SEQ ID NO: 212900 - DNA, 475 bp, Glycine max
ttgcaattgaagttgaagtcttgcccttctctcttcaactccaaacacaagacatcatcatccatggctgcctccgtctccactgtcggagctgtcaacagagctcttttgaacctgaatgggtctggacctggggtttcagctcccagttcatccttctttgggagcagcttgaagaaggttattggctcaagggtccccaacacaaagatttcctctggaagcttcaagattgttgctgtagaagagaagaaagagattgaagagacccagcagaccgacaaggacagatggaagggtcttgcctatgatatctcagacgaccaacaggacatcacaagaggaaagggtttggttgactcccttttccaagctccacaggatgctggaactcactatgctgtcatgagctcctacgagtaccttagcactggacttcgccagtacttggacaacaacatggatggattttaca

SEQ ID NO: 212901 - DNA, 488 bp, Glycine max
cttagctttgattctctgttttctgttttgttctgtttcgcgtattgtcttcatacaggaacttgaacaatgaacaatgcaaagggcaagggagcagcaagggcctcaaaagaatcactgaagcccgttgatgaccgaaaggttggaaagcggaaggcttccggtaagcctgggagaagtagtgcaccaaagaaggagaagaaggccaagaaagaccccaacaagcctaaaagaccacccagtgctttctttgtgttccttgaggagttcaggaagacctttaaggctgagaatcctaatgtgaaggctgtatcagttgttgggaaagctggaggagagaaatggaaatccttgtccagtgctgagaaagctccatatgaagccaatgctgcgaaaaggaaagctgagtatgaaaacttatcaaagttatgataaaagcagcaagctcgcagatgatgaagatcaacaagtccaatctgagtgatgat

SEQ ID NO: 212902 - DNA, 524 bp, Glycine max
gatcagaaagaaattatattacttaaagcaacccatgtaaggctacaatgcacaaagagtgattcaggtacgatagctaagtgagggaagctcaagtagttggtagagtatatcatgccaacaaaagaagaaattcttttctaccagcacaaatataaaaaagtagcctagtatgcacaatcagaatatataatagcctccttcacaaacaaaacatcataaccaaggttttggacatcaatctcagtcatcatcttcatcgtcctcttcctcctcatcatcctcttcctcctcctctccactggcatcatcttcatcattcacttcagatttggacttgtctgattcttcatcatctgcggagcttgcctgctttttatcataagctttgataagtttttcatactcagctttccttttcgcagccttggcttcatatggagctttctcagcactggacaaggatttccatttctctcctacagctttcccaacaactgatacagccttcacattaggattct

SEQ ID NO: 212903 - DNA, 508 bp, Glycine max
gttggtggttccaaagtctcatctaaaattggagtgattgagtcacttttagaaaaagttgacatccttcttcttggtggaggaatgatcttcacattttacaaggcacaaggtctttcagtgggttcatcccttgtagaagaagataagttggatcttgctacatcactacttgcaaaagccaaggaaaagggggtgtctctcttgttaccaagtgatgtggtgattgcagacaaatttgctcctgatgctaatagcaaggtcgtgccagcatctgccatccctgatggctggatgggattggatattggtccagattctgttaaatcattcagtgaagcattggatactacccaaaccatcatatggaatggaccaatgggagtgtttgagtttgacaagtttgctgttggtacagaggctattgcaaagaagctggctgacctcagtggaaagggggtgaccacaattattggaggaggagaatctgttgcagctgtggagaaag

SEQ ID NO: 212904 - DNA, 395 bp, Glycine max
gcaaaaagcttctgccagcaactaaaagatttatttgaatttatggctctcagccagggtttacagttacacgcaatttatgtgtgaagccaataataactcaagcaagataaaatttacactaacagacttcgaagggtcctacaacatatgctcttttacaagattgacaacactgacacctgaggatgggaaaattttccaagatgaaaagtgtcttacacagcgactgggacggcttcatcaagagcaaggactcctggaagctctttgccttccaataactccaaactggcaccaccaccagtagatatgtggctcatgacactagcaactcctactttctccacagctgcaacagaatctcctcctccaataattgtggtcaccccctt

SEQ ID NO: 212905 - DNA, 622 bp, Glycine max
ataaaattgcatcattgagttcactgtcttgtacacttttgcttctgcatctacaattggcctgaaagccttctcacttactagtacatctataattgggccttcttttgctgacattttatccacattgtgtgcaggggacctgtgcaatatgcctttatacaatgaaaccagggcagggccatgccatttttactgcagaatgttctcactctttccatttccattgcatcacttctaatgtgaaacatgggaaccagatttgtcctgtctgcagagcaaaatggaaagaagttccttttcagaatcctgcttcaaatatgccccatgatcaactcaaccaagtttctcctcaaggtgatgctactcggcagatttcatcactttatcatgttaccgagccagctatttttgatgatgatgaagccctggatcaacaaacttcagttgcccatccaaaaaatgaggctgatcatgatgtaataaatactgtggagatcaaaacatatcccgaggtttcagctgttccaaaatctgcttctcatgatgcctttgcttgattaattcatctcaaaagctcacattcagggagaaaaacaaataatgatgcaacagtactgat

SEQ ID NO: 212906 - DNA, 444 bp, Glycine max
atttttgagtctgcttactgaaaatgggaacaccaaggatgacctcaagcttcccactgatgagagtctgctcactcagataaaggatggatttgctgagggcaaggatcttgttgtgtctgtcatgtctgctatgggtgaggaacagatttgcgccctgaaggatattgggccaaagaactagcttttggtgctggcagcctgttgtttctatttaagcaaagatccttttgtaagcctttatattggtttgttcaagacctggcttatggcttatagattctagtcagactagtcttaacaatggtgtttatggatgtggtcacagaaactatatcacattttttctggttttctatgctgtcctatgactttgttataaaggaggagtcaaatgtgggaaggtttttttttggtatgatatgatgagatcttcattgcctg

SEQ ID NO: 212907 - DNA, 444 bp, Glycine max
caggcaatgaaaatctcatcatatcataccaaaaaaaaaccttcccacatttgactcctcctttataacaaagtcataggacagcatagaaaaccagaaaaaatgtgatatagtttctgtgaccacatccataaacaccattgttaagactagtctgactagaatctataagccataagccaggtcttgaacaaaccaatataaaggcttacaaaaggatctttgcttaaatagaaacaacaggctgccagcaccaaaagctagttctttggcccaatatccttcagggcgcaaatctgttcctcacccatagcagacatgacagacacaacaagatccttgccctcagcaaatccatcctttatctgagtgagcagactctcatcagtgggaagcttgaggtcatccttggtgttcccattttcagtaagcagactcaaaaat

SEQ ID NO: 212908 - DNA, 475 bp, Glycine max
gaatctcagaattctctaaaagagatctttttctgctctttgaagaaagaagggtctttgcttgattttggagatgtctctgctctcagatctcatcaaccttaacctctccgataccaccgagaaggtgatcgcagagtacatatggatcggtggatcaggaatggacctgaggagcaaagcaaggactctcccaggaccagttagcgacccttcagagcttcccaagtggaactatgatggttccagcacaggtcaagctcctggtgaagacagtgaagtgattttatacccacaagccattttcagggatccattcagaaggggtaacaatatcttggttatctgtgatgcctacactcctgctggagaacctattcccactaacaagaggcacgctgctgccaaggttttcagccatcctgatgttgttgctgaagtgccatggtacggtattgaacaagaatacaccttg

SEQ ID NO: 212909 - DNA, 487 bp, Glycine max
ccaatgaacatgacaatttcatatattattattatacttcacaatcagcatttctttgttcaagactgataataaccattaaattattggcattgtaacaatcggaaaacgagggaaaggaatagaagaaaacaatgaacaacccttgccagttagttgcaccaaccaacagggcaccaaccatagtaccaatcaaaaggtaaaaagagagagagaccaaatcctactaagaaaagcataactgttcctttccatccaaagggagaaaacatgcaggttttgctcatggcttccacagaatggttgggtctgcaatcatggaagtaaccacgtatgggtccatgttggaagctggccttctgtcctcaaaatatcccttccctgctttctctgtgtctctcccaaccctaacagaagctccacggtttgcaactccccataagaaggtgttgatgtcagcggtttcgtggcgtcctgtcaaacgacg

SEQ ID NO: 212910 - DNA, 555 bp, Glycine max
aaaaaagaaatttctgaagtgaataaaaatggccgtatctaagaaaattccagatacatagtttgtcatcactctaaagcgtaaaaacagcctgtttccaaccaagttaccatgtctctaggtatgcaggcatagaactaacaatttctaagccaagtacaagggactgctctttccagcaatcattcaaaaagcaaatgaagcatataaagttagctacattcattgcccatgtcacttggaagtctcttcatcttttgtcgccttaggatgtattcccttcaacttaagaaattgttacaaagaacagaaaccaaattaaagaaaaatcacgatccaattagatcaggtgtttcagcctcaatggacagcaatgcagtgtgaacttttccagtccaactgtccagtcgatcccgtaaggatttgatctgttgaatacccagaactcttggctgcacccaggaaacatgcactgtgccctcaacttgatcaattataccctcaattagatgaacagataggcttttcataaggagatgctccacattctctata

SEQ ID NO: 212911 - DNA, 470 bp, Glycine max
caaaagggtggttgaagttgaagcagagataagtgtctcaacaagtgatatgcaaagcatgtctctctgtgcttcactctcctccacagcttcacacctcacttcccttgcctccgtctcttcttccacctctccactttcccgcaaattttctctcactttccgggaaaaaaacagaaccccaattgcaccacctcacaagctccccttcttctcagcaaggcctgcccccaccagagtagtgttggtgaagtctcaggccacagcacctgcttcttctgaggctgtgaaggtgacaccggtgccttctgagatgaaggcatgggtgtatggagaatatgggggtggggattgttctgaagctggactccaatgttgctgtgcctgatgtgaaggaagatcaggtgttaatcaaagttgttgctgctgctcttaacccctgtgatgccaagaggaggcatggaaaagtt

SEQ ID NO: 212912 - DNA, 548 bp, Glycine max
aaaaatgaagttctttatttttgttttttagctttaatctaaactctgatttacatagaatatgaagtttactagacagacacggcaaaattgcctatcccttttacttgattcaagggatgggatgtataacaacctttccagttgctcggtttgtttcaaggtaagagaaggcttcagcaagcttatcaaaggggaatggacctttggggtcaacaattggcttcaccttcccactttctaagtaagggtttagtttcctcagaacttctccattggaagtaactacaaatctgaagccaggtggtgtaacagcacctgtgagtgccaccacactgccatcttctttcacagccttcactgccctgtcacattgcccaatggcatcataaactacatcaaatttttcgggcaaatcttcaaagttctcttttgtgtagtcaatggccaaatcagctcccaagcttttcagtaggtccaaatttctagtgcttgaagtggcagcaactcttgaagctccataaacttgcttagctagctgaatcact

SEQ ID NO: 212913 - DNA, 433 bp, Glycine max
cctgagagttaggtccatggctgaggaagagcaaccaagtcagcctgcgaccccagttacaccaccaccagcagaacccaaaccacagccagtctctactccttcaccaaaggtgagcaccaagttttctgatgtgttggcgttcagtgggccagcacctgagaggatcaatggaaggttggccatgattgggtttgtgggtgcaatggcagtggaagtagccaaagggcaaggtgtgtttgaacaaatatccaatggtggtatcccatgggtcttgggaacaagtgtggtccttacccttgcttgcttgattccactcttacaagggatcagcgtggagtataagtccaaagggttcatgtccctaaatgcagaactgtggaatgggagatatgctatgttgggtttggttgctctggcttttactgagtat

SEQ ID NO: 212914 - DNA, 506 bp, Glycine max
gataaaaaaaaatgataattttatatgctgattaaataaaggcaccaagtacaaaaagagattggtctttctaaccacgaatgacttaagaccattttggtgtgcattcatgactgaattacaccaaggtaccacccttaacatactcagtaaaagccagagcaaccaaacccaacatagcaaatctcccattccacagttctgcatctgaggacatgaaccctttggacttagactccacgctgatcccttggaagagtggaatcaaggaagcaagggtaaggaccacacttgttcccaagaaccatgggataccaccattggatatttgttcaaacacaccttgccctttggctacttccactgccattgcacccacaaacccaatcatggccaaccttccattgatcctctcaggtgctggcccactgaacgccaacacatcagaaaacttggtgctcacctttggtgaaggagtagagactggcttgggtttgggttctgct

SEQ ID NO: 212915 - DNA, 369 bp, Glycine max
acacaacaacactctctcttctcgctcttggcttttcgctcttcactcactctcattcattcatttccaccgttcatggatccagtaagcgtgtggggtaacacgcccttggcgacggtggatcccgagatccatgacctgatcgagaaggagaagcgccgtcaatgccgcggaatcgagctcatcgcctccgagaacttgacctccttcggcgtcatcgaggccctcggcagcgctctcacgaacaaatactgcgagggcatgccaggcaaccgctactacagcggcaatgaatacatcgaccagatggaaaacctctgccgatcacgcgcactgcaagcctttcacctcgacgcccaatcctggggc

SEQ ID NO: 212916 - DNA, 554 bp, Glycine max
tcctttttttttttttataaataagaaataacatatgatatcaatcaggctaacaggattaaacatgaaatcaaagacagagaaacttcaaacttttgaattgaaacaccatggcgattaaccctatcactcccaagaaaggaagacacatatttcctttgtctgcatttctgcactttgtgtcaaacttgagtgacacaatttagtagaaagtggtatggttgaacctaatccttgtacttcatttcagataccaggaatccaggcatgtcaaacaaggcagagaacttctcaacattagctttgagatcttcaatagccttgtagtcgacgagaccctcgttgaaatccttgagaagtttgccatgctccttctggatcttcagtgtgagagtcacagcacggtgaaggaactcaccaatctgctgaaagtctttgtaaaccaacccctaaagtcatggcaggggcactcaatagcactccaccagtggccattgcactgctatcaccaaaacagcggtcttgttaactggaatgttaccgagatcacagag

SEQ ID NO: 212917 - DNA, 348 bp, Glycine max
cttagctttgattctctgttctctgttttgttctgtttcgcgtattgtcttcatacaggaacttgaacaatgaagaatgcaaagggcaagggagcagcaagggcctcaaaagaatcactgaagcccgttgatgaccgaaaggttggaaagcggaaggcttacggtaagcctgggagaagtagtgcaccaaagaaggagaagaaggccaagaaagaccccaacaagcctaaaagaccacccagtgctttctttgagttccttgaggagttcacgaagacctttaatgctgagaatcctaatgtgaaggctgtatcacatgttgggaaagctggacgagacaaatggaaa

SEQ ID NO: 212918 - DNA, 524 bp, Glycine max
tcctttttttttttttttctgatcagaaagaaattatattacttaaagattgccatgtaaggctacaatgcccaaatagtgtttgaagtacaatagctaagtgaggtaagctcaaatagttggtagagtatatcatgcgctccaaagaataaattcttttctaccagctcaaatctcaaaaagtagcctagtatgctcaatcagaatatataatagcctgcttcacaatctaaacatcataaccaaggttttggacatcaatctcagtcatcatattcattggcctcttcctcctcatcatactcttgctgctgctatccactggcatcatgttcatcattcacttcagatttggacttgtctgattcttcatgatctgcggagcttgcctgatttttatcataagctctgataagtttttgatactcaggtatccttttcgcagacttggctgtatatggagctttctcagcactggacaaggatttccatttctgtactacagctttcccaacaactgatac

SEQ ID NO: 212919 - DNA, 458 bp, Glycine max
ctgagatatccatcttatccagaaagcaatggaacatggaggtttcctggaattggagaatttcagtgctatgacaagtatatgagagcttccttggaagcatcaactgaggccattgggaagaaagagtggggaaaaaatggaccacatgactcatgccaatacaaccaatttcctgaggacactggttttttccagagggaaggaacatggaacacagaatatggacgattcttcctttgactggcactccaccaaacttattgaacacggcgagaagatccttgtatcagccaaaggcattttcaactcatgcggggtgaaactatctgccaaagtagctggtattcattggcactacaaggcaaggtcacacgcggatgaactaactgcaggctactacaacacgcggtttcgcgatggatacctaccaatagcgcaaatgctgtgcaaacatg

SEQ ID NO: 212920 - DNA, 518 bp, Glycine max
ataaaaactatgatgcttttaatttaactacacagtatacacaatgatccctccacatgatgctatatgtgttcacacaagagcaacctcttgagcttgttcttgctgcttctgaattcctgtgatgtgtccaacgtaaagatgagtcccacaagaatcagattctggaagcctttgtctttttccaccttcagacatgcttttcacaaactccacaaagagcctccaattgtctccctcaaacaacctcttattcattctcagataagtgaatgctgccaatccagaaccagagttacttgttgacaaaacttgagaaaaagcacctgcatcatatctctcaagtgcattctccccagcaagttctgcttctgctgttctggctgctatcttcacttgatgaaccaacccctcaggggaacaatgctcaggttgctctctgtccctcatttccatgcaggtgaaattgagcacaactccatgttttgccagcatttgtgctattgtaggtatccatc

SEQ ID NO: 212921 - DNA, 590 bp, Glycine max
  unsure (1)..(590): unsure at all n locations
caagccctcaagtttccaccacctcatgtcatcaaagttcgtgagtctgaatggatgactgatgaagaatttggaagagagatgcttgctggtgttaatcctggcatgattcaacgccttcaagagttccctccaaagagcaagctagatcccacagagtttggagatcaaactagtacaataaccaaagaacacttggagatcaaccttggtggactcaccgtagaacaggcactgaaaggtaacaaattgttcatattagatcaccatgatgcattcataccgtttatgaatttgatcaatggcctgcccactgcaaagtcttatgccacaaggaccatccttttcttgcaagacgatggcacattgaagccattagccattgagttaagtttgccacatcctaggggacatgagtttggagccgatagtagagtagtcttgcccncagccgcagtcaacagcgctgaaggcacaatttggttaatggccaaggcttatgttgctgtcaatgacactggctatcaccaactcantagccactggttaaatactcatgccacantngagccattgtcatagcaacaaac

SEQ ID NO: 212922 - DNA, 365 bp, Glycine max
ggaaaatcccaactggtgccatagagaaatttgatttcataatcatagtttgggatatcaatcttacatactacgggtgaacatgatagtaaaaacaaagtaatggtgataccattcttattaaatacgaaaactagataacgtccacatacaacacttaagaatgcataagacaattattatatgcatgcataagcttgcatatttactcgtcaacgagaaaggtaacgtaggtttggaaagagaaccacacataaacgcactctggccttagatagagatgctgttgggaattcctctgaaagtaaggccttcctcactggtaggaagaagcacagtataaggcatctgaaccggtccattac

SEQ ID NO: 212923 - DNA, 580 bp, Glycine max
  unsure (1)..(580): unsure at all n locations
gacgcactataagctaaagcagcaatgagtactccttctaagcttttatctttattctttgtactcattgtcttgctgatgcccttagtttccttactcaacaatgatttctctatcttcaccattaaaaccatttcatacctagtttcctttagtgaaaagccaaaccattactctaatttcagcattattccatacaaagcccaaaatagtaaacaaaatggccacatcaccacaaactccaatggaagagacaaaccacgtctttggaggaaagccttcattggcttcaaaaatactcacgagccatcttcgaatatttctcgagcaatatcccttaatgtaagcaagtgttttcccgttgagttaccttcttttgcaataaccaattcccattgttgtccacctagaccacctncttctaagatcatagatttcaaagattttgcttctccaaacgccacgcttcgagtaagaaaaccggctcacatggtagatgaggagtacataagcaaacttgaaaagggcattgcactcatgaaagcactccctgatgatgacccacgtaatttcatacaac

SEQ ID NO: 212924 - DNA, 526 bp, Glycine max
agagaatacaccaaaacccaacatgaaaacccttaacaaagcctcacttattttattccctctcttgttcctttccctattcaagcattcccatgctgcaggaatcgctatctactggggccaaaacggtggagaaggcaccttagcagaagcttgcaacactagaaactaccaatatgtgaacatagccttcttgtccacttttggcaacggccaaactccacaactcaaccttgcaggtcattgtgaccccaacaacaatggctgcactgggttgagcagtgacatcaaaacttgccaagaccttggcatcaaagtgttgctctcccttggtggtggtgctggaagctactccctcagttcagctgatgatgccactcaacttgcaaactacctctggcagaatttccttggaggtcaaaccggatcagggccattaggtaatgttatattggatggcattgactttgacattgaatctggtgggagtgaccattatgatgacctaaccagggcattaaatagc

SEQ ID NO: 212925 - DNA, 572 bp, Glycine max
atatagtagaaaaaccaatcacgagcggtgattagtattatttaaataatggaattaatgacatagtttttctataagtctataacatgattaaacacttccaataatagcattactataaccattttggacatcattgaatctgttccagagcatgactccaccatactttgaagactgtttaatcacaggaagaacctgagaagtcaacacatcagagggcacaaagccaccacttggagcagctgcctcagatgcaggaagccccatgaagatttgagaagctggcactgtgatccattggttccatgaattgatcaaattgttggtgtttccactggagtattggcatgaagggttgttgtagaattgaacccacacatagtcaaaaagcccagtttggatggctctatccaagtgagcatcagggattatgcactgtggggctgcagacaagtacaccttcctttgtgagctgaagctatttaatgccctggctaggtcatcataatggtcactcccaccagattcaatgtcaaagtcaatgccatccaatataacattacctaatg

SEQ ID NO: 212926 - DNA, 479 bp, Glycine max
cttgaaaggccgtttaggtccaggcatgatgataacggttgatttacttggcggtcagcagttgtagcatcacccacttggaggtctatgagaatacagaagttaaaaaacgagtagccttatcaagcccatatgggaactggatcaaggaaaatttgcggactttgaagctcgggaacttcctttcagcctctgtgttggacaatgaggcagtattaagacaccaacaggcatttgggtactctagtgaagatgtccagatggtgatcgagagtatggctgctcaaggaaaggagcccacgttttgcatgggagatgatattccattggcagcattgtctcagaaacctcacatgctttttgattatttcaagcaacggtttgcacaggttacaaatcctgcaattgatcctcttcgagaaggattggttatgtctcttgaagtgaatattgggaagagaaggaatatattggaaatt

SEQ ID NO: 212927 - DNA, 467 bp, Glycine max
gcaaggagaaaacaatattttttcattaatcagaggagagaaaagatgactaggcatatcaagccccaactaatttattttcaccgtccacaaaaatcccaatcagattcgaatcaactgcattttatatacagttttgctttcacatggctatacaaaagagaatgctaatgctttagatggatgtatacggggtgcatcgtactgctggcaaaaatgatcttgagaatcaatgcagcgaccatggtttcaagggatagtttaatccccatattttggctagcatttccaccttattgatagcttctccaattcctgtacaaatcagggatacaacaatggctccatagcctggcgtaatcaatgtaatgtaaccttgcatcgtcaccctaagcagactgataagtgacctgatctgccgtagttgtgtcgtacttggcatttgcctcaggggtatcctcttcact

SEQ ID NO: 212928 - DNA, 518 bp, Glycine max
  unsure (1)..(518): unsure at all n locations
attttgcattggatcttgtaatgaatagtgatggcacttgccaaggagtgattgccttgaatatggaggatggaacactacatcgtttcaaagctgcttcaacaattttggccacagggggttatggtagagcatacttctctgcaacctcagcacatacttgcactggagatggcaatgccatggttgcacgtgctgggatccctcttgaggatttggagtttgtacaatttcacccaacaggtatatatggagcaggttgccttatcacagaaggatctcgtggtgaaggtggaattcttaggaatagtgagggtgagcgatttatggaacgatatgcccctactgcaaaggatcttgcatcaagagatgtagtttcaagagcaatcacgatggagattcgggaaggtcgtggtgtaggacccctgaaagatcacatctatctccacttgaatcacttacccncagatgtgctcaaagagagacttcctggcatctctgaaactgctgctattttt

SEQ ID NO: 212929 - DNA, 520 bp, Glycine max
aacattgagacaagtctaatccatccattagctagtatattaatacacccgagccttgggagggaatgattcaacctcatcatccaatacattcaaatgcactggcctgtagtccaaccggactttctcgttctcccagaatcccacagtgtgtttcatccagcttccatcatctctaaccttgaagtcttcacgggcatgagctcctctactctctttcctagcttcagcagagtacattgtgatgcatgcatttatcaaaagattttccaattcaatagtctcaatcaagtcagagttccagattaaactgcggtccttcacctggacatcatggaagctctcccatgttttatcaattaattgacaaccttcttctaatgtttcttgtgtacggaacacagcagcattggtttgcattactcgttgcatattcaaccgaatttgcgaagttggcaatgaaccatttgaatttctcaaattgtccagccatgcaattgttctctgaccagcatccttc

SEQ ID NO: 212930 - DNA, 356 bp, Glycine max
ttttatctttattccactgaatagaacatgagcatataaatggataccctttatattatctatctttatattatctataaagggtaaagatatccgatgtgaatctatttgtttagttttctatcggtatgtatataggtgaataatccaacatgcctttttgtgaagtaaaaaaactaccctcgatccatgcctcaaaagggttgatcataagtaaaaaaaatcaatgaattcatgataaaacccttctgcgtttttgtattataaattcttttgtcaataaaagggatcaaggggttgggggaatcaaatggtaaagttcttttgttggtaaattggaggattagaaacatgac

SEQ ID NO: 212931 - DNA, 519 bp, Glycine max
atgtatctatataatcgaattgaaattacgattctatcaaatctttttatttactttttttttttttaagaaaaaagaaagttctaattattaataaattatatctatatatatatatatacagatagatattctatatcttttatcttaattaatatttgacccctccttataatgtgttatagttttctttatttttaggaacttatccattccttttttaatgtgcccgacaatccgaaagaattctgggggaggggtcatttcgtttttgatctagaataaatagagcttcaagaaatgagagaattaagaatacccacgagaaacactaatccaatccataatgatgtaccggaaaatacaacatttttgttattcgaccaaccttcaggagaagcaaatacaacaggtacactaatcaataaaataaatgaaatagcaattaatgcaaaaacagctaattggaaagcaatagtcatgtttctaatccttcaatttaccaacaaaagaacttta

SEQ ID NO: 212932 - DNA, 589 bp, Glycine max
  unsure (1)..(589): unsure at all n locations
tcgcgatctagaacctcgagccgattcggctcgagcagacctaaccattaatcgagaagtgatgggaacgacgaaacctgcaaatacttaagattttattaaaaacaaatcttaatgattcattaggtgggatggcggaagaaaccaaaaagcaatcctttttttaggagttgtgccctacattacatctgaatttgattgataataaaagagtaaatattcgcccgcgataattttgattttattgaatttttttttttatttttgccaattctatttattctttctaataataaaaaatattctaataactaataataaaaaggaaaataaagattcattagaatattataaaataacaaataatagaacaaaacaagattctttagttatatatgtaaaaaaaaaatggtttatttataagaatacatattccattctatatcaaaacaaaatataaaaatttggaatagattctatgaaatctcaaaaaatcccgctattcaattattcattaaacatatgaatattagtgcatattantttatcgattagattaaatagattatctatatatatagatagatat

SEQ ID NO: 212933 - DNA, 414 bp, Glycine max
aggaattgttgtaactttttgattcctaaattctctaaaattcgaaattctaatttcgttaggggaaagagattgtttgtgtgtgagtgagtatggctggaaaaggcgagggtcctgctatcggaatcgatttgagaacgacgtactcttgcgtcggcgtgcggcaacacgatcgtgttgaaatcatacccaacgatcatggtaacagaactaccccatcctacgtggctttcaccgacacagcacggttgatcggcgatgctgcgaagaaccatgtcggtatgaacccaaccaacacccgtttttgatgctaaacgtttgattggaaggcgttatttcgatgcatcactacaaggtgacatggaagtgtggctcgtcaaggtgattcctggccctgctgagaaacctatgatt

SEQ ID NO: 212934 - DNA, 550 bp, Glycine max
gagcaaaaacttatatcattgttcaagtagaaacggggaaaagtacattaaaaaaaaaagagaaaaataaaatcgcaataaaaacataatgacacgctgttatctaaacttcaaaagggtctttgacaaaatcaagaacaacccatgagaatcttctgcttaatcgacttcctcaattttgggtccagcaccgcttccactgccagctgcaggaccatcctcatccatggctccacccgcatcaccaccagcaccctggtacatctttgctatgatgggattacaaatgctctccaactccttcatcttatcctcaaattcgtcagcctcagcaagttggtttccatctagccattggatagcctgctcaatcgcatcttcaattttcttcttatcatcagaagacagtttggaagcaatcttgtcatccttgattgtgttcctcatgttataggcataattttccaatgcatttttggcctccactttcttcttatgctcctcgtcctcagacttgtatttctcagcttcctgcaccatcttctcaatc

SEQ ID NO: 212935 - DNA, 525 bp, Glycine max
aaaaaaataagtagaaaaatttatatgtacgtatcagcatgctacccattaaatcgaatagactgtgcctgcatcaatattcagtatcagatatcaagcggcatgcagcagcctcatatacaacaataccagggttaattttctgtaattcaaccaatacagtgattttatcatgaatttccctttacatccagaatccatcacgttcacgctggaccgtaagatctatgaatcccacgagtatgcattaaaaggaagaacaataccaataatttttgctcaaaatatgcgaccgttcacatgaagctctggttactggtttctcctgcactactcttgcgcttgcttttggagttactagaggatgaggggttattagtatgccagttccttttcctctgatttatgaaccaattatttatctgctttaattgcaagcctgtttcctgcaccaacctagccttgtcttcctcagtggggtaaggccatttagaatgtgactgccaccaagctttcaaaagggat

SEQ ID NO: 212936 - DNA, 578 bp, Glycine max
  unsure (1)..(578): unsure at all n locations
gtttcttacaagcctctactatactgcttcaccttctgctctagaaaattcagtgctgaaacatggcttcggctactctctctgtagccaaaccagcccttcaggcaaatgggaaaggcttctctgaattctctggcctccgaagctcatcaggcttccttcccttttctagaaaatcttcagaggatttccattctgtcattgccttccagacctatgcagttggaagcagtggaggatacaagaagggtgtgacagaagcaaaactgaaggttgccataaacgggtttggaaggattggaaggaacttcttgaggtgctggcacggtcgcaaagactcccctcttgatgtcattgccatcaacgacaccggcggcgtgaaacaagcctctcaccttctcaaatacgattccatcctcggaaccttcgatgctgatgtcaagcctgttggcagcaatgtcatctccgtggatggaaaggaaatcaaagttgtttctgaccgcaaccctgccaaccttncttggaaggactnggggatagacttggtgattgaaggaacctgggtgtttgtagacaga

SEQ ID NO: 212937 - DNA, 394 bp, Glycine max
caaggtaagaattttattgcacaatgagaaggcagagaaaattgatggttctgtttctcagtacaagtttaaaagaaaaatgaagcaacaagtgttgtagtggtagtagtagtagtaagcatacaaaattacaatggcatggtacatacataataatttaattaccaatgagaatttgtttggctctcacttccatttgttggcaacaatgtcagccaaatccacaaccctttgggagtagccccattcattgtcataccaagcaatgaccttcaccatgtcatctcccatgaccatggtcaacgaggagtcaacggttgaggacacatcagtgcacctgaagtcaacggacacaagtggctcatcacacacagagaggattcccttgagctca

SEQ ID NO: 212938 - DNA, 567 bp, Glycine max
  unsure (1)..(567): unsure at all n locations
ggtgctatgaatcaatgagggantccgaatgcacgactacgtatgctcgcattcttggttgagattacacgatcaactaaaaatttatccatcaaaccctcgaacttcacactgcggacactcttaaaaatagggaggaagttcaagaccaaggaaaatcgatgttttgcttgaacctcacaaagatggtgtcctcagaacctgtgccttttcgctccctgcaatctgttctttcggtctgtgctcagccattttgaggtccattgacaataacccaacttcatgcactacttaacgctcgttagccgcccaaattcagtgtggtctgagagaacttagaacccgaattgttatcgtgaagaacactcataaagataccgagggtgtgaagcttgcggctgtggccaaagtgagaagagcttatgaagctggtgtgaacggtagacccttcttagagaccctcgttggagtcctctacaacataaacgagcagcttctaactgaggacgtagacatccctctaacaaaggttatgcctaataaaaaagttgcacttgttgtggtcac

SEQ ID NO: 212939 - DNA, 458 bp, Glycine max
caaaaacgatagagaaaaaatttcccttagccacctccaaccctcacggctaactctgtttttaacatgcgaaccttgaccgagaacactgctatcaatgtcttgatgaatttgaccgtgagggcggtcgcaaagcatcctttcacatccctgcgtctctccttccgctgtgcccttaacaccttttgagatggtcctcaccgcccaaagttctgcactcctttacgcgagcaaatcacataattccagagcggacagagagatctcgactcccgataggacaccgtgaggaacactcataacatcaccaccgctatcaagcccggggctctggacgagagtgacaagagcatgacgaagcggttgtcgccctgggaccaccctcagagaccctctttgaaattactgtacaacattaacgagcagctcctaggtgaaggcgcggacctcccttttac

SEQ ID NO: 212940 - DNA, 183 bp, Glycine max
cctattccttgtcttattgtttggggagtctttattgagaacaacagtggaacaaccaatagaaacacgcaggaaacatgacatgactataactacgcacaatgctgttccacccatgaaacaaccccttcacacatgaatgaacaagaaacacaccactcccatggcaacttaaccggtatc

SEQ ID NO: 212941 - DNA, 316 bp, Glycine max
gttgggaattcggctcgtgctaacatacaatgaaaacgcaaactggatcaagaagggaaagatgtgcgctttgttcatcaacgaacctgacgcatgagctggtcgtctgggcagaaccacgcaatacactgcatagatggctatggagaatgccacacctaatgaacacatgttgctacctccgctcccaagtggaggatgagtggaatgcatgcaggggagagcaatccccgtgagcacataattggagactgtaacgataccttccacactttgtggacgtataattcgcgatgggcgtatggagaatttttac

SEQ ID NO: 212942 - DNA, 529 bp, Glycine max
gtcctttttttttttttttcaatttaagtggacactttaactcaaaattatagaggaggacagtccaatatgaaaaatatagtaaaatcatctcaaacttggcatcttctctttgcacctaagacattgagaattctaagaatgttacacgcaagtcccatcacaacttctagcacttggatcagcacaaccttcaggaacagaaatatttacttgccaagtttgctttgcctccaattcaagattggaagaaagttcccctgttaatagcatcctcgttagcatttccaagtgcagcctcgttcaagtacttgtcagccaattggactctcttgacattctcttgttcttggacaagcatgttaccatacgtcaagagcttctccagagtcatcttgggctgctcaaaggttggaggtccatcttttgagttcacaagcttcttcccaatgccgtcaacaccaacaccagaaatccacttcctcacttcgtcatcatatactctggccctcagtgcaccaaagaaatc

SEQ ID NO: 212943 - DNA, 524 bp, Glycine max
ttctcgatctataacctcgagccgagatcagatagtgcagacctaaccatttatgggagaatgagatggcaacgacgaatcctgcggatacttaagattatattactaacaaatcgtaatgattcattatgtgatgatggcgaagaaaccaaaaagcatatccttttttataggagttgtgcactacattacagtctgactcagatcgtgtataaaagagctaacccttggccttcctgcaacccgattttatggaatttccttttaaataacagccattcctataggttcttgctgacattaagtgatgatctcatggctaatattacctaggcgaactacgattcattaaaatattcttcgatatcaacttctatatcagaacaagattctttagccttatatgtagaaagaatctggccgatgtagaagattacatgttgcattttatatcaaaacaagatctccttctgtggaatggagtatacgaagaatgctaattcacgatattcaattattcattg

SEQ ID NO: 212944 - DNA, 563 bp, Glycine max
gccgatatacctccggagttattaattggcgggtcgacctgattactcgtcggccgccgtccttttttttttttggcataaagtgaatagacattaacattacaaccctttttttggataaaattacaagacaaactaagaaggttcagttccactacagcctagtagcaggacttgccactaattgacattttaaggttggattcaaaaaccatcaaataaaaatgtaggaagaagaaaggtcaaggactactacatcactgttataccacccaaacccttggccttcctgctacccctttttttgtcgtttccttttaatcaacatttcttcatttaggtttttgtggccataatgtgatgatcacttggccatcatcaccttaacgaactcctggtagtttatttggccatcgccatcaacatcggcctcgcgaatcatgtcatcaacctgttcatcggtgagcttctccccgaggttggtcatcacatggcggatctcagcagcagagatgaacccattctggtccttgtcgaacacccggaatgcctatttcagctcc

SEQ ID NO: 212945 - DNA, 473 bp, Glycine max
gctcgacaagctcaaagctgagcgtgaaagaggaattaccattgatattgctttgtggaagtttgaaaccaccaagtactactgcacggtcattgatgctcctggacatcgtgactttatcaagaacatgattactggtaccttccaggccgactgtgctgtccttattattgactccaccactggtggttttgaagctggtatttctaaggatggacagacccgtgagcatgctcttattgctttcaccctaggtgtgaagcagatgatctgttgctgtaacaagatggatgccactacccccaagtactctaaggctaggtatgatgaaatcgggaaggaagtctcttcttacttgaagaacgttggctacaacccagacaagattccctttgttcccatctgtggttttgaggttgacaacatgattgagaggtccaccaaccttgactggtacaagggaccaactcttc

SEQ ID NO: 212946 - DNA, 558 bp, Glycine max
  unsure (1)..(558): unsure at all n locations
aacaaaacttccttataaattaaatgcaaatttaagacatccctcctcagcagcaaaggaaatggactaaaaccctatggctgcttgtgaatttgaaaatctcagacttttaccatcaaaacataaaacagtactcatcaaaaacatacagcaacgaaaatgttaccgccgatcaagaacccagttttgaaggctacggctacatgaaatcggcggacacttcaaaatataactggtaaaacaaacacctaagactctgcaaagataaactactgtaaaggaacaagtttttttgaaaccacgttgatgatcacatgtgctagcaaaattgccaaaatgcaatcacttcttcttggcggcagcctttgtgaccttggctccggtggggtctttcttctcaacactcttgatgactccaacagctactgtctgacgcatgtccctcacagcaaaacgaccaacgggaggatactcagagaaagtttcaaccaccatgggcttggctggaaccatcttaaccataccagcatcaccattcttcaaaaattngggctcctt

SEQ ID NO: 212947 - DNA, 346 bp, Glycine max
tgagtgatagaaacagatctcatacacagatcagaatggcttctacccaatgttggttgcaccaccatgctcttaccacccctgccagtgccagatgcccatcactacccatcttggttaggaccaagcctatccaggtcgtttggaaggcacataaacaacaatcaccacaagaggatattgatgtcaccccaatctcttgccgtttaactctaactgtgctcattagagctcgctgctgctggctgcaaaatgcaacctgctgggcagcctatggtgagactgccaatgtgttaggaatgccaaagacatactcaggttttctgccatacagtggtgatggatt

SEQ ID NO: 212948 - DNA, 499 bp, Glycine max
gtcctttttttttttttttttccttgagataattgtttctcttgaataaaaattgaagccttgttacgaaaatgcatactccttgtagcagcttaacgaaggagacattaagtattcagatactgaatccatccaagtcccttgaattatgaaactcgtgaaaccatagatagcactgaaaggttgatttacacatagcatatatatatataacccgctgttgaagttttttaagcaacactgaaagaacttgctgcgctctccacaaatcttcttgctcccttaaaccacctcttgtctccagcttgagccttgcaaatgaacagtttgtccatcttttacagttgctctaattatgtggtgcttgccaccttcatctccatcagcagttcttgtcaacacagacaagaaatatgtatggcttcccgtcaatcacaggtgttgcagtctctaagatgatagccgtggacactgcatttggatcaaaaccaccctcagc

SEQ ID NO: 212949 - DNA, 508 bp, Glycine max
gtttcttacaagcctctactatactgcttcaccttctgctctagaaaattcagtgctgaaacatggcttcggctactctctctgtagccaaaccagcccttcaggcaaatgggaaaggcttctctgaattctctggcctccgaagctcatcaggcttccttcccttttctagaaaatcttcagaggatctccattctgtcattgccttccagacctatgcagttggaagcagtggaggatacaagaagggtgtgacagaagcaaaactgaaggttgccataaacgggtttggaaggattggaaggaacttcttgaggtgctggcacggtcgcaaagactcccctcttgatgtcattgccatcaacgacaccggcggcgtgaaacaagcctctcaccttctcaaatacgattccatcctcggaaccttcgatgctgatgtcaagcctgttggcagcaatgtcatctccgtggatggaaaggaaatcaaagtgtttctgaccgcaaccct

SEQ ID NO: 212950 - DNA, 425 bp, Glycine max
caaggtaagaattttattgcacaatgagaaggcagagaaaattgagggatctgtttctcagtacaagtttaaaagaaaaatgaaccaacaagtgttgtggtggtagtagtagcatttagcatactgagttacagtgccatggtacatacatattaattcaggggccaatgagaattcggttggatctgacttccatttgttggcaacaatgtcagccaaatccacaacccttcgggagtaggcccattcattgccatacgaagtaatgaccttggccatgtcatctcccatgaccatggtcaacgaggagtcaacagctgaggacacataaatgcacctgaggtcaacggacacaactggcttataacacaccgagaggattgcctggagctaattggctgcgctctctctgaatgcagaaatca

SEQ ID NO: 212951 - DNA, 543 bp, Glycine max
gctactaggccgcggtcgccctttttttttttttttgtgtaatgctaatgtctctcttcagataacgcatgagggaatgctgtcatagttagaaatacatacctgctacggcctataggctgttgttgggcccatgctactgcgggtccattactcaggatgacatgcagatgcaaggcccagaacgtccaagccttcactatgggtattgatatccaacatgaaacctactggatgactaacttctttgttatctccacaacgaactgataaaccttgggctgatcaggatgagacttcgcaacactctgtttctgtaggcacctcttggcccaagcagcaaacctggggctcctattgtcaatgacgaagctggcgacggtcctctatactttggaccaagtgcttaatggaacaagtgctctgtccacataaccaatgttgtctgcttaaaataagtttcatcgcccagctgcttctgcaacaatataacggcctctatgaactccttcttggcagcttctttttgttctgcctttgatg

SEQ ID NO: 212952 - DNA, 482 bp, Glycine max
cattcgaattcattttatttatatattaatattatattcaaatgaaataaaaagatattaaaagatactaattataagaatttgaaagtgaaattataaagttattaaatgattaatcaatttttttctacctgttcctgtagtaaaaagagttccatctgttcttgaatagcttccttcaaaaggacttctgcttccccagtgaatgtcttggtagaagatatgatttctttgaattgaggtttattcgtgtttaagtaagcacgtaactcaacaagaaatttccttacctgtccaatttctaatgaatcaagataaccattcgttccagtataaatagatattatctggtcttccacggtaagaggagctgatcgggattgtttaagcaactcgcgcaatcgttgacctgttgctaatagatattgagtacgcttattgtgatcagaagcgaattgggcaaaagcttctaattctgcgaa

SEQ ID NO: 212953 - DNA, 355 bp, Glycine max
tactattacaacatcgcccgctaccatgaccattgttgcgatcgtgctcctgttgacggtctttgtcgggtactccgtcctacacatgtctatgatctcatactacaacgcccacgcggtctaggtgctccacgtggcgcaccgaggaggagctgatgtccatgtgcgagcaggggcttgtgaagcacgggaaggtgtgcagcgcgctccgcgagaaggagaagcgcttacagatcttaaaggacaacctgcgattgataaacgagctctaacttgccgtggaccgaacctaccagctagggctgaaccggttcgctgatctcaccaacgaggaattctgggccaatgacttggg

SEQ ID NO: 212954 - DNA, 415 bp, Glycine max
atttttgagcctgcttactgaaaatgggaacaccaatgatgacctcccgcttcccactgatgagagtgtgctcactcagataaaggattgttttgctgagggcaaggatcttgacgtgtcatgcatgtctgctatgggtgacgaacatatttgccccctgatcgatgttgggccacagaactacctcctggtgctggcagcctgttgtttctatttacgcctacatcctcttgaaagcttatatattggctgggtcacgacctggcttatggcttatagattcttggcaccactagtcttatccatggtgctgatggatgtgtgcacacaaactatatcacaccttgtctggttatctatgctcgtcctatgactctgttattcaggacgaatcgtatgcgggacggtttttttt

SEQ ID NO: 212955 - DNA, 374 bp, Glycine max
attttgcatcggatcttgtaatgaatagtgatggcacttgccaaggagtgaccgggttgtatttgggggatggaacactacatcgtcacaaatgctgctataacaattttggccacaggggggagtgggagagcatacttctctgcaccctcagcacatacttgcactggacatggccacgccatgggtgcacgtgctgcgatccctgttgaggatgtggagtttgtacaattgcaccccacaggtatatatggagcgagtcgccttatcacagaaggatctcgaggtgaatgccgcaatcttaagaatagtgtcggttaacgatcgatgaaacgatgttgccctactgcgaaggatctcgcataagagatgta

SEQ ID NO: 212956 - DNA, 412 bp, Glycine max
cgaaactccacagtccagtgagaggaagagaaagcatgaagttcacagactcgccggtgatcgagcttgcggtgaacgacgccgttctgtcgcttcagcaagacaacgggtccatgcacgtgggaaccaccgtgtggccatgctccctcgtcctcgaaaaattcgcggagcgctggggcccaccctatgacaacaacccctacgctcgcgtgctcgacttccaaggcaagcgggccgaggagctcggcacgggctgctgcgtggcgggaaggggcctctacctgttgggcctgactgacctgcttctcaccgacattggacacgttatgcgcggcctggagcgcaacctgaaagtcaacaagcccatgcttcgcgaggccctcgaacactccgtgctctactgggacaaccc

SEQ ID NO: 212957 - DNA, 590 bp, Glycine max
ctctctctctctctctctctgaagatggcttcacgcaggctcgtatcttctctgattcgatcctcccttcgtagatctcaatcgaagccctcaattgccgcatcgacatcgaggctcacgtcatccaaccgtgcctcaccgcacggatacttgctgaaccgcgtcgccgagtacgccacccaccgcgggttgctgctaccactcctccctctcctcctcctccggggaagaaggagctcggcggcggcgggaagatcaccgatgaattcaccgggaagggcgcgatcgggcaggtctgccaggtcattggtgccgtcgtcgatgtcagattcgacgagggtttgcctacgatcatgaccgcgctggaggttctggatcactcgacgaggcttgtgtcggaggtggcgcagcatttgggtgaaggcgttgtccgaaccattgctatggatgccaccgcaggtgtcgatagaggctggagcgttctcaacactggctcccctattactcgtccagttggtagggctaccctaggccgatcatatatgtcattggagagcctattgatgccatggagaaatcaatactgagca

SEQ ID NO: 212958 - DNA, 548 bp, Glycine max
  unsure (1)..(548): unsure at all n locations
gctgatatagctcagtgangaaatccagagcgangacttcgcatgcacgcctatcttagtctcggattctgctcacgatgcgagtgaaaacaaagtcttgcccttctgtattcaactccgaacactaggacagtgatcatgcatggctgcctccgcctcaactggcggtgctgtgaacagagctcttttgaacctgattgcgcttgggccgggggtttcagcttccagttcatccttctttgggagcagattgaagaaggttattggctcgagggtccccaacacaaagatttcctctggaagcctcaagattgttgctgtcccagagacgagagagattgtagagaccccgcggaccgacaaggacagatggaagggtcttgcctatgatatctcagacgacccgcaggacatcacaagaggaaaggggttgggttgactccctttttccaaggtccacaggacgctggaactccctatctgtcatgagcttcttcgagtacctttcaatggacttcttccgtacttggacaacaacaggggtggat

SEQ ID NO: 212959 - DNA, 527 bp, Glycine max
cggctcgagcggctcgagcaggtcttattgattatgatatgctggagaaaactgctactctgtttcgtccaaaactcattgttgctggtgctagtgcttatcctcgggacattgactaccctcgtatgagaaaaattgcagatgaagtaggtgcttttcttatgatggatatggctcatataagtgggcttgttgctgcatctgtactttctaatccctttgagtattgtgatattgtgaccaccacaacccacaagtctttacgaggtccaagaggtggtatgatattcttcaagaaagatactgtgcatggggttgatttggagcctgccattaacaatgctgcttttcctggtctacaggggggtcctcataaccacacaattggaggactagcagtttgcttgaagtatgctcagtctccagaatttaaaaattatcacaatcaggtggttgctaactgtagagctcttgctaagcgattaattgagcatggatataaactggtatctggtggtagtgacaat

SEQ ID NO: 212960 - DNA, 404 bp, Glycine max
ggccaaaaaagggtacaacatttttttagcaccacaccttgaagcatggttattggacaaaattttttaacagcggcttagttttaaggtttcattatgcgggtacacttaaactccgggttttgggtaccgggtaaaaagagctttaactttcctacccaactttgataccttttttcccaaagggaattcagaagatgtttcaaactttaaaaaattttggggctttgttcctgggaccaaacttttggcttcaaaaattatttgcccacccttttgaatgaaaacagggatgagtgaaaattttttctcaccaagtccttttggtgtcattggtggggccccaaagcaaatgccttctggaactagggcgcttttattaccaggccctgaatttttgttgg

SEQ ID NO: 212961 - DNA, 534 bp, Glycine max
cgttgtttgagaatgcagcgcattgcaggtggtaaattccatctaaagctaaatattggtgcgagacgcccattcaaccataccgtaccagcagaggaaagagagaaaatttcagaacaaaaaagaagcagaggaaaagagagatagagagagaagaaaagctgtgaagagaagagtctgaaatctgaatcataaataattggtttttgagatgaagaactgcgagttgtgcaagcttccggctcggactttctgcgagtcggaccaggctagcttatgctgggactgcgacgccaaggttcatggagccaacttcctcgtggaaagacacacgcgcacgctcctctgccacgcgtgccagtcgcccacgccgtggaaggcctccggcgccgacctcggaaacaccgtctcgctgtgcgagagatgcgccggcggaaccaccgaacaaggtcaagagagccaaggaggcaatgacgacgacatagacaccgacatagacaccgacgatgaggatgactacgatgagagcgagga

SEQ ID NO: 212962 - DNA, 541 bp, Glycine max
tatgaatcggcactctctttgaaaactgttatgcgttcaccggcgtcggaaaggtcgtccggttagggttccggccatcgctaagggcacggatcgtaaaatcttctcgaagcttctatgctattactcatctttgcaaaacaagggattttggatggtaaagggttctggacaaattaatgacagagagacaatatttgataatcctaccaaaattgaaccaaaacgacctcatcaatggtttgttgacgctgctgaagtagatttttttccaaacaagaaacaagctgtagaagatgcagatgaaaaatctagtcctggattttcaaatgtaaatattcctccctgggagaacaatcccaattttcattcggtcccaaaccaatttattggccgattatttgggtctgaaaccaggcctgtcaatttcactgagaagaatacttcatatgttttggctgatgattctaatgtgagatcaaagatgatcaccaatcaatatggagatgatgcattctttggtttgtctatatctcattct

SEQ ID NO: 212963 - DNA, 472 bp, Glycine max
ccgagaacaaaaaaaaataaaatttaaaaatccgcgattcgctcttctcttggaaaagtgaaaaccagaagtacgaacgaaagagaagagcgatttagaagtgagagaagatggggttgtcgttcacgaagctgttcagcaggttgtttgcgaagaaggaaatgaggattctgatggtaggtctcgatgctgctggtaagacaaccatcttgtacaagctcaagcttggagaaatcgtcaccactatccccaccatcggatttaatgttgagactgtggagtacatgaacatcagtttcactgtgtgggatgttggtggtcaggacaagatccgtccactgtggaggcattatttccagaacactcagggtctcatttttgcgggtgatagcaatgatagagatcgagtggttgaggcaagggatgagctgcacagaatgttgaatgaggatgaacttagagatgcctgttt

SEQ ID NO: 212964 - DNA, 468 bp, Glycine max
caagaacaaaacgcatggaaatatattcaatcaaaaatcaaacaaacaagatgtaagcaacacagcacgcacgcacaagagggtgcaagagttccaattatagctaaaagtattagctaatttaagcaatcatacaaacccaagttacacaaaagagaatacttctagcaagcattctgctattacaacattcgctagaaaagataagcatctttctccaagaaccgccagactcgcatgaaatcaccagacaagaccaaaatttttcaaatgtctcatgctttgctggcaatgttgttagaaagccagtccaaaccctcatagagaccctctccagaagttgcacaagtgctctggatataccagtggcgttgacggagtgaatgaagtccaagcttgtcagttatttctgcagcattcattgcattaggaagatcttgcttgttggcaaaacaagaaaacagcatc

SEQ ID NO: 212965 - DNA, 468 bp, Glycine max
ggggatccgaatgcgataaaaggtggtgaattagtttttggtggtgttgacccaaagcacttcaaaggaaaccacacttatgttccaattactgaaaaaggttactggcagattgaaatgggagattttttcgttggaggtgtttcaacaggtgtttgtgagggtggctgtgctgctattgtggattcaggaacatctttgcttgctggtccaactcctgttgtggctgaaatcaaccatgccattggagctgaaggagttctcagtgtataatgtaaggaagtcggttctcaatatggagagttgatatgggatctcttggtatcaggggtgaaaccatatgacatatgatcacaaggtggttcatgttctttcaaaaggcatcaatctaagagtgcttgaattgaaatggtgactgaataggatcaggaagaagtggtagcgaaagatactcctttgggttcttct

SEQ ID NO: 212966 - DNA, 481 bp, Glycine max
gaaatgaggatggttttttcatataaaaagcacacaacacttgcaagtgggatacttctacgtcttaaatggataaatacattcgtggtttcaaaaagtaaccagagctacaattataacagcttatttacaacacgcttaacaaatttacaaagaaaatcctccagaaagcgtaattagactgcttcggcaaagccaacttggagatttccatagtcaaagacggtgtgatatgccctcatgaaaacatcgccaagaatccacaatggaccctttggaggaggaacatcaaaagcaataaacccactaaggcagacttctgtaatgccttctccagttcttagaatatactgctctggtgtgaggacaaaaggtttatttccaattgtgaacgtaatgtttggcatcttggaaagactattacagcttatcactgactctccagatggacttggcaggctctcacacagttgattcacat

SEQ ID NO: 212967 - DNA, 446 bp, Glycine max
aacaagttgtcgagaactaattttgattttcaaatggcttcctcaatgatctcttccgcagctgttaccactgtcaaccgtgccggagccggcatggttgctccattcactggccttaagtctatggctggcttccccaccagatagaccaacaatgacattacctacattgctagcaacggtggaagagtgcaatgcatgcaggtgcggccaccagttggcaagaataagtttgcgactctttactacctgccataccttgatgatgcacaattggcaaaggaagtcgaatacgctcttaggaagggatggattgcttgcttggaacttgagatggagcacggtttcctgtaccgtgagcacagcacgtcaccaggatactacgatggacgctactggaccatgtggaagctgcctatggttgtttgactgacgctcttacgtgt

SEQ ID NO: 212968 - DNA, 525 bp, Glycine max
cataacaatagaaagtaaagaaatttattcaaggaaactgggatttatacaatattgatattgtatatgcaagtccacacccagtactacatttggccttgtggacatacgacaaatattattaattttaaacatgcatagacttacacaccgaaattatgagtattagatcctcacccaaatataccaaataaaatattgttaataacttccaactttgctggcgagtgggcgggctttacacatagcctccaatggaattaaccttgacaaggtgatccaattattctctgtcatatcaagcttcttctcacttactcgtttccagtcaaaacattgaatcattaatcccaaagtatagctaacactttgcatagccatgggttctcctgggcaagcccttcttcccataccaaatgctaccaacttcttctcctctccttcttcatcaaacctctcaggtttaaagcttgtcgcatctttccatatcttaggatctctttgcatggcccaaccattaataat

SEQ ID NO: 212969 - DNA, 449 bp, Glycine max
ggtcaccgttgttcaggttggttacaggcatattgactgtgctagtgcgtataagaatcaagcagaggtaataatattgttgacaacggttatataattatgggttttttttctcttttttaattactttttttataatatttggcttttctcaactataagaattaaaagatgccaattgttgtttatttccccaatttattggtgttgctagtacgttatatgattttgttttgcaaaatagctagaaaacagtaatttttttgctagccaattgacattttatttttttaattttggtttttatagattggttctgctcttaagaagctttttgatgatggtgtggtgaagcgtgaggacttatggatcacttccaaacttctgtttgttgccttttagtaatggtgatctctttttgatattgagaaagattgtatgtgtttgga

SEQ ID NO: 212970 - DNA, 583 bp, Glycine max
  unsure (1)..(583): unsure at all n locations
acaacataaaaacccaaattgaattgtcgtaattttcaaacaaaacatcaatcaatatttcattcaaatctcaattcaaaattggatttagaattcttaatttctatattttttttttcttaaaggtagtagttctagcggttgactcgcttttttcaaattgtttttcattattaagaaaaggtaacaaagataaaatacgagcttgttttatagcaattgttattaatcgttgttgttttaaggtcaatctatttacgcgtctggataatatttttccttgttcactaataaatcgactaattaaacccatgtttttataatcaattcggtcccccgattggatcgggggcaaacgcctacgaaaagatcgcttggatttcataaagagtcgcttagatttttccatggtttatttatccctattccaaaaatcacatttattacaagagatactataaaggatttgtttttttattctgactttnntaatatatggtgtatttttttaatatatgtggtatatactgatatttgatatatcaactgaaatgattgaatccagatgatctatctattgata

SEQ ID NO: 212971 - DNA, 509 bp, Glycine max
cactcaactcactttattatattgaataaaagatacaatcattaaatgaaaaataactcttggctacttattcggggttaccatcaatagtaacacttctcaaaatctcacctggaatcactacaactagtgggtataaggcagaataaatttgctctaggagcaatgtatttttcaacgtctcaaagatgcatattgctcaaagttcaccatcccagaagtcttcaatgctcctataggcaccataggtctcgtgaacaaaaaaactggccttaactagcctttcctgcatgagtaaactccatgtgttaactagcatttttgttgatgtagtaaaagatgtataggaaatagtaagaatcaagaaaaagaacaaaaaagaatatcatacgaagtatctaactacttgcctgcttaatttcagagatcttggtcatcaaatcttgaggaatagaccagtcaaagatatcaaaatttcccttgattctggactcatagtgctcttagga

SEQ ID NO: 212972 - DNA, 353 bp, Glycine max
agacatggggaggccgcccagataatgtgaaggcggcacaagatgcacttcttttccgtgccaagtccaactcgctcgcccagcttgggaagtacaccggtgagggtgaatctgaggaagccaagaaggagttgttcgtcaaaggctactcctactaagatgtttgtagtgaatatgatacatgttaggcagcagcaacaccagcagttgtagtaggtgttgacggaggatgaagtggaagaagactaatttgtctaaaatgtaatgtttttatagtcttggagactatttttgtttatggttacatgtacctttacagcttataaacctttttgctgtgagttgtgtacttg

SEQ ID NO: 212973 - DNA, 353 bp, Glycine max
caagtacacaactcacagcaaaaaggtttataagctgtaaaggtacatgtaaccataaacaaaaatagtctccaagactataaaaacattacattttagacaaattagtcttcttccacttcatcctccgtcaacacctactacaactgctggtgttgctgctgcctaacatgtatcatattcactacaaacatcttagtaggagtagcctttgacgaacaactccttcttggcttcctcagattcaccctcaccggtgtacttcccaagctgggcgagcgagttggacttggcacggaaaagaagtgcatcttgtgccgccttcacattctctgggcggcctccccatgtct

SEQ ID NO: 212974 - DNA, 535 bp, Glycine max
tggaggcaagaaagggtgttggttaggctttcattacggcttttagatctggtgcagttatgggttttctccttgctgcaaatggtcttttggttctttacattgccatcaacttgttcaagatttactatggtgatgactggggtggtctttttgaggccatcactggttatggtcttggtgggtcttctatggctttgtttggaagagtaggtggaggtatctatactaaggctgctgatgttggtgctgatcttgtccgaaaggtcgaaagaaacatcccggaagatgatccaagaaatccagctgtgattgctgataatgttggtgataatgttggtgatatcgctggtatgggatctgatctttttggttcatatgccgagtcatcctgtgctgatcttgttgatgcttccatctcttcttttggggtgaatcatgagttgactgctatgtcataccctctaattatcagtgctgagggtatccttgattgaatgctcacaactttatttgcaactgacttctttgagat

SEQ ID NO: 212975 - DNA, 463 bp, Glycine max
  unsure (1)..(463): unsure at all n locations
aacagacaatataaatatatataaaatatggtaaggaaatattaagaaaattggaccatccaaaaggaatatataagaaaattgaccacgcgggagagatggtaaacatcatcgtcgtcgtcgtcgtcgtcaacctcctctttacaaggaaaattttcgctgcaggctcagcctaatcgagtgtcttaaaactacatgagacaaattatacttttgtttcaaggtgggggatggaaaggtttcaaaaacaatggaattgacatgacagatgagttaaagactaacaaaaaagagaaggcactggtaaaggaacgggcttttccttgttctgccattgtagaaaattgatggacgatgctcttttttctattaaatcctttagatcttgaagagtaggccaccatgtgtcgcanagaagggagcaaacacaagagactcaacggccatgagcttgataaggatg

SEQ ID NO: 212976 - DNA, 510 bp, Glycine max
  unsure (1)..(510): unsure at all n locations
caagaggaaagggtttggttgactcccttttccaagctccacaggatgctggaactcactatgcagtcatgagctcctacgagtacctcagcactggacttcgccagtacttggacaacaaaatggatggattctacattgctccagcttttatggacaagcttgttgttcacatctccaagaacttcatgaccctgcccaacatcaaggttcctctcattcttggtatctggggaggcaagggacaaggaaaatctttccaatgtgagcttgtctttgccaagatgggaatcaaccccatcatgatgagtgctggagagttggaaagtggaaatgcaggagagccagcaaaactgatcaggcagagataccgtgaagctgcagacatgatcaagaagggaaagatgtgcgctctcttcatcaacgatcttgatgcangagctggtcgtcttggtggaaaccacacatacactgtgaacaaccagatggtgaatgccactctcatgaaca

SEQ ID NO: 212977 - DNA, 408 bp, Glycine max
ggacaaaaggaaaaggcaccaaattcaatttaagtggacactgtaactcaaaattatagaggaagacggtccaatatgaaaaatatagtaagatcatctcaaacttagcatcttctctttgcacctaagacattgagaatgctaagaatgttacacgcaagttccatcacaacttctagcacttggattagtacaacaaccttcacgaacagaaatatttacttgccaagtttgctttgcctccaattcaagactggaagaaagttcccctctgaatagcatcctcgttagcatttccaagagcagcctcgttcaagtacttgtcagccaattggactctcttgacattctcttgttcttggacaagcatgttaccatacagcaagagcttctccagagtcatcttgg

SEQ ID NO: 212978 - DNA, 542 bp, Glycine max
  unsure (1)..(542): unsure at all n locations
ccgagaacaaaaaaaaaaaaaattaaaaaatccgcgattcgctcttctcttggaaaagtgaaaaccagaagtacgaacgaaagagaagagcgatttagaagtgagagaagatggggttgtcgttcacgaagctgttcagcaggttgtttgcgaagaaggaaatgaggattctgatggtaggtctcgatgctgctggtaagacaaccatcttgtacaagctcaagcttggagaaatcgtcaccactatccccaccatcggatttaatgttgagactgtggagttcaagaacatcagcttcactgtgtgggatgttggtggtcaggacaagatccgtccactgtggaggcattatttccagaacactcagggtctcanttttgtggttgatagcaatgatagagatcgagtggttgaagcaagggatgagctgcacagaatgttgaatgaggatgaacttagagatgctggtttgcttgtttttgccaacaagcaagatctttctaatgcaatgaatgctgcagaaataactgacaagcttgga

SEQ ID NO: 212979 - DNA, 550 bp, Glycine max
ttacaagctgttcccgagtccattctgaagaagaggaaacgccgggatgaacggaagcaacgccagttgttcagatcagttaaaggtaaccttaacagaatcaggaagcgtaggcagatcttcttgcgtgctgagaaatatgtcaaagagtacaggatgaaggaacgagctgagttgaaaattgccagagatgccaggaaacaaggaaatttctatattccaggagaggcaaaacttgcttttgtcgtcagattgaagggtatcaacaaaattcctcccaagccaaggaaagtgatgcaattattccgtctccgtcaaatcaataatggtgttttcattaagttaaataaggccactttaaatatgcttagaataattgcaccttatgtcacgtggggctaccctaacttgaagagcgtcagagaacttctctacaagagaggttttggcagaattcgtggtcaaaggattccaattacatcaaataggatgattgaaacccatttaaaacgatacaacatcattcgtatggaagattaatacacgaaat

SEQ ID NO: 212980 - DNA, 515 bp, Glycine max
  unsure (1)..(515): unsure at all n locations
aacaaaagtcagtttgtttattgacaagatggaagtcaacatgagatgaaatgtaaaaactaaaaaaaataaaatacaagtataaaattaaaccatcgatctgagtaatttgttgatcaagtcttctctgttgccaaagtcaccaccgtcattgtagtggacggacttcctcttccagccaccagttggcgtgttcaatttgaaaggccataagaagtgtgtggcgtacttgaagttcctaccaacagtgaaaatttcgtgtactaaatcttccatacaaatgatgttgtatcgttttaaatgggtttcaatcatcctatttgatgtaattggaatcctttgaccacgaattctgccaaaacctctcttgtagagaagttctctgacgctcttcaagttagggtagccccacgtgacataaggtgcaattattctaagcatatttaaagtggccttatttaacttaatgaaaacaccattattganttgacggagacggaataattgcatcactt

SEQ ID NO: 212981 - DNA, 395 bp, Glycine max
cagatcccggtggcctttactttctctttctctggaaaattcccccgattttctcgagaaagtgaaacggaattatgagctttcaggacatcgaggctgggcggaccttcagttcgaggcgcgggttgatgaacgggaagcaagacccgacgcaagcggtggctgccggaatattccagatcaacaccgacgtctccaccttccagagactcgtcaacaccctcggaacccccaaagacacccccgacctgcgcgaaaaactccacacgacaagactacatattgcgcaattggtgaaagatacatcatgctaacttaagcaagccagtgacattgatcaccatgctgaagttaatgcccgcaagaggattgcagatgctaaacttgcgaacgat

SEQ ID NO: 212982 - DNA, 402 bp, Glycine max
cgtgagctcggatttaggctcgaggagaaagatgggtattagagtttatcagactctgcacattttcttctttcccttcttggctcatggccacatgataccaaccgtggacatgggcaaattatatgcctaaaagggtgtgaaagccactattgtcaccacacgcctcaacgaacctttaatctacaacgccattggtatgtccaaaactaatggcaacaaaattcacatacaaaccatagagttatcttatgcagaggctggactacttgatggctgtgaaaataccgagtcagttacttccgcagaattggtgaatgcgttcactatggtcacccatgcactacaagagccacttgagcagctactgcaaaagcatctttcacatagcgttggtgctga

SEQ ID NO: 212983 - DNA, 528 bp, Glycine max
  unsure (1)..(528): unsure at all n locations
ggaatgtcaaaggaggagcattatcaagttagcaagaagtgagacttttgccattagagtgtcaaacgcagcaaacatggttctttttgttgccaaagtttatgcatcagtcagaagtggttccctagccatcattgcatccacgttagactcacttcttgacctcctttctggattcatcctctggttcactgcattttccatgcaaacaccaaacccatatcagtaccctataggaaagaaacggatgcaaccattgggaattcttgtttttgcctctgttatggcgacacttggactgcagataatcttggagtctacccgcacattaatatcttctgaaaatgcattcaacttgaccagggaacaagagcgctgggttgtgagcattatgctttcagtgactntggtgaaattcctgctgatgatttattgtcgttcttttaccaatgagattattaaagcctatgcccaggatcactttnttgatgtgatcactaatgtcattggccttattgctgcactttt

SEQ ID NO: 212984 - DNA, 497 bp, Glycine max
aacataaacatgcatccgattatccaaatatattattattttatggttttggtaacagagttagaacaccaatttacacttattgagcaatccaaaatccaaatacacgagatatattaagaacttttcagggcattatattaattgatgatacatattgctacttgtccttcgaagacaccggacagattgcctatgtcctcagcacattagatatgtagaataaaatcttagtactcaagattgcaagagcttctcgatgtctttctcgattttcagaggtgaggtggtaggtgcatatctgtccacaaccttcccttctttgtttactaagaactttgtgaagttccacttgataccatcgccaaatattccccctttcttctcctttaaaaacttgtaaagtggcactgcattcttcccattgacttcaaccttatcaaagataggaaattcagccttggaccttgtgcaaactacttcctgaatttcttcat

SEQ ID NO: 212985 - DNA, 492 bp, Glycine max
ggggaagcggttttacggagattagagtgaacttaacaacgttgaggaagcgaaggagttcagagacactgtgaatgagatgctgcaactcatggggttggctaacaagggagatcacttacctttcctaaggtggttcgattttcagaacgtggagaagaggttgaagaatatcagtaagaggtatgataccatcttgaataagatccttgatgagaaccgtaacaacaaggaccgcgagaattccatgattggtcatctcctcaaactgcaagagacacagcctgactattataccgaccaaatcatcaaaggacttgctttggctatgctctttggcggaacagactcgtcaactggaactttagagtgggcattatctaatttagtgaatgacccagaggtgctgcagaaggcatgagatgagttggacgctcaagtaggaccagatcggctgttaaatgagtcagaccttccaaaacttccttatct

SEQ ID NO: 212986 - DNA, 509 bp, Glycine max
atattatatacttgcacatgttagaaattaacaaacaccagcacacacacaccttaaatcctgaattaaggtaaaaagagtgcactgtacaaaaaagggggaatggaaaagaaggtagcaaattctatttcccctaaatggaatctgaaagggtcttgcctgataagcctatcgtgatatacatttggaatattatcagggctgccagaaagttgagattgatagctagcaacttctcagtgacttgcacttaagttcagattctgaacaaccagaaatggttcaaatttacaactgacgggagatgaaagggcaactgaaataaacaagaaggcagtgctttcctgattgctgctaagagtgtgcttgagcatgctcaggtttgtgactgtactcataatcaagatgaacaaaagcacgctcaatctcgggcaaaagctcaagcttttcttgcaacgattccccaatatcatgagcctcttgcaagggcatatccgatggcaggacaa

SEQ ID NO: 212987 - DNA, 456 bp, Glycine max
aattaattgcaccattttcaaattgagattggtttttttaaccacgaatgacttaagaccattttggtgtgcattcatgactgaattacaccaaggtaccacccttaacatactcagtaaaagccagagcaaccaaacccaacatagcaaatcttccattccacagttctgcatctgaggacatgaaccctttggacttagactccacgctgatcccttggaagagtggaatcaaggaagcaagggtaaggaccacacttgttcccaagaaccatgggataccaccattggatatttgatcaaacacaccttgccctttggctacttccactgccattgcacccacaaacccaatcatggccaacctgacatagatcctctcaggtgctggcccactgaacgccaacacatcagaacacttggtgcttacctttggtgaaggagtacagactggct

SEQ ID NO: 212988 - DNA, 593 bp, Glycine max
aaaagaatatatattttgtgttaatagaatactatactgatttatgtagagcattttgctttgctaagcattttggaagtgttgtagtatactgtatgttatgaaatgattatctctttatttatttaattaaatataaatgaacgagcatttattttatagtgatagaaggtcatattgatttatgttaggacattgtgcctctctacacattatagtgttgtcgtgactatttgatataacatgataaggttagtatttggcagttttgaagttttttaatactcatggtaagcttacagatttctccctttttatatgaaaagtatgaaacaaaagatggttgagctattattttctcacgcctatcatttgaattcaaatgcttaaattgtttggattaagttggtatttggttagagtttcttagttcttttagactttcctatttcctagataccttatctcattgctattccgatctaattgcttctatatatttagggtaggaaattctggacacttgctgtaaatggttcatctaattctttgaatggttgtgattcaattatgcagtgatgtaaatataaatc

SEQ ID NO: 212989 - DNA, 453 bp, Glycine max
gtagttgttaataaaaatcattatattaagcttcaattgtatagcaataagcatcccatacaaactttaattttatagcaattacagtcaattattatcttccaacataacattttttggaagacttgaagtttccaatggatttaaatatacttcaatgtctcagaatgttgtgcttaataacatactgatcagcataaataaataaataacacacagatgcattcagtgttcctctgcaagaatacgcctgacttcatttgcaagatcaatgacatgtttgtctttgcatcctatttcatgaagagccttttcaaggttgaaaagataatctctgttaggtcctgcgggacctttagcttgaattatttgccttgcaatgtcttcaatcgatgcagggcccaaataatttacattagatttcttgtcgggagttgctatatataccatcac

SEQ ID NO: 212990 - DNA, 335 bp, Glycine max
cttgagaggctctcacttatccaatggggctcatggctcgagggccatgatattcacatatgcacaacggtgaagattggctgcattggtgctggatatgtgtaggggtcctactatggcagacattgcactgaaatgcccatccaaagaactcgctgatgttgatatgtataaatccctcattgtaccactgacacagggaccagcttactatctatcaaccaggacctgatggtgctgcgaaaccatgccactgcgagacccttttcttatccctgcagatgataaccctgtatttgtagctcacctagggattgtgtctcgggacgacacaa

SEQ ID NO: 212991 - DNA, 494 bp, Glycine max
ttctaaaacacttgagcagtggaaccaacattcattttaatgcatttgatgctctacgtggctggaaacaggaagccttgccgccagttgaagttcctgcggcggctaaatggaaatgtagaagcaagccctctcagcaagtaatactagattacgactatacatttacaacaccttattgtggaagtggcactattgagattgataaagatctgaatgagggagagacttctaaggaaaccagtgatatccattgggaagactgcatggatcatatcgatgtatttgcacttgcatccaaggagcccatacttttctatgatgaggtggtgttatatgaggatgaactcgctgataatggagtatcacttcttactataaaagtgagagttatgcctagctctaggtttcttctgatgcgttgctggcttagagttgatggagtggtgattagactgagagaaacacgtatgcattgtgtatgcggtggaagt

SEQ ID NO: 212992 - DNA, 515 bp, Glycine max
  unsure (1)..(515): unsure at all n locations
aaataacattttattacaaagtcctccatagcatacaataacaaagttacatggaaattcattaactaccactaacaataccgttatagccgggtcaaaatgctgaatttaaacaaaactaaagagatgaagcacatgtacatttatttttatttttatgaaacttagattgaaacaatacaacttaactatatgttgatgctttgccaagtgattctgcaatcttactggcaatacagtaagatgtagactgaatggttaccatggggttgacaccaactgcactaggcaaaacactcccatcacacacatacaagccttctgcttcccaagtctcaccattctcatcgagtgcaccttcttcttcagaggcacccattctacaacttgacatctgatgtgcagtggtaaacactgtccacacttcattccttgaccttggacccncaactattgtcacagtgtcaagaaactcctccaaatcttcctccttcatccccttacacttgattctt

SEQ ID NO: 212993 - DNA, 587 bp, Glycine max
gttgaagaggaagaaacatctttataccttcgaaactcggctgcagacagcagggccgaagtgcctataaatgtgaccacacaacaaattgcaagagagacagtgaatcaaggggtgttactgaatgcaaacagaaacactcgagtacagaataatgctactacgtggctgagaaatgcagctgaagattccacagcagaatcttcaagtagtactaggagagaaagggatgggggtgtagttccagtatggtctcccccagcttctaacttctcagaacaatttgtagatgatgaaaatggtataggagccggttcatcttacttgcaaaggcagcatcctcagtctcatcaattgatgaactggacacggctacctcagacagggtaatttacgtctagaacatgccgattaatatcagggggaaggaaaatgcactctcccctcttcttctgggaatcgtgggatggtgaaccgcattggacatacatgtgatcatattctacatccttaaacctgtcttgacacatgattaacggctgaacttcaatgtgtatgaaattttcagttaagccggtagtatttca

SEQ ID NO: 212994 - DNA, 475 bp, Glycine max
ctggattgagtggaggatgttctcttggtttgcagtataaaggggcttggtgtacccctcctagggtattcgtggattatcaggatgaagttgtgcctcacttggagcctggaatgctaccatcaactgttgatccagatgcagctgggattgccgaaagagggcaaaagatgccaaaaagacctgttcgtattagtgcttggaagcttgctaagttggattcacaagaggcagtgagagcagctgcaaaggccagggcatcttcttcagttttgcgacctgtagataaccaccgtctaccagatgtagaattgagttctagtgggaacatgagcatcagaagtagtttgagcacagagactggaactaacaaggaaataaaagccgagttgagattgtctccagtgagaaattctattgctcctagtcaaggaagtcgtgatgagtatgagactggaactcaaagtatgagtag

SEQ ID NO: 212995 - DNA, 569 bp, Glycine max
  unsure (1)..(569): unsure at all n locations
ctcgagccgaatcggctcgagcgttgccattctcatcctcttctttctctctctaccattgccatggatccctacaagcaccggccatccagcgccttcaattctcccttctggactacaaattctggtgctcctatttggaacaacaactcctctttaaccgttggagctagaggtccaattctgctggaggattatcatcttgtggagaagcttgcaaattttgatagggaacgtatcccagaacgtgttgtccatgccaggggcgctagtgcaaagggtttctttgaggtcacccatgacatttctcacctgacatgtgcagatttccttcgagcccctggagttcagacgcctgtaattgttcgtttctcaactgtcattcatgagcgtggtagccctgaaaccttgagggaccctcgaggttttgccgtgaagttttacaccagagagggtaactntgaccttggtggaaacaacctttccgtcttctttgtacgtgatggcatgaagtttccagatatggttcatgctcttaaatcaatcccaagaacccatccagagaattg

SEQ ID NO: 212996 - DNA, 496 bp, Glycine max
atataaatactaacaaatacaaacggcatttattgagataggtcaacgagttgcattcatggagttatgggtacacacaacataatattgcaagaaaaggattagttctttcaggtaatccaaaatcacatccttatcgtactctttgcacgtctgcaactctaacaatcattctggagttggcaacaacattaaatatttggcctcgtgctgagatgagaagctatcttttggcctagagaacggtcagcctgagaccagtatgatatccagacactgcggatctcatgggtgacccgtgggtcagataaagcatcaacccatcggcgagcaaatctatcttgcctgtcaggtgcccaagaccggtatctctctccgggctgcttgaagttgttctccttctcaattccacacttttcacgccttccactgcagatagcaggaggtatggggaacctttctgcatgacgaacaggatcataccttgaagggaagt

SEQ ID NO: 212997 - DNA, 416 bp, Glycine max
aattcggctcgaggtttcatgttacgttaattttttcttgctcgatctgttcaattgcggccttataatgcaatcgcattctctggtccaattgctgattttgattctgtattccttatttatccactgggtcagtctggttggttctttgctcctagttttggtgtaacagctatatttcgattcatcctctttttccaagggtttcataattggacattcaacccatttcatatgatgggagttgctggtgtattgggcgcggcactactatgcgctattcatggtgccaccgtagaaaatactttatacgaagatggtgattgcgcacatacattccgggcttttaactcaacctaagctgaagaaacttattcaatggttactgctaatcggttttggtgccaaatctttgg

SEQ ID NO: 212998 - DNA, 450 bp, Glycine max
cggctcgaggctgtttactcttctcgtcccgtctgaggttgaggtcggaattgcctcaaagcttgttgcattccagatgcaaagctgcctttgtatggattcaagaaggctaatattgggaaggatttggccctgcatgcatgcgccggggagcctcccctcgcattcctcgactctcttcttcttggagagtgggaagatcgcatgcagagaggactttttcgctatgatgttaccgtctgtgaaaccaaagtgattcctggtgaatatggtttcgttgcccagcttaacgagggtcgtcacctcaagaagaggccaactgagttccgagttgataacgtccttcaaccctttgatgaaaacaaattcaactttaccacagtctggcatgaaaagtcctctttcaatttgaagctagcgaggatggacaagtcaggtcttttccaatgc

SEQ ID NO: 212999 - DNA, 530 bp, Glycine max
  unsure (1)..(530): unsure at all n locations
aactgctgctgctgaagcaatttccatgtgcaacaacattcagaaagggaagaagaagaccttcatcattgcaagtaactgccaccctcaaaccattgatatttgcaagacaagggctgatggttttgatctgaaggttgttactgcagatcttaaggacattgattacaagtctggggatgtttgtggtgtgcttgtgcagtaccctggcactgagggagaggttttggactatggggagtttgtgaagaaggctcatgctcatgaggtgaaggttgttatggcaagtgatttgttggcactgactgtgttgaagcctcctggtgagttcggggcagatattgttgttggatcagctcagaggtttggggtgccaatggggtatggagggcctcatgcagctttcttggccacttcacaagagtacaagaggatgatgcctgggagaatcattggggtcagtgtcgattcttccggaagactgcttgangatggcgatcaaactagggagcagcatataaggaaggaca

SEQ ID NO: 213000 - DNA, 556 bp, Glycine max
aaaataacacacacttcacacatcattacgacaattaaaagaggtgtggaaattttcaaatagacagagcatactcaacaagagggtcatgtctaatttcctttattgaattaaacaaacgaacaaacgaaagaaaacacaaattccagatcatgcagaggattccgcattttcagaagatctggcagtagcctgtggaacagaaaaagctggcataagagtattaccagcaatttcaaaatcttgagaaattcccaagagaatatcaaaaactgtagactgtttgggattgtcaataaggaaactcaagtgccatgaagtttgatttgcccactcagaactccacatttcaaaaccattattaggaccacatacctctattgggaagatcaattcccaggaatgtggttccgattttgtccacttacatgcatcgaaatgctctgtactggtgctgtttgttaaaaacacttgtaccaatgaggcccaatcactccttttgactgctgcattcccagacatcacaattttaaccattaaacagccttttttcaag

SEQ ID NO: 213001 - DNA, 583 bp, Glycine max
  unsure (1)..(583): unsure at all n locations
ttcttcttctattctcacacattcccatctactccttccctcatggctgaacaatcttccaactccatttacgatttcactgtcaaggacatcagtggaaatgatgtgagtctgaatgattacagcgggaaggttctactgattgtgaatgtcgcctctcaatgtggtttgacacagacaaattacaaagaattgaatgtattgtacgagaagtacaagaatcaaggatttgaaatcttggcatttccgtgcaaccagtttgctggacaggaaccaggaaacaatgaagaaattcaggaagtagtttgcacaaggttcaaggctgaatttcctatctttgataaggttgaagtcaatgggaagaatgcagtgccactttacaagtttttaaaggagaagaaagggggaatatttggcgatggtatcaagtggaacttcacaaagttcttagtaaacaaagaagggaaggttgtggacagatatgcacctaccaccttacctctgaaaatcgagaaagacatcgagaagctcttgcatcttgagtactaagatnttattctacatatctaatgtgctgaggaca

SEQ ID NO: 213002 - DNA, 501 bp, Glycine max
cttaaccaacacccctgtcttctcttcctctccaaacttcatgggaacctccatcccaacactcacaccaatcttcaacacttgagtgacgagcttctcattcaaaaattgatcagcaaatagaggccacgtaatcattggcacgccagcacttatcccttcaagtgttgaattccaaccacagtgtgttaagaatcctccaatggaagggtgtgataatattagcacttgtggagcccaacctcgaattataaggcctctccctttggtcctttcctcaaacccttcttcactgatccattttttttccaactcttggaacttatttccctccctaatgacccatacaaatggtttcttagtatcttccaaggccaaggccagctccacaagttgtgaaggaatcaaattgcacaagcttccaaaacaaacataaaccgcagactttggtggctgcaaatctagccatttcaagcaatggtgctcattaattgaggcatg

SEQ ID NO: 213003 - DNA, 517 bp, Glycine max
cttctttctctctcccttagtcaaagggactcgttgttcttctcccaggttatttagaaaagcaaaatggtgaagatttgctgcattggtgctggatatgtggggggtcctactatggcagtcattgcacttaagtgcccatccattgaagttgctgttgttgatatctctaaatcccgcattgcagcctggaacagtgaccagcttcctatctatgaacctggccttgatggtgttgtgaagcaatgccgtggcaagaacctcttcttcagcactgatgttgaaaagcatgtctttgaggctgacatagtgtttgtctctgtcaacaccccaaccaaaactcagggtcttggagctggtaaagcagcagatttgacatattgggagagcgcagctcgcatgattgctgatgtttcgaagtctgacaagatcgttgtagagaaatccacagtcccggttaaaacagctgatgcaatagagaagattctgacccacaatagcaagggaatcagattcc

SEQ ID NO: 213004 - DNA, 453 bp, Glycine max
caccaatatgatattaagagaagaatcagaagattaatcaaacaaaacaagtttccctagtacattcataaaagattggagtacaaagtaacatagaacataaaccctcccatttcccacaatttataccccatttatgtcaccaactattatgagaaagttaagcaggaaaagaaaaactcttacaaaaaataataaagaattaaactgactgcctcaacatttgactggtattgcagtgtacttgatcaatgatctattttacgccaaagcaggcatgtctttgagccatggatccagtggcttaccaattgagtaaactatgaagccaatctcacgcaacttatcagcatccacaatgtttctgccatcaaaaacaaatgctggtttttgcatgttgtcaaatatcctctggtagtcgagagtcttgaactcatcccactcggttagaat

SEQ ID NO: 213005 - DNA, 536 bp, Glycine max
  unsure (1)..(536): unsure at all n locations
aatggacatgacaactcctgtgttagcaccatactttgatggcatgacaaaagacattttccaattatcttgatcttccatctttgttgttaacaagagttttgttggccatggagactccgtaaatgaaatcaggactcanacattaaagccatcacttgtgatctctgcaagcaaagatgaatctgtccggttatggaatgttcatactggaatatgcattttaatatttgccggagctggaggacatcgtaatgaagttttaagtgttgattttcacccatcagatatatatcgtattgctagttgtggcatggataatactgtaaaaatatggtctatgaaggagttctggacatatgtagaaaaatcatttacatggactgatcttacttctaagtttcccacaaaatatgtccagtttcctgtatacaatgcttcagttcatttaaattatgttgactgtaataggtggctaggtgattttatcctctcaagagtgttgacaatgaacatatcttgtgggaacctaaagt

SEQ ID NO: 213006 - DNA, 378 bp, Glycine max
agtaaaaatgtggtgttggcactagagaactttctccattgccaaatctcaaacgaggaatcacacaacttcaaaacaaacattaacttagcttgaggacgcactcgcggattcacagactaaacttaatgatttattcagtgatataggtacatcagattgatatagtatgtgataagttagtctggggagtttgtaacatcatcccaacgccatattgtcccatcctcacagcaactcaatatagtacttccatcaaaggacgtagcagtctgcctgattggagattttgattgaggatgtgacaaccttgcaacaagtacaggaggacttgactgcaattcccaaacaaaaatctttccttccctgttacccact

SEQ ID NO: 213007 - DNA, 504 bp, Glycine max
ccagagagaagaagaatcttaattgatcatcacttcacttcactaatacatcatggcagacgagacccagaacaagtatgagagctctgaggttgaggtccaggatcgtggtgtttttgactttctcggtaagaaaaaggatgaagaagacaagcctcatcctcaggaggaggtcatcgccaccgagtttcaaaaagtcactgtctcagaccaaggagagaacaagcacagcctcttagaaaagcttcaccgatctgacagcagctctagctcttcaagtgaggaggaaggagaagatggagagaaaaggaagaagaagaagaaggaaaagaaagggctgaaagagaagatcgaggagaaaatagagggtgatcatcatcatcacaaggatgaggacacaagtgtccctgttgagaaagttgaggttgttgaaacagcacatgctgaagaaaagaaggggttcctcgacaagattaaggagaagctaccagggcacaagaagac

SEQ ID NO: 213008 - DNA, 496 bp, Glycine max
agaacatgtgatccattatcagctgggaacaatcaatttcataggttactggtgaaaatgcggcatacagaaatgcctgcctcgaagtatggaacaaatggcaaagctgttagaatggtacgtacatatgactgagtgaaaagaaagagactgttagagaataaggtgttgaatggttcagcaccttcaaaggtagagagaaaaaatggtatcacaggcttgaacaatacagtgaaatctataaggttattggaagagctaaaggctttagccacagatgaaggtttcagttgggccaatgaaaattacagttcctggcagaggtctattgatgcttggtcttttgtggctcctttacgcattcggattatgttggacaatgcataatggacatatttcggaagtttcacagaggcaaagcagagaagcagatagcggaaaactgcctcgtggttaaggaagtgtgtattgcatcttggaccaactatcattaaac

SEQ ID NO: 213009 - DNA, 357 bp, Glycine max
ccagaaatagtatttaatattataagcagagattcataattcagattagccgaactttatacagaagcgaccaattaccaaacattaaaaaaaaaaaaaagaagcaaccatgagcttaacacacccatcacaagtccaaaacacttgaacttgctgaaaggcaagacatgaccactttattctaaggatgttggtttaacacaaaacaccagagggcacgaaaaccatcacagacataatacataagttgttagctacacattaatagtttatcattattcctaataaagggctatctctgctggaagcttggtctcccaacacctcacttgcaagtgcaggggttgcaggagcagt

SEQ ID NO: 213010 - DNA, 452 bp, Glycine max
  unsure (1)..(452): unsure at all n locations
tcgtcaaggaaaactaagtttttcagtcttgacttgagtgctttgagttcatggatccaatccaacacaagttcgtcaacgttggtgctctcaagctccacgtcgcataaaccggaaccggtccaaacgccgtcgtattcctgcacggcttcccggagatatggtactcgtggcggcaccagatgatagctctcgccggtgccggattcagagcggtttccttcgattacagaggttacggtctctccgacccgtcacccgaacccgataagacctcttggtccgatcttctcagtgatctccttcatattcttgatgctcttgctctttctaaggtgtttcttgttgggaaagactttggagctcgtcctgcatatctatnttcaattcttcaccctgaaagggtcttgggagttgtcacgttgggagttccatattgttccccaggcccc

SEQ ID NO: 213011 - DNA, 476 bp, Glycine max
tttgttttttttttttttttttttttccagtaatagtatttaatattataagcagagattcataattcagattagccgaactttatacagaagcgaccaattaccaaacattaaaaaaaaaaaaaggaaggaaccatgggccttaacacacccatcacaagtccaaagcacttgaactggctgaaaggcaggacatgaccactttattctaaggatgatggttgaacacaaaacaccggagtgcacgaagaccatcacagacataatacataagtttttagctacacagtaatagttcatcatgagtcctaattaggggctatgtctgcttgaagcttggtctcccaacacctgacttgcaagtgcaggggttgcaggagcagtttggaccccattggccgccatcgttgtcagcgggcacacgcattgcaggaccctcaaattgagccttagcaggtgccactcccatgaccaag

SEQ ID NO: 213012 - DNA, 495 bp, Glycine max
  unsure (1)..(495): unsure at all n locations
acagaacgaaattattgatgttaccttgtcatctcatcatatatgaacatagtacaacccttttttttttctttccattattcaacaaaactatttacatatctggaaggttatttccgtctatagaagacgttaatacaatagataagagatgaactagcctaagaagtttgaggcctggtttattcagcaaatatctgctcaaacaaacagagactccccacataagttctaatcacatattactgctgagtttttccatatagcttgatcagatatagctactcaactctattttcttcctactaaatcagttttaagtcattcattccctcttgacatcagattcttcagtccttgcaaatcttccacggattcttggctgactgtcagcaagtgccttcctgcaagcatacttgattttcctcccaaaattcctctntgtcttcttattcctgtatctggagagcttttggaagcgttcctcactggtgc

SEQ ID NO: 213013 - DNA, 457 bp, Glycine max
ttgggaagaagcttgtgaactttaaagatggacctccaacctttgagcagcccaagatgactctggagaagctcttgacgtatggtaacatgcttgtccaagaacaagagaatgtcaagagagtccaattggctgacaagtacttgaacgaggctgcacttggaaatgctaacgaggatgctattaacaggggaactttcttccaatcttgaattggaggcaaagcaaacttggcaagtaaatatttctgttcctgaaggttgtgctgatccaagtgctagaagttgtgatgggacttgcgtgtaacattcttagaattctcaatgtcttaggtgcaaagagaagatgccaagtttgagatgattttactatatttttcatattggactgtcttcctctataattttgagttaaagtgtccacttaaattgaatttggtgccttttccttttgtcct

SEQ ID NO: 213014 - DNA, 511 bp, Glycine max
aagtggacactttaactcaaaattatagaggaagacagtccaatatgaaaaatatagtaaaatcatctcaaacttggcatcttctctttgcacctaagacattgagaattctaagaaatgttacacgcaagtcccatcacaacttctagcacttggatcagcacaaccttcaggaacagaaatatttacttgccaagtttgctttgcctccaattcaagattggaagaaagttcccctgttaatagcatcctcgttagcatttccaagtgcagcctcgttcaagtacttgtcagccaattggactctcttgacattctcttgttcttggacaagcatgttaccatacgtcaagagcttctccagagtcatcttgggctgctcaaaggttggaggtccatcttttgagttcacaagcttcttcccaatgccgtcaacaccaacaccagaaatccacttcctcacttcgtcatcatatactctgggcctcagtgcaccaaagaaatcaatgga

SEQ ID NO: 213015 - DNA, 573 bp, Glycine max
ggaattttagtggacaaaactttagattggatcacacttatacaaaattctccaattagtaacttgttgagagttgctgcttggaagaaaggctgtttaatggttaaaattgtgatgtctgggaatgcagcagtcaaaaggagtgattgggcctcattggtacaagtgtttttaacaaacagcaacagtacagagcatttcgatgcatgtaagtggacaaaatcggaaccacattcctgggaattgatcttcccaatagaggtatgtggtcctaataatggttttgaaatgtggagttctgagtgggcaaatcaaacttcatggcacttgagtttccttattgacaatcccaaacagtctacagtttttgatattctcttgggaatttctcaagattttgaaattgctggtaatactcttatgccagctttttctgttccacaggctactgccagatcttctgaaaatgcggaatcctctgcatgatcttgaatttgtgttttcttttcgtttgttcgtttgtttaattcaataaaggaaattagacatgaccctcttgttgatatgctctgc

SEQ ID NO: 213016 - DNA, 438 bp, Glycine max
aggacaaaaggaaaaggcaccaaattcaatttaagtggacactttaactcaaaattatagaggaagacagtccaatatgaaaaatatagtaaaatcatctcaaacttggcaatcttctctttgcacctaagacattgagaattctaagaatgttacacgcaagtcccatcacaacttctagcacttggatcagcacaaccttcaggaacagaaatatttacttgccaagtttgctttgcctccaattcaagattggaagaaagttcccctgttaatagcatcctcgttagcatttccaagtgcagcctcgttcaagtacttgtcagccaattggactctcttgacattctcttggtcttggacaagcatgttaccatacgttaagagcttcttcagagtcatcttgggctgctcaaaggttggaggtccatcttttga

SEQ ID NO: 213017 - DNA, 502 bp, Glycine max
aaacttaagttgattgagttattataaatagtatttgattttcactagataaaaaaaaattaggtcgacaggattttaaactattttagcttaaatcattaaaatttagataacaaataatcttgagagtaaatgcatgcatagtgtcgatggcggtatattagtggctcaacgaacttgatccctcaatttaagctttaaaatcagagttggatgatccaccttcttccatggcccgcctagcttgatgtgaaagcacctttgctttgctcctcattccaatggcttcttcccctgtcattatcctcttcactgccttctacactgcatcacatgaaatactatctccctgcattccaagccatgttttagcaccaacaggtaccccaattttaaggacctcaatcaccaacttctcattgaaaaattggccggcgaacataggccaagtgaccatgggaacccctgcagtcactgcttgcaacgttgaattcatccacat

SEQ ID NO: 213018 - DNA, 607 bp, Glycine max
  unsure (1)..(607): unsure at all n locations
cttgtgatcttcttcaaccttcatagtgagaaaacacattcagaaaccacgtttctctcttcttcttcttcttcttctttttcttctctcgaggtcattattaagtattcaccatggaggcaccatctcccaccaaacccaacgacccaacaaaaccttccaacacttccaccacccttagtctggaggccggcccggcccaagcgagcccactccgaaaaatgtttgccgtggcgtccatcgccgccggcatacagttcgggtgggctctccagctctctcttctaaccccctacgttcagcttttaggagtcccccacgcggcggcctccttcatctggctctgcgggcccatctccgggctcgtggtacagcccattgtgggctactacagcgaccactgtacctnccgctttggtcgcaggcgcccctttattctcgggggcgccttagccgtcgtcgtcgccgtgttcctcattggttacgcagccgatataggatacgcggcgggcgacgacatatcgaaaacgacccgacctcgagcggtcggtgtcttcgtcataggaatttggatcctagacgtggccaacaacatgcttcaaggacc

SEQ ID NO: 213019 - DNA, 477 bp, Glycine max
gcggcacccaccatgaaagccggcaagttgccaccaccaaacaaagcatcccaaggaccacttaatgtagacaccaccatctgtggcaccacaattgcaagattgaggactcccaaagataaaccttggcctgctcctgaagcgctgcagtatattgatgctagagcaaatggaacactgaaagtaatcgcaagaggaactccgagaaccccaaagaaaaccatggacccaaccaccaccccttcggaggggtgacccacggcggcgggattcatcttgcgctggtgctccgccaccttggtgatcaccaccgtcattccgaacccaattgccagaataaagttcacaatcgcccacagcctcttcactcccccaaccatcttccccaacggctccaccgccagcgacatgaagcccaaaacgacggcgtttaccatcagccctagcgacccaacgcgcactccattggcgtacgcg

SEQ ID NO: 213020 - DNA, 542 bp, Glycine max
  unsure (1)..(542): unsure at all n locations
tgcaattgaagttaaaagccttagccttccctacaactccaaacacaaagacatcatcatccatggctgcctccgtctccactgtcggagctgtcaacagagctcttttgaacctgaatggttctggagctggagcttcagctcccagttcagccttctttgggaccagcttgaagaaggttattgcctcaagggtccccaacagcaaggtttccggtggaagcttcaagattgttgctgtagaagagaagaaagagattgaagagacccagcagaccgacaaggacagatggaagggtcttgcctatgatatctcagacgaccaacaagacatcacaagaggaaagggtttggttgactcccttttccaagctccacaggatgctggaactcactatgcagtcatgagctcctacgagtacctcagcactggacttcgccagtacttggacaacaaaatggatggattctacattgctccagcttttatggacaagctnngtgttcacatctccaagaacttcatgaccctgcccaacatc

SEQ ID NO: 213021 - DNA, 405 bp, Glycine max
  unsure (1)..(405): unsure at all n locations
aggacaaaaggaaaaggcaccaaattcaatttaagtggacactgtaactcaaaattatagaggaagacggtccaatatgaaaaatatagtaagatcatctcaaacttagcatcttctctttgcacctaagacattgagaatgctaagaatgttacacgcaagttccatcacaacttctagcacttggattagtacaacaaccttcacgaacagaaatatttacttgccaagtttgctttgcctccaattcaagactggaagaaagttcccctctgaatagcatcctcgttagcatttccaagagcagcctcgttcaagtacttgtcagccaattggactctcttgacattctcttgttcttggacaagcatgttaccatacagcangagcttctccagagtcatc

SEQ ID NO: 213022 - DNA, 496 bp, Glycine max
cttgagctatgtttcagggataatagggcagggatgtacaaagaacgagagcgaggtggtgtttccgtttccgcctctaaatccgaggatcggaagcgaatcaacgacgttctcgataagcacttggaacgatcctctccttccacttcccgccccatcaacaccgcttccaagaattccaacctccaagtggaggaatctgagacggagagtgaagagtctgatgttagtggctctgatggggatgacacctcttggatctcgtggttctgtaatctaagagggaatgagttcttttgtgaggtggatgatgattacatacaggatgactttaacctctgtggattgagcagtcaagtgccctactttgattatgcccttgatttgattctcgacgttgagtcatcccatggtgacatgttcacggaggaacagaatgagttgatggaatccgcggcggaaatgctttatggtatgattcatgctcgatatgtgt

SEQ ID NO: 213023 - DNA, 512 bp, Glycine max
aaagattttatccaattgaaattttaaaaatgactgggataaacttaagaattcaattattgaaattgaataagtaaacaatttaattggattggtcgaatggtatcaaaaaaatggagtactaactcccatttcttatttatcattgaattaaccgatcaacttgctttgatatcgaacatttctttttgatttcaaaaattttccggaaaaaatttgaatctatttttatatgcgaatcaatcctactacttctggtcctgaggtttctgcgcttgaaaaaaaaaatctgggacgtatcgcccaaataattggtccggtactagatgtagcttttcccccaggtaagatgcctaatatttacaacgctctgatagttaaaggtcgagatactgttggtcaacaaattaatgtgacttgtgaagtacagcaattattaggaaataatcgaattagagcttgagctatgagtgcgacagaatgtctaatgagaggaatggaagtgattgaca

SEQ ID NO: 213024 - DNA, 308 bp, Glycine max
aggtattccgatattcggacccctcaacttgttatgaaatcacattggtagcctttactcgggtcctaactcgtttaagagctaaatttgccccaattggttggcttttgccttccgccttattcaaattagcttctggtatttcaagaggttggtgggctttttggggatcaatggcactacccttttccgcatcatttactaaaacggggatctcattattggttattctagcaaaaccgcccatcaaagccattgttaaccattggtctttaagaaaacgtattctcaaaatacctatatctacc

SEQ ID NO: 213025 - DNA, 431 bp, Glycine max
tgtaaatcaaatagaaatttatttaatctatgatcctagagtagtttcctagacaaaatagacgtaagttcacaaacaagattcaagaataagattctctgatgaagggagagaaatatgtctgacgatccgctgggtataaggagtgaaagatgggatcatctgtttcttgaacaggtcttttaaaaaaatgttatatcggattatcgagtcataggagatactatgattgatgacttggaggatctttaagaatagagaggagtacctacattgagttcatcgatttgctcctagatatcaatagactcataaattattgtgtatgtcgaaaccaattaaaattaaaaaagaagggaaagtgtacgagacaattatctctctctatatataaataaattagtaaaacagtgtgcaactatcactttttc

SEQ ID NO: 213026 - DNA, 429 bp, Glycine max
gaaaaagtgatagttgcacactgatttatttatttatttatatatagagagagataatttgctcgaacactttcccttcttttttaattataattggcttcgaataaaaaataatttatgagtctattgatatctagggcaaatcgatgaactcaatgtagctattcctttctattcttaaaaatcctccaagtcataaatcataaaatctcctatgactcaaaaatccgatagaaaatttttttaaaagaactgttcaagaaacagatgatcccctctttcactccttatacccagcggatcctcagacatatttctctcctttcatcagagaatcttattcttgaatcttgggtgggaacttacttctattttgtctagggaactactctaggaacatagattttataaatatctatttgattgaca

SEQ ID NO: 213027 - DNA, 403 bp, Glycine max
ggtacaactacaaaggttgttggatgagataacatattgaagtactgctaagtgcctaacacctgcactgaacactggcctctgcatcagcatctacactgacgtcaacactggtcaagagactacgtctgagagcgtgaagggacaaacagcttcgccaaccttctgctgcatcagttgagagatgcaacctcgccacgccatgaagcctcacaatcagagctgattcctatgctgatgatctcgttacgaccgtgaaaacagaggcttcaccagggatgggtattgaggacatggatgagtccaatgctacctgtgggaagcgtttggctctaattgggctagagaacactgaagctgaccgacaggcgtaccgtaccatccttgtgacacggtcaggact

SEQ ID NO: 213028 - DNA, 327 bp, Glycine max
cattgattgccgagattcaaccatgttatattgagacaatcaatcaagtacacaactcacagcaaaaaggtttataagctgtaaaggtacatgtaaccataaacaaaaatagtctccaagactataaaaacattacattttagacaaattagtcttcttccacttcatcctccgtcaacacctactacaactgctggtgttgctgctgcctaacatgtatcatattcactacaaacatcttagtatgagtagcctatgacgaacaactcctttttggcttcctcagattcaccctcaccggtgtacttccaaagctgggcgagcgag

SEQ ID NO: 213029 - DNA, 471 bp, Glycine max
cgcgtgtactttcttgcgaatttgaagggcgaaggggcaaacacaacttttttgtttttttgtagagcgagagagaaaaaaatgttggggatcttcagcagttccgtggtgtcgccgccggaggagctggtggctgccggcagcagaacgccgtcgccgaagacgacggcggggaagctgctgaaccggttcgtggagaacaaggcgtcggcggtgtcgctgcaggtgggagaacacgtgcagttggcttacacgcaccacaacgagtcaccgtggcatcccagatcatttgctgttaaggatgagatattctgcttgtttgagggggctctagacaatttgggcagcctgagacaacagtatggactggccaagtcagccaatgaagtggttttggtgattgaggcttacaaagctttacgtgatcgagcaccataccctgccaatcgtgttgaatgccatctcagtggg

SEQ ID NO: 213030 - DNA, 471 bp, Glycine max
ctgaagaagtgtcatatggtttcagtggctctaaatatacgtggggtaaaatgtttgtgaatggagccgaaatatcaacttctggaagaagtgatactgtcctccaaagtaacaatggaagtgcttggatccctaaggacaatggaaaacataataagcatgtgcagcatgaaagtttcaacggcaaaggggagatgctactgcatggaaaccttgtcgcaaagatgattcaagttaacattccaagatataacgaagtcctgccatgtttataaagttggcaagcccagaaaattgcttcttggcacaatatggaagggcactccatccaatggttatctgtagtatgtatagaccgaaaaggcatgatggctgaaggcactacagcattggccactgcaggcatagccatatgttcgtgtgtggctgacattgatggatgaagtggaatggctgttatggtatttcacg

SEQ ID NO: 213031 - DNA, 560 bp, Glycine max
caatcattaaacatgccatgactagaatccaatattataatctcttttctctcatcaagcccaacaaatctaaaactgtttacaaatacatttttttttccgattgaacagaattcgaacacatacgcactttcaattttctgcacaaaactgttcttcgccgaagccctacagcctaaaaatcaaacggtaaggccttgtggggcaccagctacaggtgccttgggcttaggtttctccaccacaatggcctgcgtggtcaacaccattccagcaactgaagcagcattctgcaaagcacacctagttaccttggcagggtcgataactccagcctccactaaattctcatacctgtctgccatggcattgtaaccgacctcccattcaccactctttattttctccacaacaacttcaccttctattccagcattttgagcaatcaatgctgcaggagctatcagtgccttttgcacaatgtcagctcctagcctctcatctgcatcctcaagcttgtccttgattgctgggacatgagtggagagatgaaccatgca

SEQ ID NO: 213032 - DNA, 582 bp, Glycine max
cacaagatgagatgagggcatttatgagctactttcatgagacaatttggaaaggtgtaccacagtttctgcgtcgggtagatacagctctgaagaacattggaattaatgaacgtgtcccatataatgctcctgttattcagttctcttcttggatgggaggagaccgtgatggtaatcctagagtaacccctgaagttacaagggatgtgtgtttgctggctagaatgatggctgctaatatgtacttctctcagatagaggatctcatgtttgagttgtctatgtggcgttgcactgacgagctacgtgttcgtgctcatgaactccataggtcctcaaagagagatgcaaaacattatattgagttttggaaacagattcctccaaatgagccatatcgtgttattcttggtgatgtcagagacaaactatataacattcgggaacgtgctcgccatttattagccaatgggacatctgatatccctgaggagacaaccttcactaacgttgagcagtttctggaagccccttgactatgctacaggtcactctgtgcatgtggtgacagaccaatag

SEQ ID NO: 213033 - DNA, 427 bp, Glycine max
caaggtaagaattttattgcacaatgagaaggcagagaaaattgatggttctgtttctcagtacaagtttaaaagaaaaatgaagcaacaagtgttgtagtggtagtagtagtaggtaagcatacaaaattacaatggcatggtacatacataataatttaattaccaatgagaatttgtttggctctcacttccatttgttggcaacaatgtcagccaaatccacaaccctttgggagtagccccattcattgtcataccaagcaatgaccttcaccatgtcatctcccatgaccatggtcaacgaggagtcaacggttgaagacacatcagtgcacctgaagtcaacggacacaagtggctcatcacacacagagaggattcccttgagctcattgtctgcactctctctgaatgctgcattcac

SEQ ID NO: 213034 - DNA, 533 bp, Glycine max
ttttacattgctccagctttatttgacaaacttgttgtttacattaccaagaacttcatgaccctgcccaacatcaaggttcctctcattcttggtatctggggaggcaagggacaaggaaaatctttccaatgtgagcttgtctttgccaagatgggaatcaaccccatcatgatgagtgctggagagttggaaagtggaaatgcaggagagccagcaaaactgatcaggcagagataccgtgaagccgcagacttgatcaagaagggaaagatgtgtgctctcttcatcaacgatcttgatgcaagagctggtcgtcttggtggaaccacccaatacactgtcaacaaccagatggtgaatgccaccctcatgaacattgctgataaccccaccaatgtgcagcttcctggtatgtataacaaggaagagaatccccgtgtgcccatcatcgtcacccgtaacgatttcttcacactctatgcgcctctcatccgtgatgggcgtatggagaagttctactgggcaccaac

SEQ ID NO: 213035 - DNA, 247 bp, Glycine max
aaagaatggttaaaaaataagggtttgtcaagaatcattcgttttaaaaaaatgaattccacccggaaaaggggcccaatttacattcatgggacgagcaagtccaatctcaatcctctccaaaagactggtcaatgacttccccctgaaccggatcccgaagtgcgccatgaatgggggctgggggctgaaacaatctgccaagactggtgggacctcctccttttccaacagtccctactttccc

SEQ ID NO: 213036 - DNA, 452 bp, Glycine max
attcttaaaacactgcagattttctgaatttgttcaaaatacaagagccttgttactgtagaaccacacattcttgtgaaccagccaccaccaccacagtagggtgttcgcttgtgctgactgcatcaacttcttttttgacactttgaacattgacatcctccaattcaccacagccaatggcttcaaaaacaagatcattgacttcttgaaacctctcttgagaaagggacacctcagcaagaagcctccaagcattgccttcagacgcctcatcataatccttcctcctctttaaaaccatgtgtccactaatttcccacacagcaggattcacttgggtgtcaagaagctcagcattcacttctccaagagcttggttctctgcataacactgtggtaacagatacacttgctttccacagtcagagataagaacattgaaaggtatg

SEQ ID NO: 213037 - DNA, 438 bp, Glycine max
ctggggagaagaatgttctcatttttgatctcggtggtgggacttttgatgtctctcttctcaccatcgaggagggtattttcgaggtgaaggccactgctggtgatactcacttgggaggtgaagattttgataacagaatggtgaaccattttgttcaggaattcaagaggaagaacaagaaggatattagtggaaatgccagagctctgaggaggttgagaacagcatgtgagctggcacataggactctctcttccactgctcaaaccaccatagagattgattccttgtacgagggtattgacttctacacaaccattatccgtgccacgtgtgaaaacctaagcctggatttatccaggaagtgcatggagcccgaggagaaatgtttgtaggatgccaagatggataatagtgcctgacatgatgctggtc

SEQ ID NO: 213038 - DNA, 476 bp, Glycine max
gagcaaaaacttatatcattgttcaagtagaaacggggaaaagtgcattaaaaaaaaaaaagaaaaataaaatcgcaataaaaacataatgacacgctgttatctaaacttcaaaagggtctttgacaaaatcaagaacaacccatgagaatcttctgcttaatcgacttcctcaattttgggtccagcaccgcttccactgccagctgcaggaccatcctcatacatgggtacacccgcatcaccaccagcaccctggaacatctttgctatgatgggattacaaatgctctccaactccttcatcttatcctgaaattcgtcagcctcagcaagttggtttccatatagccattggatagcctgctgaatcgcatcttcaattttcttcttatcatcagaagacagtttggaagcaaacttgtcaaccttgattgtgctcctcatgatataggcataattttccaatgcatttt

SEQ ID NO: 213039 - DNA, 578 bp, Glycine max
atcgctctgttgttttcaaagaacctcgttttgttgaatatttcagatgtgcaactcctgagttggagtatggaagaatgaacattggcagtcgtccatcaaagcgaaagccaagtggaggaattgaatcactacgtgctattccttggatttttgcatggacacaaacgaggtttcatttgccagtgtggcttggttttgggtcagcatttaagcatgtagttgagaaagatccgaagaatctccaaatgcttcaggacatgtacaatcaatggcctttcttcagggtcaccctggacttggttgagatggtgtttgctaagggagacccggggattgcagccctatttgacaaactcctagtatcagaagagctgcgtccatttggagaaaatttaagagctaaatacgaagaaaccaagagctttctccttcaggttgctgggcacaaggatattcttgaaggagacccctacttgaagcaaagacttcgtcttcgtgactcatacatcacaaccctcaatgtgtgcaggcttacacattgaagcgattcgtgatcctgactaccatgtgaagtg

SEQ ID NO: 213040 - DNA, 410 bp, Glycine max
gaccaaaaccttgttttattgtatgatgatactatattgataacaacagaggaacaattatttgatattggtggaaatctgtcgtagacataataggttataatgcttatatatccatgaaacaatcacaacacacatcatataacaagaaaaacaccacttctatggcaacttaaccggtattttgcattccagcagcaatacccttcattgtcaaaataagggtgtcctcaagaccaggagcatactctcttttggggttaagattaacaagctctgctgctggcttgcttgattccatgtagtcctttgacaagtgtggcctcaacttcacatggtagtcaggatcacgaattcgcttcaatgtgtaagcttgcaacacattgagggttgtgatgtatgagtcacga

SEQ ID NO: 213041 - DNA, 389 bp, Glycine max
cttgagctgtgattcactgatattagggcacgtatttacatggaactacatcgatgctggagctttcgcttacgcctatcacttcggtgatcggaaccgaatcaacgacgtcaatccataagcacttgggacgaacctatagtttcacttgccgtcacatcagcaccgccttacgaattatcaacctacgggatgaagaatctggtactgagagtgtataccctgatgttgatggctctgagggtgatgacacctataggatctaatggttctgatatctatataggcgctgagcgcttgcgtgaagtggatgaagactccatacaggatgacagtaacctttgaggatagagcagtcaagtgctatacttggataatgcactggatct

SEQ ID NO: 213042 - DNA, 488 bp, Glycine max
ggctccttgtaaagattgtgatgcactatatatgatgctgtatggactagtgcagatcataatgtcattcataccagatctccacaacatggcatgggtttcaattgttgcggccataatgtcctttacatactcatctattggacttggacttggcatcacaacagtaatagaaaatggaagaatgatgggtagcttaacacgagttccggcttcaaatattgctgacaagttatggttagtcttccaaggaattggtgatattgcctttgcctatccatacacagtcatgctgcttgagatacaggacactctagagtctcctccaccagaaaacaagaccatgaaaaaggcctccatgattgctatcctcattacgacattcttctacctatgctgtggatgctttggatatgcggcttttggaaatcaaacaccaggataccttttgacagggtttggatgtaccagccttactggctcattga

SEQ ID NO: 213043 - DNA, 523 bp, Glycine max
  unsure (1)..(523): unsure at all n locations
aatgggaaacagaagccactcatccaagttattgaaaattcaatattttatccattcatgaagagcctagaaatgctcatctgttgagctaattattttccctcctttcaagggccaccaaaaaaaattgaacgaagtttggaactccgatcacttttctcaaaaatgaataaaaacctcaaggtttgagggcaatagccaatccaaacctgggctttttatccagggccttggtgtcaatctcaccagaaacagtaaacactgactttggtatgatctcatgctgcaggagggccccaagctttccatgattgttgagccttgctttgacctgtgtcagagggtcaacagcaaaagaccctcctactgtaaaaatgttctcatttgttgagaactttctagtgatctctgcaacagcggcactcttcttcaatagatccagatgatggaggtatgatgctntaatgctgtcacccttgtcaccaaggattactgaagcagaagaatcaggtctcgtgacact

SEQ ID NO: 213044 - DNA, 508 bp, Glycine max
atcatccgcagctgctgttattttcaccgcaaacaaacagtgagccatggccgtcggaaagaacaagcgcatctccaaagggaaaaagggtggcaagaagaaggcagctgatccctttgccaagaaggattggtatgacattaaggccccttctctttttcaagtgaaaaatgttggcaaaacccttgtctctcgaacgcatggtaccgagattgcttctgaaggacttactcctagagtgcttgaggtcttcttggctgatcttcaaggggatgacgatcatgcattcatgaagatcacgttgagagctgacgatgtgcaagggacgaatgtcctgacagatttctggggaatggatttcacaactgacaagctgaggtcattgatgcgaaaataggctactgtaattgaagcccatgtggatgtgaagacgactgattgctacacattgaggatggtcagcattggatttaccaggagaagagctcaccaagtgaagagaacctgc

SEQ ID NO: 213045 - DNA, 422 bp, Glycine max
gaaaatacataataatataatgtgattatataagcaagcaaatctgattttgggttctgaacaaaacccatatatattacgcgccaaaaatgtcttctgattgtctaaacaaaactgtgtcactcggcttacacagaaacattggacacaagtttgtaacttcatttacaatgataacgtaggaaaaagaaaacctagaacaaactgaatgcatgatgaaatcaagctccaacaatgtcaggggggtcctctgccactatttcatcagcaggactgactaccttggcaccaacatcctgtgagtaagctcgatgaacctccatcagtttcccaagatcaaacttaggggctttcaggatcttgactttacgaacaaacacattctgcagagggtaaatactaaatgtcgccttctcaatctc

SEQ ID NO: 213046 - DNA, 346 bp, Glycine max
gatagctgtgtttcgcaccctaattgctttgtgtgtcattgcactgggacactttcccaccaaaataatggatgatgaatcactgttgaagcagggtgcttcaggttcaaccgagttagctattcagtacagaatccaaaagaaatctgtgattatagacgtaatgagaaatatctcaaggaggttaaagcttctatcatcaaaggaaacagcaaccgcagaaggctaagttatagttaacaattagtaattatttgcttgctgtcatgaatctccttccttcgacattctattctccatcttactggagagtataattttgattgaaattacctgtgttttcacc

SEQ ID NO: 213047 - DNA, 377 bp, Glycine max
atatatagaaactaagaatgaaaatgaatttttttattatactaaaatatagttatgatgtttctttttttactcctttttttctcattttacaataaatacatgtgtaaaataattaaatattaaaatataagtaagagtgtaattgataaaaaaaagtaatgaaattttaaactttacaaatgatagataaatgctaacaaaaatttgcgaaagaattcaacacctaatgcggagggggtgtacaaataaataaataacgaaatcctcttaagccgtatagactttagctagggtgaatttagtttaacttttgtaaaaaaattattattatttaaaaatatcaaatgcaatttttaaagatgcatgccttgttt

SEQ ID NO: 213048 - DNA, 483 bp, Glycine max
ctagtcggcgttcgtccttttttttttttttttgattttttataatgattttttaatgtactgattaaataaaggcacctttttcttaacgagattggtcttttctaaccacgaatgacttaagaccattttggagagcattcatgactgaattacaccttggttccatccttaaaatactcattataagccagggcaaccaaacccaacattgcaaatcttccattccacaattctgcatctgaggacatgaaccctttggacttaaactccacgctgatcccttggaagagtggaatcaaggaagcatgggtaaggaccacacttgttcccaagaaccatgggataccaccattggaatatttgtacaagcacaccttgccctttgggtacttacactggcattgcacccacaaacccaataatggccaaccttccatagatcctttcatgtgctgggccactgaacgcctacacatcaga

SEQ ID NO: 213049 - DNA, 553 bp, Glycine max
gtggccaagaatgctccccttttgttccaaaacacaaagctcatgacacgtttgacctacactctggatgagattgagggaccctttgaggtgtcttctgatggcactgtcaagtttgaggagaaagatggcattgactacgccgacgtgacagttcagctaccgggaggcgaacgtgtgccctttctcttcaccatcaagcagttggtggcatcagggaagccagatagctttagtggggagtttctagtcccatcctaccgtggaagctctttcttggaccccaagggaagaggtgcttccacaggttatgacaatgcagttgctttgcctgctggtggaagaggagatgaggaagaacttgccaaggaaaacaataaaagtgcctcatcatccaagggcaaaatcaccttgagtgtcaccaagaccaagcctgagacgggtgaggttatcggtgtgttcgagagtgttcaaccatctgacactgatttgggagcaaaggcttcaaaggatgtcaagatccagggcatctggtatgctcagcttgagtcat

SEQ ID NO: 213050 - DNA, 537 bp, Glycine max
  unsure (1)..(537): unsure at all n locations
ctccctctggtgaaaccacctttatggcgtaaatgttaacagcaggtgagtacagcaaccacagctggccgctgcagccagaaacaagcctgaccgagctgaacttgcccagagtgctctgcattctctcttccatgttagagaagctggtggctcgcaatgaaaagctcgttgatatcctgagccagcagctagatggactgaactgtggctcagtaagacttgggaacagcttgaatacatttcatggcgtaagagcaccaagcataagcatacctaagtacttggagaggatatacaagtacactaattgtagcccctcgtgttttgtggttggctatgtgtatatagacaggttaacacataggcaccctgattctcttgtcacttccttgaatgtgcacagattgctagttaccagtgtcatggtggcttccaagatgcttgatgatgaacattacaacaacgccgtatatgctcgagtaggaggaagtagcaatactgaattgaacaagcttgagtagangtactctttct

SEQ ID NO: 213051 - DNA, 393 bp, Glycine max
tttgtttttttttttgtttttttttttttttttttttttttttggttttttgttttttttttgttttttttttttatttttgtttcattttttttttttttgaggaaaaaaaatgcggtgcaaagcgtcccccgccccttaactggaagacggcggtgacgaacattttagtcgggggggcgtacaacgatcccccagggaggccgtttacaagatggagggaaaggggggccgggggggatggggacaagcccctggtggaggttgtaaaaaagactggggccaacgcgaaaagccagagccaaaaaatcttttggcgcacgggggggagtccgaatgccctggagcttggccagcttggggcgcttgaccgcccaaagagtggcaataggg

SEQ ID NO: 213052 - DNA, 404 bp, Glycine max
gtaactcgttcttcttctatttttgttttttgtttgtgtttgtttcttctctcacctgaaaatgtcttgctgcggaggtaactgtggttgcggaagctcctgcaagtgcggcaacggctgctgaggctgcaagatgtacccagacttgagctacactgagtcaaccaccaccgagaccttggtcatgggagtggcacctgttaaggctcaatttgagggtgctgaaatgggtgtgcccgctgagaacgatggctgcaaatgtggaccaaactgcttctgcaacccctgcacttgcaagtgatgtgctgggagatcaagcttcaagcacagattgcccttaattaggaataaagataaactattaatgtgtatcttacaacttatgtattatgtctgtgatggtt

SEQ ID NO: 213053 - DNA, 380 bp, Glycine max
gatagctgtgtttcgcaccctttttgctttgtgtgtcattgcactgggacactttcccaccaaaataatggatgatgaatcactgttgaagcagggtgcttcaggttcaaccgagttagctattcagtacagaatccaaaagaaatctgtgattatagacgtaatgagaaatatctcaaggaggttaaagcttctatcatcaaaggaaacagcaaccgcagaaggctaagttatagttaacaattagtaattatttgcttgctgtcatgaatctccttccttcgacattttattctccatcttactggagagtataattttgattgaaattacctgtgttttcaccaaataaaaaaagaaaagtaaatacatgaatgcgc

SEQ ID NO: 213054 - DNA, 386 bp, Glycine max
gatagctgtgtttcgcaccctaattgctttgtgtgtcattgcactgggacactttcccaccaaaataatggatgatgaatcactgttgaagcagggtgcttcaggttcaaccgagttagctattcagtacagaatccaaaagaaatctgtgattatagacgtaatgagaaatatctcaaggaggttaaagcttctatcatcaaaggaaacagcaaccgcagaaggctaagttatagttaacaattagtaattatttgcttgctgtcatgaatctccttccttcgacattttattctccatcttactggagagtataattttgattgaaattacctgtgttttcaccaaaaaaaaataaacaatgcttataattttaaagtatactt

SEQ ID NO: 213055 - DNA, 473 bp, Glycine max
acttactctatcaagtttcaacacgccaccctcttcttcttattcagattgtcataactgaggaagcttgtttgcatatataatagagaaaatggtattgttgttagtttattacaggtttgagtggttggttagtacttcgtagaagttagctggtaacaacacattagtaaatcttgactctatggaagactacaatttttctgttggtcaatagtgccctgatgtgaaagcattccggaatgctattaaagaagctgccattgcacagtattttgagcttcgtactattaaaagtgacctgattcgctactttgctaagtgtgcctcatatgggtgtccatggcggattcgtgcaggcaagctgccttatgccccaacatttactattagacgtattgatgggactcatacttgtgggagatatgcttacaatgggcaccatcatgcttctgttgactggattgtgagtt

SEQ ID NO: 213056 - DNA, 487 bp, Glycine max
accacattcacctgatgcttccaaagcaatggcttaccttgcagcatccactgctgctgcttcccttggcatgtcagaaatgcttggaaaccccatcaacttcagtggtgccacaaggccagctccatctgcttctagtcctgcctacttcaagactgaggctctttactccaaaaagaaggctacaccaacacctacaaaaaaagctgctgctgctgctcctgccaatgatgagcttgccaagtggtatggtcctgacagaatgatcttcttgcctgagggtctcttggaccgatccgaaatcccagagtacttgaccggacaagtccctgcagactatggttatgacccatttggtcttagcacgaagccagaagactttgtcaaatatcaggcatttgagttgattcatgccagatgggcaatgcttggtgctgctggattcatcattcccgaagccttcaacatatatggagcaaactgtggt

SEQ ID NO: 213057 - DNA, 430 bp, Glycine max
aattcggctcgaggaaatttagtgcccttttcagagtgtcaagagcacagtttccttatctagatttgtctcctctcttttcccaagttgtctctcactttggtgctaaccgtgtaatgtggggcagcgattttccatttgttgttgctgaatgtggttacaaaggagccaaagaagcagtgcatcttattgccagtgagatctctttgcctttatcagatttagagtggatcatggggaggacagctacacaactcttccaaaaccaattgactccagtcaatagttgagagtggggatgctgtttgagttgtataaaaagtttttagctgttatagtggaaattagatgttgaatacttgaatatcaatttacaattctgacagcattgaaaaacaacaattccctatggctccggtagcagttctat

SEQ ID NO: 213058 - DNA, 557 bp, Glycine max
  unsure (1)..(557): unsure at all n locations
aaaataagatgccactagtttccattgagagatatatagcatatacatatttggaataagaaacagtgagtcttctgtatgtgacccacaatcacaccctcctacatcactccaactaattactttgccttactttttcaacaaaaatagaatcgagagatttgaccatgatgcttttatgtggtagataattaattctacacacacagtcattagtcagtctaattatagttctcctaactagttagggaacttcctagtttgtgttcttggtttggatcttggcaaattccagggtctttttaccttgtaacttgattgttacatagtgtttactgtactctccatgattgtatattttatacttgcatgggtggttttcatccacaaactcaggcattggaccaagctccacttcatagctaggagcaaaaaatgtcacaattgagagtctagctttctcctcatgagccacagctctatgctccacactcctggatttcccatttgtaagaacttctattgggtctncaatgttgatgacaagagcatttgga

SEQ ID NO: 213059 - DNA, 478 bp, Glycine max
aaatgaagaagccgtgttgtgttgagttttagacaattgttggatcctgggaatgttggttcgacgatgcatgcatcgttgacatggattactttgtgaagaccctttcaagcatcaaacacaaaggtgtttgtgcagacttgattggtaccatcatcactcattatgcctccatatggatccctgacctctctttctctgctgaaaatggtgacaccactcacttacaatcccccgaaagcgtcacaaattcatggatgaagaagaggttctttgtggaaaccttggtgagtgttctgcctcctgagaaggattctgacccatgcaacttcctccttcgccttctcagaaccgtcaacatggctcgtgttgacgccacttatagaggtgagcttgagaaccggatttcgtggcagctatacccagtctttttttatagagctcatgattcccttcttcagccacacgtgtgggacac

SEQ ID NO: 213060 - DNA, 420 bp, Glycine max
tttgttctttttttttttttttttgaaacaaagcaacacaacacaatagcttattcattagttctcatccattaattaccattgaagtccgaacacagaaaccaaaaatacaggatgatgaaatctcaaaaggccaaacctaagggggaatgtagtctaagtacaaacaaacaaagtggggtggcggctacaaatgctttgcaaatttttcacacttagaagcctgggggcttgtaagcgatgaagctgatgcactgcacttggcgaacgttgtcgaatccgatgatacggatgaagtcgccggggtatgcagtctgagactcttgaagctacttcaataactgagaagcgtccatgcatccaagcataggcaggatccacatggtccaggggcgtccatcggaagatcctggcgacctg

SEQ ID NO: 213061 - DNA, 534 bp, Glycine max
  unsure (1)..(534): unsure at all n locations
gaataatcatattaaatattttttagaaaaaatggcccgatcatttatcaaaggccaatcttcggtagaagagaaggttcctttggaacacttatttctatttcagtataccgggtctctttctttcatttcaaaaaatttatagaatttcgattttgaaatgaaagaaaagtgtggggataaatataaatgacaaaaagatattggaacataatcttggaagagatgatggaagcaggagttcattttggccacggtactagaaaatggaatcctaaaatgtcaccttatatatctgcaaagcgtaagggtattcatattataaatcttattagaactgctcggtttttatcagaagcttgtgatttagtttttgatgcagcaagtgagggaaaacaattcttaattgttggtacaaaaaaaaaagcagcggatttagtagcacgggctgcaataagagctcggtgtcattatgttaataaaaagtggctcggcggtatgttaacgaattgtatactacangaacacgacttc

SEQ ID NO: 213062 - DNA, 560 bp, Glycine max
tttgtttttttttttgtctactttcattttttattttaaataccgcgactaatcacataaaatttgtgtttgttctttttatatttatattatttatatttttattttttgtacaatttattactagtatagtaatcgattccctaaaatctatgaacccctccaactaaatccaataatttttttattttattattaatcaagaatttcgtatatagctagaacggccctcacaaattgcaaatactaatttgttaagaattaatcgaattgaggctatagcatcatcattagctggaattgaaatatcggcgaggtccgggtcacaatttgtatcgattaaaaattgttggaatttccaaagttatacattctcgaagagccgtatattcttcttgttgatcgacgattattacaatatcaggtaaccccgtcatatatttaatgccgccaagatatgtttccaaatgagctaaatgtctcttcaatatagcggcatctctttttggaaaactattgagtctccccgtctttggtgcattctcagtccctgacttttg

SEQ ID NO: 213063 - DNA, 578 bp, Glycine max
gtgctgttctgttgcgtgaacttattgttgtgtgcatgttcattattgggcaccgatggattcagtttctgtgcaaatagcgacgtcaaaatttgttctttgccccgcggcgacggccagttctaagaagaatgccatcatcaatttcagttccaatttcaaaggaactctcaccaaaatccatgccatttccccaaatggctctgcctctagctgcacttcgcgtgtgtctgtgtcaagtttaaagacagacaagaacaaaggcagaagtaatcttgaatccctgttttgttatgataaggctattccagaagaaataattgagaaacctgttgggttatctttggaagagaaagctattggtaacaattcccgatgcactgattgccaggccaaaagtgctgtgctttgtgccacttgtgctggttctggtctatatgatgactccataatggatagccagggcataattgtttaagttcgttgcttaggttgctggggaacaggaaatatattgtgtgcagaatgtggctgacgaggtcatctgggaaccaaatgatcagtcttactttttggag

SEQ ID NO: 213064 - DNA, 547 bp, Glycine max
gctcagtgcatcaagatctctttctctgtaatcgaaaatgagcaagggaccgggtctctttaccgatatcggcaaaaaatccaaagatcttttgactaaggactacaactccgatcagaaactcaccatttcctcatacagcatctccggagtggccctcacttcaacatctgtcaagaaaggaggactctccactggggatgtggcagcactgtacaagtataagaacactattattgatgttaaactggacaccgcatcaactatctccacaaccctcacattcaatgacgttcttccatccaccaagactattgcttcatttaagctgcctgattataattctggcaagttagaggttcaatacttccatgaccatgctaccttaacaacagctgttgcactgaagcaatcccctgtcattgatgtttctgccactgttggtaccccaaccattgctttgggtgctgaagcaggctatgacacttcatctggtggttatacaaaatacactgctggaattagtgtcacgagacctgattcttct

SEQ ID NO: 213065 - DNA, 497 bp, Glycine max
aaaataacacacacttcacacatcattacgacaattaaataaaataatttttattagttaattattaattaatttatagatattatttgattttttttaatagatcgattactactaacctggatgacggctttaatgttttcatcagtcaagggaaattccgacgattccttttgaaacttgagaagaacatcaactagatcttccactgcttcacactcctcgttgctgctgcttctggttctatttttgtgttcgtcgatgatgtcttgcaataccctatctgtcactttatgcactttttcaagtttccccgaagcccccatcatctgaagcactctactagaagggtagagatcagcaacagaaaaccctcccataagcttcaactgtttatcaatgtttgatatgaacacttgttggtatctgctcttcttaccaaaagccgctcgtgccgctatcccaaaagtcaccgagtaaatgttctcggtgagatt

SEQ ID NO: 213066 - DNA, 319 bp, Glycine max
attgaatgaaccggggtgttgtaagacagagaaggtgcatggaaacacattcaagcaggagctaataaggtgctgatcactgctcctggtaaaggagatatccccacctacgtggcaggtgttaatgagtctgactacagacctgatgagctcatcatcggctaatgcctcttgcaccactaactgacacgcacgctgtgacaaggtccttgatcagaaattcggagtcattaggggtacacatgaccaccacttactcctacaccggagaccaatggcttcatgatgcgagccagcgtgacctgacgagagcaagggc

SEQ ID NO: 213067 - DNA, 493 bp, Glycine max
gctcctgtcacatttcctaacactgatggcatcaacccaggccagtatttcataatcaacttcaaattcttcaaatatagaataatgtatagcaagccaagtttttgatacaatgtaaccaaagaataaagcttggtttgaatgctaatatttgctctacctatttttctttctttggattttttctcatcagattcttgcacaaatgtaagaattgaagattgctatatagtttctggtgatgactgtgtggctgtaaagagtggatgggatgagtacggcataaaatttgggtggcccaccaaacagctaatgataagaaggctaacatgcatttcaccatacagtgcaaccattgccttgggaagtgagatgtcaggtggaatccaagatgtgagagctgaggacattacagcaatccaaacagaatcaggtgtcagaatcaagaatgctgatagtcactatgaccctaatgccttgcctgagataaaaa

SEQ ID NO: 213068 - DNA, 435 bp, Glycine max
aaacaatgaaatctaatgcacactgaaaacggtaacaacgctgacacattatagttgaggaggctgtgtataataccctgagtttcctcaaattacagactcctgtagggaattaagcccaaacacactttagactaaatgattagacacaggttgcccaagccaatggacatttggatccaaaagcaaatgacaattttggtcgggatttgtttttacccaacatctttatttggcttagacgttcttgctcctcctcctgtatctttattcgcatggcttcttccttctgtctttgcatactcttccagctctgtatatcgatcttactgccttctttgctgctctaaagcttcccttctctgagcttcttgaaccttcctacggttgtcctcaagcatcctttcaagatcttctttctatttacgggcttgc

SEQ ID NO: 213069 - DNA, 568 bp, Glycine max
  unsure (1)..(568): unsure at all n locations
cacatccgtttcgtgatgccaaattgcaagatttatatattcaagcatcaccatgccgtggagacaatttcaaacttattgtaaatttagatagaaacatactgcataggtagaaactcttgatttgcttgataagtctgctaaaaacattttatcgatgtaaaacttaagctaggaccatggtttcaactgttgggggttgaatctttagctgttggttgccatcttcaatctcccaaatttcaggtagcgcttgtttgatattatgaatgctgttcagggcatgatcagctccagggaccaaatctgaatggcccactaaaacagtgttaagtccagttatttttgcactttcaacatttctaacactgtcatcaaagaaaattgttttctttggatccacattagcaatccgaatagcagcttcaaaggcttccacagatggtntacagaggatttgtgggtgggaatcgaaacatccattttctgttaaatctgtgagcacattgatatcatttggtacatccatgcaattgatttgtttggaggataagcgttcaaagctatg

SEQ ID NO: 213070 - DNA, 548 bp, Glycine max
agtgttcaaatccatggatccttgagatccaaatggggatctcactctagctcaagaacatttaaatcctgtgatcgtatactacttacagacacgttgttaaagctaagcttgccctctacttgtgctgctcataacaaacaaaaatggaaccaagtggatggaactacctttattacatatagactaatttcagcaatcgcgtgcaaaggtatatgacccctattctttcagcatgcccatatttctgatccgagcatcactcctagagagcacattacctatcatacagcttagcgatcaaatattttgttcgctagagttcaacatctgcaatgctgtccaccaataaaaactcggtcttagtatcacttatgcagcagatagaagaacagactctgcaaatgaggcagagccattattaggtgctccctttatcttgagaatagaagtaatcaaattataaatctcaacattttcaaacgacggtatcttcctcctctagcaaatcgaggaccatgtccaatgaaaatagtcctcatggagaa

SEQ ID NO: 213071 - DNA, 498 bp, Glycine max
cagaaaaccagactaagaaggctgttatagttgtcatttcatcattggcatggatatatagcaacatattttacacgtatattttcaatttggaatagcttaagccactaaatgagtcactaacagcaccacttgagagcctaaatctttaaatctagctgacataacctatggccaatgtgtgagaactgagaagtaaatctttgctagtactctagcattttacatcattgcagataaaaggtacaaataccggttatgggattgcatgaaattcaatcctttttcttacacatatatagttaattatcacttaattataaggagatcatgtccactaggaaaaacacaaagcaaaaatgaatgataaatatgataatgactattattgtcatacgttaagtttgttcatctccctccttatggcattggccctcactaagctcccaatggtgttaatggccaatttcagatcctccaatggatgccaggcaccac

SEQ ID NO: 213072 - DNA, 514 bp, Glycine max
aagatacaatagagatggcaattctatttttgaaacaggcaaagcaatacgcagatgcaagaccaagctatcctccacaactcttccaattcattgcttccaagactccctctcactacctcgcttgggacgtcggcactgggagcggccaagctgccaaatctttagctgcaatatacaagaatgtgatagccacagatgctagtgacaaacaacttgaatttgcagccaagctcccaaatgtgagataccaacacaccccttcaaccatgtcgacggccgagcttgaacaaatggtggcatctgagggaaccatagaccttgtgaccatagcacaagccctgcattggtttgaccgcccaaccttctacgaacaagtgaagtgggttctcaggaaacctcatggaatcattgctgcttggtggtactatttgccaagagttagtgatgcatttgacactgtctttgaccaattctattccactaatgtaagccccttattgggacccagctc

SEQ ID NO: 213073 - DNA, 535 bp, Glycine max
gacttcttaacatgaacgcaattcaataaaattacattattcaatcaatggataaactcataaaagttggtactcgtcacatctcccacacagtaaaagcaaccatttgcatatatctttaggaatcccctgttcttccaattctcaaataaattggaaacttggcaacttttttagcatcttcaccccaagcaagcttgaatttttcaacaacatcctccgtgagaagctccactcctttctccttagccgtctgatatgctgaccatgatcttatgtaggtcaagaaatcatccaaatccatcattgtttccgtcacaaactcaaagggtcctgtgtgatcagctccatccacgggctcaaatggaaaatcaatgcttctataattgtcatcaacccatttacgagctgggtcccaataagggcttacattagtggaatagaattggtcaaagacagtgtcaaatgcatcactaactcttggcaaatagtaacaccaagcagcaatgattccatgaggttcctgagaacccac

SEQ ID NO: 213074 - DNA, 460 bp, Glycine max
ccaagatctgtgcttgaacctttacttgtgtttccttgcttcatgcagacgagcttgaccttgcgccgaagggccacagatggttgaaaccgatatggatgccgaaactgatgcaaatgtggttccaccaaaggagactccaaacagtgttcccatctcttatcattcctcacactcacaccctcctcttaatgagaggattattacatccatgaccagaagatctgttgctgcacacccgtggcacgaccttgagatagggcctggtgctccaacgatcttcaattgtgtgattgacattgggaaagggagcaaggtgaaatatgaactggacaaaaaatctgggattatcaagatcgaccgtgtgctttactcatgaagtgtgtattctcacaattatggcgttattccacgtactatttgtgaggacagtgatcccctggatggcttgattattatg

SEQ ID NO: 213075 - DNA, 533 bp, Glycine max
gacttcttaacatgaacgcaattcaataaaattacattattcaatcaatggataaactcataaaagttggtactcgtcacatctcccacacagtaaaagcaaccatttgcatatatctttaggaatcccctgttcttccaattctcaaataaattggaaacttggcaacttttttagcatcttcaccccaagcaagcttgaatttttcaacaacatcctccgtgagaagctccactcctttctccttagccgtctgatatgctgaccatgatcttatgtaggtcaagaaatcatccaaatccatcattgtttccgtcacaaactcaaagggtcctgtgtgatcagctccatccacgggctcaaatggaaaatcaatgcttctataattgtcatcaacccatttacgagctgggtcccaataagggcttacattagtggaatagaattggtcaaagacagtgtcaaatgcatcactaactcttggcaatagtaacaccaagcagcaatgattccatgagtttcctgagaaccca

SEQ ID NO: 213076 - DNA, 252 bp, Glycine max
gtggcctataatgctcccctatatttccacaacacatagctcatgacacgtctgaccgacactctggatgagagtgagggaccctttgaggtgtcttctgatggcactgtcaagtctgcagggaaggatggcacttgactacgccagcgtgacagttgagacaccgggaggcgaacgtgcgccctgtcgtgtgaccatcaagcaggaggatggccttagggaagaccatacagctttagtggggaggtttct

SEQ ID NO: 213077 - DNA, 417 bp, Glycine max
ctggctttgaatgaaccactataatggcataacagaaaacagatgacacgtacgagctacactgtggatcagagtgacggaccataagacgggtcgaccgaaggcactgcaaagtgcgatgagaacgaatgtataggctacacaagctggacactccaaatgccgaggaggcgaacgtgtgcgatttatcatcaccatcgactgaacggtggcataatgggacccagatacctctagagtacatgttatagtgccagactaccgaggaagctcttacttgaaccctaagggaagatgtgcttgcacacgaaatgacaatgcacgtgctttgcctgctggtgtgagagtatatgcaggataacactgtcgggcaaacaatcaatgggccctatcatgcatgggcacaaatagcttgag

SEQ ID NO: 213078 - DNA, 543 bp, Glycine max
  unsure (1)..(543): unsure at all n locations
gaaaaacaataaaaattcctttcttttccaactaaaaacaccacaagtacattgcttttcatttgaaagctaacatttcaccaaaacaatactacattgtaattgtaaaaaaatccaatcaaaagaataaaagcagagactaccttaatatagttaaatccatattttgaagaagatgcatgcacttaaagccagtgtagtagatttaatagtatgagagcttggcaatctgcccttgtccttccttaagaaaaggccttggtatattgggaaattgatgagaaccaaaaacccacacaatagaacttgcaatgccattttctcaccagtcaaagcaactttgcaaaggactaactcntttatagtggctagtaagcaaaacaaatggagtaatgcaagtgttgctagtacagtgaaaaatggagaagaggttccaaactccatgacctcgttcttgtaacgttgggaaacatcatcatcttctacaatcttagttgtgacagcanaggatgaatatgaacgtccaaagaatttccagacaat

SEQ ID NO: 213079 - DNA, 521 bp, Glycine max
attaaagttacactgtattatagacgtaaagaaactacaaatttttacactaaaaacagtttctcttttatacatactctctgttgtcatttgtcaacactacaaaaaatgaaaaagtaaggtagaatctttaatcattcacaaatatggagcaggctgcagagggcattctgtattctaagataatacatatgaaagatgttacatatataggctattcaaacagtggctggtactggagttgaaggagcaacacggttttcagctggaatttcaacaaactcagacaatatagcacggaattcatctccgctcagagtctccttctccagaaggacttccacaatcttgtcaatggcctcacggttgttccttatatgctccagtgcaatttcatatgcttcatctgagatcctcttgatggcagcatcaatgtcttctgcaagcctctctgacattgagttccttgccatcattctcatgatgacatccccaccttgtgctgatggttccataagtga

SEQ ID NO: 213080 - DNA, 558 bp, Glycine max
gaaagtaaagcttacaggtttttatttttgaaatacatgaaaaacattagtataagaaaagtgtgtgacaatacaagaaaacataaaaaagaactaagtagaactggagcatgtttatggtttagtatgttcagtctttcatctctgtgtgtgtctgtggtgacattgaagatgacctcgatgacattgcaagctccttggcaacctgttccatggtagggcgagatcgtgggctttcagtcaagcaagcaattgctatcttcacaattgatatcacctccttatcaatagggcttgttgggtgtggaagacgttcgtccaatttaaccatcaatgacatatgatcaagtgttgaggtcatagtggacgaagatgatagcaatagagaagatgtaacatcaccagggtgctctccaaacaatatttccaacgcaaagaccccaaaactatacacatcacatttctcatttgcttccattgtgtatgcaagttcaggagcagcatatccataggttcctgcaatgaggtccaattggatgaatctggattaagaaactt

SEQ ID NO: 213081 - DNA, 493 bp, Glycine max
gtagtgtgcaaaagaaaactcttgctccttgattctgttccaatgcctcccgtaccaatttcccccatcaaagttgggcacattgatgatgtccaagagctaagaaaaaccaagccaaggacaattcctcaaagatttgtacgagacttgacagaaagaccaacactcactacacctcttcccccaccacatagtgacatgccagtcattgatttctctaagcttagcaaagggaacaaagaggaagtcctcactgaacttttcaatcttgcaactgcttgtgaagagtggggattttttcaggtaattaatcatgaaattgacctcaatctgctggagagcatcgagaacctgagcagggagttttttcatgctacctttggaagagaaacagaaataccctatggctccaggaacagtccaagggtatggacaagctattggtttcttagaggaccaaaaactggactggtgcaacatgtttgctcttgga

SEQ ID NO: 213082 - DNA, 425 bp, Glycine max
ttttttttttttttttttttttttttttttttttttttttttttttttttttttttttttttttttttttttttttttttttttttttttttaaaaaggggggaaaaaagggaaaaaaaaaaaaaaggaaaaaaaaaaaaaatcccccataaacgggaaaaaaatttttaaaccccaaaaaaaggcccccccctttaaaaaaagggggggggaaaaaggggttggaaaaaaaggggggggcgccccccccaagaaccccctaaaaaaggaaaaggggaaaaaaaacccccggggaaaaaaaagccccggtttttggggcccttgaggaaaccaatttggcaaccaaaaaggggaaaaaggggccccaaaaaaaagggggggcccccaagggggaaaaacccggggaaaaagggggggcacaattt

SEQ ID NO: 213083 - DNA, 502 bp, Glycine max
aagatacaatagagatggcaattctatttttgaaacaggcaaagcaatacgcagatgcaagaccaagctatcctccacaactcttccaattcattgctttcaagactccctctcactacctcgcttgggacgtcggcactgggagcggccaagctgccaaatctttagctgcaatatacaagaatgtgatagccacagatgctagtgacaaacaacttgaatttgcagccaagctcccaaatgtgagataccaacacaccccttcaaccatgtcgacggccgagcttgaacaaatggtggcatttgaaggaaccatagaccttgtgaccatagcacaagccctgcattggtttgaccgcccaaccttctacgaacaagtgaagtgggttctcacgaaacctcatggaatcattgctgcttggtgttactatatgccaagagttagtgatgcatttgacactgtctttgaccaattctatttcactaatgtaagcccttattg

SEQ ID NO: 213084 - DNA, 412 bp, Glycine max
gaataatcatattaaatattattcagaaacaatggcccgatcatttatcaaaggccaatcttttgtagaagagaaggttcctttggaacacttatttctatttcagtataccgggtctctttgtttcatttcaaaatattcatagaattccgattttgaaatgaaagaaaagtgtggggataaatataaatgacaaaaagatattggaacataatcttggaagagatgatggaagcaggagttcattttggccacggtactagaaaatggaatcctaaaatgtcaccttatatatctgcaaagcgtaagggtattcatattataaatcttattagaactgctcggattttatcagaagcttgtgatttagcttttgatgcagcaagtgagggaaaacaattcttaattgttg

SEQ ID NO: 213085 - DNA, 422 bp, Glycine max
gcataatattcttaagtgctatcttgaaatatcgcctgcatcatgaatctcctgccggtcatgttgataaaaggccggttctttgtatcacacattaatcttataaacctccatgcctcttggctgaatatccttaaccttatagactttgcaatggagactgatatactggtgtggtgatccatatggatgacatagagaatggattatatactatggtagaacatgcagtaaactggagaggatctggtgctctatgcttaaaaatggtatcctatggcgtcacctcatatctctgactggcgtcaagtgcttcatatgataaaccttattatcaactgttaggctactagcacaagctcgagctctagtcttggatgcaacttgagagggaatactattcttaattgatggcacagaaa

SEQ ID NO: 213086 - DNA, 543 bp, Glycine max
aagcattataatcgaagtcaatataatatacacacgtgataacgctctgagtgcttcgccaactgggggagttacaagaaagtagaaatacagcattaagaaaaagggtctatgagtcaagctgagcataccagatgccttggatcttaacatccttaggagctttagcccccaaatcagtatcagaaggctgaacactctcgaagaccccaataacctcaccagtctcaggcttggtcttggtgacactcaaggtgattttgcccttggaagaagaagcactcttgttgttctctttagcaagttcctcttcatctgctctgccaccagcaggcaaagcaacagcattgtcataaccagttgaggcaccccttcccttggggtccaagaaagaggaaccacggtaagaaggcactaggaactccccactgaagctgtctggcttcacagatgccaccaactgcttaatggtaaagaggaatggcacacgctctccctcggaagctgacagtgacagagcatagtcattccggcttctcctcg

SEQ ID NO: 213087 - DNA, 428 bp, Glycine max
aataaagctccaacaattttattaatgaaaatactttacaatttcagcacatatacactgccatgaatataattttgcacgctataattatctttcgccacaaacaatggagtagtgctcaacaaagcacaaaccaacaataataacagttttagttgcattaatttacacaagaaagtaaattaacgtaataggcaacacatgtgtgtcacgttcatgaggatcattttataatgatatgcaacattgaattaaatattctcatgcaatggagcattctggaggaaggccttgagggaaacgtctgatatcagtgcaataattgtaaatcatgtaattcttttgcacccaacggatctttgcctgccccgtggcgtccagtgattggccagtggaggaagaagtttgggaattgaagtttctgtatg

SEQ ID NO: 213088 - DNA, 532 bp, Glycine max
agtaaaggacaaatcttattgatcaatgtttacatgctttcatcatatattgctgcaaaggtagtagttgtggcaaatgacatggtactatcatggttgtctgaagaagaggttgtatacatagatgaattcttcatatcaatactactttcttcgttccttctaactttaaggtccataaaatcagaaattaaggcaggacctgttatcttactgtcattaacatccatttttccagtgagcatcttgaccacagaagacatcgatggccggagcttcggggattcttgagtgcaaagaaggctaatcttcagaaacttacaagcctgctcagcatcgaattccccgtttagtgatatatccaccagttcaaccaattcctttcgctcataaaggtcccatgtcctctccagaagaaattgttcttctattggtaatcgtgagtttatgttacatcttccactgataatttccgcatggaggacgccaaagctgtaaatgtctgctatccttgttagcttcccccctatcg

SEQ ID NO: 213089 - DNA, 433 bp, Glycine max
gcgaaaacatttttctgttcatattttattcgtaatattgctaggagaatttacattatcaaatacaacaaatgatgtgagttgaactacaatcgatacctatacaaatttactattaaggaggtgcaaatgaacagagaagacatcttcagaagaaaggaataccaaagactagcttccaccacatgaacaaactgcactgaatttacttccctgtcaagctagagttgccctcttgccttttgtatcccttgactgggcagcaaccgatctttttgaatccaggaactggtgatatatattggagagtcttctcttctcttcttctgaaacagatggtctagccttggatgctgtgaacttcagaagagcatcagtaataactgggtgttttttctggcctagaggcatccacactgtccagaacatcatg

SEQ ID NO: 213090 - DNA, 445 bp, Glycine max
ggtcaccgttgttcaggttgttttcaggcatattgactgtgctagtgcgtataagaatcaagcttatgtaataatattgttgacaacggttatataattatgggttttttttctcttttttaattacttttctttatactatttggcttttctcaactataagaattataagatgccaattgttgtttatttccccaatttattggtgttgctagtacgttatatgattttgtatcgcaaaatagctagaatacagtagtttttatgctagccaatcgacattatatatttttaattgtggtctttatagattggttctgctcttaagaagctttatgatgatggtgtggtgaagcgtgaggacttatggatcacttgcaaactctgggttgttgacttttagtcattgtgatctcttttagcatattgagatagattgactgtg

SEQ ID NO: 213091 - DNA, 490 bp, Glycine max
ggacacaaggaatttaatcaatttatacacaactttagtacacaagttgtggttcaaactctgccaaatctacagaccctgactcaattggaggcattagatatgtagccaagagtttagaacaccaaggcagcaaccagtgggatcctctttaagttcttcaccaccgctatgtcatcgctctcaccaacagcaacaagcttctcatttatctccaccatccggtccaacttccgcttgaactctgggttttcaacatcaagaacggctgggaaaatccgagcagttgtgcggtttgtctcgataatgacatgcatgtcaaattcttttgtgttaagtccaatgccttcgtagaaagctgtacgttggcaatcattgagatacattgtgacataaaccgatagacagaagaatcgagaccacaactttgccttccagtcatttagaaattgtggctgtgccttcatcagggcagagaagaaatctccat

SEQ ID NO: 213092 - DNA, 507 bp, Glycine max
ggtcactgacggtcaaggaggtttcaggcatattgactgtgctagtgcgtataagagtcaagctgaggtaataatattgttgacaacggttatataattatgggtatatattctcttttttaattactttttttataatactaggcttctctcaactatcagaattaaaagatgccaatcgttgtttatttccccaatttattggtgttgctagtacgttatatgattttgatttgcaaaatagctagaaaacagtaatttttttgctagccaattgacattttatttttttaattgtggtttttatagattggttctgctcttaagaagccttttgatgatggtgtggtgaagcgtgaagacttatggatcactttcaaactctggtttgctgtctttagtaattgtgatctcttattgaatattgagaaagattgtatgtgttttgaccagtttggatgctgaatgaatgatcctttgatttgttggctatatttttaggtgttc

SEQ ID NO: 213093 - DNA, 498 bp, Glycine max
ggacacaaggaatttaatcaatttatacacaactttagtacacaagttgtggttcaaactctgccaaatctacagaccctgactcaattggaggcattagatatgtagccaagagttcaaacaccaaggcagcaaccagtgggatcctctttaagttcttcaccaccgctatgtcatcgctctcaccaacagcaacaagcttctcatttatctccaccatccggtccaacttccgcttgaactctgggttttcaacatcaagaacggctgggaaaatccgagcagttgtgcggtttgtctcgataatgacatgcatgtcaaattcttttgtgttaagtccaatgccttcgtagaaagctgtacgttggcaatcattgagatacattgtgacataaaccgatagacagaagaatcgagaccacaactttgccttccagtcatttagaaattgtggctgtgccttcatcagggcagagaagaaatctccatgtctgttct

SEQ ID NO: 213094 - DNA, 472 bp, Glycine max
aaaatatcacacagtttacacattattccgactatcaaaagaggtgaggcaatttccaaatggactgtgcgttcttgacatgatggtcatgtgtaaaatcctttattgaagtaatcaggcgaacgccactacagataacacaaattccagatcagtgctaggattgcctagttccagaagatctgtcaataacctgaggaacagatctagctggcataagagtattaccagcaatgtcaaaatcttgagaacttcccaagagattatccaaaactgttgactgtgagggattgtcaatgaggaagctcagagtgccatgaacattgatttgcccacgtggaactccacattacaaaaccatgatgaggaccacatacgtatattgggaagatcaattgcgatgaatgaggattcgagcttgtgcagttacatgagtctgaatgctctgtacatgtgctgtgtgtaaaaacac

SEQ ID NO: 213095 - DNA, 452 bp, Glycine max
gtacaataataaatccatattcttataattaaaagtagtagattacagcgatgcacttgagaaacatattaagtggactaattctccctggtcaagcatgaaaaaaaccagctatgacccaaggtagagagagattatacacagaatactagtaattaactaagactggctctgcaattgccaaaaactccattgcagtagcagccacctgagaagacactaagacctagactagaccatacatagtgaagattaatacccttacataacaacataggacactaagaaaacacggcttcacagagaatcccagtcgatctcataagaggggtacttctggagattaaaattatccgaatcaccttcccactgcggctcgctgacgtcagcgaaagtcagaaccgaaagcggcgaagaaccttcagatgaggatgaagcagcttcgaccttac

SEQ ID NO: 213096 - DNA, 506 bp, Glycine max
aacgaaataattttgatatgtagattaaataaacacacgaagtacaaataaacattggtctctctaatcacaaaggagattaagtccattgtggtgtgccttcatgactgaattataccaaagtactacccttaacatactcagtaaaagccagagcaatcaaacccaacatagcaaatctcccattccacagttctgcatctgaggacatgaaccctttggacttagactccacgctgacaccttggaagagtggaatcaaggaagcaagggtaaggaccacacttgtccccaagaaccatgggatgccaccattggatatttgttctaacacaccttgccctttggctacttccactgccattgcagccacaaacccaatcatggccaaccttccattgatcctctcaggtgctggcccactgaatgccaacacatcagaaaacttagtgctcacctttggtgaaagagcagagactggctgtggcttgggttctactgatggt

SEQ ID NO: 213097 - DNA, 504 bp, Glycine max
aacgaaataattttgatatgtagattaaataaacacacgaagtacaaataaacattggtctctctaatcacaaaggagattaagtccattgtggtgtgccttcatgactgaattataccaaagtactacccttaacatactcagtaaaagccagagcaatcaaacccaacatagcaaatctcccattccacagttctgcatctgaggacatgaaccctttggacttagactccacgctgacaccttggaagagtggaatcaaggaagcaagggtaaggaccacacttgtccccaagaaccatgggatgccaccattggatatttgttctaacacaccttgccctttggctacttccactgccattgcagccacaaacccaatcatggccaaccttccattgatcctctcaggtgctggcccactgaatgccaacacatcagaaaacttagtgctcacctttggtgaaggagcagagactggctgtggcttgggttctactgatg

SEQ ID NO: 213098 - DNA, 542 bp, Glycine max
ggaatgttataggaggagcatttcacgttagcaagaagtgagacttttgccattagagtgtcatacgcagcaaacatggctctttttgttgccaaagtttatgcatcaatcataagtggttccctagccatcattgcattcacgttagactcacttcttgacctcctttctggattcatcctctggttcactgcattttccatgcaaacaccaaacccatatcagtgccctataggaaagaaacggatgcaaccattgggaattcttgatgttgcctctgatatggcgacacttggactgcagataatcttggagtctacccgcacattaatatcttctgaaaatgcattcaacttgaccagggaacaagagcgctgggttgtgagcattatgctttcaatgactttggtgaaattcctgctgatgatgtattgtcgatcttttaccaatgagattattaaagcctatgcccaggatcactttcttgatgtgatcactaatgtcattggccttaatgctgcacttttggcaaacaatgttga

SEQ ID NO: 213099 - DNA, 475 bp, Glycine max
  unsure (1)..(475): unsure at all n locations
aaaacaaaaacaaaataccatatacgaaggttttgccgaagagccagcactcagcacagctagccagttttagcgttgcatttacaggtaaaggacaatcaaagaattaaatactttttaattaaaagaaacatggagagaacttacaccataatccgtgacacattttaaaaccccaaacactaacatagagagcacataaaaccacacaacaaaattatgggaattcccacatcatgaactgaaatcagatgcaacaaactccagtcaaccaccagacccggcaaaacaccaatcaagtgacatcatcagcaagggagatgctatctgcttccctgtatatatgcatttgctccataatggaattgagacaatctttgactaagcagcaagaactatgatcacgatgagaagcacaatcccaaanatcaccaaaagcaagcatgtcaaagaggaatttgatctttgggttttt

SEQ ID NO: 213100 - DNA, 499 bp, Glycine max
agaaaggaagggaccagtatattgaattgtgacagaagccaaatagcaaccaccacgtgaatcaactcaaatgtactacaacttggaaatcactaacttattggaaaagctttgattacgcactgcagcttcaataagacttctcgcatcaatccctttctcgtgaaaatatgttttaacaccaaaaataatgttgcaactaaactgaattttaaatttgagcagaagtaacccttcatttgtaagcagctttcactgctttctgagcagcatcatctaaatcttcagccgttatcaacgccataccactttccttcaaaattctttttccatgatctaacattggtgccttccagacgaactactacgggtactttcagtgcaacctcttttgcagcattcactattccacttgctataacatcacacttcattatacccccaaaaatgttaaccaaaattgccttcactttgtcatcagcagtcaatattttaaatg

SEQ ID NO: 213101 - DNA, 459 bp, Glycine max
actggttcattttccattttttagttattccgatattcggacgcatcaacttgttatgaaatcacattgatagcctctactcgtcctagctcgtctaagagctagatttgcctcaattgtttggctcttgccttccgccttattcaaattagcttctgctatttcaagagtttgctgggcttcttggggatcaatggcactacccttttccgcatcatttactaaaacagggatctcattattggttattctagcaaaaccgcccatcagagccatcgttaaccattggtctttaagaagacgtattctcaaaatacctatatctacggctgtggcaataggcgcatgatttggtaatactccaatttgcccgctattagtagataaaatgatttccttcacttccgaatcccaaacaattcgattgggggtcagtacacaaagatttaaaggcctttc

SEQ ID NO: 213102 - DNA, 554 bp, Glycine max
aactcgagaagagtcactgattaaaggtgttataaaatcagtttttagataactatacatataaaatactatataactctaaaactgattcggattctatagtgatcttcaccctataaatagaatacagagagtaggtagattgtgacttactttattggtatattaacaaatacttatcaagaaaactccctgctttaaacatctagtcatattaatctaaccatagcatcgaattggatcattgcatcccttagaagcagattgcttggaaccaaatctccctcctttctcaaggtactgttgatggtattcttcagccctgtagaacttcttggcaggaaggatctcagtaacaatcttcctgttcagcttcttctgttgttgttctaaagactctatggctgccttctcttgttcaggtgtgtaatagtatattccagacctgtattgtgttcccacatcatttccctgccgattcagtgtggtaggatcatgtctagcccagaacacatcaagcaaactctcatagctacatacatggggatcatatt

SEQ ID NO: 213103 - DNA, 464 bp, Glycine max
aagaaaaaagaaagttctaattattaataaattatatctatatatatatatatacagatagatattctatatcttttatcttaattaatatttgacccctccttataatgtgttatagttttctttattttttaggaacttatccattccttttttaatgtgcccgacaatccgaaagaattctgggggaggggtcatttcgtttttgatctagaataaatagagcttcaagaaatgagagaattaagaatacccacgagaaacactaatccaatccataatgatgtaccggaaaatacaacatttttgttattcgaccaaccttcaggagaagcaaatacaacaggtacactaatcaataaaataaatgaaatagcaattaatgcaaaaacagctaattggaaagcaatagtcatgtttctaatccttcaatttaccaacaaaagaactttaccatttgatcc

SEQ ID NO: 213104 - DNA, 407 bp, Glycine max
agctgctgctggtgcagcactttccatgggctcccacttatacaaagggatgcagatgacctttatcattgcgagtcactgccaccctcaggccattgataggtgcaagacgagggctgatggaatgcatctgacagtaggtactgcagatcttaaggacatcgattacaagtctggggatgtatgtggtgagctcgtgcagaaccatgtcactgaacgagatgttaaccactatggggagtatgtgaagaaggctcatgctcatgaggtgatagttgttatggcaagagatttggtggcactgactgtgttgaagcctcctggtgagtgcggggcctaaatgtgaagctggatcagctcacagtttgtggtgccaatggggaatggatggccatatgcaaattgct

SEQ ID NO: 213105 - DNA, 497 bp, Glycine max
  unsure (1)..(497): unsure at all n locations
gatcacaacaaaattttaattaaaaattcgaactaaaatgtaagacttttaaacataaacgcacaaccattgtataggggggaaaaaacaaaacgctttgatttgaagcggacaatttttcccatttacattggatcactatcgcctaaataaatgactccatgaagcacatttgcagcagcacaaaatgcacagccgctgccttttattaatccatagatgccatcatacacagcactgcattactaaccatgacgttcaaacttcaggggctgaccaacttaagagagtttgccttctcttgcagagaatccaggaggctgtcaaagctcttcttaaacgagtccactccttcaagttcaagctgggaaccaacaaagcttcagtcaatacccaatttctggagagcattgnatattccttcagcttcagatgcctttgagtctattggcctggatacggtcccatgatcaataaatgcttgaagggcttgggct

SEQ ID NO: 213106 - DNA, 356 bp, Glycine max
aactgctgctgttgtcacactttccaagctcctcaacatctaaagggggaacaataggacctttataattgcgagtaactggcacccgtcaaccatggatatgatctgaacatgggctaatgcgattgaactgaacgacggaactgcagagcttactgacattgatgacaggcatggagatgttagaggtgagctagtgcagtaccctggcactgcaggagaggatgaggactatggggagcttgtgaagaaggctcatgctcatgacagtgaacgttgttatggcaagagattcgctggcactgactgacatggagcctggcggagagttctaggcagatattggtggaggatca

SEQ ID NO: 213107 - DNA, 508 bp, Glycine max
aagtggacactttaactcaaaattatagaggaagacagtccaatatgaaaaatatagtaaaatcatctcaaacttggcatcttctctttgcacctaagacattgagaattctaagaatgttacacgcaagtcccatcacaacttctagcacttggatcagcacaaccttcaggaacagaaatatttacttgccaagtttgctttgcctccaattcaagattggaagaaagttcccctgttaatagcatcctcgttagcatttccaagtgcagcctcgttcaagtacttgtcagccaattggactctcttgacattctcttgttcttggacaagcatgttaccatacgtcaagagcttctccagagtcatcttgggctgctcaaaggttggaggtccatcttttgagttcacaagcttcttcccaatgccgtcaacaccaacaccagaaatccacttcctcacttcgtcatcatatactctggccctcagtgcaccaaagaaatcaatg

SEQ ID NO: 213108 - DNA, 441 bp, Glycine max
gaggctgattcagcttcagtgttattggaaggaacttttccctttgggcttgatgaatcatgtgcaggctcagttggatcaaaagtttgatcattcaattgagtagccttctcttgttgcttttgttcagccctccatgttcttaattcatgttctacagctaactttccttcattggccttttcggaattcccagttgcaattttcagagattctcttcttacagacaactcctcattcaggtcttctaacttctccaggcttcttaattcagacttccttgctatctgaatctgataagtagcagcttcgatcctcgcattggcttgctcctctgccttataggctctactgctgagctcatgatattcttctagtgtgagtgtcaccattgaggaatagtccttgtcatttttgttgcccttagctgattcactcttc

SEQ ID NO: 213109 - DNA, 520 bp, Glycine max
agagcttcaaataatagcagttttatattgtcttccctaccaacaggttatacataaaaacggaaacaaaccagaatcagttttatagaacagtaatagaaactagatctagccggaacaaaaccatcccctcaaaagagacaatcatcaaccggcaacaggaagttgcagcttggtatccatcttcttgtctaaagccaccgtaatacaccacacccaagttcaaattcacatatcatgttgggcaaactcctcctcctcctcttcctcttcatactcatcctcatcagcagtggcatactggtactgctgatactccgacacgagatcgttcatgttgctctcagcctctgtgaactccatctcgtccatgccttccccggtataccaatgcaagaaagccttcctcctaaacatagcagtgaattgctcactcactctacggaacatttactgaatggaggtagagttaccaatgaatgttgaagccatcttcaagccagttgggggaatgtcacag

SEQ ID NO: 213110 - DNA, 482 bp, Glycine max
agagcttcaaataatagcagttttatattgtcttccctaccaacaggttatacataaaaacggaaacaaaccagaatcagttttatagaacagtaatagaaactagatctagccggaacaaaaccatcccctcaaaagagacaatcatcaaccggcaacaggaagttgcagcttgttatccatcttcttgtctaaagccaccgcaatgcagcacacccaagctgaaattcacatatcatgttgggcaaactcctcctcctcctcttcctgttcatactcatcctcatcagcagtggcatcctggtactgctgatactccgacacgagatcgttcatgttgctctcagcctctgtgaactccatctcgtccatgccttccccggtataccaatgcaagaaagccttcctcctaaacatagcagtgaattgctcactcactctacggaacatttcctgaatggaggtagagttaccaatgaatg

SEQ ID NO: 213111 - DNA, 542 bp, Glycine max
gaattaaaaattctgatcgcatattaaattcccaagtcgtattcaaatccttatcaataaaaccatgaagccaaattaaaatatttctagtacacacccaaaaattcttcaaaagaaacttccgggaatctagcacgaccaaaatcataaattaatgaaattctaacccatcgataattaaatttgatgggaattatgatgtagcagtagcacacgtctcaccattaaaatcaaaataccaggtcaaagtttcaagtaacttaggacagaacgtaaaaaaaaactagataaaatgagtagatagctcggtacattaagtcacttagcacttgacctcctttaaggcatatgcaaagtacaggaatgttggatcagcagcgccgtccttgtagtaggcaaagaccaagcaagcatcatcacccatgctctcaccaacaaaaaattggaaatctttaatcttagagagcaggtatttagttgctccctcgatggtgctcttaaacaactcctggtgctctgcatcgagcttgggagtcaaattc

SEQ ID NO: 213112 - DNA, 395 bp, Glycine max
ttgggaataagctcgtgaatatagaagatggacctccaacctttgagcagcccaagatgactcttgagaagctcttgaggtatggtaacatgcttgttcaggagcaacagagtgccaagagagtccaattggctgacaagtgcttgaacgaggctgcacttggaaatgctaacgaggatgctattaacaggggaacttggttccgatcttgaattggaggcacagcacacttggcaagtcaatatttctgttcctgaaggttgtgctgatccaagtgctagaagttgcgatgggacttgcgtgtcacattcttagaattctgaatgacttatgtgctaagatgaagaagccacgtatgagaagattctactatatgaaccatattggactgtctt

SEQ ID NO: 213113 - DNA, 492 bp, Glycine max
aaaccaaaagcatatcttttattacattagaaagcgcaactgtacaagagaaacagagaaaatcctagctaatgaacaccatgataaactctactaccagtcacattcttctcatagttatcattaaaggtatttacatggccccgcatgcaagccttaccgtcacaagcacataaacacattactccattaatacatcacacggtactttatttgaaaatgaatcttttactctgtgcctgcaaggactgctgacccttccaccttgaagaatgcaccccagatttcctcttcctcagcaggtattgcagtaatcttattctttggattctcatagcatctcaatcctccaactgctgtagagtagaaacacccttgagggaaagaagcaagtgacttgccacaagaacctttaagcaaatctgcatcatcagcaaatgctacatatccatcagctgtgattccccaataaagaggaaccttaccagcttg

SEQ ID NO: 213114 - DNA, 485 bp, Glycine max
gtgagattaagctagagaacataaaagatggacctacaacctttgagcagtccaagatgactctggagaagctcttgacgtatggtaacatgcttgtccaagaacaagagagtgacgagagagaccgcttggctgacaaggacttgaacgaggctgcacttgcaaatgctaacgacgatgctattcacaggggaacattcttacgctcgtgaattggcggcatcgcaaacttggcaaggaaatatgactgttcctgtagggggatctgatcctagtgctggaagtggagaggggacttgcgagtggcaatcttagacttcatggcgcttgaggtgcattgatgacaagcccagacagacaacagcttacgatattctctagagaggactgaattactctgaaattgcgagttaaagtgtccagtcaaattgaattgggcgactggctcttgtgagatattcagaaaatgcggaatcctctgaatg

SEQ ID NO: 213115 - DNA, 479 bp, Glycine max
ttttttttttttttttttttttttttttttttttttttttttttttttttttttttttttttttttttttttttttttttttttttttttttattttttttttttttttttaaaaaaaagggggggaaaaaattgcaattatccctttagacccaagaccttttcaaaggttttaaagccacacgcaagagcgggattaaaaaaaaccaaaagctcagccccccctacaagaaaaaaaatttaaacgccccaaaaaaggtttgggccccccaaaaaagtgcacccagggggtcaaaaaaccagtattctcaaacccatttttttgggctggcgcaaaaaagtaattgggaggcaaaaggacccttcgggcaaaaaggggaaaacggacatttttggagccacccgctaaaaggttttttggggaaaaaatcccaagaaaaaaagggcccggggcatgtacccccacccgggggtgtccc

SEQ ID NO: 213116 - DNA, 549 bp, Glycine max
atgtaacaagcataagcgcttatatactttgtgcaatggcaagtatatcatatacaaattacatgagtatgattatgatagacggtatttaaatgaccagtaatacaaatcatcagtatactatataactgggtaaggtgtttatatacattagtcgtttatacaacataacggcgaagataatccaatctagctgaatgcttgagcttcataagagccttgacttcgtgctttctaaccatttccctagatatattcaagttcccagcaatttctcccaatgttctgtgacccttgccatcaagtccaaatctctgtctgatcaccaagctctccttcggcttcagggaatcaagcacatcatcaagagcaagccttagtagagcaggtggtttcctattatcaccattaacaccatcatcatcaacgatcccattaatgaactcctcttgtgtggttgtatgtctcgagttcatagaaagaatggattttgatgccttaattacgtcatggtatctttcaggggatatatgaactctttctataatg

SEQ ID NO: 213117 - DNA, 494 bp, Glycine max
aaatcactaaaccacattcttctcatccataaaacacattagacaatccactgaaacattgtaaatcccaagcgcaacgcgcacttgaaatcataaaattcattaatacaataatcccactatggcaagccacattggatccatattatcggtaatacatatccaatcaactaccacatcgcaactgccatcgcctattcgcctggttgttgcttagatgtttccttgatctcatctccagcatcgtccgtgatgtctgatgtccacaaagtcagattgtcacggagaagttgcatgatcaatgtactatctttgtatgactcttcacccaatgtgtcaagctcggaaattgcctcatcaaatgcctgcttggcaagattacaagcacgatctggcgagttaaggatttcataatagaacacagaaaagttgagagcaagtcccaacctaatggggtgagtgggggccaagtcagcaagagcaatatcctgagc

SEQ ID NO: 213118 - DNA, 495 bp, Glycine max
gaagtaactgtaaatctcattagtttgggttgaacaccctcgtcaagaaactccaaaatcgcttcgcaagttacaagacatcacttgacatcaaaaaataaaatacaagacatctcaacataaagtaattcaagcttgtattatacaaccgcatttaaagacagttttgtaaagaataataataaaaaagacaaaattagtaaagccgtactctgctatctatgccttactatacctacaagttttttgtcagtccgttatcccggcaccattatccacatcaacctcgcccattcctgtatcttcttcctcctcactgtcttcatcaccactgacctcttcattatcttggcgtagcttagccatgtgctcagcaagcaatttatcatcacgttcactcactgctctagctgcctccttaaccacaagtttacccttgtgttgttctattgcttcagtgcaagaagctatggcattgttgagaaccaatattcc

SEQ ID NO: 213119 - DNA, 461 bp, Glycine max
gtggagttgcagtcatcaatgttggtgttgctacagagactgagcttgaggatcggaagctccgaatagaggatgccaagaatgcaacttttgctgccattgaggaaggtattgtacctgggggtggcactgcactggttcatctctccactcatgtcccagcaatcaaggacaagcttgaggatgcagatgagaggctaggagctgacattgtgcaaaaggcactgatagctcctgcagcattgattgctcaaaatgctggaatagaaggtgaagttgttgtggagaaaataaagagtggtgaatgggaggtcggttacaatgccatggcagacaggtatgagaatttagtggaggctggagttatcgaccctgcccaggtaactaggtgtgctttgcagaatgctgcttcagttgctggaatggtggtgaccacgcaggccattgtggtggagaaacct

SEQ ID NO: 213120 - DNA, 506 bp, Glycine max
aaaccaaaagcatatcttttattacattagaaagcgcaactgtacaagagaaacagagaaaatcctagctaatgaacaccatgataaactctactaccagtcacattcttctcatagttatcattaaaggtatttacatggccccgcatgcaagccttaccgtcacaagcacataaacacattactccattaatacatcacacggtactttatttgaaaatgaatcttttactctgtgcctgcaaggactgctgacccttccaccttgaagaatgcaccccagatttcctcttcctcagcaggtattgcagtaatcttattctttggattctcatagcatctcaatcctccaactgctgtagagtagaaacacccttgagggaaagaagcaagtgacttgccacaagaacctttaagcaaatctgcatcatcagcaaatgctacatatccatcagctgggattccccaataaagaggaaccttaccagcttgatcagaagccacaa

SEQ ID NO: 213121 - DNA, 435 bp, Glycine max
cacaagatgacatgagggctgtaatgcgctacttgcatgagacaatatggaaaggtgtgccatagtaacgggctcaggtctatacaggtctgaagaacattgcaattaatgaacgtggccgatatagtgcttcagtaatgcagtgctgtacttggatggaacgataccgcgatggccattctatgacaacccctgaaggtcaagggatgggtgtaagctggcgtataatgatggctgctaatatgtacttttattacaacgaggatcacatgtgggagttgtgatatgaggcgttgtaatgacgagctacgtgtgccagctcatgatctccataggtcctcatagagaggtgcaaaacatgctattgagctttggaaacagattcctacaagtgagccatatcgcgttatacttggtgatgtcagatacaaacta

SEQ ID NO: 213122 - DNA, 486 bp, Glycine max
aaaccaaaagcatatcttttattacattagaaagcgcaactgtacaagagaaacagagaaaatcctagctaatgaacaccatgataaactctactaccagtcacattcttctcatagttatcattaaaggtatttacatggccccgcatgcaagccttaccgtcacaagcacataaacacattactccattaatacatcacacggtactttatttgaaaatgaatcttttactctgtgcctgcaaggactgctgacccttccaccttgaagaatgcaccccagatttcctcttcctcagcaggtattgcagtaatcttattctttggattctcatagcatctcaatcctccaactgctgtagagtagaaacacccttgagggaaagaagcaagtgacttgccacaagaacctttaagcaaatctgcatcatcagcaaatgctacatatccatcagctgtgattccccataaagaggaaccttacca

SEQ ID NO: 213123 - DNA, 344 bp, Glycine max
cacaacattgcaccagctctgtatggcacacctggtgtgaacattaccaagaacgtgatgaccatgcccagcatcaaggttactctaattctaggaatatggggaggcaagggacaaggaaatattatgcaacgtgatcttaggctctgtccatataggaaacgagaccgtgatgatgagtgctggataaccgctgagggtacaagggatagatgcacgctggctaaaatgatggctgaccgtaaaactgcatatcagaacaagatcgcaagattgagtgcgtctatgaggcgctgatctgacgaactacctggtcgtgctgatgaaatcaataggtcctctga

SEQ ID NO: 213124 - DNA, 511 bp, Glycine max
caagaaattcttcatagactttcagcctcaagattaagtacagtttagtgcattccatccttctaaagctaatttacaaagatcaaaacgtgattacaaatgctgctgctatggcccaaaagaaataaacttaaattcctattaacaacaaaacatactagctaattaatgccatagtcctcatcagtgacactttgagctccaaccatgagtcatcgtttccttgtgttacataaaagcttcaaaataaccaccttactgtttagcctgtgaatagaggaaggtgccaagaattgcaatggcagcaccaagagcattgatgggctgaacaggcgtgtgaaagataaggatggaagaaacaatgaccgaaatcctcttcattgtgtttccaatgctaaatgttaagggagaaatctgatcaagagacatgtatgagacttgattgtacaagtggtaaaagacactctgtgcagctacccaccatacaaaattgggacccaattgagataca

SEQ ID NO: 213125 - DNA, 501 bp, Glycine max
ctaaacttactattgggatgaaattatgtaatttatatctttaaaataaaatagaatgccatatgttcggactagacctaaaatgggatagatgtatctagggattagtcgtttcaaaaagaattctgcctagatacacaatacacatggcattctatctattgttatttcaaaatggaatcaattttataagtttaaaaaagacctaaagttagggattactcaataggtaatgttgctacaatgcctaaccaaagggcaactacagtaccaatcaaaaagatggtggttgctactggacggcaaaatgggttttggaatctattaacattctccaaaaagggtactgttaataatcctgaaggtaccgaaaccattaaaagaacgcccattaacttattgggcactgaacgaagtatttgaaatacgggaaagaaataccattcgggtaatacttccaaaggagttgcatatggatccgcgggttccccaatcatggat

SEQ ID NO: 213126 - DNA, 559 bp, Glycine max
ctaaacttacgatagggatgaaaatatgtaatttagatctttaaaaaaaaatagaatgccatatgttcggaatagacctaaaatggaatagatgtatctagggattagtcgtttcaaaaagaattctccctagatacacaatacacatggcattctatttttttttatttcaaaatggaatcaattttataagtttaaaaaagacctaaagttagggatttctcaataggtaatgttgctccaatacctaaccaaagggcaactacagtaccaatcaaaaagatggtggttgctactggacggcgaaatgggttttggaatttattaacattctccaaaaagggtactgttaataatcctgtaggtaccgaaaccattaaaagaacgcccaataacttattgggcactgtacgaagtatttgaaatacgggaaagaaataccattcgggtaatatttccaaaggagttgcaaatggatccgcgggttccccaatcatggatggttctagaaccgctaagcctacgttacaggcaatagtacctagaatactactggaaa

SEQ ID NO: 213127 - DNA, 485 bp, Glycine max
gttatcatcctggtatgtctcaaaggaaactccaggaactaagccactagcaattctgggaggaatggcatatagcctgcttggaaatggtttaagattcccgccagtaactttaggagtgggagtaatgcaggcctccattttcttataccagacatcatcggcatctgaggactcgcaaaattccacactagaatcatcttttctcctttgacatgattcagagtctacaaccttttgccaaatggccatttcagccttctctgacctcttctcccagcaaagttgcttagcagtctcttcaatctttctttgctcttcctcaagttcttccttaggtctcagccaggatttgtagttagccttccaattgattggaggacccgaaagcacccaataaccaccaggccttagaactcgatcaacttccatcatataaattccattatttgctccccaaggaatcaaacagcgagaacaatgag

SEQ ID NO: 213128 - DNA, 402 bp, Glycine max
atatattcttactatgaataagaattaattaataataataatacatggtgtctctgatgtaacagaaggtagaataatagatatacattgaaacgttgaaatgcatgagttcagttatcataggtgcggcactcatcggtctccgggttgtccttgcagtaattctcgagcgggtcatattgcttctgcttctccctggcgtggctcgccgccgcgctcagctcctccacctcgttccacgccgtcgcgcactctgcgtcgtcgacagatcccgagcacgccttctccgtgctcttgatgctatcctacaacttctccgatatcttatgcggcgtggcccagacgggccgggcctttaccaaaccgggccacttttgaatgggcctgaacagagctgggaag

SEQ ID NO: 213129 - DNA, 561 bp, Glycine max
  unsure (1)..(561): unsure at all n locations
cgaaaggattgatatatcaatcaaattacagttaaataataataatcccttacatatgatttctttttgtttcctttttgcgaaatcccatgcatatatgatttaatgtaaaggataaatcactaacgaaaaagctaaaatacactgctgtaacttctattcattaataatcgatcatgtatgttttattttacgccacatgatgcatttccttatattagcttcccttccaaccaacggctgtaaaaatccaacgcctcccgcggcttatattccggcacggtgtgcccagctcccttgattgtgaggaaggtgaggttgttctcgtacgcttgcaagtacccagcaacttggttatttgagttccatggcctccattcatccacaatcttgtaacccaaagatcgtgtccaagcctcacttccagtaaacggtacacacatatcatggtcgccactgaaaataagtgccctatagccaagcctggttaggttcttgtggtaaggaatncatgcttcagcattgtgatggtactctatcctactcgaacataattcccac

SEQ ID NO: 213130 - DNA, 500 bp, Glycine max
  unsure (1)..(500): unsure at all n locations
ataataatagtactatattcataataacaaaggaacagttatttgatattgttggaaatctctctagtagacataataggttataatgcttatacatccatgtcacaatcacaacacacatcgtataacaagaaaaacaccactgctatggcatcttaacctgtattttgcatgccagcagcaatacccttcattgtcaaaataagggtgtcctcaagaccaggagcatactcgcttttggggttaagtttaacaagctctgctgctggcttgcttgattccatgtagtcctttgacaagtgtggcctcaacttcacatggtagtcaggatcacggatccgcttcaatgtgtaagcttgcaacacattgagggttgtgatgtatgagtcacgaagacgaagtctttgcttcaagtaggggtctccttcaagaatatccttgtgcccagcaacctggaggagaaacctctnntgttcttcgaaattagatcttaaattctc

SEQ ID NO: 213131 - DNA, 326 bp, Glycine max
cactcttagagccttgtttactccagtgacttgagtgaccacaagcgcaccgtcttgtcaccgcttgcgctggcaatcacgttggaatgaattggatggcgcactactacatttacaacacttgagtgtccatcaagcttgcccacttgcttaccgctgtcgcgctgccacaaatacactgcaccatcttcacttccagagagaacaagctcgctgtggtcacctccaaaacatggacgaagaatgtatcggtgctcgcgaaacccgcggtacttggctatcacaaaacccgtcacaatttttacacaccccatttgctcttgttt

SEQ ID NO: 213132 - DNA, 538 bp, Glycine max
  unsure (1)..(538): unsure at all n locations
gtctctcaaatttgtttcattgcattgtattctagttaatacggcaggagttcacataagacttgtttgttagaaatatgcctgacatagtattcctattctacagctgcaaactgtaaattatacaatttagcacatgcaaaatgaaagtatgtgtactccatcttgtcgactgtgatcgaaaggtatgcaatgttggtgtcttggatattagaaacttctttgattgcgtctagtagaaaaaccagtgtcgtcttcatctttgatgaagggtttaaatctagcgaggccaccacttccactgtatgcttggcttctgtttgcagcttgatgatcggatggatctggattgccacaaatctcaagtttgattataaatgtagctgtgcttcctttgtcaggaccctcactctcaatccatatgtggcctcccatgaggtttacaaatcttttacaaatggcaagcccaagacctgcaccactgctaggtcgagctggtccactccgagactgggcanacttggtaaagagatgcgga

SEQ ID NO: 213133 - DNA, 434 bp, Glycine max
gcagcttcagatattatatagattatacaactggataaacctgttaaactgtttcatacaagatatggaaacaaacagatatgctcctatatcgcaagtctcccagcacaggtcaaaactttgaaacatgtatgaatatgatgatgactatgaaactgatattgattccaataaagcatccacgtactctttaagtttcaattttggaattgcaccttcccttctgctttctggaacttcctgcccgttcttgaagagtattaatgtcggtagtccataaactttatactcttcaattagctgcgggttggcatcatgatcaatctttacaaccggtaatctggcttcatattccttagcgagggattccatggcggaagagatgagacggcaaggaccgtaccaagttgcgacgaactcaacaagaaccggac

SEQ ID NO: 213134 - DNA, 446 bp, Glycine max
agaaaatgccagagtctttttattaaaaccaagactatgtgcccaggtcaaagccatcataggaagctggtggtggctgcaccatggacttggatctggacttagaaacttgatggactttggatcacataccctataggctgcacccgcatgtgacctttttaggattccacgtgctgtgaccgaccttactctgccctttgggctttttctgatggagaagacccgaagcttccagcttctgccttgtctgatggccacacgatctcgtcttgtgattcaaattcaagagcagcaaagccagtggagaatgatgacaacaaaaaacttttgccaccacttgttcctatttcaccagtggaaaatttggatggatcttgtgtaatcaaggaaaggatgacacaagcacttcactacttcaaagagtagactgacttgaatgttct

SEQ ID NO: 213135 - DNA, 506 bp, Glycine max
tgccggcctttcgttttttttttttttgcaaaaatatgcatcaattcaacaataaacagggtttccggtctcatattcaggtcctatagaaccattggcactgactgctaaacagcaaatacgcaaaccacattaaactgagaagtaccgtttactacaatataccacatgctattctaacaactagaaagtaacagtgccactgaagccttccggcttaccctaaaacctgagatcacctatgttcttgaccttcgcaccggcgaacggatgcaatatctaccatattcaggactccagggtttcccataatcaggactcttgcgcctttcataatcaggactcctgcgcctgccataatcaggacttttgagcctgccataatcaggactcctacgcctggctggaccaccaccattgtacctatcatagacagggctgcgtggacgaccatagtcaggactctggcggctgtgatatggactgggtgatctctcataaccacc

SEQ ID NO: 213136 - DNA, 558 bp, Glycine max
  unsure (1)..(558): unsure at all n locations
catgattaaccacatatactgacttgaaattaagtaatatacaaacgctatttttcgaggtgcatttccgtaagctacaattaaaaaaaagcacccaaaagaacttcagcacactttcttggtctctcactcgtcatttgtgaccatgttctacaacaacagatactttaagtaaaaacttttttatgacttcacctaagggaaaaaaggatcaaaaagctaaaagctctcagactcaataatcataatctgcttcacttgtttcagcgtgcttctgcagaagcaatctcaagttctgcccaccaaagaggagaaagttttggaactgctgattcaggtgttatttttgttatctctctgagtctctcactcacatctttcattggtggtctctgctgtggatcagggtggacacaagatgtaatcaatgcagcaacttgttccagctgatcctcttggtaagacactagaatnggatccaccatttctatgaggggctggtccccttctaaatagtgtgatgcccagttttcaagtgagtccctatgttccactgat

SEQ ID NO: 213137 - DNA, 485 bp, Glycine max
ctcttgctcttcctcttcttctctttctattaaccttcccctctctccctcgccctcagatcggagccatctctcccctccccgatcttttgcaccagaacaccgccaccatgcctttcgcgaaggaaaacgctttcggtgggaacttgaccggtcttcccaaagatcccgcgaataagctcggcagcgattctgatgcgaccaattcttcgaggtacaaagcttctggactgaacaccaatgtgctggctggagctagatatgtctctagagattgggctgcacagggtcaaatgccattggaagtcaatactgcgatggctagaagttttgagagaaggatggaagctggcacattgggaatgattggccataaacgtatgatgagtgacatcccaagttaaaccagagagacaaacccatctggttttcgaccgttatctcctcatcttcctctttatcagccccaactttcttcgaccctc

SEQ ID NO: 213138 - DNA, 438 bp, Glycine max
  unsure (1)..(438): unsure at all n locations
ctgtagcttccctttttctataaaaaaatatcttatgatgcttttaactatataccaagatgcctgaacttgcaaaaatatgcaattacacaagagcagcctcttgtgtgtgcttttcctgtgttgctttgatgtgcccaacataaagatcactcccatgggaatcagctgccggaagtctctctctccgaccaccctcagacatgcttcttacgaaatccactaggtgccgccagttgtcagcttcaaacaacctcttgttcattcttagatatgtgaatgcagccaatccactgccggattctgacttacttgttgataaaacttgagcatatgcatctgcatcatatctctccaatgcattttcccccgcaagctctgctctagctgntgntgttgccatcttcacctggtgaactaacccttcaggtgagcagt

SEQ ID NO: 213139 - DNA, 480 bp, Glycine max
gaactaagaaacacaggataaataacattttattacaaagtcctccatagcatacaataacaaagttacatggaaattcattaactaccactaacaataccgttatagccgggtcaaaatgctgaatttaaacaaaactaaagagatgaagcacatgtacatttatttttatttttatgaaacttagattgaaacaatacaacttaactatatgttgatgctttgccaagtgattctgcaatcttactggcaatacagtaagatgtagactgaatggttaccatggggttgacaccaactgcactaggcaaaacactcccatcacacacatacaagccttctgcttcccaagtctcaccattctcatcgagtgcaccttcttcttcagaggcacccattctacaacttgacatctgatgtgcagtggtaaacactgtccacacttcattccttgaccttggacccccaactattgtcaca

SEQ ID NO: 213140 - DNA, 505 bp, Glycine max
atcaagccgtgatatctgagcattctctcgaggttttctagaatcttacaaagacctacaagacttcaaaaactttcaaatacacaaccgccatcatgggtaaggaaaagacacatatcaacgtcgtcgtcatcggacacgtcgactccggcaagtctactactaccggtcacttgatctacaagtgcggtggtattgacaagcgaaccatcgagaagttcgagaaggaagccgctgaactcggaaagggttccttcaagtatgcctgggttttggacaagctcaaggccgagcgtgagcgtggtatcaccatcgatatcgccctctggaagttcgagacacccaagtacttcgtcactgtcattgatgccccaggtcatcgtgacttcatcaagaacatgattactggtacttcccaggctgattgcgccattctcatcattgccgccggtactggtgagttcgaggctggtatctccaaggatggtcagactcgtgagcacgc

SEQ ID NO: 213141 - DNA, 483 bp, Glycine max
ggctgtcgcccttttttttttttttttaaaggttttggctcggagtgaatttcttggggattcagtaactaaaatcttgtatcccatctagctaaaattggcttcttgccattgtggagaaattttctcaactcatcttaatcgccaatagtcatcatgatcatgaatgagccttgaaagccttgttttgggagcaagggatcgtatggcttggaatcattagaagattgggaacatgtcctttggtgggcgaaagaagaaacaacgttgtaatggaccaaactaggattttttttgaggaaaccacaatgcattcatccacaccattatgaactcccgaaatattgtcgagggggcatgagtcaatgcatctatttcttgccagccttttgggcggtcttggtaaccttgccggtacccttgttagccttggcgacggacttgatgacaccgacggcgacggtcttgctcatgtcacggacg

SEQ ID NO: 213142 - DNA, 583 bp, Glycine max
  unsure (1)..(583): unsure at all n locations
agaacacacagctcttactttcttccgccatattccacaagaactctccaaggatcctccttcccacgagattctttggtgggaaaaatccaagaggtttgaaatttgaaggcagggaagatggattatttcaatgcaccaggaagaaaccatctctttgttccagggccggttaacattccggaccagatcatccgggccatgaacagaaacaatgaggactaccgttctccagcaattccagctatgacaaaaactttgcttgaggatgtcaagaagattttcaagaccactactggaaccccatttctcatccctacaactggtactggtgcttgggagagtgctctcacaaacacactgtctcctggggatcgaattgtatcgttcctgattggccaattcagcttgctttggattgatcagcagcaacgcctgaagttcaatgttgatgttgctgagagtgaatggcgccatggtgctaagcttgatgttctggaatcaaagattgcttcagatacttcacacactataaagggcatttgcattgttcacaatgagactgcaactggngtcaccaatg

SEQ ID NO: 213143 - DNA, 537 bp, Glycine max
acaggacaataaaagaagcaatgcattaaagctgaaagtagaaagtacgttcatcttcaaaggagtgtaaaagagggtaatatatattttacagaatttctgaaagagccgaaaaagggaagtaaagactagaatgatctgtgacctaaatactggaagggatcataggaatagtgtcctgtaagtatgcactggcagcagaaactccactttcaagctttacaggataacccacatctttgagtatcatctctacaccagctagacatcccaacagttgcaactcattcaagtggccaagatgtccaattctgaaaaccttcccagcaactttgttcagtccaagacctaagctcaaattggatctcttccatgccctcctaactatttcagtactatcaatgtaagcaggaacaagaacagcagtcacagtgtcactgtaccactcttccttttgggtgcaattcttcaaaccccatgcctctacagcaagtctggctgctttgcctaaacgactgtgccttgcgatcacatttc

SEQ ID NO: 213144 - DNA, 358 bp, Glycine max
ggccgcccttttttttttttttttttttttttttttttttttttttttttttttttttttttttttttttttttttcaccgcattcctccccgcgctcttcgcacccggccccgttctctttcgccgccctcgctctcccgcgaaagcgcccggacccgcgggcccgccaccgggccccccccccccaaacgaccaacgcccccgccgcgcccgccccccccccgccgaccggcggccccccaaaggaaaacccccggaaaaaaaaaaaaggggggcctcccccgggaacccaagaaaaaatttctttattggggcgctcccccccaggggccacccccattcccccggggaaaaccc

SEQ ID NO: 213145 - DNA, 299 bp, Glycine max
aggtcgaggtgacagataagaaagactagcttttctacagccatgaatgcctttgagctaatttccatgtccaaaggactgaacctttatatcttgtttgactcacatcagggatttctatggcacaccagattcacctcactatcctctgcgtatgagatactcaacaggagtgttgaatctgcaagaccttttggctttgatgtgcacatcaaaaattacaaccataatcttgcgtatgtgaaacctgcaccgaagggataccttaatgttgccacaaagatattccaagcggcacc

SEQ ID NO: 213146 - DNA, 368 bp, Glycine max
ctgttccgagaacaacaattttccttatccatttctctacttgcgaagtgtacggaaagacgattggagcctttctccctaaagatagtgctcttcgtaaggatccagcatactatgttcttaaagaagacgaggctccctgcatttttggggctattgaaaaacagaggtggtcttatgccagtgcgaaacagttgatcgagaggctgatttatgctgagggtgctgaaaatggcttggagttcacaattgtgaggccctttaactggattggacctccaatggatttcattcctggcattgaaggcccaagtgagggtgtgcctcggattctcgcatgcgataacaataatctttttagacgagag

SEQ ID NO: 213147 - DNA, 258 bp, Glycine max
gaattgtgtttattataaataagaattaattaataatacatggtgtctgatgtacgtaacagaaggtaaaagtaatagatgcatgcatgtaactttggaatgactgagttcagtcatcaattatcataggtgcggcactcatcagtctctggattgtccttgcagtaattttcgagcgggtcagactgcttctgcttctccctggcgtggctcgccgccgcgctcagctcctccacctcgtcccaggccgccgcgcat

SEQ ID NO: 213148 - DNA, 395 bp, Glycine max
gtgatgggtgggtgagtccgaattgtgattgtaagcaaagatggctttcacggaatgcggtctacttcttgcttcggcttcaggaaccaacaagaacaggaacaaggttccagaaaacaaatggcattgtaacctacattgagtgttgtaccctgtgtctgggatgccttctaccatgggacgctttcatcaacgacgttgattacttttgctttgtctaccctgacaccagcgttgaccgcatctatgccgcggtttacatgatagtcgggctggtggggagctgcctcataatcctctacagccactagtctgacgcctatgtgaggatcaacggtggattggccctatacgacagttcgcttcttgtcgttcccctccttgatgccttttac

SEQ ID NO: 213149 - DNA, 464 bp, Glycine max
ctcatactcctctcactatacgttttcctttcgagatagagaacagatagagataacactatgctgcacatgataatggcgctgctgtgtggttcaacttgcgtgactccattcctttatcacaagaacgttggttgcacaacctgaggaacatcttctctttgttggctctcaattggcgttatcaaagctcacatatatcttcttccgttcgaacccttgtgccggcaacatcccgtgtccgttgccagcaagagtctactactgttacccctgtcgcataaaaagacccgcgcttcgcgtgcgtagaacccgaaccccgattcaaaggcccggacatttgtaacaagagctggtatccaagagctgcggatcatgtgaatacagaaaaaacatggtatgtgtgtgatgctacagacaaagttcctgtgagactagcatcgacgattgctattcacattcga

SEQ ID NO: 213150 - DNA, 544 bp, Glycine max
  unsure (1)..(544): unsure at all n locations
gcatctaaaccttaaataggtatttgtacattgaatcttcaatctatgcatgacaatagaagtagccattttacaagctttcaccaacataaacactcccacctaaaaccatttaagcgttacaacttagttaaaaaggtttgccaatgtttctccaaggcttgcaatcatagagttgttccaacacttctcacttgggagtgaaagcagcaaaaatagtagcatggccaggatctgcaaggtgagcaaagaggttgtcaataggaccagtgccagtgtaaatgtgctggaaccatgcccccatcacagccaacatggccaacctcccattcttgatctcctttgttctcaactccttgatcttctcaggagaaccacttccccagccaagtgggtcaaaccaaagcccacctgggtacccaacatcagttcctgtgagctngttgttgggaaagatggngtcagtgttgacacagcctggcttgatgatgtcagcccaccttctaccctcggcccaaccgatgaaaaagagctcaactattga

SEQ ID NO: 213151 - DNA, 467 bp, Glycine max
ggtgccccttgcaggttccaacgtctagtcatggtgccaaggtttggatggtctagcctctcgctcagctgcatactacgagcaaggtgcccgtttcgccaaatggcgtactgttgtgagcatccccaacagtgcctctgctctggcagataaggaagcaacctgtggtctggctcgctatgctgcaattgctcaagacaatgggttggtcccaattgtggagccagagatcttgcttgatggggagcatggtattgatagaacttctgaagtagcccaaaaggtctgggcagaggttctcttctaccttgctgagaacaatgttctttatgagggtattctccttaagcctagcatggctacacctggagccgagtccaatgacaaggccagtcctcagacagttgctgattacaccctcaagctccttcacaggagaattccccctgctgtccctggaattatgt

SEQ ID NO: 213152 - DNA, 505 bp, Glycine max
aaatcaacagagataactctctgaatctttatattatagatctattattgattcattacatacataattcagaaggaaaaaaaaaaaacataacaaaaaaaaaagtgtccgcttcagatttgatcgcatttttcctattgcacaaagcctgcgcatttcattcaagtttcaacagaagcgtaaaaattgcacaagtgtcttagataaccacattagaaaatgaaaagggcaaccaccacccatcattataataagtaaacaatacctacaaattgcactattgcaaggcattggcaccagccacaatttccagaatttcaccagtgatcttagcctggcgctccctattgtacacaatggacaagttcttcttcaactcaatagcattatctgtggcattgctcatggcactcattctggcggcgagttcactcgccaaggactcctgcaatgccctcagaacctggctgttcaaatacagtggcagcagtgcatcaaggatctg

SEQ ID NO: 213153 - DNA, 494 bp, Glycine max
tccttaaccaacttactcatattttaatgtcgcacagaaaattcagagcaccccgccgtggttcattggccttttcacccagaaagagagccaacagacttagaggaaagatcagatctttccccaaggatgaccagagccaagctcctcaccttaccgccttactcggatacaaggctggtatgacacacattgtgcgtgagctcgaccgtcttggatccaagctcaacaagaaggagatcgttgagcccgtcaccatcgtcgagacccccgctctcatcgttgtcggagttgtcggttacatcgagactccccggggactccgctctctgtccaccgtgtgggctaacttcctcggagaggagctcagacgtaagttctacaagagatggtaccaatccaagaagaaggccttcaccaagtacaccaagaaggttgctgagaacccccaatctgttgagaaggagttgaacagaatcgccaagtacgccact

SEQ ID NO: 213154 - DNA, 448 bp, Glycine max
agtagtagtagtagtaactttgattagagattataagccattttcatgctcaaaagaaagcagttttcagtactaaatacaatatgtaagaagcaatgaaaatccctcctttagccaaaaatttaaaaaataaaatacaattcccttcctttcttttcacaatattctggccataaggaaaggatattgagctgtgaaccgccaaaaaccataaaatatcaattgccagttacagtgcttgacttcatctcttgaacacgcaacatattcaagttgtgttgggttcgagaattagggacctcgggttggggcaaaacaaaagcaacctgaactctgatcttcaggtatcataccaccacctttgctagtatcaagtgcttcaagcatcctcaccacctcttccatttctggacgcttggttggattcgcatcccagcatttccgcatg

SEQ ID NO: 213155 - DNA, 459 bp, Glycine max
aaaataaaaacataaacaacatactttcgctgaaacgagttcaatacatcattttaaaacataataaacagcagcacttaaaccagagatgcaaagcacaagttcaagggagacactgaacaaacagataagacatatgagaacacttcataaaagggattccccttagcaaccaccacgaaggcgaaggacaagatgcaaagtggattccttctgaatattgtaatctgccaaggtacgaccatcttccaattgcttcccagcaaaaatgagcctctgctgatctggagggataccttccttgtcctgaatcttagctttcacattgtcaatagtatcagagctttccacctccaaggtaatggtcttccctgtcagagtcttcacaaatatctgcatacctccacgaagcctcaacaccaaatgcagagtggactccttctggatattataatcagc

SEQ ID NO: 213156 - DNA, 116 bp, Glycine max
ccggaaccctgccaacctttcttgtaaggacttggggatagacttggtgatcgaaggaaccggagtgtttggatacagagaaagtgcactgaaacacattaatgcaggggctcaga

SEQ ID NO: 213157 - DNA, 578 bp, Glycine max
  unsure (1)..(578): unsure at all n locations
cagttaaatgcaaattccactaagaaaaatgatttctcaactagtgcagaaagctaggaagatatgtccttgcattgtttttccacaacacttattatggacaaatagaacaaggaaaacaaatagaacaagggaataaatttatggacactatctctaagagtttctaaactcatccttggagagatgaaaaacaagaaaatatctgtaagttaccatctctgcatccccttgcctacaaaaaagaaaacaaagaaaaaccacaccaggtgaacagatatctgaggttatcaaactttagtccgatattctgatctcaactcctaaaatgtccttcaccacctcatatgttacgaatgcaattgctattgatgggaccacctttacagagttgggcaccagacccttgtataatgcaccaaatccctcatgctgaacagtttttctgaatgcatcgaccattccagtgtattccagtggaactntgcctcttccatcgccagttagaacagaagcagcatggttccaaccgaccatctgcattcttcgacggataacgtcaagagggtaaagcacag

SEQ ID NO: 213158 - DNA, 425 bp, Glycine max
gccgtatagttcagaccgtaccgtactctttatctctttctccgccgcaaactatccttgtacggcggggccaccgtacaacccatcgatttaagcaaaggagcaacatatggaggtgcttggttgcaaatggaggacaccgcaagcaacaactacagagtcgtcgccgccgacggtcccgtgatgagcgataaataacaagcggctccacgcccctcgcaagaagcagaaccgtatcctcgccatggaagaggccgagacccagggcaggcctctgaacaaggagcaggaagaggatgtccgctccaaaccctccgtccttggtctcattgacgagctagagaagcgacggctgcctgtggccaccgatctatgcgaagagctacaaaacaacggcacctactctcaaaaatctggggagaccg

SEQ ID NO: 213159 - DNA, 470 bp, Glycine max
  unsure (1)..(470): unsure at all n locations
aacatcataatttttcttatacataagaattaaacatggtatcaaaaggttttacaatatttatacattctgtttaatcaacagaactagaccctctttactttaagttaggtttaaagttcagtttgggcatcatcatttgctacatgcataaataaagcatgtatctaattagactaaaaaccaactgatgggatctcaagctgaatcacgagccttgcaaacaggtaaatcatcttcgaaattgggagggactccaaggattggatttctctcaaagaaattagcaggcttcaaatcaaaacttgatgatacagtaggcatgacaggatagtcctcttgacagggtatatgatggaaccctattgtgtaccacanaacaatgtctntattctcaattggacgatccctgttggaccagacttgaagagtatcatcccctttgctctggtaagcaaataaaccaccag

SEQ ID NO: 213160 - DNA, 429 bp, Glycine max
ggcgagagacccaaaagctaagcgttgcctctataattcaagggacaattgttccaattgatgccacgtttagagagtactacaccacattttatacgctgcattaagcccaataacctccaatcacctggatcatatgagcaaagccttgcactgcaacagatgagatgatgaggtgtcctggaagtgggtcagatatcaagatcaggcttttctactagagcgtctcaccaaaagtgcgccagatgatatggctgtcctctccttgaaaacgttgcctctcaggatccacttagagtttcaatggctattcttgatcacttgaacattttgactgagatgtatgaagctggctacacaaaactattctttcgaacagggcagattggagtgcttgaagataccagatatcgtaccctgcatggagtt

SEQ ID NO: 213161 - DNA, 490 bp, Glycine max
attgaatcgtaagcagcggctactttaatcctctcctcttcctctctactaatttcagctatggccgacgaagctgtggttgttccagatcccacccagatcgatgtcaagctctttaaccgctggagcttcgacgatattgagattactgacatttctctggctgattatatcggagtggcgacatccaagcacgccacgtatgtgcctcacaccgccggcaggtactcggtgaagcggttcatgaaggcgcaatgccccattgttgagaggctgaccaactctctcatgatgcacggtagaaacaatggcaagaaactcttggctgttaggatcatcaaacatgctatggagattattcatttgttgactgaccagaaccccattcaggttattgttgaagctgttgtcaacagtggtccacgtgaagatgcaacacgaattggttcagctggagttgttaggagacaggctgtggatatctcacccc

SEQ ID NO: 213162 - DNA, 520 bp, Glycine max
aataaaaacaggatctttaattatttaacatattaaacggtaaatcacatgtaaattattgatcaaagaaaatgacgagtcacatgtaattcttccttgcacaaagctggtttggtgtggatatttcttcatatatcctcgtagaagaattttttaaaaagatccataagtgctgtcaggaaattcatggaaataagaacaccatctccatcagggcttataataatatgtgccctaacttctcgaaatacttttgctaaaccaaagtgcacaggctttccccaaccaaaatctgcatcatacactggcaagctcatccagcttgtgatgagaatgttatgaggattcccagaatagggttcattaataaggtctccttgtcccgagaaaaaagcccttatgttatccaattgctcttgccctaaaacataacttatgtgtgaccttatatactcatatgtaaccgcataaaccgcatcccttatcttttgagccccatagcttaatgggtttaataaga

SEQ ID NO: 213163 - DNA, 508 bp, Glycine max
acaagttaattgaagaaattcaatttgtttaatcaaattccccaaccccctctctttttatttgttcactacgtattatatgcaataaaatattatatggcagaaatattctaagttggaaaaaatagaaactaagatataggatttttcaggaaggggttaaaaaagattattttattgatatttttagaatatttctatttcgacacaaacaagaaggaataggaatcggactctaggaaaagacaaaaaatcccccctagagtaccttttccatattttaattgattttgtttcaaattatctatctatatagatatctattttatgtttagtatcgaatccaattttattgtattttacaatcgaaatttctataatagaactctctattatagaaaaatgaaatctgaaaaaaacagtgtcataaccataatattcgaatttattggggggttgaaaaaacaaagtcaaatagtcttcctgacaatatccatactcgagttta

SEQ ID NO: 213164 - DNA, 562 bp, Glycine max
  unsure (1)..(562): unsure at all n locations
ccgccatattccacaagaactctccaaggatcctccttcccacgagattctttggtgggaaaaatccaagaggtttgaaatttgaaggcagggaagatggattatttcaatgcaccaggaagaaaccatctctttgttccagggccggttaacattccggaccagatcatccgggccatgaacagaaacaatgaggactaccgttctccagcaattccagctatgacaaaaactttgcttgaggatgtcaagaagattttcaagaccactactggaaccccatttctcatccctacaactggtactggtgcttgggagagtgctctcacaaacacactgtctcctggggatcgaattgtatcgttcctgattggccaattcagcttgctttggattgatcagcagcaacgcctgaagttcaatgttgatgttgatgagagtgaatggngccatggtgctaagcttgatgttctggaatcaaagattgcttcagatacttcacacactataaaggcaatttgcattgttcacaatgagactgctactggngtcaccaatgact

SEQ ID NO: 213165 - DNA, 496 bp, Glycine max
acaggacaataaaagaagcaatgcattaaagctgaaagtagaaagtacgttcatcttcaaaggagtgtaaaagagggtaatatatattttacagaatttctgaaagagcagaaaaaggaagtaaagacaagaatgatttgtgactcaaatcctggaagggatcataggaatagtgttctgtaagtatgcactggcagcagcaactccacttccaagctttacaggataacccacatctttgagtatcatctctacaccagctagacatcccaacagttgcaactcattcaagtggccaagatgtccaattctgaaaaccttcccagcaactttgttcagtccaagacctaagctcaaattgtatctcttccatgccctcctaactatttcagtactatcaatgtaagcaggaacaagaacagcagtcacagtgtcactgtaccactctttcttttgggtgcaattcttcaaaccccatgcctctacagcaagtctg

SEQ ID NO: 213166 - DNA, 509 bp, Glycine max
ggttcctccctcagttgcttccttcctcttgtgtccacccagttccccctttcattttccattcaataattcaaacaccagttaatggctacccttctattccaccacaattcgcctcagatattctcttcctccttcttcttctcacagcattaaacgccgtcgttttcatgactccataattcaccggaagcagaacaacaacaagaagcagcagcagcagcgcgagttcacatgggattgggaacaaccgcgagaagcagaagaagaatcgtcatcgaagaaggttctagaacaagaacacacaacaacaccaacaacgccgatgccgatggagctggagcaggagctaggttcaacaacaatccagcgttccttcgacgcgcgctacacccgccacgcgcgcgactcgctcggcgaattgcctgacagcttcaccatcaccgacccctgcatccccggccaccccatcgtcttcgccagcccgggcttcctcaagctcacgggct

SEQ ID NO: 213167 - DNA, 556 bp, Glycine max
  unsure (1)..(556): unsure at all n locations
aggaaatataatacattttatttatacacgtccaacagagaatgttttcttacaattgacagtatggactctcttttttttttcttcttcacaaattaattcttttacctttctatcatctcaacaatcaccaattgagattgattattttttcgaatggattaatatttctgggaagtaggcaaatattatttgttccaaactcacatgatccttttgctacgactcagaagatcccgcagtcattgataaactcctcactgcaaccttgactacaccaaccacactaagttgtctcttctcaggactcaaacaatggctatcatcgtttttattgttgtcttctatttgaactcccacaaagtatgcaaccttgccagaagcatcacgaacgggtgagatatgaagaaaattccaaaatgagcttttgtccttcctgtaattcaaaatacgtactgtgcatggttgttctgttttaatgctttcccttatctgaacgtaagcaataagagaaaggcataacanaatggtccattcccattagtctaagactcta

SEQ ID NO: 213168 - DNA, 505 bp, Glycine max
  unsure (1)..(505): unsure at all n locations
aaactatgcctcgctagtaatccactcttgtatagcaatatacaacctacaacattctacacaacccaccagctatatccaaacataaccattatatgtatagtcaatttagtatccaagctaacaaatgctccaactgtatgatggttattgttaagacattgcaaaatgtgaagaatcctttcagctgtatcctttcaccaagtgctgccaaaaaataataacgacctttcgaaatatcttgtaccaaaaatccacagctatatattgggatgctgctcagtcatttctttcctcattcagctttcaatctcaagatctccttagccgtcctacgccgaaagtaagacatgttttcctggttaaaacacaattccagacccctgctataaaagtctgcatatttgatcataaacaccccacaatcatacccatttttctgcacaggaaggtctttcacaaattctnttttccaggtatttacatcaatatgttttccagtctt

SEQ ID NO: 213169 - DNA, 553 bp, Glycine max
  unsure (1)..(553): unsure at all n locations
gcgaaccaaatcaaacagtatgatatataaagtcataataaaatgcttatgtgaaatgtacccacacgatacatctatttaggccaacaagctcacactttattaattaggaactacttccctgctcaagaaggttttgtgtgttggggttcttgccccaagctctctccctccatattacttccacttcatcaaaggtcaatcctttggtctctggaacataaacaagcacaaatacaaatgcaaccacagctatgacaccaataatcagaaaagttgaaccaatccctataccctccgcaattgaaagaaaggtctctgagacaatcaaatttgagacccaacacacagtagctgacatgcccccacagatacctcgatattcttccggatatatctctgaactcagagtccatggcacaggccccattcctggcgagaaaaaaccaatatacaaggctaagcctacaactgcaagccatccatacaactcatntgacgtggatgattgcttataaaatgcaaaggccaagatgaccaaagatacaattac

SEQ ID NO: 213170 - DNA, 439 bp, Glycine max
gtgtttttagcgaagagattaaattgttaaaggaaaagtatgaaaagaagttgaaagatgctgctgccagacaacttatgcttgctgaggaggctgcactgctggatagggagcttaagatagagagagcgaaagcatcccttgctatcaattcacttcaagataagatggaagagaaactgaagacagaacttgaacaaaaggaaagtgaagcagaattgaagttgaaacaagctccagaattagcaaaggcagagataactgcacacatagcaaatgagaaggcagctcaaattgaaaaaatggctgaagcaaatgttaatataaatgccttgtgcatggcattatatgctctatctgaagacgctcgtcaaagtcatgctacacacaactttgcattgagagcacttgcattggaagatgcactatctaaaggact

SEQ ID NO: 213171 - DNA, 517 bp, Glycine max
attctaaaatctaagtcacctgaaagtattcccttgatcaaaaagttcagaagaaagccctgctgccataaaacacacgggagttagtgctctttggtgtctgtagcttgtgttcagagctagagtttcctgaactagttggtccactttcaaagtccacaggaagcttcatttttgccaatgactcggtgaattgctgcatgcttttcatgtacatgtctacaaaatcctgctgcaccacattcggctccggctcgatgttaacagtcacaagaggtttagggaacgaggaatcagtctcaccatctttgacatccacatttttctctttggtttcctcattgggagacgagtctgagcttgcagccactgaaggagatgaaaccccatttgttgacacactgctaacactgcatgctgagaagctctccacaagctgaacacctgcttcagaactaagattttcagtatcagtagtggtcaagctatcagaacactggctctcctcacatggaat

SEQ ID NO: 213172 - DNA, 411 bp, Glycine max
  unsure (1)..(411): unsure at all n locations
actagcaaaaaaggaagatagatatatacaacttttcttacaattttttgtttcatgaacataactggaactgttgatgagtaaaattcttacataaactctgcatgctttcaaaaaatagtagcatggtacgcaatatataagtaatatgtaattaaatgtccaaacaaacctacacgaaggaaccttaagaggaaataacgaatgaagaaattggaaaatagtagaacctcagacataaagaaaattacacaagataatgatgataacaatatcactttgnttctcgcatttgcatatcatcttctgttttccagacaacatcatccaggcttgttgaaagtttcttgtagaacttatggaactccaatgtatctccttttgccttccgtacctcaaccatgtgaagag

SEQ ID NO: 213173 - DNA, 547 bp, Glycine max
caccgtgacactgtcactcctttttctccctccggttccggtccgtacagtgtccgcgtctgcatcaacctcgtcctctgtccctctcactcactcctactcctgctcggccaggcagaggctcttctctcacaaaacaagactcagtttccggaatcattcctctgcggttacaaaacttacggtgacatgcggtgcggctgtgacggagatcaacgagacccaattcaaagacacggtgctgaaggctaaccgtccggttcttgttgagtacgtcgctacttggtgcggtccttgccgtctcatctcttccgccatggaatccctcgctaaggaatatgaagacagattaacggttgtaaagattgatcatgatgccaacccgcagctaattgaagagtataaagtttatggactaccgacattaatactctttaagaacgggcaggaagttccagaaagcaaaagggaggtgcaattacataattgaaacttaaagagtacgtggatgcttaattgaatcaatatcagttcatatcatcatcat

SEQ ID NO: 213174 - DNA, 484 bp, Glycine max
tcaggtttgatttcgaaagcgagttggatggaagaagaagatgaggccgatttttgctgggaacttggagtacgatactcgtcaatcatagcttgagcgcttgttctcaaagtatggaaggattgaccgcgtggacatgaaatctggttttgcttttgtctattatgaggatgagcgtgatgcagaagaagcaattcgtgcacttgacaatgttccatttggtcatgaaaagcgatggctgtcagtggagtgggctatgggtgaacgtggacgtcttcgagatggatcgaaggcaaaccagaagccaacaaaaaccctttttgtgattaactttgacccaatccgtactagagttcgtgatataaaaaaacacttggaaccttatgggaatgtgcttcgtgttcgcattcggcggaactctgcatttgtgcagcttgagacacaggaagatgctaccaaagctatagagtggacaaatatgagt

SEQ ID NO: 213175 - DNA, 552 bp, Glycine max
gaagagggaacaatttaggaaaataacaatgatgttgtgttggtagcgtaaggtggaaaaaagagggtctttccttccctaagctatggctcctgctgggaagctttctgggcttcgtcgagaaggcagtgactggttctgcaatgggggactgccaagtgatataactgtttccgtcgatggtgtcactttccatcttcacaagtttcctcttgtatcaaaatgtggaaaaattgctagagcacatgaagagtccaagaataccaatgagactctgaaaatggtgctggaagaatttcctggtggtcctgacactttcttaattgcagcaaaattctgttatgggtatcgagtggaactgacagccagaaatgtagtatcggtccactgcggtgcagaataccttgaaatgacagatgaatttggagaaggcaacttgttgtcaaaatcagagagttttttccataaaaacacactgcgtaactggaaagattggattctggctctccaagttctgagcctgttctacccagagcagaaaagcttcattag

SEQ ID NO: 213176 - DNA, 454 bp, Glycine max
tcctttttttttttttttggttcatattatttttttacatttttttatcatttatttttttaattcttgtcgaaattgtttatgatttttttacatttttctattgtttaaaaggggaacagcttaaatacatataagtgaaatactgggcttgggggggaaaagtttatacactaactagactctttccaagaattatggtcatccgttgagaaatcatcctattggcggtttttcctataccaaatgaaagttggccaaactgcaagaccctgtacaagcccaaatacagggtgccacccagcgctttataagggtctcaattgatgcggcgaaatgctggaaaccgaaagtgaaatgatttgtttttacccactgtaaaaggggcacccgcgtagtgaatgatctttggctatgggaacccaccagacttagcacatgctcttgctaatcc

SEQ ID NO: 213177 - DNA, 492 bp, Glycine max; identical to SEQ ID NO: 209188

SEQ ID NO: 213178 - DNA, 533 bp, Glycine max
aatagaaattctcgctataatattgaatcactgacctgttttttttaatctaatgtacataaaagcaacttcaaccatcgtcatgataataatgccactaaacattgcctcttctttcattgacctacaaacaaaccgtgaaagcaccattctatgggtctaacataagctgcataattagctacaacaacaatattcacatgacagcctacgggcaaaataccaaacgtggccaatacatttagtcgagtattatatatgaagcaactagattctactggaaattatacacaaattgtatatcactggcaaactcctgattgccctatggatgcctcgtaggtaaattttttttcctcacacttccattcatagaacaagagtaactagaaggatgcagccacaaattctttcttccctccgtaacttttttataggaaatatgataactgttgttgcttccttgaaccgccttccccatacaattcattccactgctttaactcattcattcctgccccctcaactgcgta

SEQ ID NO: 213179 - DNA, 461 bp, Glycine max
agcaaagggcttagcttatcttcatgaggaatcaaggttgaaaatagtgcacagggatattaaggcaaccaatgtcttacttgataaacatctgcatgccaagatctctgactttggtttagccaaacttgatgaagaagagaatactcatatcaacacaagaatagctgggacaattggttacatggctcctgagtatgctatgaggggttacttgactgacaaagcagatgtctatagctttggaattgtagctttagagattgctagtggaaagaacaacacaaattataggccaaaggaggagtctgtatatcttttagattgggtctatgttcatcaagagcaaagaaaccttctggagctggtggatccaagtcttggttcaaagtactcctcaaaagaggccctgagaatgctgctgattagcactcttgtgcaccaacccttctcccactctt

SEQ ID NO: 213180 - DNA, 477 bp, Glycine max
aataaaaacactcaaaagaggagattaaatgaagaaaagaatggtaacaatagctggtggtgtgagtctttcaagccctagcagggtatttgctaatgctaagggaatagactcagcacaaaaggcccaggccgagaggtttccagctctgtcgaggcccattcaaaagtggcctggtttggtgaagacccggcccgttcggtcgacgccggagaagatatcggagaaggtagaggagagcataaagagcgcggaggaggcgtgctccggaggcggcggtgacgcagaatgcgcagcggcctgggacgaggtggaggagctgagcgcggcggcgagccacgccagggagaagcagaagcagtctgacccgctcgaaaattactgcgaggacaatccaaagactgatgagtgccgcacctatgataattgatgactgaactcagtcattccatagttacatgcatgcgtctattactt

SEQ ID NO: 213181 - DNA, 481 bp, Glycine max
ggatatttcaataatacaggagattatgcttccgttctcctccgtgtaaaggaagaccatgatggggcagaaccctcaggaaactcagtttctgctataaatcttataagattggcttccatggttgctggaagtaaggctgagcattataagcgaaatgcagaacatctattggcagtttttgagaaaaggttgaaagatatggctatggcagtgcctctaatgtgttgtgcagcagatatgttgcgtgtactttctcggaagcaagtggtcgcggttggtgaaaggacgtctgaggactttgaaagcatgcttgctgcagctcatgcagtatatgatcccaacagaacagttattcatatagatcccaacaacaaagacgagatggaattttgggaagtaaataacagtgatgttgctctcatggcaaaaaataactttgcagtcaacaaggttgtagctcttgtatgccaaaacttca

SEQ ID NO: 213182 - DNA, 646 bp, Glycine max
  unsure (1)..(646): unsure at all n locations
ctgttccgagaacaacaagcgccttatccatttctctacttgcgaagtgtacggaaagacgattggagcctttctccctaaagatagtcctcttcgtaaggatccggcatactatgttcttaaagaagacgagtctccttgcatttatggttctattgaaaaacagaggtggtcttatgcctgtgcgaaacagtcgattgagaggctgatttatgctgatggtgctgaaaatggcttggagttcacaattgtgaggccttttaactggattggacctcgaatggatttcattcctggcattgatggtccaagtgagggtgttcctcgggttcttgcatgctttagcaataatcttctcagaggagagcccctcaagcttgtggacggtggccagtcccagagaacctttgtttacattaaagatgctattgaagctgtcttgctgatgattgaaaaccctgccagggccaatggccacatatttaatgtgggtaacccatacaatgaggttactgttaggcagcttgctgaaataatgattaanggttattcaaaggtaagtggcgaaacaactccttgaacatctaccgtgatgtgagctcaaaagaatttatggtgaggatatgatgtagtgacagagatcctg

SEQ ID NO: 213183 - DNA, 588 bp, Glycine max
tgaagatcttttggggggttgtgaatttgtgtcttcttggctcccaacccacacgcaacgcaaccatagaatggaatgaatgaaggcaaagcttatacttataaaagagagatagaaattggttgtgaaaaacagaagcactttgtttctaagtaaaaggaatcttcagctgccatgtttcatcgctggagcaattctcatcaacaggatcagggaagcagcgagctttatgctgaatccaagattaaagagctgaagggtgttatcggacccttatctggacgcagtttgacgtattgcactgatgcatgttttaagagatatttggaagctcgaaactggaacgtagacaagtccaagaagatgttggaggagacactcacgtggagatcaacctataagccagaggaaattcgctggcatgaggttgcaatggaaggagagactgggaaattgtatagagcatgttttcatgatagacaaggaaggactgttcttattctgagacctggaatgcagaacactacttcaatggagaatcagttgcggcatcttgtgcatcttttggaaaatgcattgctaatcttt

SEQ ID NO: 213184 - DNA, 539 bp, Glycine max
gcagtatataaatgataactgtattataaatccctctttgcagtaattaattaaactggggatgcacccctagttctaatttgccaggagctaatggctttacaatgattagtatccataccatctccactaaaaccaagtgtatgtttggattaccgttccaatccttccaaagttattaactcaaaagtaacaaaagcatgcttctccctacgtactttcaatatagattcaccacctgcaaacggtaatccaaacattatgagagcttcattttagaactgatgcagaattcccgttgacaatgtggtttgagagcttcccatcagatccccaaaatgctgcacacttcaaatcatcctgaaccattaatctggagaactcctcatggttataactcattatgctttttccacctagttctttgggcagattttcctcatcaaaataggacttcatgacctgcacactatctttattattcgggtagacaaacttcaccttctgaaatgtcttgttgtccaagaagtacttgacta

SEQ ID NO: 213185 - DNA, 565 bp, Glycine max
  unsure (1)..(565): unsure at all n locations
cggctcgagtttagacctaactatcattgctattattaataatggccactaattatttaaatgcttaaatatgattttattcttaataaatatttaatttttgtatttatttttaataattttttattttacattaaatatctaataaaataaaaattttactttgttcttgatacttatttttagtttatgataaattagtgaattttgtatttgttatttaatttttttttatttattaatagtcagatctaaaacaaaaatttgttaatttattagaaaataaatacaaatttttttagtttatcaaaaacaaataaaatatagaggacaaaacataagtattgttttataagagattcaacgtaaaacaaatatttattaaaaaataaacataaaaattaaatatttattaaagattaaaaatatatttaaaccttatttaaaaatgataatttcacatttatcacgagcatatgaaggtggagctccatggtgctgatggttatggtggccctttgantattggaacttgtgctttcatagaaaaacgcttatgtgggag

SEQ ID NO: 213186 - DNA, 466 bp, Glycine max
agattggtgggaccgcaaaggatgaatttgaacgtccaaagaatttccagacaatggctattaaagcaaaaaggtaagaacttggtcttatgtacaaccacattcttaagtcattccaccaacccttgattgtgcctccagaaatcaaaccctcaatcaaagttgaagaactctccccgagttttacatatgccaaaggtatgaaccatgggctagacatttttggaaacaagggaatggctttaaggggataaagtgaagggatgaaggagtaatatagtattggcaaacaagtggttgcccaatagttaaagcgccaatatcccattagtaggcctaaattgatctttcctttaccataccatgtaggactgtactcagtgaacaaaatttggaagtcacctttaccccaccttttttgttgaactaatgtgtgaagcaagttatttggagcaattcccaaaaa

SEQ ID NO: 213187 - DNA, 469 bp, Glycine max
tgcctgatgacaagctatgacatgcactgctcccatgcgtaagacattgagattcgagctcgaggactcacctcattaacattgctatttcctacttatccttgcttgtcttgatccttggagctctgctcctcacccctcaagggcttgctgacgaaactgattcttactataagccaccagtttacaagataccaccagtgttcaagcccaagcccaagccatccattcacaagcccaggccatgcgtttacaagcccaagccacccgtgtacaagaaacccccttatgggaagcacccaccagctcaagacaacgatcacttctaaaccatgcaacagggcatgttaatgttcactgtctgctaaaaacgagaggattagactacctactacgtgcgttgatccttttacatcctgaatggtaattcacaaccttgtagggatgacacattctaggctagctctgc

SEQ ID NO: 213188 - DNA, 339 bp, Glycine max
cctttggtatcaatggtattagctcagcatttattggtcatattggttcaagggaacgtgctgcttatgctcttgggttcactgttctcatacgctctgccaatggaattctgttaggaatggcgagtgcgctgtcaacactctgcggacaagcatacggtgcaaaacaatatgtcatgatgggagtgcatcatcaaagatcatggatagatatgggcataacttcactctttgttcttgcggtgttcatcttcacgaggccgattttcctgccacacgtgatatattctaatcgtcggcctaagagcatgagaatccgacggagaaacaaacactatt

SEQ ID NO: 213189 - DNA, 366 bp, Glycine max
tttttttttttttttttttttttttttttttttttttttttttttttttttttttttttttttttgtttttttttttttttttttgtttttcgttggggaacccctttttttttcccccttccctgggaaaaaaaaaaattttcctttccccaaagggggaaaggggaaatttaaaagcggtaaaaagggccccggggagggatttgaaaacagtttttggaaaaacccggacccttttttttggggccaatattcccggcttttaaaaaaaggcccaatgtccccaaaaaaaaaagggggccaccgggttttccccccaatttaattttccatcaaaaaaaggggggttttttgggagcgggggg

SEQ ID NO: 213190 - DNA, 319 bp, Glycine max
attgtttaaacctaattctcattttttcatttttcgattcttctcctcctaaagatgcagatcttcgtgaaaactttgaccggtaagaccatcacccttgaggtggagtgctccgacaccatcgattacgtggaaacttaagattcaagacaaggaatggatcccacctgaccagcaaagacttatctttggggtaaacagcttgaggatggtcgaacccttgtcgactacaacatccaaaaagaatccactcttcacctcgtgcttatcctcaggggtggcatgcaaatcttcgtcaagactatgactggcaagacca

SEQ ID NO: 213191 - DNA, 449 bp, Glycine max
agtcgctcgtcgccggtggcgtttccggttgagtgtcacgtactgcagttgctcctctggaacgattgaaaattttgctgcaggtccagaatcctcataacattaaatacaatggaacagaacaaggcctaaaatatatatggaggactgaaggatttcgtggacttttcaaagggaatggtactaattgtgctagaattgtccctaattctgctgttaagatcttcagttatgaacaagcttgtaaaggtatactgcatctgtatcagcagcaaactggaaatgaggatgctcatctgactccttttttacgtcttggagctggagcatgtgctggaataattgctatgtctgcaacttatccaatggatatggttcgaggcaagattactgtgcagactgaggcatccccatatcaggacagatgaatgttccatgctttgtctact

SEQ ID NO: 213192 - DNA, 475 bp, Glycine max
caaggtaagaattttattgcacaatgagaaggcagagaaaattgatggttctgtttctcagtacaagtttaaaagaaaaatgaagcaacaagtgttgtagtggtagtagtagtagtaagcatacaaaattacaatggcatggtacatacataataatttaattaccaatgagaatttgtttggctctcacttccatttgttggcaacaatgtcagccaaatccacaaccctttgggagtagccccattcattgtcataccaagcaatgaccttcaccatgtcatctcccatgaccatggtcaacgaggagtcaacggttgaggacacatcagtgcacctgaagtcaacggacacaagtggctcatcacacacagagaggattcccttgagctcattgtctgcactctctctgaatgctgcattcacttcttctgaaaggtcttctttgagaccttgacgacgaggtccaccactg

SEQ ID NO: 213193 - DNA, 565 bp, Glycine max
gcagaagaaataccggagaaaagtgagttgttgagcagaagagtgttgtgttgtgcattcgcggaagaagaaggagcagatgggtaatccacggaaaccgagtaccgccgacgagcttcacacggcggcaaggtccggtgatctcatcgccgttaactcaattttggcttcaaatcctttggccgttaattccagagataagcattccagaacacctctgcatttagctgcattttctgggcaagcagaggtagtcacttatctctgcaagcagaaggctgatgttggtgcttctgcaatggatgacatggctgcaatacactttgcttcacagaagggacatttagaagttgtccgcgctctactttcagctggggcctctctcaaagccaccacccgcaaaggcatgacttcattacactatgctgttcaaggctcccatatggaactcgtcaagtacttggccaagaaaggggcaaaccttggtgccaagacaaaggcaggaaagacccctttggatcttgctaccaatgaagaaatccgctcctttctggaggaatatgag

SEQ ID NO: 213194 - DNA, 592 bp, Glycine max
  unsure (1)..(592): unsure at all n locations
tggaatgcaacctataccaactcatgaattacagggaaaaactattttctgaagctgaagttagaaattggtgttttcaagtttttcaaggtcttgcttacatgcaccagcgtggatacttccatcgtgacctgaagcctgaaaacttgctggttaccaaggatttcatcaaaatcgctgattttggactagcccgagaaatcagttcacaaccaccctacactgagtatgtctccacacgatggtatcgtgctcctgaagtgctgcttcagtcttatatgtatacctctaaagttgatatgtgggcaatgggtgctataatggctgagcttttctctcttcgtcctcttttcccaggtgccagtgaagcggatgagatttacaaaatatgtggtgcgataggcaatccaacctttgaatcatgggcggatggactcaaacttgcaagggatattaactaccagtttccacagcttgccggtgtgcatctttctgctatgattccgtctgctagtgatgatgcnatcagccttattacatcactntgctactgggatccctgcaagagggcaacagcttcagaggctcttca

SEQ ID NO: 213195 - DNA, 535 bp, Glycine max
  unsure (1)..(535): unsure at all n locations
ctcgagccgctcgagccgctctcctgaaggtaaggcagagaagagaagaagagaaggaaagaggcttgtccctggagaaaagaggaggcaaatacatggagaacgagggtgtaaacacggtggtggtggagcaacaacctgtggcatccacgtccaagtttccgttgagcttttgggaaaccacggtggcttcaacggtggcgctggttttcgcggtgggccttctcggcgtctacctcaccatgcccgattccgattacagcttcctcaaactccctcgtaccctccaagaccttcaactcctacgggataaccttgagagctatacaagtgactacactgcacaagtcttggtggggtactgcgtggtatatattttcatgcagactttcatgattccagggactgtgttcatgtcattgcttgctggagcactctttggagtctttaaaggtgtggctctggatggtntcactgacactgcaggagcttcatgatgctatttcctgtctaaacttattggacgacctattct

SEQ ID NO: 213196 - DNA, 488 bp, Glycine max
aggtcgagcgacaattcactaagctttaattttttcatcatggcttcctcgtgtgcttcctctgccattgcaactgttgccatctccacaccacgttcccagaagaatggatcactcttgggaagcacaaacgcttcttttcttagcgggaggaaactgatcgtgatcaactctacagtgccacttggagcacgacccagcactacagtttgcgcagctgttgagcctgataagcctgtgtgggtcccaagcaggacccctcctccatggctagatggcggagagacaacacattatggttttgatcctctaggtctagcatatgatcctgacagcctgagatggaatgtacaagcagagcttgtgcactgcagatgggccatgtagggagctgatggcattttgatgccacaattccacacaaagattgacatcctcaacaccccttgatggttcactgctggagagcaggagtacttgccagacac

SEQ ID NO: 213197 - DNA, 540 bp, Glycine max
gacaaataacattattatatcaacatataagcttacaaatttccacattttcaggaaacaaatgaaggaaattcatcccagttttgacttctgattgagtgaagccacaagacacgtatcgaagttcccaaattaacacaaattgcttggtcagatgacccaaaaccaagctataacagacccagcagctagaccaaaaactaagaataatacactcacaatccctgcagtctctgcatgctgcaacattacaattttaggaatcagaatcatcaatgcactggttaggtagccattagtaagccctaacaggcaagtcagtattgtcacgggaatctcagtccggaagaatttgggaccatgcaagcaacctaagaagagagggaaaaacaacaatcttgctatgcaaccacctatggcaacttttgcattctgtaggaggtaaactgcagtcagacacttgccaacaagatcaaacacattatagccagcaattaggagaattggataccaatccttaagaatttgagagtgaacatc

SEQ ID NO: 213198 - DNA, 505 bp, Glycine max
  unsure (1)..(505): unsure at all n locations
atgaagattccacaaaggaccttgacaaaaacaagtaacacaataatcagttacctctacagacaatataaacatttaatggaaacatcagcaaggtagcaaccaaagcaggaaactcgaagttctgtgaaatagatagacataaaattttcatatttcattccatgttctctgctacacctatgacctatttctgcaaatgtattctcttatcccttattggcaactcaacgggcttctgcgccgcatgtggatgatctgggcctttataaaccttaaggtgggtgaatagtctcctcccaagccttccttttggaagcatgccacgaacagcgtgttcaataattctttcaggaattctgttttgcagctgggcaaatgtctccacggtcataccaccaggtcgtccagagtgcctnctgtaaagctcttgggtcctctttttcccagatacagcaaccttttctgcatttaccacaattacaaacgcacncatgtccacact

SEQ ID NO: 213199 - DNA, 278 bp, Glycine max
tctacattcaaagaagatttttcttctagacgctaaaacagagaatatgttactaagtgctagtcggaatctacaaatagctgatcctggagtcgctcgggttgaagctattaatccacctgatatgactggtgacactggcaccctaggatatattgccccagatgttctggttgggaaaccttacaacaggagatgtgatgtctatagctttggcacttgcttgtgggaaaattattgctgtgatatgccttatccagatctaagctctgctgatg

SEQ ID NO: 213200 - DNA, 320 bp, Glycine max
atcatatccttttttatcgcatagttcgcatcctttaagcgttggtgggggcggggctggtgggagcaacggccttggcacggggaccgaagaacttggtcttctcctcgcgagtctggaagcgaccgtgttcgaacttggaagaggtgtcgatgaacttgagcttgatctgctccaaagcggctatggaagtctgggggaccagggaatttttgagggggaaaaacctttttctggttccgacaatggttaccttgagcattaagttggcggtctgaaccgtaccctaggggctgaattcacccataggggggaacttc

SEQ ID NO: 213201 - DNA, 553 bp, Glycine max
gaaaaagtgatagttgcacactgttttatttatttatttatacatgcaaaagtagtcaaaataattgacatacttgtctacatcaaaagttgacgaggaaaagtaaacctgcgtagctagctagctgtcccatgtacacttttatttaaaaattgaaacataaaaaaatcttgaaacgaagcagctaatagaatccattatttatatataacaataaactactatatacacatacaatgtattctagtttagtcccctaaaacacgagcaagttattctgggtgtcgtagcccaacttctccaaattcggctggactgcaaattgaatcataggtggtggtccacaagtcaatgccaaggtatcaggagatgcatttggaatatgctccgtcaggatactttcagtgatgaatcccacactgtattcccacccttctcttatgctttcttgtatcacgtaccacaccttcaacctatcatacttcttagcccactcatcaagctcttccttcagcaatatatcatccctcgggtcggtcgcgtaaaccacatg

SEQ ID NO: 213202 - DNA, 508 bp, Glycine max
gaaaaagtgatagttgcacactgttttatttatttatttatacatgcaaaagtagtcaaaataattgacatacttgtctacatcaaaagttgacgaggaaaagtaaacctgcgtagctagctagctgtcccatgtacacttttatttaaaaattgaaacataaaaaaatcttgaaacgaagcagctaatagaatccattatttatatataacaataaactactatatacacatacaatgtattctagtttagtcccctaaaacacgagcaagttattctgggtgtcgtagcccaacttctccaaattcggctggactgcaaattgaatcataggtggtggtccacaagtcaatgccaaggtatcaggagatgcatttggaatatgctccgtcaggatactttcagtgatgaatcccacactgtattcccacccttctgttatgctttcttgtatcacgtaccacaccttcaacctatcatacttcttagcccactcatcaagctcttc

SEQ ID NO: 213203 - DNA, 416 bp, Glycine max
gggtaagtaaattgggaatggtgttggttttgccacgtgtctgtctgaggagaaaatagaatcaatagctatgaaattgtggcccatggtctgattgtggaatatgaagaagatgactggggggggtgtcactatgcaatcgacgccgggaagctcatgatacttggatctgtatccagagcgtgtagatgtggctttttcaaaaatccttacattctcggactggctgctgtcgccggcatcggtggtctcctgttccgctactacactggtgtgatatcaggggctctcttatacattaaggatgattttgaggaggttagaaacagcaatcttctccaggagacaataatctatatggctattgccggggcaatcgcgggagcagcatcgggtggctggattaatgatgccta

SEQ ID NO: 213204 - DNA, 477 bp, Glycine max
caacactgcaggcacctttagatttttattttcttcactgttcacacacgatttcctcctttcctttcacattatcctttacctttttttaaacaagccagcccagcttgcttctgttccttctcttctaaccagtatcacctacacggtgtgtgtgtcccttcatcctggaaattagagccacaaacataacacattccgctttgactttggaggcaggtttttgtgctttgtctggctcccaatcaccgtgatatcatggaatccccacaatctgttgtgtcaccattcaagaggtctgtcttgggtgatgcagagaagtataggtctgatgttctgtctaaggacattgaagtcaatggaaaggaaggtgccgcgtgtaatgtggaggaattcattggtgttggtgatgtttacattcatcaggccagggacattcataacatctgcatataccacaagcaagatgtttatgct

SEQ ID NO: 213205 - DNA, 569 bp, Glycine max
ctttcgaaagattttatccaatttaaattttaaaaatgactgggataaacttaagaattcaattattgaaattgaataagtaaacaatttaattggattggtcgaatggtatcaaaaaaatggagtactaactcccatttcttatttattattgaattaaccgatcaacttgctttgttatcgaacatttctttttgatttcaaaaattttccggaaaaaatttgaatctatttttatatgcgaatcaatcctactacttctggtcctgaggtttctgcgcttgaaaaaaaaaatctgggacgtatcgcccaaataattggtccggtactagatgtagcttttcccccaggtaagatgcctaatatttacaacgctctgatagttaagggtcgagatactgttggtcaacaaattaatgtgacttgtgaagtacagcaattattaggaaataatcgaattagagctgtagctatgagtgcgacagacggtctaatgagaggaatggaagtgattgacacaggagctgccctaagtgtccagtcgtggagcactctaggacgaatttcac

SEQ ID NO: 213206 - DNA, 499 bp, Glycine max; identical to SEQ ID NO: 208427

SEQ ID NO: 213207 - DNA, 565 bp, Glycine max
  unsure (1)..(565): unsure at all n locations
ctttcttggaacctttttaattgtttcttctttaaaaatcaatttcctttaaggctttaactttaatattagagttctttctctttcattcatccttggtaatggcttgcgcattgcaagcaaccttagcagccaacacctatgccttttcttccaggagattctccttgaagcaccaaaagaacagtaagagaaggttttctttgttcactgttagagctgattctgatgactctgactgcaatgaggaagagtgtgccccggataaggaagtagggaaggtcagtgtggaatggttagctggggagaagacaaaagtagtgggcacattcccacctcgtcgtaagccgggttggactggctatgttgagaaggacactgctgggcagacaaacatatattcagttgagccagcagtttatgtggcagaaagtgctataagttcaggaactgctggctcttcttctgatggagctgagaacacagcagcatttgctgcatgccttgctctgatatcgattgcagcagcatcgtcgatactgctacangttggtaagaatgctcc

SEQ ID NO: 213208 - DNA, 522 bp, Glycine max
aaagataaacacactttcagttggtagcagtggcataccaagaatgatgttcaacatttgcatccattaacctttagttgtgtatacacaaaataaacttctttggtatgttttggtagcaaaagtggtaaccacttgatacacctacgatttaatgttcacactagaggtctcagaagcttgagcttcaacctgaacctgggaaacttccggaggtgggctttcaggttgaacagatgaggatagttcagcctcacttggcacagacacttgagtaatttccggcggcgtgaatttgttgatgtagtaactaagtgatggtccagagtattgagccgtctggatctgaggaggagcattcttaccaacttgtagcagtatcgacgatgctgctgcaatcgatatcagagcaaggcctgcaacaattgctgctgtgttctcagctccatcagaagaagagccagcagttcctgaacttatagcactttctgccacataaactgctggctcaactgaatatat

SEQ ID NO: 213209 - DNA, 520 bp, Glycine max
caatcgatccatcttcactcccaagtttatgtaaaatgacctttgtttcacgtagtcttgcaccataatcctttttccaagcttcaaacatttgttttaaccttctaagctctctatctgggttcaaacttgcttcaacttgaccagattttacctctaccaagaatttagaatcatcaccaaacacttgactcctttgctcaaattcttcagccaaccgacttataacactcaaaccagcactcattgattttgccccattgctttcttggcgccggtgattggttcctacatcccagctgaaatccctgtcatcacttgcattaacagaagcatctgaatttctttcagaatcatccatagcaaggctcttctttgcaatagagaggctagattgtagggacctcatttgtttctgccatacttcttccatggatttcatctttaattcatattcagaccatctgttctcatactgttgaaggcgttggtgaagaatgtcattttcctcttctttctc

SEQ ID NO: 213210 - DNA, 334 bp, Glycine max
gttgagaagccttcaagcacaaaatttatttccattgttgcttcttacaatgacactccaaatgagccaactcccagtgatcctatttggctataccatagtgatcaaattgggcacctacgtgatgtagacactatctatgtgtacaaatcaagacccaacagcaccatagatattgagaggaagaagaactctcttagcaagatgtgggtgccatactatccaatagctggcagattgaagctgacaaaaaacggtagaatggaagtggattgcaatgcacaatgagagacattgattgaagctcaaagcacagacacatttggtgattatg

SEQ ID NO: 213211 - DNA, 368 bp, Glycine max
ctgtcaagaaagttgcacttgttttggtcaccggcgaccgctgcctctgcggcggttggaccaccgcactcataaagaaagctgacgctcccatcacggaattgaacgatcttggctcggaatccactgccataagtggaggccagacgggtaactcttatttcatcagagagcgctatcttccggtcgccccgtttatatacggcgccccacttgcaactgctaaggaagctcatgccagagctgacgatgccccctcactcttagggagaccaaaggtctacagaggggagcttctatcacaccgcgttaaactctttggtgaaagaggatcccacgagctatacctagctttctctttctgccaa

SEQ ID NO: 213212 - DNA, 464 bp, Glycine max
ggtcaaaactccccaacactatcatggaaattatcattgtataatttatgaaacaggctagtacttaaactcccgatcttagaacacaaattttcgtcccagcaacaaaatctttcataacttgcgaagccagcgagcaaaaagctaaaaagtaactaatgcaagcaaaagatcaaatttcattaaatgacaaacattgaccgaaacaaaatcttcccgatcgcaaatattgcttccacaactgctcaacgattggcctttgcaactctctcaatttcatcctttttcttgatagcatagctgttggatgacccttttgctgcattaataaggtcatcagccaagcattctgcaattggcttaatatttctgaaagcagcttcccgtgctccaggtgttaaaagatagatagcctgggtaacacgcctaaggggtgagatatccacagcctgtctcctaacaac

SEQ ID NO: 213213 - DNA, 484 bp, Glycine max
cttctgcatgaccttccttatacataagactaaaattagcagagtgcatgcggccaggcgggtatttgagtacctatccgacaattctgtaaacttgcctgttattcaccatattcagatcccaaatgggactcacagagatgacttggtaattggcgctggttctgatgctggaccccttctgagggatgggcttggagatggacttcttttggaagcgccagacaaggattgtgaatatattagaaacacttctttcaatttggagcaaggctgcagaatgagagatacaaagacagagtgtgtctcatgtccatcctgtggcagaacattggttgatctataagaagttagtgcgcaaatattggagaagacatcacacctggccggtgtttcgactgcaatcatgggatgcattgcacatggaccaggggagatggctgatgcacactttgggtatgtgggaggcactcccgggaagatt

SEQ ID NO: 213214 - DNA, 566 bp, Glycine max
ggtacatatcagcataagacaatttattatatatatattttaaaaatactgaacgaaaagctcatgaatatttcacaacttcctaatgtagaaaatccgaacagcttttctacatataagtgaaatactgaaaattgaaatagaaaagtttatacactaacaagactctttccaagaattatgtcatctgttgagaaatcagcctctttccggtatgttcctctaccaaagtccaggttgtacgagtctgcaagaccctctacaagcccaaattcaggttcccacccaagcactctctttgctttctcaattgatgcaaagaaatgctggtcacggaatggaaatgatttctttttcccaaagtcaaaatctttagggttgtagtgaatgatctctggctctgggaacccaccagccttagcacatgctcttgctaatccgtcaaacgtgacatacttctctcccgagatgttgaatacttccttgctggccttctcattaccaagaacttggataaaagctgtcgccaaatccttaacatgaccaagtggggtatctgagtcctg

SEQ ID NO: 213215 - DNA, 233 bp, Glycine max
aattgtttaaacctaattctcattttttcttcgtacgactcttctcctcctaaagatgcagatcttcgtgaaaactttgaccgagaagaccatcacccttgaggtggagtcctccgacaccatcgataacgagaaagctatgattcaagacaaggaagggatcccacctgaccagcagagacttatgtttgcggataaacagcttgaggatggtcgaaccctaggcgactaca

SEQ ID NO: 213216 - DNA, 372 bp, Glycine max
  unsure (1)..(372): unsure at all n locations
gcatgaatgccatgatgcaaagtttcatcaaaccaggaataaaataaaatttgctcaagtcaacaaaggagtatactgattcacagtttcacagaactttcactcctcgatccattcacttatcaaatttacagatagatttctcagatttcaccatcccaaagttcctcaagggatctgtaggcaccataagtttcatgggcaaatgtggtacccctgagtaatcttgcctgttgaatctcagaaaatttggcgagcaggtcctcaggtatagaccagccaaaaacatcaaaattttcctttattctagnttcgtttgtactcttgggaagaacactatggcccatttgaagtccccagcgaagagctact

SEQ ID NO: 213217 - DNA, 500 bp, Glycine max
ggataccatcaaatctccaccatctgaagtaaaaacaatgaagaaggctgcaaagttaagtattgcagtgaccacaacattttatatgctttgtggctgcgtaggctatgctgcttttggagattcaacaccttgggaacctgcttgctggatttggtttccataaactatattggcttgtggatattgctaatgctgctattgtaattcaccttgtgggggcataccaagtgtatgctcaacccctctttgcctttgtagagaaggagacagcaaaaagatggcccaaaattgacaaggaattccaaatttctattcccggtttgcaatcctacaatcagaacatatttagcctagtttgtaggacagtgtttgtgatcataaccactgttatatcaacgttgcttccattcttcaatgatattttgggagtgattggagcattgtggttttggcctttaactgtctactttcctgtggagatgtatatattgcaaaag

SEQ ID NO: 213218 - DNA, 543 bp, Glycine max
aaagtgctactccatttaataaatgccagataatttgttctgaatacgggaaacaataagagcatcaaaactacagctaaaagacaattatccaaccacgagctgttaattttacatcccatcatcaatggagcatttataggataatctgatagagaaattcatatatccttaccattattaccatgcctgacaagacgtatgtacatttgctaactgtaattgctattaagatacacgatgtctgtctgagaaattatggtccagatatccacagccacaactacatcctctataaacttatatatagcgagggataggaaaacctaagaatcacggaaaattggttgcggcatccacttgagatgcaaattcaaaaaagccagatttggctccatctagcacaaaacgttctttggattccccttccagtattaccctggtaagcgtcaatgtgcatctgcccatatagtcctttccgaatgtgtcgtggtcccaaacttcaacaattagcatatcatgtaatccatcctcaacaacaaa

SEQ ID NO: 213219 - DNA, 526 bp, Glycine max
  unsure (1)..(526): unsure at all n locations
gaaaatcctgcttctgatataaatgtcagaatcagatacatcatcaacttcagtgggaaaaactgatggtgaaaatgcagttcctgaatccaaagttgaagttccccccgacaatgagtttgagaagcgaataaggcctgaggtaataccagcaaacgagattggtgtgaaattctcagatgttggtgccttagatgagaccaaagagtcgcttcaagaactagttatgcttcctcttcgaaggccggaccttttccggggaggccttctaaagccttgtaaaggaatattgctatttgggcctcctggcaccgggaagacaatgctggcaaaggccattgcgagcgaatctggcgcaagtttcattaatgtatccatgtctaccgtcacctccaaatggtttggtgaagatgagaagaatgttcgtgctttattcacactgggccgccaaggtctccccaactattatatttgttgatgaggtggatagtatgctacgacagcggaccanagttggagagcatga

SEQ ID NO: 213220 - DNA, 576 bp, Glycine max
cacaaaagcacttgcaaactagttttgttttgggaacatcatcacattacattagattggtggtaatggcagcgtcactacaagcagcagctactttcatgcaacccaccaagttgagcaggagcaacactttgcagcaaaagtctactcagtccatttccaaggcttttggtttggaacctgttggagctaaaaaggtcacatgctcccttcaggctgatcttaaggacttggctcacaagtgtgttgatgctaccaaaattgcaggattcgcccttgccacctctgccctcgttgtctctggggcaagtgctgaaggtgttccaaagaggctaaccttcgacgaaatccagagcaagacctacttggaagtgaaggggacaggaacagcaaaccagtgcccaacaattgatggtggattggactcatttgccttcaagccggggaaatacaatgccaagaagttgtgccttgagccaacttcattcacagtgaaggccgatggtgtggccaagaatgctccccttgagttccaaaacacagagctcatgacacgtttgacctacactcttgatg

SEQ ID NO: 213221 - DNA, 396 bp, Glycine max
gggcccgaaaacttacaccccccataaatttaaaccctgaattttaaacattggcatcggggggcgatataataatcacccctgaaggtctttttaaacgggctaggaaagatggggcaagggattatgccgcgaccccatgcatgaagttactaacaaaatttgggccaacaaacaaaacagaaaacaaaacactttttgactaaagctgggcataccaaatgccccggattttgacatccttgggggcctttggtcccaaaaaagggccaaatgggtgaacaattttgaacacaccgataaccttacccgtttaaggcttgggcttggggaccctcaaggggatttcgcccttggaagaagagggccttttatgggctcccttgggaaggtctt

SEQ ID NO: 213222 - DNA, 582 bp, Glycine max
gcctctcttccatctccccagcctaaacctctctcaggaaggccacattacgcccttccgtcttcgcaacccttaacactccttcttctccttcctcttcatcttccttcccctctctcattcaagacaggcctgtttttgctgcccctgcccccatcatcaccccaactgtgagagaggatatggcaaaggaatacgagaaagctattgaagaacttcagaaattgttgagggagaagagtgaactcaaagcgacagctgctgaaaaagtggagcagataacagcttctctagggacatcatcatctgatggcatcccatcatcagaagcctcagacaggatcaaagctggtttcattcacttcaagaaggagaaatacgacaagaatccagctttgtatggtgaacttgccaaaggccagagccccaagttcatggcgtttgcttgctcagactcaagggtgtgcccatctcatgtgctagatttccaaccaggagagggccttgtggtcagaaatgttgccaacattgtcccaccatatgaccagtcaaaatacgctggaactggtgctgcagtgagta

SEQ ID NO: 213223 - DNA, 551 bp, Glycine max
gaaaaatgaaaattttataacaagaggatttccaactcttattaaaagaagattttccgacatgcataaacgcagttcatagtttcatatatatctttataaatatcatatggtgatgaaggtggctaggcctcttcattgcagatacacacgacctctaagcatggcccctatagcttccaatggagaatggtggccacatctttaacttagggaaccaagatgaggtcattgataatggttgatgttcatacggagaaagaggatgcaaggccaaactgaaggccccagagctcaaaagatcctttaacaaagtcatagtatcctcctttcagtgacaatgttttgttcaccaagccatctctaacaaatgggtaagttagcaggtttccaagggaaacattcacagattccttctcacagtgtgagcacaactcagcaaaaggggcatccccatgctgtgtcttcacctttgcctttgcaggcaagccaattttgacccactcctcaataaaatcagtagagtggttccatcatatgggaaaagacag

SEQ ID NO: 213224 - DNA, 521 bp, Glycine max
catttttcttcctccatctttattttaaacataacttgaactctccattccttaaattttagctacgagctagttccgacacagacaaagcaatggcaaagaccgagttagaggtgactgttgagagcaagaacaaagacctcaagcacctggggtttgtgaggattgctgctattcaaacatttgtgattgtgtcaaatctgtatgagtacgcaaagcagaattctgggcctttgagatccgtcgtaggaacggttgagaacactgtaaccaccattctcggtcctgtctgcaacaaattcaaggacgtgcctgatgatgtccttgtttttgatgacaaaaaggtggatgaagcttcccacaagttcgatgagcacgctcctccttttgctaaacacattgcggatcaagccaagggtgtgattcagaaagtgacttgtgaggcagggaaagtagcaggtgaagcacaatctggggggccaagagcagctgttcattatgttgctacagaatcaaagcat

SEQ ID NO: 213225 - DNA, 534 bp, Glycine max
  unsure (1)..(534): unsure at all n locations
aaaggaggaagcaacctttatgagcattatcatccgcaccattcatttacataaaccctattttctacatggattagttacacagtcttgccaagtctttactaacttaaaagtttttctagtcacaaccaccacatgccccacaatgtcacaacccataaaacaaggtcactcaaaagcaaattttttgaagaagtaaagctcaatttaatcagaatcagatgattctgatctctgttcctcagaggctgcattatctcctttcaagttagcctctccctgcttgaatgccttggctatctcttcaatgggaatcaaaggtagatacccaacgaaactgtaacccttttgagtcatggccttgatcacatgattgtacttctctgaccagtgagcaacagtgggaattgccatctctgacagtgcatggaatggtggatagtggttgagtccattccacaactttactgaatttatcaacacanaatgctttgattctgtagcaacataatgaacagctgctcttgggccccc

SEQ ID NO: 213226 - DNA, 591 bp, Glycine max
atttgatttcgaaatccgattattatattcctaacccgaagtgctccttggtgtattcataaaaagtaataatttttcttcgaatcttagcaattgatatcctttcgaaacaccatttttttcttcatttgaattgacagtgaattctttcgatttcttattcgatttatgtattcttttttctaaattaaacaaggcaaggactaactcccgaactgcaagtaaaaaaaatgatagaatagaatatagatttatctataagctctatgacttgtaatagaacttatgcttgatagagaggttattatcatatagagctgacgaatgagatgaagttgagttcattaaataaagacgaaaaatgacaaataagaaaacattcattccccttctatatcttacatctatagtctttttgccctggtgtatctctttcacatttaagaaaagtctcgaatcttggtttattgattggtggaatactaggcaatccgaaattttcttgaatgatattaaagaaaagagtattctaaaaaaattcatagaatttgaagaactgttttctagatgacatgtaaaggatgtccggaa

SEQ ID NO: 213227 - DNA, 523 bp, Glycine max
gtgggacgatagttttgaaaagacagattgcctatcttctctttaatctcaggcgaaatacgatcggggggtgccaattcaaaaccttccggtaaaataagaacagcccccacattcaaagctccctttttaccattagcaagaacttgtttcacttgcatatcataaggaattcgaacaactgcttcaaatacagtatcaggaagtaccgcttgtggaacctcaatatccacgggcttattagctaaatggcaattggcacagacaatacgaccggttgcttctcggggattttcataaccctgctgtgcaaaaattggatatgcgtttgaaatgggtgctcgaattattatatatatcatgatcgatatggaaatggatcgagtaatcccttcctttatacaagaaaaagcatttctagtttgcatggtctaatcattgatcctgaaaatctctacaattagattaagtaggtcactcgcatagttccctatccaagtcggggaacccctttttcatttaa

SEQ ID NO: 213228 - DNA, 550 bp, Glycine max
aactttttgattcctaaattctttaaaattcgaaattctaatttcgttaggggaaagagattgtttgtgtgtgagtgagtatggctggaaaaggcgagggtcctgctatcggaatcgatttgggaacgacgtactcttgcgtcggcgtgtggcaacacgatcgtgttgaaatcatagccaacgatcagggtaacagaactaccccatcctacgtggctttcaccgacacagaacggttgatcggcgatgcggcgaagaaccaggtcgctatgaacccaaccaacaccgtttttgatgctaagcgtttgattggaaggcgtttttccgatgcatcagtacaaggtgacatgaaattgtggccgttcaaggtgattcctggccctgctgagaaacctatgattgtggtgaactacaagggggaagagaaacagttttccgcggaagagatatcctccatggttcttatgacgatgaatgagattgcggaggcgtatctaggttccaccataaagaatgctgctgtcactgtgcctgttacttcacgactcac

SEQ ID NO: 213229 - DNA, 504 bp, Glycine max
gagcaaaaacttatatcattgttcaagtagaaacggggaaaagtacattaaaaaaaaaagagaaaaataaaatcgcaataaaaacataatgacacgctgttatctaaacttcaaaagggtctttgacaaaatcaagaacaacccatgagaatcttctgcttaatcgacttcctcaattttgggtccagcaccgcttccactgccagctgcaggaccatcctcatccatggctccacccgcatcaccaccagcaccctggtacatctttgctatgatgggattacaaatgctctccaactccttcatcttatcctcaaattcgtcagcctcagcaagttggtttccatctagccattggatagcctgctcaatcgcatcttcaattttcttcttatcatcagaagacagtttggaagcaatcttgtcatccttgattgtgttcctcatgttataggcataattttccaatgcatttttggcctccactttcttcttatgctcctc

SEQ ID NO: 213230 - DNA, 530 bp, Glycine max
gttgagaactaagaagaaggaattggcttcctcaatgatctcctccccagctgttaccaccgtcaaccgtgccggtgccggcatggttgctccattcaccggcctcaaatccatggctggcttccccacgaggaagaccaacaatgacattacctccattgctagcaacggtggaagagtacaatgcatgcaggtgtggccaccaattggcaagaagaagttcgagactctttcctacttgccagacctcgatgatgcccaattggcaaaggaagtcgaataccttctaaggaaaggatggattccttgcttggaattcgagttggagcacggtttcgtgtaccgtgagcacaacaggtcacctggatactatgatggacgctactggaccatgtggaagctgcctatgtttggctgcactgatgcttctcaggtgttgaaggagcttcaagaggctaagactgcataccccaatggcttcatccgtatcattggatttgacaacgttcgccaagtgcagtgcatcagct

SEQ ID NO: 213231 - DNA, 557 bp, Glycine max
agttctcatccattaatttccattgaagtccgaaaacagaaaccaaaaatacaggatgatgaaatctcataaagcaaaaacaaatgggaatgtagtttaagtacaacaaacaaagtggggtggctacagatgctttgcaaatttttcaatgacttagaagcctgggggcttgtaggcgatgaagctgatgcactgcacttggcgaacgttgtcaaatccaatgatacggatgaagccattggggtatgcagtcttagcctcttgaagctccttcaacacctgagaagcatcagtgcagccaaacataggcagcttccacatggtccagtagcgtccatcatagtatccaggtgacctgttgtgctcacggtacacgaaaccgtgctccaactcgaattccaagcaaggaatccatcctttccttagaaggtattcgacttcctttgccaattgggcatcatcgaggtctggcaagtaggaaagagtctcgaacttcttcttgccaattggtggccacacctgcatgcattggtactcttccaccggttgctagcaat

SEQ ID NO: 213232 - DNA, 531 bp, Glycine max
cactcataacacaaagctcaaagcaaagctcatccttgagttaaaaaatggcagcagcttcttccatggctctctcatccccatccttggctggcaaggccgtgaagctgggcccatcagccccagaagtgggaagggtgagcatgaggaagaccgtcaccaagcaggtctcctcaggaagcccatggtacggcccagaccgagtcaagtacttgggcccattctctggcgagcccccgtcctacctaaccggcgagttcccaggcgactacggctgggacactgctgggctttccgcagacccagaaaccttcgccaagaaccgtgaactcgaagtgatccactccaggtgggccatgctcggagccttgggctgcgtcttcccggagttgctgtcccgcaacggggtgaagttcggagaagccgtgtggttcaaggccgggtcccagatcttcagcgagggtgggctcgactactagggcaacccaagcctgatccacgcccagagcatcctcgccatctgggccacac

SEQ ID NO: 213233 - DNA, 562 bp, Glycine max
  unsure (1)..(562): unsure at all n locations
gtaaaaagcaagtaacattaagttggattcggatacacaagataattcacattatctgaagtacttcaccaaacacaaatctaaaaactctcaaaagtcatttcgttctttgacgctcactttccggggacgaagttggtggcataggcccaggcgttgttgttgacagggtcagcaaggtgatcggcgaggttctccaatggaccctttccggtgacaatggcctgaacaaagaagccaaacatagagaacatggccaatcgtccgttcttgagttccttcaccttaagctcagcaaaagcctctgggtcatcagcaaggcccaatgggtcgaagctgccacctgggtagattgggtcagtgacctcaccgagggggccaccagcaatacggtaaccttcaacggcacccattaggataacttgtgtggcccagatggcgaggatgctctgggcgtggatcaggcttgggttgcccaagtagtcgagcccaccctcgctgaagatctgggacccggccttgaaccacacggctttctncgaacttcaccccgttgcgggac

SEQ ID NO: 213234 - DNA, 425 bp, Glycine max
cgaccataaagaatttcttaggccagattttccccttttcttctctggtgccacacctttagttggagcgttgccttatgctcagagctatggcgggcatcaatttggtatgtgggctgggcagctgggagacggcagggcaatgactctaggggagatactgaattctaactctgaaaggtgggaacttcaacttaaaggagctggcaagactccttacagtcgctttgccgatggccttgccgtcctccgcagcagcgtcagggagttcctttgcagagaggcaatgcaccaccttggtataccaacaactcgtgcactttctcttgttaccaccggcaacctcgtcacccgtgacatgttttatgacggcaatccaaaggaagaacctggcgcaattgtttgagagctgcccaatcttttct

SEQ ID NO: 213235 - DNA, 603 bp, Glycine max
  unsure (1)..(603): unsure at all n locations
accaagaatcccgtaattttaatagatcaatttactgacccatcacaaacaaattttcacactacaataacaatcaacccgcaaacaaacccttcgaccaaatgttacattgtacgtgttaaataatactcggggacagtatattggaaacatatggaaaaataataaacaaagaaacacgctactatttttttgctcttaattaattcctagtttttatgttttcatttttgtaatcctttagacctaaatgggagcctcatgaagaacaagaaagcatgcatacacctggtcgatatgcccaagctgggggcaagcgagcatatttttccattcctggttgctcatcatacggatgctccactaatttgagcaggctgcgaacctctccaaaatcacctatttctgcagcatcaattgcagtctggcagagatagttcctcagtatatatttaggattcactgaatccatcgagatcttcctttcgtcatcaggtatcccactggtagagacctcatgtatataagctttcaaccaactggtccatgcttccttacgctctttaccaatatctaacagtacagnacttagtgggactaaca

SEQ ID NO: 213236 - DNA, 516 bp, Glycine max
gtaacttatggtagaatatgtgtcaagagaagtgtgttagagagtgtgttggtagtacttctctaatttatatagagaccattcactgttaatccaccatcaacacaaatggtctgtcctgttatgtaagaggctgcaagtaaagcgaggaattcccacaattgaaaacccttcctttgcttctccaatccgaccagggggggttcgccaaatgaaagcattaagaagtttttcatttttaaaatgctgcaaggaaataatgataagataccctcactccacataaaggaattaaaacaaatgaaaaaaaaaaacaaaaaacattagcaccatactcttttaaacataattttgttattaactaaaatttattaaaaattataaaagttacttaacatcttatttaatgagttttgtccataagaaagagtatgatcgggttaaaattattactacatgatttgtgattccgaacaatcttcatatgggatatatgtcatgtaataacttttcatg

SEQ ID NO: 213237 - DNA, 496 bp, Glycine max
agttattccgatattcggacgcatcaacttgttatgaaatcacattgatagcctctactcgtgtcctagctcgtctaagagctagatttgcctcaattggttgtctcttgccttccgccttattcaaaatagcttctgctatttcaggagttggctgtgcttcttgtggatcaatgtcactacccttttccgcatcatttactaaaacaatgatctcattattgtttattctagcaaaaccgcccatcagagccatcgttaaccattggtctttaagaagacgtattctcaaaatacctatatctacggctgtggcaataggcgcatgatttggtaatactccaatttgtccgctattagtagataaaatgatttccttcacttccgaatcccaaacaattcgattgggggtcagtacacaaagatttaaagtcatttcttcaaattgctctccatttctaagttcgtagctttcgcagtagcttcatcgatatta

SEQ ID NO: 213238 - DNA, 493 bp, Glycine max
aaacataaaacatttacttcctttctgatatataatacaaaatagtttttccttctatgttgtctagttctactatggcagcaaaagcttaaaaccacagatttaagtgatgtttcacagatttacaagggcagtaacttttcacaagatccaattaaaacctgaccttaattccctaataaagtatcgaccctcgcatttactgctcttgacaagaacttcatacaaattggtggcttaactccagcaagagcaagtattgaagcaggaagagtccatattccatcgccacatatcaaaccagaagctacagctggtgcaaaagcatctgccttagccttgttaatcctctcccacacatacaatatcagacttccaacacacatatcaatggcaaagtatggccctatatagaaaggtattgccatggccattggaagtggtatgaacctccctctcttgccaaggaaatctttaatcaagtttattgcga

SEQ ID NO: 213239 - DNA, 475 bp, Glycine max
tcttttttttttttttttttttttttttttttttttttttttttttttttttttttttttttttttttaaaaggaaaaggccccaaattcaatttaaggggcccctgtacctcaaaattttaggggaagacggcccaatttgaaaaattttggaagaactttttaaacttagcctttttttttttgcccctaaaacattggaaatgctaaaaatgttacccccaagttccatcacaacttttagcccttggattagtacaacaaccttcacaaacaaaaatttttacttgccaagtttgttttgcctccaattaaagactggaaaaaagttcccctttgaatagcatcctcgttggcatttccaagagccgccttgttcaagtacttgtcagccaattggacttttttgacatttttttgtttttggacaagcattttaccatacagcaagagcttttccagagtcattttgggc

SEQ ID NO: 213240 - DNA, 358 bp, Glycine max
aggacaaaaggaaaaggcccccaattcaatttaagggggccctggaactaaaaattttagggggagaagggcccatatggaaaaatttgggaagatcccttccaccttggctttttttttttggccctaaaaacattgagaatgctaaaaatgtttcccccaagttccattccaacttttagcccttgggttagtacaacaacctttacgaacaaaaatatttacttgccaaagttgttttgcctccaattgaagacgggaagaaaggtcccctttgaatagcctccccggtaggatttccaaaagcaggctttttcaagtacttgtgagccaattggactcttttgacatttttttg

SEQ ID NO: 213241 - DNA, 548 bp, Glycine max
  unsure (1)..(548): unsure at all n locations
ctgagtcttgcaattgaagttgttgtcttgcccttctctcttcaactccaaacacaagacatcatcatccatggctgcctccgtctccactgtcggacctgtcaacagagctcttttgaacctgaatgggtctggacctggggtttcagctcccagttcatccttctttgggagcagcttgaagaaggttattggctcaagggtccccaacacaaagatttcctctggaagcttcaagattgttgctgtagaagagaagaaagagattgaagagacccagcagaccgacaaggacagatggaagggtcttgcctatgatatctcagacgaccaacaggacatcacaagaggaaagggtttggttgactcccttttccaagctccacaggatgctggaactcactatgctgtcatgagctcctacgagtaccttagcactggacttcgccagtacttggacaacaacatggatggattntacattgctccagcttttatggacaaacttgtctgtcacattaccagaacttcatgacccctgccaacat

SEQ ID NO: 213242 - DNA, 542 bp, Glycine max
  unsure (1)..(542): unsure at all n locations
aggacaaaaggaaaaggcaccaaattcaatttaagtggacactttaactcaaaattatagaggaagacagtccaatatgaaaaatatagtaaaatcatctcaaacttggcatcttctctttgcacctaagacattgagaattctaagaatgttacacgcaagtcccatcacaacttctagcacttggatcagcacaaccttcaggaacagaaatatttacttgccaagtttgctttgcctccaattcaagattggaagaaagttcccctgttaatagcatcctcgttagcatttccaagtgcagcctcgttcaagtacttgtcagccaattggactctcttgacattctcttgttcttggacaagcatgttaccatacgtcaagagcttctccagagtcatcttgggctgctcaaaggttggaggtccatcttttgagttcacaagcttcttcccaatgccgtcaacaccaacaccagaaatccacttcctcacttcgtcatcatatactctggccctcagtgcaccanagaaatcaatgga

SEQ ID NO: 213243 - DNA, 545 bp, Glycine max
gaaattaagaaaaaatggcagcttgcactgtctactcaacacaatctctgagcacaaattgctccatctcaaccccatcaaagacacagctgagtttcttccaccaaaagcaggtagttttctggaggaacagcaacaggggcaacagcagcagcagaagaagctatgtgataacatgtgcagcaggtgactcacagacagtggtgattggtcttgctgcagactcagggtgtgggaagagcaccttcatgaggaggctgacaagtgtgtttggaggagcagcagagccaccgaagggtggcaaccctgactcaaacacactcatcagtgacaccaccactgtcatatgcttggatgattaccactctttggatagaactggcagaaaggagaagggtgtcactgcccttgaccctagagccaatgattttgatctcatgtatgaacaagttaaagctcttaaggatggaattgctgatgaaaaaccaatctacaaccatgtcactggtctactggatcctcctgagctcattaaaccccccaaa

SEQ ID NO: 213244 - DNA, 608 bp, Glycine max
  unsure (1)..(608): unsure at all n locations
attgtctcaatcttgtatcaacataactgaatctcagcctcacttttttttctcggataagtacatacatacatacatatgtgtttttttcattaattatgatgcagaacagcctaataacaatagacaaaataacatgaaacacagtgaaattgtggaaaacatgaaagaagaaagaaaatgatgattttgatgagaactaatgcaatttgactgcgtcgctcggtcgatatgtatatatattattatggcaggttcaattcaattcctaagcttttgcagccactggagtctcagccttggtggctattagctgctcatataaatctcttatcttcaaaccaactatggtttggaagagacctgttccattgttgctgccggggaaatcagcatgcttcaacatctgttgagtaacctctccatagaactttgtagagaggttgcttaggtggctctcaacgtatattagttcatctagtctgtcaaattgtccatccatttctacaagtgacacctcatttncgtagtaagtctctggtccatagaagaatntgatgccagtgtaggagcatgtaagcttccttccacatggtattcatgaaatg

SEQ ID NO: 213245 - DNA, 562 bp, Glycine max
gatttattgttctgaagtcacttggccacgccttgatctttgcaagcttggttcacttacatttaaaactccagataatgtaaagtatccatccatgaatcttgtattttctgctggccgtgctggaggcacaatgacaggagttcttagtgcagcaaatgaaaaagctgtagagatgtttattgatgaaaagattagctatttggatatattcaaagttgtggagctaacatgtgagaagcatcaaaatgaattggtatcctctccttcccttgaggaaattattcactatgacctgtgggcgcgaaaatatgctgctagtctgcaagactcttccagcttcactcctattcttgcatgaggatgattaaactagggatgtggctgatgcttcccaattgcctgctttcaccataatttcttcgggcattgaacaatgtagaatggtgcattccacagatgttgaaaattaaataggttttctgcttatggaatgctggcgtttaacacctttcattgatcttatagttggcgaatttcatggaaacgatgtctttatagc

SEQ ID NO: 213246 - DNA, 669 bp, Glycine max
  unsure (1)..(669): unsure at all n locations
ccaaataataccaatttcatataataatatcagccaacgaatgtgtgctgaggaaaaagaaaaggaatccttttatgaaagtgattggtgattggtcaacttttgtgtctatctctgctaatttttgtaagactccacctatttaattctattagaaaaagagaaatacataacttctagttgaccacatcatgtaaattttgaatatgagaaaatccattccccttcttgactttgacacattcataggcaaccaaccaacctcctatgctcctattgactattaaaaagacatcgttttccatgaaattacgacaaaactataagatcaattgaaaggtgttaaaacaccaacattccataaacaaaaaacctatttaattttcaacatctgtggaatgcaccattctacattgttcaatgcccgaagaaattatggtgaaagcaggcaattgggaagcatcagccacatccctagtttaatcatcctcatgcaagaataggagtgaagctggaagagtcttgccgactagcagcatattttcgcgcccacaggtcatagtgaataatttccttaagggaaggagaagataccaattcattntgatgctttttacatgtaagctccacaactttgaatatttccaaatagctaatcttttcatcaat

SEQ ID NO: 213247 - DNA, 522 bp, Glycine max
agtgaacttggattcatctatattgcatcatccctcaaaaatagtacttgtaaaactgacattgaagttgttcatgaacagtataaaaatcgtcaaagaaaaattacagggacgtcatatatctaccaccacgcaggagggttgatatacctggtgcaacacaaagtaggagatgatatttgtgcaagtgaacagaaattaatagacttcgacattccattgctctgatttcttcaattgcctcttgtactcaggccaatcaatgccatctttggcagccaatgacaccataatgtcatcaatacccttttccattccttttagtccacacatgtacacaaaagtgttatccttcttcagtaattcccacagctcttctgcatattgagccattcgggtttggatgtacatcttctctccgttctcgtttgtttgctctcggctcacagcgaagtcaagcctgaagttgtcaggatatttctcttgcatcttctcaaaatcctccttatatagcaatgagct

SEQ ID NO: 213248 - DNA, 513 bp, Glycine max
gggagaaagtgaaaattccattgaggtagtgtgatatgatcacattcacattgattcaaatgctatatacaagtatcttagcatcatctgaaagctaagaagccaactacataataaaagcttcaaataaattaaataataacatggggcaggctttgatttaaaatccactaatgccaacaacaaaaaaagaagaaattcagaaaccacgaaatatattacacaaatggcagaagagaacagagcaagacggagcataccaagcggaatcaaacaatggcacttccacctccaccggaactcgaagcagagttaaccactctctcttcctcatattccttatcatccgttggtagctcatacctgcaaacagggcaagaatttcgagaactcaaccaaggaacaatgcaatctccatgatacccatgcccgcacggcaacctcttcgccaagtctccaacaccgagcaaatccttacatatagcgcacgccacggcttcgctttcggacgca

SEQ ID NO: 213249 - DNA, 560 bp, Glycine max
cgaaaaatagctccaggcaacgtttgaaaccggatttgtcaaacccatccgacaaccatggagtaccgcaacaaacttgttctcgctcctatggtccgcgttatatcacttactgcgaggaaatcattgaccacaagatgctaaagtgcgagcgccgaattaacgaactcattggatccactgattttgtggagaaggggacaaacaatgttgtgtttagaacctgtgatgaagaaaaagatagggttgtgtttcaaataggaacatcagatgctgtgagggccctaactactgctcagctagtgtgtaatgatgctgctgcagcagatattaacatgggttgcccgaagtcattttctgtgagtggtggaatgggtgctgctctgttgtccaaaccagagcttattcatgatatcttaacaacattaaagaggaatttgaacacaccagtaacatgtaagattcgacttctaaaatcaccacatgataccgtggaattagccagacgaattgagacaactggtgtttctgctcttgcagtccatggaagaaaagtccca

SEQ ID NO: 213250 - DNA, 527 bp, Glycine max
ccgaggcgaagagaagagaaattttaagatggaggggaaggagcaggatgtgtcgctgggagcgaacaagttcccggagagacagccgattgggacggcggcgcagagccaagacgacggcaaggactaccaggagccggcgccggcgccactggttgacccgacggagtttacgtcatggtccttttacagagcagggatagcagagtttgtggccacttttctgtttctatacatcactgtcttaaccgtcatgggagtcgccggggctaagtctaagtgcagtaccgttgggattcaaggaatcgcttgggccttcggtggcatgatcttcgccctcgtttactgcaccgctggcatctcagggggacacataaacccggcggtgacatttgggctgtttttggcgaagaagttgtcgttgcccagggcgattttctacattgtaatgcaatgcttgggtgctatttgtggcgctggcgtggtgaagggtttcgaggggaaaacaaaatacggtacgttgaatg

SEQ ID NO: 213251 - DNA, 530 bp, Glycine max
  unsure (1)..(530): unsure at all n locations
gccgccctttttttttttttttttgcatatatgactcgggggttatttttgattttgcaaattacacaatcacagccgtacatcacacgtgagctgggcctcttccaacttaaaagcagaggataacattggcccatgacgcaacacatgcaccacctaataatcataattntacatctttacatacaaaatacaaagactttaaattaaaattaaaaaaaaaaagataaacagatcatcttgatgaaatgaaaccgaaacccagaaacattgttttgattttttttgttgttcccaacttgattaagcatgaacggtttgattgaatcacttggacttgaagggaatggccctgattacgacctggtggtagagtgctgcaagtgcagcaccaatgaaaggtcccacccagaagatccagtgatcatcccaaccaaggtccttgttgaagatgatagcagcaccaagactacgagcagggttgataccagtgccggtgatagggatggttgccaagtgaaccaagaaca

SEQ ID NO: 213252 - DNA, 585 bp, Glycine max
tgaaggcattcacagcgtaattttttgctgcattttaatcgatttatctaaccaggactgaatgacctaatggagtctaaaggtgggaaaaagaagtctagtagtagtagtagtaaatcaattttttacgaagctcccctcggatacagcattgaagacgttagaccaaacggtggaatcaagaaattcagatctgctgcttactctaactgttctcgcaaaccatcctgatacacatccggattgatagttcgttgcatgcaaccatagttttattaggattttttcttctttgttttcaattaggtttttttgttgctctccttcaaactccatctttccaaatcctctctttgcgattgtgttttgatctgcttcctactgcgatagtttctctactgttacatggccatggcggtttccgcaattggttttgaaggtttcgagacaaggttggaaatatcctttttccagccgggactttctgctgaccctgaaggaaggggtctaagggctcttacaaaatcccagtcgggtgagattctaacaccagctgcttgcaccattgattcttcgctcaaaaac

SEQ ID NO: 213253 - DNA, 534 bp, Glycine max
caagaatggacctggcattctgtttagcagtacaagtgatgaagccaagaagcttgctgctgctgctcttgcagcagtgaaagatgatgctgccatggctgcctcaagcagggggaaacttgtgattactgaggttcgggactttgctggtcaagaaattgaagttaaaaagcttgtagattctgactcaaaggaggcaatggaaagagccaaagctcctccaccttctgcagtggatactgtccttgaacaaatcaagaagaaacagaagctcagtgtactggataagaccaaaaaggactggggtgaatttaaggaagaaaagagactggaagaagagcttgatgcttataagaagagttctaaccagtatttggacaaggtttctttcttacagcgagcagattaccgtgagtttgagcgtgagagagatgcgcgactggctttgcaatccaggatgcgaccagataatatgcatgaggatgactgaaggtagttgaagactggagttactacctttggagaattatgtat

SEQ ID NO: 213254 - DNA, 577 bp, Glycine max
agtatatccaatggaatccgtgaatgttctcctgatgaggatcgtacactcccaatattgaagaaaatccttgacttgagtactaaaattcagaatttgaagaaacaacatgtagccctatctgatcaagtgaaactcacagctgagtcatttacaggcctagatgttttaaagtctgttcagcttcttggtactgaatatgaagtgttgaaaaggaagtacctagaggagtcctctgagcgtaggcggctttacaacaaagtgattgaactaaagggaaatatcagagttttctgtagatgcagaccactaaatgaaagtgaaattgcaaatggatcagcactatctgttgtcaattttgagtcaacttctgatgggcttcaagtcatttgctctgattcttcaaaaaagcactttaaatttgattatgtattcagacctgaagataaccaagagactgttttcgaacaaacaatacctatcgtcacatctgtattagatgggtataatgtttgcatttttgcatatggtccaactggaaccggcatgacctttactatggaagggacaccacagc

SEQ ID NO: 213255 - DNA, 555 bp, Glycine max
  unsure (1)..(555): unsure at all n locations
aagtcacacgtaatttcaattgaagataatactgtcggggccgaattaatcgtgatcgtaatcattcatcagtggtgggtgtggacgacgcgttgggcccaaccttcctcagctgaatcccatgcttgtgcgactcatcatcctcatacacgtgcggcaaaattcagagaacaaagtgtctctgttaagtctgctgcacttggacttatctggacaaacattaaagttttgcaatcacctcctaaagagctctggagtatatgggtgagctttgagttcctgtaaggtatgtgggctgatttggatgcaagggcagaaataacatcaccaagtgctgatagagacttgtttatgaattgagattccttcagtctttctccttcagcttcagttttcaccacacgctcactgccagctaaatctactagccaaaggtgactcncttgtttctggccattgattaaattcttccctaaaacagtcactctcaacacacaatgagaacgactgctaagctcattagcactagtggatccaacagatctggcttggtta

SEQ ID NO: 213256 - DNA, 514 bp, Glycine max
gcagaccaagcaggaaatcaaattacaaaatgagccaaagtgtccatcaaagcagcacaaacacactggagctaacaagtggatctcccaaccaacaataaatgttttccctaatgatgcccttgccatcttgacttggatcattttaatcactaaaggacacctaataaaccaggaagacaacatatatgaaacttacatatagaagatgaagcttcaaggttcatacattaaccttcagtagtgcatgcctagattttgtcgagcttatctgccttaattatggggttggctttagctatggcattctgaccaacagtcctataatcaaaagggcaattatgtttatcagaatagcgatgcattgcacagaaaacgttgccacatttgctgttaaaaccagttaaaccaacacgtttccggcatgtagcacatgtactgggacctgtgttggttttcatttccaaactatcaccggaggacgaatccacagaactttgagcacagacaatct

SEQ ID NO: 213257 - DNA, 517 bp, Glycine max
attactgatgatgcataattcaatataaaggcagtggagcaactgtgtaattgtacactgggcactgtgttatataaattaggacctaaaaaaggctatattttgtttggatactaaagctacttaagccagagggaattaaaaaaacccattcacagggtttgctcattcttcacttgtccaaacagcaattatgcaggatggtaattgcacctctctaaagtaaaatgcctttctcctttctcgtggcacttggaagatcaatcaaaacttaaaaggcttagcctaagtttggttttctgttattgtctgaatggctgagagagacacatgcatggaactttcttataggccactggaacggttggcatactcttgaactaatgccccaaagagagatggcctttggagcaagttggctggtgaatcaaattctttggcccgccctgcatctacaactagaactttatcacaggccattactgttggtattctatgagcaatgctgatgatggta

SEQ ID NO: 213258 - DNA, 504 bp, Glycine max
acaagtgaaaaatttcctgggacatttattcattaaaagtcgaaactatatgaatattttgataactatgtatgtacatgggtggaaatgttagtggccagacctataagactcactctatagtaattctactaagtaactatgcccacccaaccaaaaatggctgatccctaaatagtaattgtttcatgaggtctgcacttcttaatcctgatattcatactgccattctttatgcttccaccacccaaaagttgacagcaatgcctacggggtacattcttccaatattctggatccagcttcaaggcagaaactctaattctttgcacttcctcattattagtgccttctctgttgcactttgcttccttgccttcatgtctcttgtagatagtgatacttccactttttcccacctttgtagcctgatccaggaaaaacctagctggctgctggcacgggtcagagctcataggtcgagtattgaatatgaagggacca

SEQ ID NO: 213259 - DNA, 515 bp, Glycine max
  unsure (1)..(515): unsure at all n locations
aggacaaaaggaaaaggcaccaaattcaatttaagtggacactgtaactcaaaattatagaggaagacggtccaatatgaaaaatatagtaagatcatctcaaacttagcatcttctctttgcacctaagaacattgagaatgctaagaatgttacaccgcagttccatcacaacttctagcacttggattagtacaacaaccttcacgaacagaaatatttacttgccaagtttgctttgcctccaattcaagactggaagaaagttcccctctgaatagcatcctcgttagcatttccaagagcagcctcgttcaagtacttgtcagccaattggactctcttgacattctcttgttcttggacaagcatgttaccatacagcaagagcttctccagagtcatcttgggctgctcaaaggttggaggtccatcttttgagttcacaagcttcttcccaacactgtcaacaccaacaccagaaatccacttnctcacttcatcatcatatactc

SEQ ID NO: 213260 - DNA, 349 bp, Glycine max
ggaagtggggacagagaagttcattaagggaatgtacaaggaggcttgcaagatcttcactcgccaatgcacgtcaccaatgcttgatgattttctcactctggatgcttataattacattgtcgtgcatcacccgagggaaacatcaaagctttgaagtttgaactaaggaagtggttctttattatgcataataattgggtcctttagattctgtcttgtttgttctcctaagttgtctttgtctttttaccatcacttcatcgtttcatgaagggcctgggacgtcatataattgtgcgtggaagagaagaataaagttcgtcattgcagctatattttgaatgat

SEQ ID NO: 213261 - DNA, 349 bp, Glycine max
atcattcaaaatatagctacaatgacgaactttattcttctcttccacgcacaattatatgacgtcccaggcccttcatgaaacgatgaagtgatggtaaaaagacaaagacaacttaggagaacaaacaagacagaatctaaaggacccaattattatgcataataaagaaccacttccttagttcaaacttcaaagctttgatgtttccctcgggtgatgcacgacaatgtaattataagcatccagagtgagaaaatcatcaagcattggtgacgtgcattggcgagtgaagatcttgcaagcctccttgtacattcccttcttgaacttctctgtccccacttcc

SEQ ID NO: 213262 - DNA, 527 bp, Glycine max
  unsure (1)..(527): unsure at all n locations
tgcaattgaagttaaaagccttatccttccctacaactccaaacacaaagacatcatcatccatggctgcctccgtctccactgtcggagctgtcaacagagctcttttgaacctgaatggttctggagctggagcttcagctcccagttcagccttctttgggaccagcttgaagaaggttattgcctcaagggtccccaacagcaaggtttccggtggaagcttcaagattgttgctgtagaagagaagaaagagattgaagagacccagcagaccgacaaggacagatggaagggtcttgcctatgatatctcagacgaccaacaagacatcacaagaggaaagggtttggttgactcccttttccaagctccacaggatgctggaactcactatgcagtcatgagctcctacgagtacctcagcactggacttcgccagtacttggacaacaaaatggatggattctacattgctccagcttttatggacaagctngttgttcacatctccaagaacttcatg

SEQ ID NO: 213263 - DNA, 533 bp, Glycine max
aaaggaaaaggcaccaaattcaatttaagtggacactgtaactcaaaattatagaggaagacggtccaatatgaaaaatatagtaagatcatctcaaacttagcatcttctctttgcacctaagacattgagaatgctaagaatgttacacgcaagttccatcacaacttctagcacttggattagtacaacaaccttcacgaacagaaatatttacttgccaagtttgctttgcctccaattcaagactggaagaaagttcccctctgaatagcatcctcgttagcatttccaagagcagcctcgttcaagtacttgtcagccaattggactctcttgacattctcttgttcttggacaagcatgttaccatacagcaagagcttctccagagtcatcttgggctgctcaaaggttggaggtccatcttttgagttcacaagcttcttcccaacactgtcaacaccaacaccagaaatccacttcctcacttcatcatcatatactctggccctcagtgcaccaaagaaatc

SEQ ID NO: 213264 - DNA, 632 bp, Glycine max
attttatatttaggttacgaggatattatcatgaatccaattatttctgctgcttctgttattgctgctgggttggccgtagggcttgcttctattggacctggggttggtcaaggcactgctgcagggcaagctgtagaagggattgcacgacaaccggaggcagagggaaaaatacgaggtactttattgcttagtttggcttttatggaagctttaacaatttatggactggttgtagcattagcacttttatttgctaatccttttgtttaatcctaaaaaaatagaaatacatatccttttttccgtggacttgctttaccggtcttgctttttcgaattctatttatattaatatttcactcctataattctttatccgatcggacaagaacacaggggaaggactaattgaaaggtgaagaattcacatactgattcgccctctttcttctcttttttagtccaatgaccccccctttttttttatgaataattttctcaagtgttaatacttgagagattttgcaatggatataagaactggtatctaaatcgaataggtatcattctattagggaatcttccaattgattgaccaatccccaatatatatggatatatatata

SEQ ID NO: 213265 - DNA, 527 bp, Glycine max
gataaaacattaactgttcactttcctgtcagtggaaaaacaaaacttgtcagagcttggcatctacgtccatcccgtttttggaaggatgggaaatggattgagtatcccaaggttggaaccggtgacagttctacccatgagggtgatacacctcatgaaaaacgacctaagttaggtagtcctgcagtagaggtaaaagggaaagacaggattccaaaaggtactaatgccgtggagtcggcaaatcctggcaagttgaggttacttgacttgactgaaaatgatagagtgctcaatattggtaagtacagcaagaatgaaaataaatctgatgcccacagaatggcgaggactggtcttcaaaaagaaggatcaagagtgatttttggtgttcctaaacctgggaagaaaagaaaatttatggaagtaagcaagcattatgttgcagatgggacaagcaagatcaatgatggaactgattcagtcaagctttcaaatttcttgatacctcaaggtactggatc

SEQ ID NO: 213266 - DNA, 569 bp, Glycine max
atcaacaaacctttctataaacaagtcaacatggataaattccatatacagcctacaggattaaattaaatcatattgtaaacaacataaaatcaatattaacatctactggactagtctgcctaaaccgaaggaaacaagaatttccattcctatgttccctattataaaattataaataaatatacacatctatgccaagtgtgttggtctttcaactgaacagaaccgcgcacactgtaattcctcgttcaaccttggttttaccccctagaagttttccgattctggtttttgtgacccttttcatgtgaagcagaaggaatctttgagataattaaagagctctgcaatccttctaatagtcttgacgttggctgaatcctgcgaatggatctacgaggctcagtgttttcagatgttgatttcagtggatttccactgaaagctttttcttcatcaatcttacccagccttccaccaccagcaggcgcaagttttcctttacttgcccttgatgttgatggtcttttagcagggtgagaatcagtccaagcacaagtgatgaa

SEQ ID NO: 213267 - DNA, 539 bp, Glycine max
ggataatattggccagttacagtatcctgagtgggctccaattaattgtcgagttcatcgacaaccaattcacatcactgaaggaaattatgtcagaaagcaagatgtcagcattgaatatgatgcatgtacaattccaaatgattgtggttcattggatgttgccaaagttggaaatcacaaacaaattgttggtttccatgttgctggaagcaaaggaagactgggatatgcttcattgataccatacgttgagccagttgtgcaagctcaaagtgctgaagtttactttgacttcttccctgtggaggttgatagtcaagagggagttgctcacattggtgaattgaaatctggtgtctatgttccactgcctacaaaaactaatttggtggaaactcccaaggaatggcaactggatctaccttgtgacaaaattcctagtgtcttgactacaactgatgagagattggtaggcacagaacatgagggatatgatccttatcttggggaattcaaaatatgccactcccatgatg

SEQ ID NO: 213268 - DNA, 607 bp, Glycine max
  unsure (1)..(607): unsure at all n locations
tgctcggcggccgcccttttttttttttttttttatatttaaacacactcattgcacatagtaatgcgctttatttaagtgaataaaatattacatactagttcacaaatgcaaaaggacactcatcaaccagatatttgagactcttacagttctcaagaagtcgcgtcagcatagggttagtggcgttagaactcagaatttcattcttaacgccaaaaagaacagccagtaaagctactggaaaaggatcaactctagtaagaaaaacaattttcttacctctcccaagtgctgtgcgaatccttttgttgatatctgaggagcgattgttaactgcagaactaatccaagcagtggtgggtaaaccaccacgtccactaccacatgtaacatttacaacgacagcttctgaaggtaattgacttacaggataaagacaattcacaaaaattggtaaccaagaatccactggaaaatttccatcaaagaattcttgtgtgttagccaacacaagcttatcatcaaaaacaatcttgtttggaaaagctntacctgctccttgtaaacccaacaaatcaatgctcaacagtagatcaatattatc

SEQ ID NO: 213269 - DNA, 538 bp, Glycine max
aggtattcgtgcgtggttggcggctcaagatcagcctcatgaaaaccttatattccctgaggaggttctaccacgtggaaacgctctttaatggaactttagctttaactggtcgtgaccaggaaactaccggtttcgcttggtgggccgggaatgcccgacttatcaatttatccggcaaactactaggagcccatgtagcccatgctggattaatagtattctgggccggagcaatgaacctttttgaagtggctcatttcgtacccgagaagcccatgtatgaacaaggtttaattttacttccccatctagctactctaggttggggggtaggtcctgtgggggaagttatagacacctttccatactttgtgtctggagtacttcacttaatttcctctgcagtattgggctatggcggtatttatcatgcacttttgggacctgagactctagaagaatcttttccattcttcggtatgtatggaaagatagaaataaaatgactacaatgttgggtattcacttaatcttg

SEQ ID NO: 213270 - DNA, 555 bp, Glycine max
tggtcggcggccgccctttttttttttttttttttttttttaagaaaaaagaaagttctaattattaataaattatatctatatatatatatatacagatagatattctatatcttttatcttaattaatatttgacccctccttataatgtgttatagttttctttatttttaggaacttatccattccttttttaatgtgcccgacaatccgaaagaattctgggggaggggtcatttcgtttttgatctagaataaatagagcttcaagaaatgagagaattaagaatacccacgagaaacactaatccaatccataatgatgtaccggaaaatacaacatttttgttattcgaccaaccttcaggagaagcaaatacaacaggtacactaatcaataaaataaatgaaatagcaattaatgcaaaaacagctaattggaaagcaatagtcatgtttctaatcctccaatttaccaacaaaagaactttaccatttgatcccccaaccccttgatccctttattgacaaaataatttataataagaaaaacg

SEQ ID NO: 213271 - DNA, 514 bp, Glycine max
ccgataaaatttaatgttattaagcaaacaaggggaaaaaagaaaaagagtacctgagttggttttccacgagacgagaagagacacgcgtcttgatagtgtgttccaaaagattcccgaacaaaaaggaacattctttttttaaacaatttcctttttgttgttgttgctgggggggttggtaaccaggataccccggataactgccatacatgttgggatcttgtgcggcagcgggagcatacccataattttcataaccttgtgcagaatacccatagtatccaccaccataaccagcaccagcattccagtggtttggatctgcctgagcctgtttgtttgaaggactgcggccccatgaaagactaacattttgaccacccaacagggtcccatgtaacacctgaagtggcttttctgtacagctcctgtatgggaattggacaaacccacatagcttgcctgctggaatctttgcatgcactaattctccatactggctgaaaacttg

SEQ ID NO: 213272 - DNA, 442 bp, Glycine max
gggagcaaactgctattatcattgctttataaaatttgcaattctgaaatgcaaatcaaacaaggcttggtactattattttttatatttcaactttaccgtaaaaggacatgagcccccttatggggcttgaaaagaaaaatctgtaacaggagcatgaccataagctggagaaagttcaaatgaaaaatgttgtaaaatcgttgacaaagccatttttgcctccaacaaggaaaagttttgtccaatgcatattctaggaccccatccaaatggaaaaaatgaaactctgccatttgtggccttcaaaactccttcagaaaatctctcaggtttgaattcattcacatcatcaccccagagttcgcggtcatggtgaaccataattgttggtaaggaaacttgcactccaccaggtaatgataggtttccgagtttcata

SEQ ID NO: 213273 - DNA, 396 bp, Glycine max
caattaaaggggaccctttaactcaaaattatagaggaagacagcccaatatgaaaaatatagtaaaatcatctcaaacttggcattttttttttgcccctaaaacatttgagaattctaagaatgttacccgcaagtcccatcacaacttttagcacttggatcagcacaaccttcaggaacagaaatatttacttgccaagtttgctttgcctccaattcaagattggaagaaagttcccctgttaatagcatcctcgttagcatttccaagtgcagcctcgttcaagtacttgtcagccaattggactctcttgacattctcttgttcttggacaagcatgttaccatacgtcaagagcttctccagagtcatcttgggctgctcaaaggttg

SEQ ID NO: 213274 - DNA, 337 bp, Glycine max
agggaaactgcctttgcaatcattaagttgcccttggtcaaggctaaaaggtacttggaagatgttcttgcccacaagcaggcaattccattcagacgtttttgtcgaggtgttggaaggacagcccaggctaagaatagacactctaatggccaaggacggtggcctgtcaagtcagcaaaattcattcttgatctgctcaaaaatgctgagagcaatgctgaagtgaaaggtttggatgttgatgcactgtacatttcgcatatccaagtcaatcaagcacagatgcaaagacgccgaacataccgagcccatggaagaatcaatccttatatgt

SEQ ID NO: 213275 - DNA, 517 bp, Glycine max
aacaatcgatttatcttctaatacttagtatttcttttgaaactacttttaaatatccatccaaaggaaacaccgaaagaaatccaaactaagtttttcgaataacttaaattaatttgaagcatagtataaaactcataccaaaccataacaaaaattaaacaaacaaaactctcctcttgacataatctaggaatattgtgcctcaaacaattaagttgtattctatgacgaagcgccacttcgaagagcttgggatttcttgcttgttgttaacttagtctcgggctccttcttcacaggttcttctttttcagataatattaactctatgtggcacggagatgacatataaggattgattcttccatgggctcggtatgttcggcgtctttgcttctgtgcttgattgacttggatatgcgaaatgtacagtgcatcaacatccaaacctttcacttcagcattgctctcagcatttttgagcaaatcaagaatgaattttgctgacttgaca

SEQ ID NO: 213276 - DNA, 515 bp, Glycine max
aagtagttgagaactaataaggttaagcaaatggcttcctcaatgatctcttccccagctgttaccactgtcaaccgtgccggtgccggcatggttgctccattcactggcctcaagtccatggctggcttccccaccaggaagaccaacaatgacattacctccattgctagcaacggtggaagagtgcaatgcatgcaggtgtggccaccagttggcaagaagaagtttgagactctttcctacctgccagaccttgatgatgcacaattggcaaaggaagtagaataccttcttaggaagggatggattccttgcttggaattcgagttggagcacggtttcgtgtaccgtgagcacaacaggtcaccaggatactacgatggacgctactggaccatgtggaagctgcctatgtttggttgcactgatgcttctcaggtgttgaaggagcttcaagaggctaagactgcataccccaacggcttcatccgtatcatcggattccacaacgt

SEQ ID NO: 213277 - DNA, 388 bp, Glycine max
agcttattcattagttctcatccattaatttccattgaagtccgaaaacagaaaccaaaaatacaggatgatgaaatctcaaaaagcaaaaacaaatgggaatgtagtttaagtacaaacaaacgaagtggggtggcggttactaatgctttgcaaatctttcacacttagaagcctgggggcttgatggcgatgaagctgatgcactgcacttggcgaacgttgtcgaatccgatgatacggatgaagccgttggggtatgcagtcttagcctcttgaagctccttcaacacctgagaagcatcagtgcaaccaaacataagcagcttccacatggtacagtagcgtccatcgtagtatcctggtgacctgttgtgcttacggtaca

SEQ ID NO: 213278 - DNA, 466 bp, Glycine max
ccgaagttaagtctgtgttaatgcaccatgaagctctcacagaggctcttcccggtgataatgttggattcaatgttaagaatgttgctgttaaggatctcaagcgtggttatgttgcctcgaactcaaaggatgatcctgccaaggaggctgctaacttcactgcccaggttatcatcatgaaccatcctggtcagattggaaatggctatgcccctgttcttgactgccacacttcccacattgctgtcaagtctgctgaactcatgaccaagattgacaggcgatctggcaaagagcttgagaaggaacccaagtttttgaagaatggtgatgctggttttgataagatgattccgaccaaacccatggtggatgaaactgtctctgagtaccccccacttggtcgctttgctgtcagggatatgcgtcaaactgttgctgtgggagtcatcaagaacgttga

SEQ ID NO: 213279 - DNA, 527 bp, Glycine max
cctactccaatgaacatgacaatttcatatattattattatacttcacaatcagcatttttttgttcaagactgataataaccattaaattattgccattgtaacaatcggaaaacgagggaaagggatttgaaaaaaacaatggacaacccttggccagttagtggcaccacccaacaaggcaccaaccatagtaccaatcaaaaggtaaaaagagagagagaccaaatcctactaagaaaagcataactgttcctttccatccaaagggagaaaacatgcaggttttgctcatggcttccacagaatggttgtgtctgcaatcatggaagtaaccacgtatgggtccatgttggaagctggccttctgtcctcaaaatatcccttccctgctttctctgtgtctctcccaaccctaacagaagctccacggtttgcaactccccataagaaggtgttgatgtcagcggtttcgtggcgtcctgtcaaacgacgttcgttgccttctccataagcagaaatgtgct

SEQ ID NO: 213280 - DNA, 385 bp, Glycine max
gtgataatatatttgttctaattggtgcatttccctctgatgtctaaatggcattagtaattaaaattagaacgaccctaaaccttggtttccaccccctcacagtcacttttgccttcatagcaatcagcccactgttaacttttgcacatttttgtaaggaatatcgaacgggcaacaaacacaaacaagaacaaattcaccgtggctatggctgccaatagccaatagaatttgtccaatcgactactattcaagtccttaccaaaccaacttttcccactcttcttagtgatgtgatcaacaactgttatcagcatactacttaggaaactcgctgcaccaattacactaaggtaaaatgctatgcctaggcttctcattg

SEQ ID NO: 213281 - DNA, 480 bp, Glycine max
cattccaaaaccaaatttattactaaataagaataagattcgaatccatcccaagttactcactaacacgaccacattgtcataagacaaaaaaagatacagaaactacataattacaggagaaatctaataggtcatgttacttgaagttttcccgaatcaattaaaggcgaaaaaaccaaacaaaacagaaaccaacgatttttcagtaaccattctaacaaattccacatggctatgtagcgggatgctttgttcagtcctgaagaaattgctaggatcaaccttggtctttatttgaaccaaccttttgaagttatcatcgaaatattggactccatatgcactcccttcaaagtagccatagaaaccgtggtggttgatgcccaattctaagtccttgtaacatataaaagcttgtcttggattctgagacacaaagggtgtcatgtatttgtgaagttctcttaccaagtttat

SEQ ID NO: 213282 - DNA, 454 bp, Glycine max
accaaagtcaattttcttttctgtttttttttttttctttttcatccataaaatttttgatgaaaagtttatattacaagagtactcagtacaagtggcagtctattctactctacgcgtatatgtatgtatggagctatacatatacgtagtatcatacaaactctaacgactaactaactagtgattaattacttatatgcaaagaaaggcgcttcaataaccgcgtcttctctcattcactcgagcgagtcgactcagtgactcactaccagcactgatccgtttcccagttccgacgcgtgtaaccggagaacaccgccgccgtcgacaacggccgttgtcgccggaataggctccgatcgtagttagcgcgcttgtcgggatcagaaagagtagagtacgcggcgtggatcttcatgaattcgtcagcggacgaatttttccggtcgat

SEQ ID NO: 213283 - DNA, 469 bp, Glycine max
accaaagtcaattttcttttctgtttttttttttttctttttcatccataaaatttttgatgaaaagtttatattacaagagtactcagtacaagtggcagtctattctactctacgcgtatatgtatgtatggagctatacatatacgtagtatcatacaaactctaacgactaactaactagtgattaattacttatatgcaaagaaaggcgcttcaataaccgcgtcttctctcattcactcgagcgagtcgactcagtgactcactaccagcactgatccgtttcccagttccgacgcgtgtaaccggagaacaccgccgccgtcgacaacggccgttgtcgccggaataggctccgatcgtagttagcgcgcttgtcgggatcagaaagagtagagtacgcggcgtggatcttcatgaattcgtcagcggacgaatttttccggtcgatggccgccacgtcggg

SEQ ID NO: 213284 - DNA, 550 bp, Glycine max
gtagatttcaaagatacttttgtttatgctgatcacttaaaagaaagttttgtggattatgaggtgtcttttgttaattctgatggctcagaaaatttgaatccaaggcctccttttaagatcaagcttccccgaacactcaaacctaacaatggtactcttactgggcatgcaatgtctacttccggtgcaacaaatgatatcaatgtggttgatgcaaattatcagaaagaagcactagttattgagacatatactcctccagatcctggcccctatcctcaagatcagcccaaacaaaatttagttagattcacacccacacaggttgaagcaatcatctctggcattcagcctggtctaactatggttgtggggccacctggtacaggaaagactgatacagctgtacaaattctaaatgttctttaccataattgtccttctcagagaaccttaataattactcattcaaatcaggctttgaatgacctgtttgagaagattatgcatagagatgttcctgcacgttatcttcttcgacttggtc

SEQ ID NO: 213285 - DNA, 576 bp, Glycine max
  unsure (1)..(576): unsure at all n locations
gtgaaaatgttcagaaaccagttttacacggacgtgacgacatggagcccggcggggaggctgttccaggtggagtacgcgatggaggcggtgaagcagggctcggcggcgatagggctccgatccaagacccacgtggtcctcgcatgcgtcaacaaggctaactccgaactctcatcgcaccagaagaagatcttcaaggtcgacaaccacatcggcgtcgccatcgccggcctcaccgccgacggccgcgtcctctcccgctacatgcgatccgagtgcatcaactataactacacctacgagtcaccgctccccgtagggagactcgtcgttcagctcgcggataaggctcaggtttgcacccagcggtcatggaaacgtccttatggagttggactcctggtagctggattagatgaatcaggagctcacctctattacaactgtcccagtggaaactattttgaatatcaggcttttgctattgggtctcgctctcaagctgcatagacatatttggaacgcangtttgagaaatttgtggctcttcacgagaagatctgatcaaagatg

SEQ ID NO: 213286 - DNA, 550 bp, Glycine max
cagcctgaatttcaataatttttgtaaatcatgcattcaagttcatcaaacagctataaaatcgtttacaatgagcaggcatggatgaattgaaaaaacaaacaggaataaggggaaaaaaattccatcaaagaaatatcttgtcccatgacacatgaaacctactcgtctttaaatattggtattcaacacctctagtacttaattttaaattatcaaatgtccataggagaaccaccttggtctacagcagcagcaccaccaccaccttgatctgcagcaccagcagcagcacctggatctgtgggagcatcctgtccggctgctggctgagcttcttcttcagctggagcagcttcttcctccctcacaatctcaaaagtatcaatcaactgttgaacagtttcctgatccaaaatgtggaatggctcaccaacaccaaccacagcaattgtgcacacagaactcctgagtttttcaccttgcaaggactccctagttgcaataagtgcatctttgatcagatcttctcgtgaagagcccacaaaat

SEQ ID NO: 213287 - DNA, 551 bp, Glycine max
cggggctaagtctaagtttagtaccgttgggattcaaggaatcgcttgggccttcggtggcatgatcttcgccctcgtttactgcaccgctggcatctcagggggacacataaacccggcggtgacatttgggctgtttttggcgaggaagttgtcgttgcccagggcgattttctacatcgtgatgcaatgcttgggtgctatttgtggcgctggcgtggtgaagggtttcgaggggaaaacaaaatacggtgcgtcgaatggtggtgccaactttgttgcccctggttacaccaagggtgatggtcttggtgctgagattgttggcactttcatccttgtttacaccgttttctccgccaccgatgccaaacgtagcgccagagactcccacgttcccattttggcacccttgccaattgggttcgctgtgatcttggatcactcggcaaccatccacatcaccggaactggtatcaaccctgctcgtagtctaggtgctgctatcatcttcaacaaggaccttggatgggatgaacactggatcttct

SEQ ID NO: 213288 - DNA, 496 bp, Glycine max
actagtcggcggccgccctttttttttttttttttttttttttttttttttttttttttttttttttttatatgactctggggttatttttgattttgcaaattaaattacacaatcacagccgtacattacacatgagttgggccttttccaacttaaaagccgaggataacattggcccatgacgcgacacatgcaccacctaataatcataattttacatctttacatacaaaatccaaagactttaaattttaaaaagaagaaaagagattaacagatcatcttaatgaaatgaaaccaaaacccacaaacattggcttgatttttggtgttgttgttggtcccaacttgattaagcatgaaccgtttgattgaatcacttggacttgaagggaatggccctgattacgacctggtggtaaagtgctgcaagagctgcaccgatgaatggtcccacccagaagatccagtgttcattccaaccaaggtcctt

SEQ ID NO: 213289 - DNA, 426 bp, Glycine max
tgtgtcgtccttttttttttttttttttttttttttttttttttttttttttttttttttttttgttttgggaagctttaaaagagggtttcctttttttttaaataagcaaggcgccaacggaaaaagaggaaaagcccgggggaaaccattccctaatagagaagggcagggggcgaaaaaaaagggcccaaccccaggggcccaccccccaaaaatggaaaaggcaaaaaagggggcggcccggggcggcccaaaaaaacccaaaccgaaaacccccccaacgggggggggcgggaaaaaaaaaaaaccaagtttgggtggaccccaaaaacaataccgggggggggggtccccaacgattggaccgggaaaaccccggccaaacccaaccttggggccttgcaaacaaacccctgggggcaa

SEQ ID NO: 213290 - DNA, 557 bp, Glycine max
gccaaaaaggacaataaagtttctagccttattttatatattgctggattgatgtttttagctacattggtatgtgccagagataacatatataacaagtgtatgtattatagcataatccttagtttaggggcaaaaaatgttcctccaacatgaagggtttaaaaaacttgaccaagtcctttcccttgcacagaccataatatcactcatcaggatgaaagcactccatattgatcagtctgcttaggtagtgtagaagccaagaatttaccattggtacttagcagcaacaagaacctcctcatactgctgagcagcattgtcccaactaagatcctgcgtcatccctcgccgttgaagcccttcccagctctgcttatactgcctgaaggtcaacaagcagttccctatcgcgtttattaacttgttagtttctgcactgtcaaatgtccatccaaggcctgactctttaaacggattaaaagggcttacagtgtccctcagtccaccgacagcatgtacaactggaattgttccataattcatcgcataga

SEQ ID NO: 213291 - DNA, 372 bp, Glycine max
cattcgaattcactttctctatccctaaatattatttccagatgagatagccagatgtcaaaagatactaattatgcgaatttggaagtggaattatcaagttattaaatgattgagccctctttgtttacctgatccctgtagtaaaagagggcccatctcttcttgagtagcaaccttaaacaggacttctgcttccccagtgaatgtcttgcgaaaagatatgatttctttgccttgcggtggattcgtgattaaggaggcacgtacctgaacatgaaactaccttacctgtgcaatttctagtgaatcaggaaccccatccgttcccgtataaataggtgttatctgcccttgcaccgcaagaggagc

SEQ ID NO: 213292 - DNA, 531 bp, Glycine max
gagctcttctccattggttcttcatctgcatgcacacacttgcatagttttggaaaccaagaatttttgaagggtagcatcaacaagaagttctggaaatggagatcaccaatgtcagcgagtatgaagctattgcaaagcagaagttgccaaagatggtgtttgactactacgcatctggtgcagaggaccagtggactctgcaggagaacagaaatgccttttccagaattttgtttcggccacgtattcttattgatgtgagcaagatagacatcacaactactgtcctgggcttcaaaatatccatgccaatcatgcttgccccaacagccatgcagaaaatggctcatcctgagggagaatatgcaacagcaagagctgcatctgctgctggaacaatcatgactttgtcttcatgggctacttcaagtgttgaagaggtagcttcaacaggacctggcattcgctttttccagctatatgtgtacaaggacaggaatgtggctgctcagcttgtgagaagagctg

SEQ ID NO: 213293 - DNA, 521 bp, Glycine max
agccacagaagtatcatcatattaatgcttagaaattaagcatagagttatccaaatacaagtttaaatgagttgtccaaaaaggaaaagaaaggatgagaagaacaggttcatgaaacatatatagaagtgtttcccccattggaaaaagtttttcataatcttggcaaggcgcgggggatagtgcgtggttggtcccaatcagtgacaatgtgatcacgagtgatatccttgagtgaggtgcaaccactcaaagccatggttagctcaaactcctcacgtagcatccgcagcacatttcttacaccagcctctccttcagcagccaaggagaacaccactgggcgtccaataaatatgccagaggcacctagtgccaatgccttgaagacatcagttccgcggcgaacaccaccatccaaaaatacaggaacacgaccttcagcagctttgacaacctcttctaaggctgatatagtggctggaacataatcaagttgtctagctccgtgattggacac

SEQ ID NO: 213294 - DNA, 525 bp, Glycine max
cggccccatgccccaatctaaagtacacatcctcttagccaagcaagtcggtgtccccaacatggtcgtcttcctcaacaagcaagaccaagtcgacgacgaagagcttctccaactagtcgaactcgaagttcgcgaccttcttacctgctacgaattccccggtgacgatacccccatcgtctccggctccgcactcttagccctagaagcccttatggcgaaccctgccatcaaacgcggcgacaacgagtgggtcgacaaaatctacaaactcatggacgaagtcgacgactacattcccatcccccagcgccagaccgacctcccattcctactcgccgtcgaagacgttttctccatcaccggccgtgggaccgtcgccaccggccgcgtagagcgtggcaccgtcaaagtaggggaaactgatgaccttgtaggatcgagagagacaagatacacaacggtcacaggtgtggaaatgttccagaagattctagacgaagccctcgccggggacaacgt

SEQ ID NO: 213295 - DNA, 558 bp, Glycine max
  unsure (1)..(558): unsure at all n locations
atatataatcacgattttaaaccacagaatatgaaaatataattgcattacatgttaccagcttggtgtggtaataccataatataaagccaaatggacataatgttttaagtgtagtatgagcaaccgttccaccttactaattgggagaaaatttttggtggcatgacattttccaggaaactcacttgcgcgcctcagccttcttctgctctttcgcagctttctcttcttctcgctttttagcagcatcttccctttgctgacgtataagagctaaacgttctaaatccttctttgcttgatctgtttttccttgctcttgcagcctcatatagcgctcatgggctctctgtttctctatctcctctctttcacgccttgaaagttctgttgttttttcaacatcaacatctctagctttcaagctctttggctttaccaagttaggatnttcaatctcaataactccttgtgttccttttttcttagaagtttcctcttctgattcttctccagattcatccccagatacttcctcaggctactttttatgct

SEQ ID NO: 213296 - DNA, 557 bp, Glycine max
aattggaagagaaggtagttcctcctgaataaattttattaaggttatacatgcaatgcaataatgaatcgtgaaggggcataaaggtagacttagttatatctcgccgaccccaacagctccacgttttttaaatacctttatttagcatttgcatgtggtaatgtaacacggagctatatatcagcatttaatttatgtattccacgctacaaagtacaaattaaaggttatcgatctattccacttttttactctcttgttttttcatgaagggagtgacataataattaataaaggtatagacttatctcccgctgaccccaacagctccacgttttttaatttctttcacaaatgcatcgagatttctggcagatgagccacctacagccaccgcggtctctgcatccttcttccacttgagcgcgttttgtttcaactcgtctgcttttggcccttctgtagcttccaataagcacttttttacctcttctctgctcaccactttcttttcagcctgcccataacccagtttaatccccactccaaacaca

SEQ ID NO: 213297 - DNA, 525 bp, Glycine max
gatgaatggcctcaaaacgctttttcgtttgtggttattgagtcctgagtgatcttgtcatccgacctttgccatgacaggtgcgcttgcatggcaggtcaaaaaatgttaataaaaaaagttttattggtttggggagagatcgcacggcggttgcccggggtctcttactcttgtgtggagtggtgttcgctgtgctctccttttcgttatgccttttattattacctatctgtcgctccactccgtattacgactctggatcagaggatacatcagaggattcgctccaacccctatcgagtaaggtattatctgtcaatttacattcgaaagggttaggctattgaattttaaataattacagataaaataatcgatagctttgattttaaaaattaatcataatcatcggctaggttgcaacataatacttaattcgcttaattctttaactgcgcctcagagtattcataacatattctattaaattaataagctggtgatgtaattaatattaatatg

SEQ ID NO: 213298 - DNA, 603 bp, Glycine max
gtcatagcataagtcatatagcgtcttcacattgatattccaatcatcgccagaagatttacaatgttaatgacctaattctgcattacaaatgttgtcgcccgaatctgaacttcttacaagtagattattggacaaatatacatagccccccgcaatacaatatggcccatcttatttggatacaagtaaccggagtttaccaaatcaagtaagatgaaaaagggaacaatttacatgacaattacaacagtatagcttcacaatttctataaacagtaaaattatgcataaggaagtcgcagcaggcagctaatatgaaatgaagacaattattaataaattccttggctcgatttattttcactatgaataacgttatattagattcatgaagatattatacctaccagaatattgatgaactccacctagcatcttctgccaataagattgccaaaactacatattaatattaattacatcaccagcttattaatttaatagaatatgttatgaatactctgagggcgcagttataaattaaagcgaattaagtattatgttgcaacctaaccgatgattatgattaatttttaaaat

SEQ ID NO: 213299 - DNA, 536 bp, Glycine max
acataaggtcagatttaataatttcatataaatgattagggatggatgttaaaagataaagaatgattacaatcaaacgctaatagatttatggaccccaaaaaaaccatcgcaattaataagaaaaaatggagacaaatgtgagatgcacttttgtattgtagataacacaggcacaaagttagtaaaacaatgattttcggaccatgcttgcaaccccaacaattttaataagagcctaaaactcaagtcaacataagatcattccctccaagatgagggcgaaggcaaacacgaacttcatgctcttctgatcccacacgaagttttggcaccatgatctcaagcactgatcctggcccatcatagtatgcttctatattggcatcttcaggaattcgagttgaaagagggatttcacgaacaaactcaccaagtgggcagtgttcggatgacggatctgtaagtttgaatgtcctgtcatgtctcttgatatatggctttcccagatgtgctcacacaagaaaccctaatga

SEQ ID NO: 213300 - DNA, 442 bp, Glycine max
tgaaattttgataaacctcgatcacaggttgccgcaccttaaaaccggaaacaaaagcaatcgttacttgatttcaagaatctctcaatttcttcctacttctttgtgtacggtttcttaagggaaagaaaatcactctctgtgctggccacagacttcgtgaatcattttcttttccactcttagtttatttgctgaacactctcctatttgatataggacttcgtgtcagatttaaacttcttctgtctctttctcagttctctgtttaatttcaagttcaagctggtgaaatcttggattagtgctcccactctcctatctggtataggacttcgtgggtagacttttctatttctctcctttctttcactctcttcttctcactgatccgcattgccgttcaaagtggtcttatttgaaaacacttgggcgttggtgc

SEQ ID NO: 213301 - DNA, 554 bp, Glycine max
aaaataacacacacttcacacatcattacgacaattaaaagaggtgtggaaattttcaaatagacagagcatactcaacaagagggtcatgtctaatttcctttattgaattaaacaaacgaacaaacgaaagaaaacacaaattccagatcatgcagaggattccgcattttcagaagatctggcagtagcctgtggaacagaaaaagctggcataagagtattaccagcaatttcaaaatcttgagaaattcccaagagaatatcaaaaactgtagactgtttgggattgtcaataaggaaactcaagtgccatgaagtttgatttgcccagaactccacatttcaaaaccattattaggaccacatacctctattgggaagatcaattcccaggaatgtggttccgattttgtccacttacatgcatcgaaatgctctgtactgttgctgtttgttaaaaacacttgtaccaatgaggcccaatcactccttttgactgctgcattcccagacatcacaattttaaccattaaacagcctttcttccaagc

SEQ ID NO: 213302 - DNA, 404 bp, Glycine max
tctctacctgacctcacttggatttagtgttggatctagtcatctagataaaaaaaattaaaatgaagatcattgagaaaattcgcgcagcttctgctgatccaaacagggtggtgttctcatttgagttctttccccccaagactgaagatggtgtggacaatctgtttgagaggatggaccccatgggggctcacaacccctctttttgcgacatcacttggggcgcttgaaggacaactgctgatcttacatcgggaattgcccacatgatgccgaacattgtctgtggtgagaccattatgcacctcatctgcagcaacatgcccggtgaaaagattgaccatgctcttcacaccatcaaattcaatggccttcaaaatgtgcttgcacttcgtggggat

SEQ ID NO: 213303 - DNA, 549 bp, Glycine max
cacagttcactcattatatatattaagaaacatccaattcagaggaaggagtaacttgtccttatgtcaacgtacaggttacccatgcgactttgaagaatgaaaatataaagacgttagggacatagcccagaaaaataatttggcacttcaacttagaaccatgtgtaatatgaatcatcatactgagaagaaaacaaaagaaaggaaaagaacatgacaaccaacagaagtgacatagctaaagtactaataaataataagctcatgtcagaaatctgcaaagacggcaaaaagatcaccattgatgtaatcattgtcgaccaaactaaccaagaagtggctgcccccaacctcttcaaccaatttcctggatgcctcatcctcagggtacaagcttgcccatcctcttgaccaaatttcaaatgcctcatccttccatacattgaagctgacaggatctacaatggttggttgaattatctccttagctgggaagacaccccatgtcacagcattaacgtcagtttgacccacattagatttcca

SEQ ID NO: 213304 - DNA, 511 bp, Glycine max
  unsure (1)..(511): unsure at all n locations
cacagttcactcattatatatattaagaaacatccaattcagaggaaggagtaacttgtccttatgtcaacgtacaggttacccatgcgactttgaagaatgaaaatataaagacgttagggacatagccccaaaaaaataaattggcacctcaacttaaaaaccatgtgtaatatgaatcatcatactgagaagaaaacaaaagaaaggaaaagaacatgacaaccaacagaagtgacatagctaaagtactaataaataataagctcatgtcagaaatctgcaaagacggcaaaaagatcaccattgatgtaatcattgtcgaccaaactaaccaagaagtggctgcccccaacctcttcaaccaatttcctggatgcctcatcctcagggtacaagcttgcccatcctcttgaccaaatttcaaatgcctcatccttccatacattgaagctgacaggatctacaatggttggttgaattatctncttagctgggaagacaccccatg

SEQ ID NO: 213305 - DNA, 505 bp, Glycine max
ttgttttcctttttttttttttttttggacagtttaaaatttcaaaatatcttcataatctatcagagcaaaaaaatattcaggcactaaattagaaatttgttcaactcatccggatctaataattacttcaagggccctttccttttggatgaatatgaatataccccccaaccaaagaatccatataatgcttaccccccaggaaggatatactgcaaatacaccattaactcaatttcatcgacgcaaatttttctgccagatctatagcctcgtttacatgtgatgcctctgtaccctgacccgttgcaagaccaccttttcctttaccacatctcccttttagaggccccaaagcattacttagccaatctgccacattcagattacctttaccttctttctctggcaccccggcacacactacagccttgttcgtagattcgcccgtgctaaaaaccatcacagataagcccttctggtccatgacttttgaacagcc

SEQ ID NO: 213306 - DNA, 430 bp, Glycine max
gatctcttgttcttgtaatatatttataaaaatttttcttattaacatgaattttttctgggtatttgtgataaatttttcgtttattcttttgaattaatgaaagacctatggtttgatacaataaaaaattgtttattgttttttctaaacagggcgaactggttcaataacaaatatttcttttttcataaatttgttatttttctttttccttaagcctagaagaattaaattcttctgattttgaatcatcataatatctagacctagttctcctctttgaatagaggctattgtaatttctcttaaattttttaatctaatcaggagacaatatacatttaaattggaataatttcttaggtcaaagaatatttaacaatgtcaaagtatattgtctcctgattaaattttttaatctaatcag

SEQ ID NO: 213307 - DNA, 474 bp, Glycine max
aaataccgcgactaatcacataaaatttgtgtttgttctttttatatttatattatttatatttttattttttgtacaatttattactagtatagtaatcgattccctgagatctatgaacccctccaactaaatgcaataatttttttattttattattaatcaaggaatttcgtatatagctagaacggccctcacaaattgcaaatactaatttgttaagaattaatcgaattgaggctatagcatcatcattagctggaattgaaatatcggcgaggtccgggtcacaatttgtatcgattaaacaaattgttggaatttccaaagttatacattctcgaagagccgtatattcttcttgttgatcgacgattattacaatatcaggtaaccccgtcatatatttaatgccgccaagatatgtttccaaatgagctaaatgtctctttaatatagcggcatctctttttg

SEQ ID NO: 213308 - DNA, 521 bp, Glycine max
gttcgggaataaactctttatttggacaatgcttcctgctctttcaaaaccttctttcggaggacctccttgtagcccacaatgtcacccttccacttgttgatacctccgtgctcacagatccaaaatttcatcagctatctgattgatcaatctgaaatcgtggcttaacaacaccactcctccctcaaattcgttgatggcgtcagcgagagcatcaatagtttcaatgtccaaatgattggtgggctcatccagcagcaacagatgaggagtctgccatgctaaccacgcaaacaccactcgtgtcttctgtccatctgaaagcagtcgaatcagagtagtttgggcttttccagtgattccaaacttgccaatgatctgtcgcattctctcgtactcgacttcacctggatagcacttcatcatataatccagtggtgacaggtccatgtccaacaagtctgtcaagtgctgatggtagtatccaatcttcaagtgctgatgtcttctcaccattc

SEQ ID NO: 213309 - DNA, 414 bp, Glycine max
gcctggtcagtgggaatttcaagttggtccttctgttggtatatctgctggagatgaggtgtgggcagctcggtacattttggagaggattacagagatggccggagtaattgtttcatttgatcccaagcctattccgggagattggaatggagctggagctcactcaaactacagcaccaagtccatgagagatgagggtggttatgaggtgattaagaaggccattgaaaagcttggattgaggcacaaggagcacattgcagcatatggagaaggcaacgagagacgtctcactggaagacatgaaactgcagacatcaacaccttctcttggggtgtggcaaaccgtggaagctccattagagttggaagagacacagagaaaaatggcaaaggttactttgaggacag

SEQ ID NO: 213310 - DNA, 434 bp, Glycine max
gtcgcaaggacgccgcaaagatcatcacacagcaagatgaccgtctcctggtcatggttggaccttgctccatccacgaccctgagaccgccattgagtactgccagcgcctcaaggcgctcgccgagaagctccaggacaacatcctcatcatcatgcgcgcctacctcgagaagccccgcacaacagtcggctggaagggtctgatcaacgacccggatattgacgagagctaccagatcaacaagggtcttcgcgtctcgcgcaagctctacattgacctcacatctcaaggcatgcccattgcctccgagatgctcgacacaatctccccccagttccttgcggacctcatctccctcggcgccattggtgcgcgcacaacagagtcccaattgcaccgtgagcttgcttctggtctttcgttccccatt

SEQ ID NO: 213311 - DNA, 441 bp, Glycine max
gggcaaaatatgcaaaaacatgttatttggttcataaatgatggaagccaagtaccccctttacccaaccattttccctacattttttatatacaaacaaagtcccaccccggcacgaaattaatgcaccccattagtctttttgctcgccttgctccgcctttcggggacagcagcagcaagatcctccaacacagtaacggggctatcccaatcgatacacccgtaagggatggacaccccctttgggagcccggctggacccttagcagggaccttttgattaccctcgttgatattcgattcaatcatgacggcgacaatggcggtttccccctcgcggatctggtcggggatgacctttgcgaccttgggttggttgcggggaactttgttcgagttgccatgcgaacagtcaaccatcaggacttcaggaagctt

SEQ ID NO: 213312 - DNA, 425 bp, Glycine max
gaaaacttggatgcctttaatagcttctatggaaacatgccgtggcttgcaattccgttctccgatttggaaacaaagaaatccttgaccagaaagtacgacgtggaagccgttccgtgcttaattttgttgcaacctgatgatcgtaaagagcacgtaacagttcgtgacggggttgaacttatttaccgttacggaatccaagcttatccattcagtaacgagaggttggagcagctgcaaaaggaagacaaagtgaagcgtgataatcagactctcactaatttactagcaaaccaccatagagactatgttttgagtcacactcacacgggactcaaaaaggtacctgttgcttggctagtgggtaaaacaattggactctacttctcagcggaatggtgcgtcccatgcgccaagttcac

SEQ ID NO: 213313 - DNA, 427 bp, Glycine max
gcccagggctatggatccttgggaatgatgacattcgagcttatgacccccgatggtctgactatggagtctgaggccgcacacggcactgtcactagacactacaggcaataccagaaaggccaggagacgtccaccaaccccgtcgcctccatctttgcttggacaagaggtcttgccttccgagccaaacttgacgacacgcccgctttggccgaattcgccaaggatctggaggccgcttgtgtcgaggtcattgacaaggacagcgtgatgacgaaggatctcgctttggccatgaagggaaagaacatgcagagaggggactgggtcaccaccgacgagtacatgaaggcggtcaacaacaaactcatcgagaagatcaaggcgaggacatctgcatagtgttggctcgacatatcccctc

SEQ ID NO: 213314 - DNA, 424 bp, Glycine max
gaaacttgaatctgggaagccagatattttaaaaggatctttctatgccaatcccatacttgatacacctacaacagaggcttctttgatacaacggtatccatcatattgcggctcaaatatatggcctagaaacgctttaccagaacttgaagtggctttcaaagcacttgggaagctgatatttgacattggattgatgttggcatatcactgcgatcaatatgtatccaaagggatgaaaattcacaaggatgaaggtctggaatcaatacttcgttgctcccgctgtcataaaggacgtttgctatattattttccttcacaacagggagtcccagatggcaactctttgtcttcttggtgtggatggcatactgaccacggttcactgacaggtctgacttgtggtatgtttacgaga

SEQ ID NO: 213315 - DNA, 428 bp, Glycine max
gtcggagctgtcaacagagctcttttgaacctgaatggttctggagctggagcttcagctcccagttcagccttctttgggaccagcttgaagaaggttattgcctcaagggtccccaacagcaaggtttccggtggaagcttcaagattgttgctgtagaagagaagaaagagattgaagagacccagcagaccgacaaggacagatggaagggtcttgcctatgatatctcagacgaccaacaagacatcacaagaggaaagggtttggttgactcccttttccaagctccacaggatgctggaactcactatgcagtcatgagctcctacgagtacctcagcactggacttcgccagtacttggacaacaaaatggatggattctacattgctccagcttttatggacaagcttgttgttcacat

SEQ ID NO: 213316 - DNA, 551 bp, Glycine max
  unsure (1)..(551): unsure at all n locations
ctcgtcgtcaccatgccgcaaggggattacatagagcgtcacagaagagactatggctaccgtgtcgatcacttcgagcggaagcgcaagaaagaggcgcgtcaagttcacaaacgctctgcaattgcccagaaggtttaaatcaaaaattttgtttttaattggtttttgtttaacctagttctattgtcttaattctaattattcgatttttgttaatttgaattgaacaggctctgggtattaagggcaaaatgattgccaagaaaaattatgctgaaaaggcacagatgaagaagactttggctatgcatgaagaatcaacttctaggcgcaagactgatgataatgttcaggatggagctgttcctgcttatctccttgatcgtgataacacgaccagagcaaaggttcttagcaacaccattaagcaaaagaggatggagaaggcgggaaaatgggatgttcctctacctaggtacgtccggtggctgaagatgaaatngtcaaagtggtccgtactggtaaaagaaagaccaagcatggaagag

SEQ ID NO: 213317 - DNA, 502 bp, Glycine max
aaaacaaagaaaaaaaaaaacccttagccaacacaaccatcatggccacctctgctattcagcgatcagcattcactggtcaaactgctctgaagcagctcaatgagttcgtccgcaagaccggtggcgccggcaaaggtcgcactaacatgcgccgcaccgtcaagagtgctcctcagagcatttggtatggccctgaccgtcccaagtacttgggtccattctcggagcagattccatcatacctgaccggagaattccctggtgactacggatgggacactgctggattatcagctgacccggaaaccttcgccaggaaccgggagctggaggtgattcacagcagatgggcaatgcttggtgcccttggctgcaccttcccagagatccttgagaagaatggtgtcaaattcggcgaggccgtgtggttcaaggcccgtgcacagatcttcttagagggaggccttgactacttgggcaaccccaacctgatccatgc

SEQ ID NO: 213318 - DNA, 494 bp, Glycine max
ctggggacccaaatttctaatatataaaaatataatggtgctcatacagatttttctgctacacaggtgtagttacattagtgaaaatggagttaaacacaagggaactgcaaaagggagcagaagattgcattgcatgtaggcatcctcattgtccagggacaaagttagtggcataagcccaagcattgttggcaacaggatcagcaacgtggtcgtaaaggttctgaatagggcccttgccagtgacaatagcctgaacaaagaaaccaaacatggagaacatagccaagcgaccgttcttgagttccttgaccttcaactcagcgaatgcatcagggtcatcagccagaccaagagggtcaaaagcaccaccagggtagattgggtcaagtccttcaccaagtggtcctccaccaactctggaaccttcaacaaaccccatgagcacaacctgaacagcccagaatagcaggatgctctgagcatggatc

SEQ ID NO: 213319 - DNA, 447 bp, Glycine max
caagaatcttgactctgacccattttttcctatcatatgaaaaatacatcgatgaaaagttgtgcgattggcatcatggggattacttgattcaattctcaatatcatgaagcttctcatgaccaccacttgctaggatataggtatgatcttacgcctccacaaaaaaagtatatcaggtcaagggtgaatcaaacatttcatacatatgttcacgtgactatcgggctccagaactaatttttggcgcaacagaatacacagcttctattgatatctggacacctgggtgtgatcatgctgaacttcttctaggacagggtatcaattgctggaagtctatgcattaatgttggcgatgcttaagacccttttgctgtccttctgagatatgctatatagacttgacgtagaatctaatgattggatagccattatggcccggag

SEQ ID NO: 213320 - DNA, 507 bp, Glycine max
aaattgtgaagtgaagctattactaatggaacataattgattatgataacacaatacactattctaggtccccagccctgaggagacaaaaagaacaacatagggacttttattcccataatgtatccccttaaggctgagaacaatcctctaggcttgcttaatgccccatgttccatatatatgtctggggactggtcggccttctaaactcttaaccacttgcaaccacggtttgtcaaccataaagatggaattttttgccgtatgacctaaaaataaaacatgattctcgaaaggtataacttcaaaaggcctcctattatgccccttcataacttcaatcctcttcttaacattaaaatggtgtgaatcccttgcccttgaatctttaggatttagcatatcactttcatcttgctccacgggcaatccaaagtcaatcaagcacatagccctggagctgtgaacaacaaccgattatgaattcgccgatggagaatatga

SEQ ID NO: 213321 - DNA, 410 bp, Glycine max
gagggaattccaccttctaaagtgtttgattggattgacagagattccaaatgaattggtaagcggattccttcaggtatgtttccacttaattgattcatatcgagaaccaatatttttagagatgagaatactgaaaggtcaggtaaagagccagtgatttgattaaatgacaaaaccaaatcttgtaatgagtgtctaacacaaccactagacaaattatgaaggattgatggaaggtcttcagtcaaatggtttgctggcatgtataaagaatgtaaggtgcatatattcgccaaggatttcaaatcctcacccttgaatatattatatgagaggtcgaggtgctcaagagaattcattacacggccaaaatggtttgatgtggaaccctccaagaggttattact

SEQ ID NO: 213322 - DNA, 346 bp, Glycine max
cgaagattaccgccgcggcggctaccacgccgtccgaatcggcgacgccttcagcgccggtcgctacgtcgttcagagtaaactcggctggggccatttctccactgtctggctcgcttgggacaccaaacattctagatacgtggctttgaaagttcagaagagtgctcagcactacactgaggcagctatggatgagataacaattttgcagcagattgcggagggagatcctgatgataagaagtgtgtggcgaagcttttggaccatttcaagcattctggtaccaatgcacagtatgattgcatggcgttcgagtaccttgtagacagagcttagactctt

SEQ ID NO: 213323 - DNA, 426 bp, Glycine max
gagccgcgcgccagtgggttaaatgctcaatttcttctaattaagaaccacgatggtttaggaatccattgttctccatttagggtttctttttctcattcaaattcttctccagtcacatccagttggggtttctttctcggaagatggctcgtaacgaggagaaggcccagtctatgctcaaccgcttcatcacgatgaaggcggaggagaagaagaagccgaaggagcgccgccccttcctcgcctcagagtgccgcgacctgtcggaggccgacaagtggcggcagcagatcatgcgggagatcgggcggaaagttgccgagatccagaacgagggtctcggcgagcaccgtctacgcgatctcaacgaccagatcgacaagctcatgcgcgacaaatcccactgggaacgccgcatcgagg

SEQ ID NO: 213324 - DNA, 424 bp, Glycine max
ctcgagccgcatcggatcaagcgaggcttaccaagaaccacatgatctagcacatcaaggacttggcctcatacaacaaggtggggaagtactacattgaaatggggccctacaacactcatgtcacaccagtgatcctgacgaacatcattgagaaccctgcttggcacactgagatcacaccttaccaggctgagatatttcaggggaggctagagacactgattgatcaccacaccatgaccactgacctcaccggattgcctatggacaatgctgcattggttgatgagggaactgttggtgctgacgcactgtccatgtgcaacaacattcagataggggagaggaacagcttcattattgccagtgactgccaccctacaaaccattgatatttgcgagacaagggctgatggtgctg

SEQ ID NO: 213325 - DNA, 453 bp, Glycine max
cctgtgattggatgaaacttaagagcaggggattatcatcattgtcacatatgatgaagcaatattcaacaagtgcaagaactgtatgaataggaataagagtttatgtacaacgggaaatgaaaatagttgtcatttgaacacattatgctgtggcagctgcttgttcttcaacagcctgtgatgctgggagaagggtgcaaatgaggttgcggtcaccgtacacattatcaacacgtcctgtggtaggccaaaactttgcagtacggagccaaggagctgggaaggctgcatattccctggagaatggttttgtccatgcatcagccatgagcagtgatggtggatgaggggcgcccttaagtacattgtggttaatgtcaacctttcctttctcagtctcagcaatttcttgtctaatggaaataagagcatcacagaacctgtctaact

SEQ ID NO: 213326 - DNA, 425 bp, Glycine max
ccgccacttctgaatctattgaatcaacaatcatgtcggacgaagagcaccatttcgagtccaaggccgacgccggagcctccaaaacctaccctcagcaagccggtaccatccgcaagaacggctacatcgtcatcaaaggccgcccctgcaaggttgtggaagtttcgacttccaaaactggaaagcacggtcacgctaagtgtcactttgttggaattgatattttcactgccaagaaacttgaggatattgtgccctcttctcacaactgtgatgttcctcatgtgaatcgtactgattaccagctcattgatattgctgaggatggatttttgagtctgcttactgaaaatggtaacactaaggatgacctcaagcttcccactgatgagagtctgctcactcagataaaggatggattt

SEQ ID NO: 213327 - DNA, 558 bp, Glycine max
tctgatcgctaaggtacggactggatcgacgaggctcactagctgactgccgggctgtcgtcctttttttttttttttccacaatatacttcctcctttataataaaatcacaggacagcaaagaaaaccagaaaaatgtgataatagttgctgtcaccacatccataaaaaccattgttaagactagtctgactagaatctatacgccaggtcttgaacaaaccaatgtaaaaggcttacaaaaatgtctttgcttacatagaaaatagaaataacaagcaacaagcaccaaaagctagtgctttggcccaatatccttgagggcacaaatctggaacttacccatagcacacatgacagacacaacaggatccttgccctcagcaaatccatcctttatctgagtgagcaggactctcatcagtgggaagcttgaggtcatccttagagctaccattttcaggaagcagactcagaaatccatcctcagcaatatcaatgagctggtagtcagtacgattcacatgaggaacatcacagttgtgagaagagggcac

SEQ ID NO: 213328 - DNA, 523 bp, Glycine max
gctgctcgtccttttttttttttttttaaaatttttacttgtattgatttattattagggataggcgtgtaatgattgatcctcatgcataactgaagcatcaaccaatgctggctttgatgccggcgcataaggaaggttggccaataatatacttgaacggttacatactggcgataaattatgcaaatatgcaaccagccccatcaacaaaacgacctgccaaaatataaggcaaaaacctctagggggcaaaacatacagctaacgtaggaagcgacggtgaccttggaaaccccccggcgtttacacaacggctaactcagggcttcgcgggaaaagagccttttatagctggaccataagctttagctcccaaaacaggagaggcagcaacccatgcattgggtccagccaggaacaccttgtaagccgctgctggaacaactacggcatcaacgtcaattcatggatttactacctgggccgacacaaaggggacaaatccagatctgggtacacg

SEQ ID NO: 213329 - DNA, 423 bp, Glycine max
gcccttgcaatctcaatcttctcttcttttttcaggatacccatttcgtttttcttctcaaatggccctttcttgttccaaagtttcaagcttttctctctcacccgttgtgggtggtggtgatgtttttaaaaatctcactttttcttccttttctttgagtttttctaataagcgtgttggtggaatcaagaacttgagggtgcgtgctgctgcttcaaacgcaccagctccactcgctggggtcatatttgaaccctttcaagagctaaagaaggattatcttgctgtcccaattgcacacaatgtttccttggctcgtcagaactatgctgatgagtccgaatctgcaatcaacgagcagatcaatgtggaatacaacgtttcctatgtgtaccattccttgtttgcgtacttcgacag

SEQ ID NO: 213330 - DNA, 435 bp, Glycine max
aaccgaacgtcattttttatttctaataaaatgattacatggtacaaacatatatgagattgcacataataatactactactaccattctaccaacaactataatacaaggacaaagttccctacatttttatcacctaggagaggaacacttattcactattcactattgctacaaacagaacaacacacttattcactattactacaaacagaacaacacggtgataacttcacataggaccatatgtatagaaaacagaggctgttcaaagattatagatcttcatcatgaagaagcctttgatcaaagtgccacacaccatgaccctttccaactaatctcagctgagtcacatactctgcaatctttgtaattgacttaacctgctcatacaagaactcgctctcaatgaagtctgctagttgaggatca

SEQ ID NO: 213331 - DNA, 428 bp, Glycine max
attgaagttaaaagccttagccttccctacaactccaaacacaaagacatcatcatccatggctgcctccgtctccactgtcggagctgtcaacagagctcttttgaacctgaatggttctggagctggagcttcagctcccagttcagccttctttgggaccagcttgaagaaggttattgcctcaagggtccccaacagcaaggtttccggtggaagcttcaagattgttgctgtagaagagaagaaagagattgaagagacccagcagaccgacaaggacagatggaagggtcttgcctatgatatctcagacgaccaacaagacatcacaagaggaaagggtttggttgactcccttttccaagctccacaggatgctggaactcactatgcagtcatgagctcctacgagtacctcagcactg

SEQ ID NO: 213332 - DNA, 512 bp, Glycine max
ggcgatggcaatggcgcttcgcaggctttcatcttctattgacaagcctctgcgccctctcttgaatgccggttccctctactacaagtcgtctttgcctgatgaagctgtttacgacaaggagcgacccggagttacatggcccaagcagttgaatgctccacttgaggtcgcggatcctgagattgctgatattattgagcttgagaaagctaggcaatggaaggggctagaatcgataccgccagagaatttcacctctgtgtctgtgatgcaagccgctggatcggttatgaccaacaaatacagcgaggggtaccctggtgcaagatattatggtggcaatgagtgtatcgacatggctgaaacactgtgccaaaagcgtgccctacatgctattagattggatcccgctaaatggggagtgaacgtgcaggctctgtcaaggtctcctgcaaaagtacgcgtttacactgcattgcttacacctcatgaaagaatcatggcgcttg

SEQ ID NO: 213333 - DNA, 502 bp, Glycine max
gtcaaggaccaaggggcgtgtggttcgtgttggtctttcagtacgacgggagcgttggaaggagctcattatctggccactggtgagctcgtgagccttagcgagcaacagcttgtggattgcgatcacgtgtgtgatccagaagaatatggagcgtgtgactcaggctgtaatggtgggttgatgaacaacgcatttgagtacatacttcagtctgggggagtacagaaagaaaaggactatccatacaccgggagagatggcacctgcaaatttgacaaaaccaaagttgcggctactgtatctaattacagtgtggtttcccttgatgaagaacaaattgctgcaaacctagtaaagaatggccctcttgcagttgctatcaatgcagtttttatgcagacatatgttggtggcgtctcatgcccatacatctgtgggaagcatttggatcatggggttcttctagttggttatggtgaaggtgcatatgctcccattc

SEQ ID NO: 213334 - DNA, 480 bp, Glycine max
aggaccacacatttccttggatttcccacttgtatatgtcaagcatacatacagaaattacatactacataaacaacatgggcttagcagattcctgatcctatacggagataattttaccagtaccaaatgataaaggtcacaacataaatatttatacaaactccccttagtccagtatcacatcacaaccacaatcaggcatatctttgtatttaatggctggatggatatatagcagctacagttgagaccatggaatctactccacacacatttcgacctctgcagatcttggaatatccattctctccccagctttcgccccatgaattcttaatgatccagtaagggttgttcttaaaacgaatgggagcatatgcaccttcaccataaccaactagaagaaccccatgatccaaatgcttcccacagatgtatgggcatgagacgccaccaacatatggctgcataaaaact

SEQ ID NO: 213335 - DNA, 424 bp, Glycine max
gacaacagcagagttggcagcttcactaactttggcagctgctagaaggatagttgaggcagatgagttcatgagagcaggattatatgatggatggctacctcatctatttgttggaaacttgctcaaggggcaaacagctggtgtaattggagctggtcgaattggatctgcttatgcaagaatgatggttgaagggttcaagatgaacctaatttattatgatctctaccagtccacacgactagaaaagtttgtcacagcctatgccgcattcttgaaagcaaatggtgaaaccccaccgacttggaaaagggcagcaaccatggatgaggtcctccaggaggcagatataattagtcttgatcctgtcttggataaaaccacttatcatctagtcaacatggaaagactagctaagatg

SEQ ID NO: 213336 - DNA, 503 bp, Glycine max
agggacataaggaataacttcatttatgtttaattaatgtttgaaatactacaaacacacgatgcttattaacatcacagtctttatatgcacagggccatcgacactttacatggttcttacacaaaaaagaacagacttgccccagagcctaacccaacacacaaaaattggccatttgtgcaatttgaggcccttgaaccatgtgtgtttatagctttgaagttggcaaacccagggcttttgcattaacaatgcttgggcatgcagctggtggtcgagcattctcattgaggaatggttccaccttattggcatcaaaccaaactgggtaccctttaaccttccccagcacgtttagagctgctagtgtagccattccctcacgagtccacttggaggcagatgcaatgtggggtaccacaatggcattcttcaactctgcaagcccaggtttcatgtagggctcttcctcaaacacattaaggcctactcgaaacatt

SEQ ID NO: 213337 - DNA, 425 bp, Glycine max
ttggagagttgaatgtggaatcccttcttgatttccgctcacagttatttgtaatagcatttttaatgagatgctcattagatagctatgaaaaattactgcgccaggctaaagctccaagtatgtttttacaatccttcaaaaattttgtttctttgtgtgtgtatggtgatgataacttaattagtgttcatgaatatgtcaagccttactttagtggttctaaattgaaaagctttctagctggtcataatatcaccattactgatggtattgacaaaactagtgcaactttgcaatttagaaagttagcagattgtgattttctcaagagaaactttaagcagatgtctaatgtgttgtgggtggctcctgaggataaggcgagtttatggtcacaacttcattatgtttcgtgtgataat

SEQ ID NO: 213338 - DNA, 425 bp, Glycine max
gttaaagggctttgcatgcatgggaacttgaaccagagcttgcagcttttggataggttgacgaagaagggactcgtcccaaatgcattcacgtattcgttccttctcgaagcggcatataaggagaggggggtggatgaggccatggagcttttggatgatataatagccaagggtggggagcctaatttgagtagttacaatgtgttgataaccgggttgtgcaaggaagggagaactgaagaagctattaagcttttcagggaattgcctgcgaaagggttcagtcctagtggtgtgagtgataacattttgctgaggagattgtgctatgaacggcggtgggaggaagccaatgagcttctggcggatatggataaagaagatcagcctacctcgtgggtcactgacaacatattgattac

SEQ ID NO: 213339 - DNA, 441 bp, Glycine max
caattatggcaacaacaacaacagcagcatgaatgggggtagacagcaacagcaacagcctcagcctgaggtttacaacataagcgagaatgatttcagggatattgttcaacagcttacagggtctccctctcagtatcaggatcatcctaaatccaaacctcctcagaattagaacaattccccaaaacctcaaagtatgagggtgcagaaaattaggcctccccctttgccctatgtgaggccttcattgcacaccaccttgacagcagctagacctgctcactttagacaacaaccatcaccaaaccctaataatatagctgagtcaccaatctgtgtctacatgagataccttgaacatgtaatcacagatcccacttgaaggagtgcccaatttcaatcccatcatcatgcagcgtttttctgctttgcttccta

SEQ ID NO: 213340 - DNA, 247 bp, Glycine max
gatgatgaagtgaggaagtggatttctggtgttggtgttgacagtgttgggaagaagcttgtgaactcaaaagatggacctccaacctttgagcagcccaagatgactctggagaagctcttgctgtatggtaacatgcttgtccaagaacaagagaatgtcaagagagtccaattggctgacaagtacttgaacgaggctgctcttggaaatgctaacgaggatgctattcagaggggaactttct

SEQ ID NO: 213341 - DNA, 420 bp, Glycine max
ctcgagccgaatcggctcgagggttaccttcctcatgtcctccgggatcgtgttgaacgactgggtgcgctgggttaccttccacagcggctacgatttcggctacctcctgaagctgttgacatgccggagcttgccggacacgcaggccgggttcttcgatctgatcaagatgtattttccgatggtatatgatatcaagcacctgatgaagttctgcaacagcctccatggagggttgaacaagctcgcggagttgttggaggtggagagggttggcgtctgccatcaggctgggtctgatagtttactcacttcttgtacatttagaaagttgagggatacgttcttcagtggctccacggagaaatatgctggtgtcttgtatggtttaggggttgagagtggacagactaattg

SEQ ID NO: 213342 - DNA, 420 bp, Glycine max
caattagtctgtccactctcaacccctaaaccatacaagacaccagcatatttctccgtggagccactgaagaacgtatccctcaactttctaaatgtacaagaagtgagtaaactatcagacccagcctgatggcagacgccaaccctctccacctccaacaactccgcgagcttgttcaaccctccatggaggctgttgcagaacttcatcaggtgcttgatatcatataccatcggaaaatacatcttgatcagatcgaagaacccggcctgcgtgtccggcaagctccggcatgtcaacagcttcaggaggtagccgaaatcgtagccgctgtggaaggtaacccagcgcacggagtcgttcaacacgatcccggaggacatgaggaaggtaaccctcgagccgattcggctcgag

SEQ ID NO: 213343 - DNA, 569 bp, Glycine max
  unsure (1)..(569): unsure at all n locations
aagcttccaactttgcgggattcgtatttgttgtttcagtgctgtgatggggaaggtcgcggtgggagctgcggttgtctgcgccgccgccgtctgcgctacggcggcactggtggtgcgccaccgcatgattagttcccggaagtggagtcgcgccatggcgatactgaaggagtttgaggacaagtgtgggaccccaattgtgaagcttagacaagtggctgatgccatggatgttgagatgcacgcaggtctcgcatctgaaggtggtagcaagctcaatatgttgatcagttttgtcgataatctcccaactggggatgaggaaggactctattatgcactggatcttggaggcacaaacttccgtgtccttcgtgtacatttaggcgggaaagacaaaggtgttatcggccaggagtttgaagaagtttcaattcctccaaatttgatgactggctcttcagaagcattgtttgattttatagcagcagctcttgcaaagtttgttggttcagaacctgaaggtttcattctncccctggcagaaaagagaactgggttttaca

SEQ ID NO: 213344 - DNA, 396 bp, Glycine max
aaggttatatctttgacattattccttaacgaaggagaaacaaaccccgcaaccaaaataatgaatgccccggtcaccagctgcaagggaccattggttcaatgggttgatctattacctatgcaaaaaatgaaacttgttttacacgtttttcccttgtttggcaataaaatttaagactcctccactcccaaatattgggagtgagaagctgccaggagggctgcaccaatgccagagccatcattagcatgctcaatgacaatggtctcagcagcctcattttccaacaattcctttagggtaccctccaagcattctctaaatttggtgtggtgtgtaaacaatcccccatccaaagctatcactgacttttgcttctccccaaccttaacc

SEQ ID NO: 213345 - DNA, 422 bp, Glycine max
cactcaacccctgaattctatagcatttgtttttgatggtgtcaactttggggcatctgattttgcatattcagccttctccatggttgtggttgcaattcttagcatcatttgtctgcttattttgtcatccgctggtggtttcattggaatttgggttgctttgaccatctatatgggtcttagggcatttgctggcttcttaagaattggaacgggatcaggaccttgggagttcctaaggagctcatgactgcacatggcagacaccgtagttatagcttcatattaggcctaggtttcagtggtgtttgctgattacatttaagtgaagagaagctttccctaggtttttaagtcgcttaaaaaattcttcggaaagaataggcacttttccctgcttgattgtgcttggggtattg

SEQ ID NO: 213346 - DNA, 421 bp, Glycine max
cactcaacccctgaattctatagcatttgtttttgatggtgtcaactttggggcatctgattttgcatattcagccttctccatggttgtggttgcaattcttagcatcatttgtctgcttattttgtcatccgctggtggtttcattggaatttgggttgctttgaccatctatatgggtcttagggcatttgctggcttcttaagaattggaacgggatcaggaccttgggagttcctaaggagctcatgactgcacatggcagacaccgtagttatagcttcatattaggcctaggtttcagtggtgtttgctgattacatttaagtgaagagaagctttccctaggtttttaagtcgcttaaaaaattcttcggaaagaataggcacttttccctgcttgattgtgcttggggtatt

SEQ ID NO: 213347 - DNA, 325 bp, Glycine max
acttttgcaacaagtgaggatgcatcttctgccattcagggcatggatggccaggatcttcatggtcggaggatacgggtgaattatgctacagaaaggtcacgtccagggtttggtggtgatggtggatatggcagtggtggtggtggtggctacaatgggggtggaaacttttgttgtggaggttgatcctcgggactcagtgtccttatgttggtttatgggcgatattggttcatgcttacgcttccactgaggggatgtgacactttgacgcctacaaatattggagggccatgtgtctattacaccaaatcttctgatt

SEQ ID NO: 213348 - DNA, 429 bp, Glycine max
ggaaggatgtcttacgttgctcacaacgttaatcagccccaagagaaagatttgttggagggaaatttttcctttgatattaaatctcgctctagattggaaaaagtttcctctacaaaagcacaatttgttagtggaaaaaccttcaaatatgatatgattggtgctggttcacattcttcagaagattttcctgaaaaggaagatcaagaaaaacccaaaaagattgataccagattgagacaaagaatagatcctcaatacaatgaggttcaggctcagatggaaacaaatttgtttaaattgtctcttgatgatgttgaaactcctaaaggttccatgttggatcttaaaatttctcaatctaaaattgcacttcccaaaaacacagttggaggaaccattctgcgtagtgatctattggcaaat

SEQ ID NO: 213349 - DNA, 379 bp, Glycine max
tttcgtttttttttttttttttttttttttttttttgtttttttttttctttttttttgttctggcattaactacttaattggtttgttttgttagtttagcacggtgcctaaaagaatatgcagggatatatttccatcctagaggcaaaagcaactacaactttaggaatcacttccttgactagaaagaaccaaccaaaattgctcccacattctaatatattcattgtatcaacaatgctgcctaacttactaatgcgtgcaagtttcttgtctcagtcaaaatgcattccctggcaaatagagcagaaacaacagcgaccccattgagatttggtgcaccaagtttcatgactgcacgtgcatttgacagacca

SEQ ID NO: 213350 - DNA, 441 bp, Glycine max
tgaaactctcctcttacaaaagaaccaacttctaaggagctttggtgacactattaagtctacacttctggcattcagaaatgctattgcatccaatcattcaaagaccccttttcctcaagggggtgttcatcatgttaccaagtatgtcatgaattacatcatggctctagttgaatatggtgacacccttaatctccttcttgctgatgacacctcaattgatcctgcaggcaacaaagatgacacaccatgtctctcattgtgtccagtggcttgccaatttcggtcaatcaccgcaactctagaatccaacttgagcaacaaagtccaagttttacaaagacgaggctttgcaacatattttcatgaagaacaacattcattacatggtgcaaaaggtcaagtgctctgatctaagccatttctttggggactgtt

SEQ ID NO: 213351 - DNA, 617 bp, Glycine max
ggtgaggtaaacttgaattgaagtgaagaaggagatggctgcaacctcttccttgtgctcatggaccctgcaatcccagatcaatggattcttccttcacaaaacctctctttcccatactccttccctcactttctccaggaggaaaatttcaaccacagtgaaggctacatctcgagtcgacaagttttcaaaaagcgatatcattgtctctccgtccattctttctgcaaacttttcaaaattgggagagcaggtgaaagcagtggaattggctggttgtgattggattcacgttgatgtaatggatggtcgctttgttccaaatattacaattggacctcttgtggttgatgcattgcgccctgtgacagatcttcctttggatgtacacctgatgattgtagagcctgaacaaagggtaccagattttattaaggcaggagctgatatagtcagtgttcattgtgaacaatcttccaccatccattgcatcgtacagttaatcaagtgaaaagtctgggagctaaagctggagttgtcttaaaccccggtaccccctttagtgcaatagaatatatccttgatgtggttgatttgttcttaattatgtccgt

SEQ ID NO: 213352 - DNA, 509 bp, Glycine max
ctactagtattgagtaattatcagtcagatacatgtgatgattgagccacaagcataacttaattatataatatagttgactttgaaactggcgcataagcaatgtctgccattattttacttgattggttctcatactggcagtcaattttgcttatattcaaccacccaatcagtaaaacgatatgccaaaatttaatggagaaacctctatggggcaaaaaatacagcttacattggagcgtacggtgaatatggaaccacacaggcatttcacacagcaactacttcaggtcttttgctggttatgattcctcttatagcttcggcataatctttagctccaaaaacagcagagccagcaaccagtgcattggcttcagcctcaatcaccttgtatgcatttgctggaccaactacaccatctacttcaatccatggattcactaccttctccgcacacaatcttctcaaatcagaaattctgtttacttgactctcaataaaac

SEQ ID NO: 213353 - DNA, 535 bp, Glycine max
  unsure (1)..(535): unsure at all n locations
atggcttcaatctcaggcatatgctcatcctccccaactctcaaccactccaccccaaaacgaggccggaccccactcctcccttcctcctcattcccctctaaaccctccccgcctcgctccctcgcgcgtgagacccccgcgccgcaacaacaacaacaacaactctccgcagtaacaaaaccactccacgccgggctcgagaaggagccacgcgccctatggcggcgctacgtggagtggctctaccagcacaaggagctggggctctaccttgacgtgagccgggtcgggttctccgacgacttcgtccgcgaaatggagccccgcttccacgccgcgctccgcgccatggaggacctcgagaagggtgccatcgccaaccccgacgaagggagaatggtggggcactactggctcagggactctgctcgggcgcccacctcgttccttaaatcgcagattgataacacgctcgtcgccatttgcaccttcgccgacgacgtcgtcaccggtaagattaagccgncatcgt

SEQ ID NO: 213354 - DNA, 495 bp, Glycine max
caaaaaagtccgtccaaataaatttaaatttaaagaagaaaaaaaaatcatcttcattgtagatggagagatccaacaaccaaaacaacttataataccattatggaatgaggatttcattaatctactactcaagcgtacaattcatcaagattacactccccaagaaaaaccttgatgctcctcggagaaccacagttaccttcagcaattagtgctctgtcattggcagccatatgagcaatgatcttgtaaatcatttcaatatcttctggggcatggcaacggtcagctacttcttcaagtgttaatggttcaacaggctccttgcagcttgcttcattgagtactgccaatacccgtttctgaagtgctaacacttctcctgctgctttcttaccagcttccacaccaggttggtgataagcatttatgttaacaagcgaagcatatattccaacggcccgttcataaagggctacaagggcaccaact

SEQ ID NO: 213355 - DNA, 576 bp, Glycine max
gtatcttcagattcactcccagaatcacttttgtcttcactttcagatttctctggtgtttcatcctcagatttgttaggaacaccattttcattttcctcctcattttcttcatctctctcttcttcctctgactcatcttctgcgtcacttgtactctttctccgcactactgaagaatcttcatttttcttctgactcttcacagaacgtcttgaagttgttgcagatcttgatgaaccccgttttacaacacgcttgcgctttgttcccttactgggcttgtctttttccgcaagtaacacagttgtggttgcatgaggggcaactaaaaaatctataagctcagcaataatatcttccttccttgatgttgccttgttaattgttatgtcaagcacatcacagaattccagtaacttctctttattacacttgtcaagtttttctgttactttaatcctttgcttttcctcattgtcacgccacacgaaaccagaaaaccttgatatattactcttgatctcaactgcccttcctctccttcaaagagaattgattgagcaatttgaacgt

SEQ ID NO: 213356 - DNA, 497 bp, Glycine max
atggggttatatttttatttttaaattttatattcctactatcttataaaaatatccttcaattatattaataattacaaatgaccaagctgtgggggaaacccccaaccccaacaacaaaaaaccgactttattaaaaaaccacaaaatatattacagagagggccgaaaaaaacacaccaccacagagcataccaagccgaaacaaacaaaggcactaacaaaaaaaacggaactcaaacaaaataaaccacaaactcttcctcaaaaaacaaaaaaaacgttggaggcgagacccgcgcacaaaaaaaaaaaaaccacaccccaacccaggaacaaagaaaattccaagaaacccatgcccgcaccgcaacctggaagccaagtcttcaacaaaaaacaaacccttacatattgcgcacgccacggcccccctatcggacacatcctcaccgaaaaaaaccccccaccgccacaaaagaaaaagaaaaactcct

SEQ ID NO: 213357 - DNA, 426 bp, Glycine max
caatttataagaataatccaatgatttctgaaacaaccatttcaattcaatcgataaattcagtaaattgttcattgaaaaaaaaaaaaataaaggatcttaatgctaaaagaaaagcagttatcagaaaaattgaaaaaattaaaaaggggcttgtaatttcagagacaaatattcattcaaacaaaacaacttatgatagtaaaagggtagaattcgaaaaaaaaaaattgctgatattacaaagaagaagaaatgctcgattaactcgtaaatcacattcttttttaaaatttttcatgaaaaggatatacagagatatatttctatatatcagttgtattccgaggatcaatatacaactttttcttgaattaacaaaaaaatttttaaataaatccatttacgataatgaagcaaatgcag

SEQ ID NO: 213358 - DNA, 583 bp, Glycine max
gatctcttgttcttgtaatatatttataaaaatttttcttattaacatgaattttttctgggtatttgtgataaatttttcgtttattcttttgaattaatgaaagacctatggtttgatacataaaaaattgtttattgttttttctagacaggccaactggttcgataacaaatatttcttttttcataaatttgttatttttctttttccttaagcctagaagaattaaattcttctgattttgaatcatcataatatctagacctagttctcctctttgaatagaggctattgtaatttctcttaaattttttaatctaatcaggagacaatatactttgacattgttaaatattctttgacctaagaaattattccaatttaaatgtaaaatcaaaaaatttcttagtaagaaattaagttctgcctccatcttgttcttgtctttctttttctttatacccttactattcttttcactgtctgatcctacataatcgttttcaatatctttttcttggtttgagatagatgattcaagatttcgtggacagggtattctgcttttgcccgatttcag

SEQ ID NO: 213359 - DNA, 424 bp, Glycine max
aagaaactgatggaagagatcaaacaaagtgacgagataatacttttcatcgatgaagtgcacactttgattggagcaggagcagcagaaggggcaattgatgctgctaacatactaaagccagctcttgcaagaggtgaactacagtgtattggagccacaacattagacgagtacaggaagcacattgaaaaagatcctgctttggagagacgattccagccagttaaagtgccagagccaactgtagatgaaaccatacaaatactgaaaggacttagagagcggtatgaaattcaccacaagctccgctatactgatgaggctcttgtagctgctgcacagctgtcctaccagtatatcagtgatcgatttttgccagacaaagctatcgatttgattgatgaagctggttcacgagtcc

SEQ ID NO: 213360 - DNA, 421 bp, Glycine max
aagaaactgatggaagagatcaaacaaattgacgagataatacttttcatcgatgaagtgcacactttgattggagcaggagcagcagaaggggcaattgatgctgctaacatactaaagccagctcttgcaagaggtgaactacagtgtattggagccacaacattagacgagtacaggaagcacattgaaaaagatcctgctttggagagacgattccagccagttaaagtgccagagccaactgtagatgaaaccatacaaatactgaaaggacttagagagcggtatgaaattcaccacaagctccgctatactgatgaggctcttgtagctgctgcacagctgtcctaccagtatatcagtgatcgattttcgccagacaaagctatcgatttgattgatgaagctggttcacgag

SEQ ID NO: 213361 - DNA, 405 bp, Glycine max
tttcgttctttttttttttttttttttgtttttatttttttttttttttttttttgtttttttttttttttggggcctaccaagtattccaataaaaactttagggactttgccaagaaaaaattattttggaaatgggttaaacaaattaaggtcaatagtttagcaaattaaccgttttttaccggaagcgttttttgcaagggttcgggggctccccttctaccattgaacccaatcaccttaccattaaaaacaggattccttttaacaaagaccccctccttgatctctttggcaagaattttctcagccaagctggcccccaaaagtcaaattaggggttttcttaaaggggaagctccataaccaggggtataacctttttggcaaatttggccccga

SEQ ID NO: 213362 - DNA, 420 bp, Glycine max
aagaaagggaaagcaactaaacattctctctcagtccttaaattctcatcgcaacacaacactctcatccacactccaaaatggtgacctcgtcgcaaaagattctggttaccggcggtgccggtttcataggcacccacaccgtggtccagcttctcaaaggaggcttcagtgtttcaataatcgacaatttcgataactccgtcgtggaagcagtggaccgcgtccgccaagtggtgggccctcagctttctcagaacctggaattcacccagggcgatctcaggaatagggatgacttggagaaactcttctccagaacaacttttgatgccgtgatccactttgctggcctgaaagcggttgctgaaagcgtttccaagccccgtcgctattttgattttaattcggtcggcacca

SEQ ID NO: 213363 - DNA, 495 bp, Glycine max
  unsure (1)..(495): unsure at all n locations
gttaaaatacatagtttttacttcttgaaatgcggccaaagttttattctcgagattatacaacgaactgcctaaacaaatcatccaacataaaagtattctataaagagatgcctatttgtgtggaaaacattcgtagatgagcagtatatttctcaagctaactcaaggcttccccgtgtaaccctggggattgttctttgcccaattccattggtccctgcacatctcatccacaccatattttgctttccatccaagttctttctcagctctctctgtagatgcataaacctcagtagcatctcccggtcttcttggacataattttactggaattttcttgccagacgccttttcaaatgctgtaaccatttcaagcacggatgttccacgaccagttcccaggttgtaagcagtacaacctatgttctctgttgtgaagagncttccaaggcagcaatatgaccatctgctaagtccatcacatggata

SEQ ID NO: 213364 - DNA, 417 bp, Glycine max
gtcattgaagaaataaaagtgaagttctaattggtgttattgagcagatagcatggagccacagtgtagaatcaagaaggatgccactgaattgatagggaataccccaatggtatatctgaacaacattgtggatgggtgtgtagcccgtattgctgctaaattggagtacatgcaagcgtgctgtagtgtcaaagataggattgctttgagcatgattgaagatgctgagaaaaaaggccttattacacctggaaagactgttctggttgagtatacaaggggtgacaccggcttaggattggcattcatagcagcattgaggggtgataaactgcaggtgactatgccgtcttacgtgagtcttgagaggaagattctactgcgagcctttggagctgatgtatatcttacaga

SEQ ID NO: 213365 - DNA, 461 bp, Glycine max
gagtgcaaaacaacttttgaaatcccatatgagtaatgttgggttattttcataagcaagaaattgaagcttgaagtgtcaatccagatgttattcaacttattttagaccacactataccgacaatagtgcttgcttaacgggtactcagtgagtactagcctaagctatttatgcaccttagtcaaatgtcatttggtcagcttctttgctaatggattcaaacagtggtgaagataagtaacgttctccaaaactggggaaaatcacaacaatgagctttcctgcattttctggtctcttccccacctttattgccactgctgcagcagctcctgatgaaattcccatcagcaaaccttttttcaaggcaagcagcttagcagtttctatagcctcttcacttgaaacctgaataacttgatctaggagatttacatccagaactttgggaatgatac

SEQ ID NO: 213366 - DNA, 529 bp, Glycine max
gaaagaatggcagcttgcactgtctactcaacacaatctctgagcacaaattgctccatctcaaccccatcaaagacgcaactcagttttttccaccaaaagcaggtagttttctggaggaacagcaagaagggcagctgcagcagcagaagaagctatgtgataacatgtgcagcaggtgactcacagacagtggtgattggcctggctgcagactcagggtgtgggaagagcaccttcatgaggaggctgaccagtgtgtttggaggagcagcagagccaccaaagggtggcaaccctgactccaacactctcatcagtgacaccaccactgtcatatgcttggatgattaccactctttggacagaactggaagaaaggagaaggggtgtcactgcccttgaccctagagccaatgattttgatctcatgtatgaacaagttaaagctcttaaggatggaattgctgttgaaaaaccaatctacaaccatgttactggtctcttggatccccctgagctcattaaa

SEQ ID NO: 213367 - DNA, 546 bp, Glycine max
  unsure (1)..(546): unsure at all n locations
gtctcaatcttgtatcaacataactgaatctcagcctcgctttttcttctcggataagtacatacatacatagtgtttttttcattaattatcatgcagaacagcctaataacaattgacaaaataacatgaaatagagtggaattgtggaaaacatgaaagaagaaagaaaatgatgattttgatgatgagagaactcaatttggctgcgttgctcgatcgatatatgtatatatattatggcaggttcaattcctaagcttttgcagctactggagtctcagccttgctggctattagctgctcatatagatctcttatcttcaaaccaactatggtttggaagagacctgttccattgttgctgccgggaaaatcagcatgcttcaacatctgttgagtaacctctccatagaactttgtagagaggttgcttaggtggctctcaacgtatattagttcatctagtctgtcaaattggccatccatttctacaactgacacctcattntcgtagtaagtctcaggtccatagaagaatttgat

SEQ ID NO: 213368 - DNA, 459 bp, Glycine max
tggaccgaggacatgagggatgatgcccttgaacccgctgatctcaatgacaggaacatgatggtggtggatgttggtggcggcacgggtttcaccactcttggtattgtcaagcacgtggatgccaagaatgtcaccattcttgaccagtcaccccaccagctcgccaaggccaagcagaaggagccactcaaggaatgcaaaataatcgaaggggatgccgaggatctcccctttcgaactgattatgccgatagatatgtatccgcaggaagtattgagtactggccggatccacagcgtggcatcaaggaggcatacagggttttgaaacttggaggcaaagcgtgtctaattggtccggtctacccaacattttggttgtcacgtttctatgcagatgtttggatgcttttccccaaggaggaagagtatattgagtggtttcagaaggcaggg

SEQ ID NO: 213369 - DNA, 591 bp, Glycine max
ctcgagccgaatcggctcgagctcccgggaaaaaaagtaggtaaaaaaatatgctaagtataaattgtctactgatgaaatacgaaagctgatgatattgaaaaaaaaagaattgtaaataaggttcaggttcgacttccatagagaatatagatgatattgtctataatgatagaaaaaaataaaaaactttcgaaagattttatccaattgaaattttaaaaatgactgggataaacttaagaattcaattattgaaattgaataagtaaacaatttaattggattggtcgaatggtatcaaaaaaatggagtactaactcccatttcttatttattattgaattaaccgatcaacttgctttgttatcgaacatttctttttgatttcaaaaattttccggaaaaaatttgaatctatttttatatgcgaatcaatcctactacttctggtcctgaggtttctgcgcttgaaaaaaaaaatctgggacgtatcgcccaaataattggtccggtactagatgtagcttttccccaggtaagatgcctaatatttacaacgctctgatagttaagggtcgagatactgtt

SEQ ID NO: 213370 - DNA, 424 bp, Glycine max
attccgatattcggacccatcaacttgttatgaaatcacattgatagcctctactcgggtcctaactcggctaaaagctagatttgcctcaattgggtggctcttgccttccgccttattcaaattagcttctgctatttcaagagtttgctgggcttcttggggatcaatggcactacccttttccgcatcatttactaaaacagggatctcattattggttattctagcaaaaccgcccatcagagccatcgttaaccattggtctttaagaagacgtattctcaaaatacctatatctacgggtgtggcaataggcgcatgatttggtaatactccaatttggccgctattagtagataaaatgatttccttcacttccgaatcccaaacaatttgattgggggtcagtacacaaagattt

SEQ ID NO: 213371 - DNA, 424 bp, Glycine max
cacacacacacacactcactttcttgcttgttctaactaccatgacaacccacattgataacctgtgggtgttggccttggtctcaaaatgcacacaagagaacattgcatggtcactcttgaccatcatggtcactatctggatcttcatgaccttcttctgctggactcatcccacaggtcctgcttggggcaagtactactcctttcattactggaaaaaaacatccacaaccacaaccgtaacctgaaacaacacaaacttcaacaaccttaaaatgattcccggtcccaaaggctatcctttcattgtaagcatgagcctcatgacatcccttgcacaccaccgtattgctgccgctgctcaagcatgcaaagccaacaggctcatggccttctacatgggtgacacgcgtgtcatcgt

SEQ ID NO: 213372 - DNA, 425 bp, Glycine max
cacacacacacacactcactttcttgcttgttctaactaccatgacaacccacattgataacctgtgggtgttggccttggtctcaaaatgcacacaagagaacattgcatggtcactcttgaccatcatggtcactctctggctctccatgaccttcttctgctggtctcatcccggtggtcctgcttggggcaagtactactcctttcattactggaaaaaaacaaccacaaccacaacctcaacctcaaacaacacaaactccaacaaccttaaaatgattcccggtcccaaaggctatcctttcattggaagcatgagcctcatgacatcccttgcacaccaccgtattgctgccgctgctcaagcatgcaaagccaccaggctcatggccttctccatgggtgacacgcgtgtcatcgtc

SEQ ID NO: 213373 - DNA, 395 bp, Glycine max
cgattacccaacaacttgggactggcaacttaataaaaacagggggggaaaaaaaaaaaaaccaaaaccccgttgtcccctttttttggagacagggccaactcaaactttttcccctggttaaggggattcactgaacatttaggggctacaaagggccatgcccctgctatttaacatgtttattattattattattatcattattattattataaaggccttaacccccccctggggggaactttaacaaaaggggggttagccttttcacacgaaagcctcagcacctccgttagatcaaccttcccctcattagaggggggccatttaaactggggcaaaagcctcgccacccaaaaagttccggtgctaaaacccaaagtttttccggg

SEQ ID NO: 213374 - DNA, 418 bp, Glycine max
ctcgagccgaatcggctcgagattcttttttctaaattaaacaaggcaaggactaactcccgaactgcaagtaaaaaaaatgatagaatagaatatagatttatctataagctctatgacttgtaatagaacttatgcttgatagaaaggttattatcatatagagttgacgaatgagatgaagttgagttcattaaataaagacgaaaagataaaggtggatcttattgttattggatctgttgctgttgatccaaagacaggtgctcgattgggaaagggagagggatttgcagaacttgaatatggtatgctgaggtacatgggagccatcgatgattcaacacgagttgttacatctgtgcatgactgccaattggtggatgatattccagttgaaaagctgttaatccatgat

SEQ ID NO: 213375 - DNA, 419 bp, Glycine max
caggaagtagtttgcacaaggttcaaggttgaatttcctatctttgataaggttgaagtcaatgggaagaatgcagtgccactttacaagtttttaaaggagaagaaagggggaatatttggcgatggtatcaagtggaacttcacaaagttcttagtaaacaaagaagggaaggttgtggacagatatgcacctaccacctcacctctgaaaatcgagaaagacatcgagaagctcttgcaatcttgagtactaagattttattctacatatctaatgtgctgaggacataggcaatctgtccggtgtcttcgaaggacaagtagcaatatgtatcatcaattaatataatgccctgaaaagttcttaatatatctcgtgtatttggattttggattgctcaataagtgtaaattggt

SEQ ID NO: 213376 - DNA, 467 bp, Glycine max
ctctctgctctagaattattgatgtctgtttctcacctttgattctggctgttaattgttatcactaggaaattttttggtgtggttggtttctttctttacagtgtgtgtgtgtggttgattctgctttgtttattcctttcttggtggtttggttttctcttgtttgtgtttttcattttgaaatttgaaaagctggacatgtttgtattgtagctgtttattgtatgaatgttttcggtttcaatgtgctttcattttggctttcggttgttactggctctttcttttttggttgagtaattattagggcttttgtttttttgctggttgattctgggttttttgtttggatattttagcttggtttgttctgaatttggccacattttgctctggttcttgtaattgcatgaaatgggtgtcatctctccgaagatcttcccagcatgtgggaacatgtgtgt

SEQ ID NO: 213377 - DNA, 421 bp, Glycine max
agaggctataaaggctgcagttgatttgtcagcgagatacatagttgataggtatctacctgataaagctattgacctcatagatgaagcaggaagtagagcttgtattgaagcctttaagaagaaaaaggagcacgaaactggaatcctttctaagtgcccagctgattactggcaagaaattaaagatgttaagtccatgcatgaaatggagaacaagcttaaatactatggcgcttctagcattgacgataccaatgaactcatactggactcatatttatcttctacaaccaccgataatgaacctatagaagttgggccagaagatatagcagcagttgcttccctctggtcaggaattcctgtgcagaagctcacagctgatcaaagaattcttctgttagatcttgagaatcaa

SEQ ID NO: 213378 - DNA, 459 bp, Glycine max
cacacactcaatgaagggagttacagtgaaagttgaagaaacaatggcgtatgctaatgctgcttcaactagcccaacaacatcttcaaacctctccccgcaacccatggaagggttgcacgaggtgggtccccctccgtttctcaccaaaaccttcgacgtggtggaagacccatccaccaacgacatcgtttcgtggagcagatcccgcaacagtttcgtcgtttgggactctcacaagttctctaccaccatcctgcctcgctacttcaagcacaacaatttctccagcttcgtacgacaactcaacacctacggttttagaaaaattgatcctgacaagtgggagtttgcgaacgaagggtttttggcggggcagaggcaattgttgaagacgataaagaggaggaggcacgtgacagtgacacagacacagtcacacgaaggaggaagtggggc

SEQ ID NO: 213379 - DNA, 520 bp, Glycine max
atgatgcaatgattacttctgcaatagagagattagagcaagcacttaaagatgaaggcatttcttataatgtcatttctgggcgacataagagcttgtatagcatttattgcaaaatgttaaagaagaaacttaccatagatgatatccatgacatttatgggctgcgcttgattgttgacaaggaagaagactgttacaaggccttgacagtagttcatcgattgtggtctgaggtgcctggaaagctgaaagattacatatgtcgtcccaagttcaatggatatcaatctctgcatactgtggtgatgggtgaaggcaaggttccccttgaagtacaaattcggaccaaagatatgcatttgcaagcagattttggatttgctgctcattggagatacaaggaagatgattgtcagcattcttcgtttgtgcttcagatggatgagtgggctcgatgggttgtcacctggcagtgtgaagcaatgagtagagattgctcaatctgtggatatgctga

SEQ ID NO: 213380 - DNA, 518 bp, Glycine max
gaatcaagttagccaagttcaaagtagtaacacagttgttctgtacaaatatttctatatacataacagtcactaaataatttcatgttggaatggaagtgaaatccaaaagcacgggtcaacttcttgagccagccatggtgcttgcggcggttcccatgcttgacacagttagcccgcgatcatacatacgctggatttcttccctatattctgtaagagacttgtcaggtatggctggtgtaagttcaatcacatctcccatcttcaacttgctattgggatcactaacgggtttatgattcagccttggcctcaactcttccttcaatgggaacctatatgttgtcaacctagagcttgctctcccagatcttttcaacaaatccaatactgttgagtttgcactgaattcttggacagacatcttatcattctcaatcatgataacaaacacagggccattctgaccacaatcaggcttgtaagaatatgggcaatcctcagcatgtgaaggg

SEQ ID NO: 213381 - DNA, 413 bp, Glycine max
gttcattgatgagctggatgctgttggaagggaacgtggcttgattaaaggttcaggtggacaggaacgtgatgctactcttaatcagctcctggtgtgcttagatgggtttgaagggaggggagaggtgatcactattgcatccacaaaccgaccagacattctggatccagcacttgtgaggcctggcaggttagatcggaaaatatatattcccaagcctggccttattggccgcatagaaattcttgaggtccatgctcgtaaaaagccaaaggctgaagacgtggattacatggctggtgctagtgtgactgatggaatggggggcgcacagctagccatcttaattgaggttgctgccatttgtatgaaacgtgatttcaggtctgagattactactgattacctat

SEQ ID NO: 213382 - DNA, 518 bp, Glycine max
aaacaatagtttaggaatgtctacacttggctttaattcaggctttacaccgaaacgtaggaaaacaaggtttacatgtccccctcacgagctagcaaaggctacctagcttagacccgacacaattattgtccatactccgtagagttgtggtaaagaatataatacaggaacaaggtacatgaaatcagcatatagtataaatattctccaaaattgatggggcatttgcccctgcaatttgttatgcgtggctactcaaactcgtttcctttccactaccgatcaatttttggaattctctacacttagcaactcgtatgtcaagtatgctgggaggcattggttttagggagccgtgcaactctactagatggaagaactcttgtttggttaagcttttcttctcaacaagctcattcaccaaagcatccatcagcgttctattttgctccaggatctcttttgcacgttcataacacgagttgacaatctgcatggcttccgaataatttcat

SEQ ID NO: 213383 - DNA, 417 bp, Glycine max
agaatccgagatcaaccccgacgaaggcaaggggtttttctcggcttcttcagatttctgaaatggcgcctgtttcagctttagccaagtacaagctcgtcttcctgggtgaccaatccgtgggcaaaaccagcatcatcactcgcttcatgtatgataaattcgataacacctatcaggctacaattggtattgattttctatcaaaaactatgtatcttgaagatcgaactgttcgactgcagttgtgggatacagctgggcaggaaagatttagaagtcttattccaagctacatcagggactcatctgtagctgttattgtatatgatgttgcaagccggcagactttcttaaatactgctaagtggattgaagaggtgcgaacagaaagaggcagtgatgtcattattgttc

SEQ ID NO: 213384 - DNA, 416 bp, Glycine max
caattttgcgtttctctgcctaaaaggattgaaagatgggtcaagcattcggttgctaccaagtcgatcagtcaaatgtggctatcaaggagcattttggaaaatttgatgatgtcctagagcctggatgtcactgcctgccttggtgtcttgggtaccagattgctggtagtctgtcgctgcgagtgcagcaacttgatgttcgatgtgagacgaaaaccaaggacaatgtctttgtcaatgtggttgcatctgtgcaataccgagctgtgtctgagaaagcatctgatgcattctataggcttaccaacacaagggagcagatccaatcatatgtttttgatgtcatcagggccagtgtaccaaagttggagttggattctgtctttgagcagaaaaatgatatagcaaaggct

SEQ ID NO: 213385 - DNA, 478 bp, Glycine max
aaaagaaaaacacatcttttgggaagtaattcttacatagcaaattccttaatgattcacaagcaacttgacattaagactaatccttaaacaagtgttcaaaactgcacatcagtacttacacataaaatagacactgctatgaatctatcaaatataagaagagtaaagatgcagactttataaggtcaaacaaaagaagcatttcctgaaaaaaacctgacacacatactataagatatttacaactccaagaaagcttaattctgtgaggcagcggcctgaaggagaccatcccgaatttgcacggcaatgtctttaactgtcccaagaccgtgaggtatgaacacagacgaggaccttgacgatgctcctatctctttcatggcgtcaaagtattgagtcaccagcaccatgtccatgacatctttagctgatgtaccgggcacgttctcagagaaagcaagcacgctgtccc

SEQ ID NO: 213386 - DNA, 355 bp, Glycine max
gtgcacgcttttttttttgtcaggaccactgacttaggggcattcaccaattgtccaacgcacggatgcttaccgcaattgccttctaaaccaaccgcaaggaccaattgtgcgactgaaccgatactgtggtactacgaccaattcctaatgcaacactgacatcgtggggtaaaaccaaactgtctataatcggtaaacctagctaacgctacctagcgtagggtgagacaatacagcgctgggggaattctgccacacactgatgagaccatgcgatatactaggaacacattgcaacgtcggtaggaacgctaggatgccataagctccccaattcttggggccacaattc

SEQ ID NO: 213387 - DNA, 431 bp, Glycine max
gttctggaatcaaagattgcttcagatacttcacacactattaaggcaatttgcattgtccacaatgagactgcaactggggtcaccaatgacttggccaaagtgagacaaattctcgattcctaccggcatccagccctccttattgttgatggagtgtcttctatttgtgctcttgatttccgcatggatgaatggggagttgatgtggcaataactggctctcagaaggccctttcccttcccactgggataggtattgtggttgcaggacctatagctattgaggcctcaaaacatgctaaatcacttcgagttttctttgactggaaagactacctgaaattctaccagctaggaacgtattggccatacactccttccatacatttgctgtatggtctgagagctgctcttgatctgatttctga

SEQ ID NO: 213388 - DNA, 436 bp, Glycine max
aaaagaagcaatgcattaaagctgaaagtagagtgtatgttcatcttcaaaggagtgtaaaagagggtaatatatattttacagaatttccgaaagagcagaaaaaaggaagtaaagacaagaatgacttgtgactcaaatcctggaagggatcataggaatagtgtcctgtaagtatgcactggcagcagcaactccacttccaagctttacaggatagcccacatctttcagtatcatctccataccagctagacatcccaacaggtgcaactcattcaagttgccaagatgtccaattctgaaaaccttcccagcaactttgttcaggccaagacctaagctcaaattggatctcttccatgcccttctaactatttcagcactatcaatgtaagcaggaacaagaacagcagtcacagtgtcactggaccac

SEQ ID NO: 213389 - DNA, 441 bp, Glycine max
agcagaagcagcagatatgaatatgaattcaatcccacacgtgctgagtgttgctgggtctgattctgggggtggtgctggaatccaagctgatcttaagacttgtgcggctcgccgtgtctactgttccactgtcattactgctgttactgctcagaacactgctggggttcaaggactcaacattctacctgaggattttgtggcagaccagttgcactctgtgctctctgatatgcatgttcatgtcgtcaaaacaggcatgctgccctctcttaatatagtcaaggtcctttgtcagacccttaggaaatttcccatcaaagctcttgtggttgatcctgtcatgatatctaccagtggggatgtacttgttggtccttccgttcttgctggatttctggaggagctgctttccatgactgacattgtaaccccaaa

SEQ ID NO: 213390 - DNA, 490 bp, Glycine max
agcctccaaatgttttgttctgccccagtatcgagcaatcataaactacttaattggtatgttttgtaagtttagcacggtgccgaaaagaatatgcagttatatatttccatcctagaggcaaaagcaactacaactttagtaatcacttccttgactagaaagaaccaagcaaaattgctcccacattctaatatattcattgtatcaacaatgctgcctaacttactaatgcgtgcaagtttcttgtctcagtcaaaatgcattccctgtcaaatagagcagaaacaacagcaaccccattgagatttggtgcaccaagtttcatgacttcacgtgcatttgacagaccaatgccaccaattgcaaccacaggaagtgtagaggccaggcatacttccttcaagccttctaagcctatagtacgattatttgcctttgtattagttggataaacaccaccacaaccaatgtaatcggcaccatcaat

SEQ ID NO: 213391 - DNA, 537 bp, Glycine max
gtcttgcataagactgaggatgattcacctgcaaatcgatcatcaatgtctgaatttggggatgacaattttgctgttgggagttgggagcagaaagaagtaatgagccgtgatggtcacatgaaacttcagacacaggtcttctttgcctcaattgatcagcgcagtgaacgtgcagcaggtgagagtgcatgtactgctcttgttgcggtaattgctgattggttccaaaacaatcgtgatcttatgccaataaagtcccagtttgatagtcttattcgtgaaggctcattagaatggaggaacttatgtgaaaaccagacctacagggagcgattccctgacaaacattttgatcttgaaacagttgtccaagccaaaatacgccccctttctgtggttcctggcaagtccttcattggattttttcatccagaaggaatggatgaagggagatttgattttctgcacggcgccatgtcttttgataacatctgggatgagattagtcatgctggacgggagtgccctaaccat

SEQ ID NO: 213392 - DNA, 590 bp, Glycine max
  unsure (1)..(590): unsure at all n locations
aaagccttagccttccctacaactccaaacacaaagacatcatcatccatggctgcctccgtctccactgtcggagctgtcaacagagctcttttgaacctgaatggttctggagctggagcttcagctcccagttcagccttctttgggaccagcttgaagaaggttattgcctcaagggtccccaacagcaaggtttccggtggaagcttcaagattgttgctgtagaagagaagaaagagattgaagagacccagcagaccgacaaggacagatggaagggtcttgcctatgatatctcagacgaccaacaagacatcacaagaggaaagggtttggttgactcccttttccaagctccacaggatgctggaactcactatgcagtcatgagctcctacgagtacctcagcactggacttcgccagtacttggacaacaaaatggatggattctacattgctccagcttttatggacaagcttgttgttcacatctccaagaacttcatgaccctgcccaacatcaaggttcctctcattcttgtatctggggagggcagggacaaggaaatctntccaatgtgagc

SEQ ID NO: 213393 - DNA, 519 bp, Glycine max
aaaggaaaaggcaccaaattcaatttaagtggacactgtaactcaaaattatagaggaagacggtccaatatgaaaaatatagtaagatcatctcaaacttagcatcttctctttgcacctaagacattgagaatgctaagaatgttacacgcaagttccatcacaacttctagcacttggattagtacaacaaccttcacgaacagaaatatttacttgccaagtttgctttgcctccaattcaagactggaagaaagttcccctctgaatagcatcctcgttagcatttccaagagcagcctcgttcaagtacttgtcagccaattggactctcttgacattctcttgttcttggacaagcatgttaccatacagcaagagcttctccagagtcatcttgggctgctcaaaggttggaggtccatcttttgagttcacaagcttcttcccaacactgtcaacaccaacaccagaaatccacttcctcacttcatcatcatatactctggccctcagt

SEQ ID NO: 213394 - DNA, 414 bp, Glycine max
tgaagctgtttacgacaaggagcgacccgtagttacatggccgaagcagttgaatgctccacttgaggtcgtggatcctgagattgctgatattattgagcttgagaaagctaggcaatggaaggggctagaattgataccgtcagagaatttcacctctgtgtctgcgatgcaagcggttggatcggttatgaccaacaaatacagtgaggggtaccctggtgcaagatattatggtggaaatgagtatattgacatggctgaaacactgtgccaaaagcgggccctagaagcatttagattggatcccgctaaatggggagtgaacgtgcagcctctgtcaggggcttctgcaaatttccacgtttacactggattgcttatacctcatgaaagaatcatggcacttgatct

SEQ ID NO: 213395 - DNA, 506 bp, Glycine max
gattaagaaatttggtatttgaagcctttattacatatgcatctatacatttcaacataacgatcaagattttctggattcttacatataaaggcttttgacattgtttttaaaatatgttgtcgtcctctaccatggatcaggaaaactgatcttgttgaattgcttgccagtaagaccatgggatgacctaatggaaaattttcttttctcaattcttgtgcttcatggttgctttatcaaaaccaatggttggaaattgttttgcatactcctcaacatcaaggcggagctttgctatctccgattgaaaggtagaagatgactcaattgtggccaagaagtccttcagctttgttcctttgctctctcccttaatcttcacagctatcttcactgctgcatcaaaaaactctgctaccttgacaaaatcctcctcaacaaatcctctagaagtaagagcaggggttcccatcctgatgccaccaggaaccatggcagacaca

SEQ ID NO: 213396 - DNA, 418 bp, Glycine max
aaattaatgtgacttgtgaagtacagcaattattaggaaataatcgaattagagctgtagctatgagtgcgacagaaggtctaatgagaggaatggaagtgattgacacaggagctgccctaagtgttccagtaggtggagcaactctaggacgaattttcaacgtgcttggagagcccattgataatttaggtcctgtagatactcgcacaacatctcccattcatagatctgcgcctgcctttatacaattagatacaaaattagccatttttgaaacaggaataaaagtagtagatcttttagctccttatcgtcgtggaggaaaaataggacttttctgtggagctggagtgggtaaaacgggactgattatggaattgatcaataacattgccaaagctcatggaggtgtatc

SEQ ID NO: 213397 - DNA, 351 bp, Glycine max
ccgcggtggcaagctggaaccatacaaataaactacactttcttccgggagccaagactggatgacactaaccaaagcgcgattgcaaaggcctggactatgagggccccagaggtgtgcatagagctgcaggagacgactttgaatgaaacagccaacattgagatgcttctcgagagatagaacctcggggatccgtgtcctattgatggtccaggggggatattgggtcatgcatacgctcccactgatgggaggtgacactttgtcgcctacaaatgtcggaggaggatgggcgatgaggccaaattgtcggatacacgagcagcggagctggaagtatgggcacat

SEQ ID NO: 213398 - DNA, 411 bp, Glycine max
ttttgttttttttttttttacatttattcattatcatatatgcatcatctagtttcagctgggtgattcttaattaagagaaaactaaaagacaatatctaacatgctattttcgttgtacttgaattacaatgataacgcctcgattgctttcagaatcctttaatgcaaattaccgaactaggactctagcaactagggctaacaacacctagctataataattcggggttgataccatagagctttcgagtgccggctatatcatcgtgcgctagattcaccttcctagttcgcggagggatactaggatacatgatggctcttaggttcgactagtgggctaatccgagcaagtgcccgaactcgggcactgtcacagattcaacgttacacgcacttgttaccggc

SEQ ID NO: 213399 - DNA, 424 bp, Glycine max
aaactttcgaaagattttatccaattgaaattttaaaaatgactgggataaacttaagaattcaattattgaaattgaataagtaaacaatttaattggattggtcgaatggtatcaaaaaaatggagtactaactcccatttcttatttattattgaattaaccgatcaacttgctttgttatcgaacatttctttttgatttcaaaaattttccggaaaaaatttgaatctatttttatatgcgaatcaatcctactacttctggtcctgaggtttctgcgcttgaaaaaaaaaatctgggacgtatcgcccaaataattggtccggtactagatgtagcttttcccccaggtaagatgcctaatatttacaacgctctgatagttaagggtcgagatactgttggtcaacaaattaatgtg

SEQ ID NO: 213400 - DNA, 438 bp, Glycine max
tgtggatatgctaggtacggaattaatcgccgggctcactagctggctgccgccctgtcgtccttttttttgaacattatttacttacaattcttttgttcccttttaatggcttatgtgatccgtgacacaattatcctttttcgcggagcccctgatgaagcgctccgttaactgtctaaacgttccaggggtgagtgaactattagacccagcctgatggcaagcgccaatttgtctacagctgcaacgacttcgccagcttgtttaacccaccatgggggctgttgtacaacactatgaggtgcttgatgtcatatacggtcggtaacttcatccggatcagatcgaaaaacccgggctgcatgtacggctagcttcggcatgtcgcccgcttcaggaggtagccaaaatggggcttgatgaggacggttaccc

SEQ ID NO: 213401 - DNA, 438 bp, Glycine max
ctttctcctaaaacatctgcagtgggttcttcttcttctattacaacaacgtcgtccaagaccatgaccatggccatggccacgatcctgctcctgttcacggtcttcgcggtttcatcggccctagacatgtcgataatctagtacgacaacgcccacgccgccacgtagcgcagcgacgaggagctgatgtccatgtacgagcagtggctagtagagcacggcaaggtgtacaacgcgctcggagagaaggagaagaggttccagatcttcaaggacaacctgcgattcatcgacgaccacaactcccaagaggaccgaacctacatgctcggactgaaccggttcgcggatctcaccatcgaggagtacagggccaagtacttgggaaccaagatcgatcccaaccggaggctcggctagaccccgagcaaccga

SEQ ID NO: 213402 - DNA, 463 bp, Glycine max
attactgattattaaagcttggcgcatcaatacattacaatacaatatgtaactatgaactatcaatatatgatcgttatttatgtctgtgatacacacaattcaggccatgatattcgtacgtgatttacagcaacttctaacttatttaatacattataccaacccaactaggagcaattttcattatacaatgacacttatctttaaactctgaagcatgacaaggtggtagtcaccagggaccatattcttatgcaatttatgccacaactggataagacgcacaagttgcaacaccacacatgttcttgcccaattccattttgaagtagccattctcaccccaagcttctccccatgaattttttatgagccaatatgggacgccatgttaactccataccctacagcaaggactgcatgggtcacatcctgggaagtgctaccgcaaatgtcacta

SEQ ID NO: 213403 - DNA, 520 bp, Glycine max
  unsure (1)..(520): unsure at all n locations
cgagaattgtatttgcacagtccagaggaagctcgccaattgagaaggaaagctctctctcgtattgaatggctgcaaaaagctgatgtgcctaccatagcacagattgaagagttccattcgatgcagaggatgatgaatgctcctgattcaaatgataatattgatctactgttgagcattgatttgttgggtttacaaggagcaggtaaagcttttccaaacaagattgtttttgatgataagcttgtgttggctaacacacaagaattctttgatggaaattttccagtggattcttggttaccaatttttgtgaattgtctttatcctgtaagtcaattaccttcagaagctgtcgttgtaaatgttacatgtggtagggccgggggtnggntttacccaccactgcttgnattagttctgcagttaacaatcgctcctcagatatcaacaaaaggattcgcacagcacttgggagaggtaagaaaattgtttttcttactagaagtgatccttt

SEQ ID NO: 213404 - DNA, 567 bp, Glycine max
caacgatccagatgtgttgttggcagctgcacgcaaggtggagcctttttgcgattatgttgatattaatcttgggtgtcctcagcgcattgctaaacggggatactatggcgccttcttgatggataaccttcctctggtgaaatctctggtagaaaaattggctgttaaccttcaggttcctgtttcatgcaagattaggctctttccaaatttagaggacactttgaagtatgctaggatgcttgaggaggctggttgtatgcttttagctgttcatggcaggacaagagatgagaaggatgggaagaaatttcgagcagactggaacgctatcagggccgtgaagaatgcagtcagaatccctgtccttgcgaatgggaacataaggcatatggatgatgttagagactgcttggaagagactggtgttgaagggggtgctttctgccgagacactgcttgaaaatccagctctctttgatggattttcgaaccgccgaatgggtgtctgaaagtgaaggaaccaatctggattgaaaacttgaccaggcagatctgctaata

SEQ ID NO: 213405 - DNA, 571 bp, Glycine max
caaaaagaagcctggttaaaagagaaggcggcaggaggtggctatgagtcgtgcgcgtgtgtattgcgacgtgaacgaaacgcgcccacgcgagtactgggactatgagacgctgaatgtagcctgggggtacgtttctcgtctcttttttcctccctccttcgcccctattgccctttgctgccccatcgaaatctttcgctcgataagggggaatggcgttggtttctgcgcatttgaacacagctccagcattatttggatggatcaatgtcattgccgctgtgtttttgtagggaaggctcacagacgtcttgttgtgaatacacagggatcaggacaattacgaggtgatccgcaagatcggccgaggcaaatatagtgaagtattcgagggttataacgtagccagcaactctcgctgcgttatcaagattctcaagccagtcaagaagaaaaaaatcaaacggtacgtatgtttgtagagtttattgaccatgtactggctgtctactttttggttatcacgcttgttgttgatgcttcgtagtgagatcaagatcttgcaaaa

SEQ ID NO: 213406 - DNA, 561 bp, Glycine max
caccacaccaatgccaatacccatgtgcaacgaaattcaagcccaagcccaagcccaagcccagagcccaacctgggtttaagctcgtcggtttcaaaaacttcgtccgaaccaatcctaagtcggaccgctttcaagtcaaccgcttccaccacatcgagttctggtgcaccgatgccaccaacgcctctcgccgattctcttggggacttggaatgcctattgtggcaaaatctgatctctccaccggaaaccaaatccacgcctcctacctcctccgctccggcgacctctccttcctcttctccgctccttactctccctctctctccgccggctcctccgctgcctcctccgcctccattcccagtttcgacgccgccacctgccttgccttcgctgccaaacacggcttcggcgtccgcgccatcgccttggaagtcgccgacgcggaagccgctttcagcgccagcgtcgcgaaaggagccgagccggcgtcgccgccggttctcgtcgacgatcgcaccggcttcgggaggtgcgcctctacggcgacgtggt

SEQ ID NO: 213407 - DNA, 452 bp, Glycine max
aatagaaaaatactatccataaaagtttctgtgatttcattttcatacaagggaggacactatcattgtaattctatgtattatagagtataaacaccctatgccacattgattcctcattaatcatttcaacaaaggagtatttgtgttcttccaatgtgcttacgcggttcttttagcttccaaagtcttctcatattcttcaatggatttgaaaagctcagaaaaattgcctttcccaaaacccccacatgcacccttctggtacaccttcccttcctcatcctccaccatgcacccgatcctctgaattatctctatgaatatcgttggcctgtccccaacaggcttggtgaaaatctgaagcagagtgccctgatcatctctgtcaacaagaatcccaagctcctcacactgcttaatctggtcaacggtcaacacatcatcggcac

SEQ ID NO: 213408 - DNA, 353 bp, Glycine max
agcagaagcagcatatatgaatatgaattcaatcccacacgtgctgagtgttgctgggtctgattctgggggtggtgctggaatccaagctgatcttaagacttgtgcggctcgccgagtctactgctccactgtcattactgctgttactgctcagaacactgctggggttcaaggactcaacattctacctgaggattttgtggcagaccagttgcactctgtgctctctgatatgcatgttcatgtcgtcaaaacaggcatgctgccctcttttaatatagacaaggtcctttgtcagacccttaagaaattccccatcaaagctcttgtgggagaccctgtcatgatat

SEQ ID NO: 213409 - DNA, 487 bp, Glycine max
agcctccaaatgttttgttctgccccagtatcgagcaatcataaactacttaattggtatgttttgtaagtttagcacggcgccgaaaagaatatgcagttatatatttccatcctagaggcaaaagcaactacaactttagtaatcacttccttgactagaaagaaccaagcaaaattgctcccacattctaatatattcattgtatcaacaatgctgcctaacttactaatgcgtgcaagtttcttgtctcagtcaaaatgcattccctgtcaaatagagcagaaacaacagcaaccccattgagatttggtgcaccaagtttcatgacttcacgtgcatttgacagaccaatgccaccaattgcaaccacatgaagtgttgaggccaggcatacttccttcaagccttctaagcctatagtacgattatttgcctttgtattagttggataaacaccaccacaaccaatgtaatctgcaccatc

SEQ ID NO: 213410 - DNA, 614 bp, Glycine max
  unsure (1)..(614): unsure at all n locations
agcagaagcagcagatatgaatatgaattcaatcccacacgtgctgagtgttgctgggtctgattctgggggtggtgctggaatccaagctgatcttaagacttgtgcggctcgccgtgtctactgttccactgtcattactgctgttactgctcagaacactgctggggttcaaggactcaacattctacctgaggattttgtggcagaccagttgcactctgtgctctctgatatgcatgttcatgtcgtcaaaacaggcatgctgccctctcttaatatagtcaaggtcctttgtcagacccttaggaaatttcccatcaaagctcttgtggttgatcctgtcatgatatctaccagtggggatgtacttgttggtccttccgttcttgctggatttctggaggagctgcttcccatgactgacattgtaaccccaaatataaaagaggcatcagttttacttggtggtgtgccgctgaaatcagtttctgacatgcgcactgctgccaaattgatacatgatttgggtcctaggaatgtacttgtcagggtggtgacctccctactncgntagatgctattgatgtattctttgatggtgaggagttcta

SEQ ID NO: 213411 - DNA, 473 bp, Glycine max
agcctccaaatgttttgttctgccccagtatcgagcaatcataaactacttaattggtatgttttgtaagtttagcacggtgccgaaaagaatatgcagttatatatttccatcctagaggcaaaagcaactacaactttagtaatcacttccttgactagaaagaaccaagcaaaattgctcccacattctaatatattcattgtatcaacaatgctgcctaacttactaatgcgtgcaagtttcttgtctcagtcaaaatgcattccctgtcaaatagagcagaaacaacagcaaccccattgagatttggtgcaccaagtttcatgacttcacgtgcatttgacagaccaatgccaccaattgcaaccacaggaagtgtagaggccaggcatacttccttcaagccttctaagcctatagtacgattatttgcctttgtattagttggataaacaccaccacaaccaatg

SEQ ID NO: 213412 - DNA, 608 bp, Glycine max
  unsure (1)..(608): unsure at all n locations
attctcagttacctcctgttatttgggaaaacccatccatgaggcttttctgttgtatttgctggccatatgacacagtttagatgttaagatatgatctcccaaataaatggcaccaatgcaattcaacgatattgcatagatatattcctagctgcctttaaattgcttccctatgcagttcaatacaagttcattatgtttggagatggacacaagaacccaagctactgtgatcttgtcaacatgattacttctaatgtttttgatgctgccgtaggtgacattgcgattgtctctctccgaacaaagattgtggattttactcgaccatatatagagtcggggctagttgtggttgctccagtaaaaaaaattgaagtcaaatgcttgggctttcttgcgaccatttactccacatatgtggggtgtcactgctttttttttcctctttgatggagcagtggtgtggattcttgaacatagaacaaacgatgagtttcgagggttaccgaaggaacatatagttacagntctttggtaagtactcttgttgtagcttgtgcacatagctagntagtcataactcatcnttgtatgcttttgca

SEQ ID NO: 213413 - DNA, 453 bp, Glycine max
gggcgcaaacaacatggttgacaaactaaaactgcaaaagcatacaaagatgagttatgactaactagctatgtgcacaagctacaacaagagtacttaccaaagaactgtaactatatgttccctcgggaaccctcgaaactcatcgtttgttctatgttcaagaatccacaccactggtccaacaaagaggaaaaaaaaagcagtgacaccccacatatgtggagtaaatggtcgcaagaaagcccaagcatttgacttcaattttttttactggagcaaccacaactagccccgactttatatatggtcgagtaaaatccacaatctttgttcggagagagacaatcgcaatgtcacctacggctgcatcaaaaacattagaagtaatcatgttgacaagatcacagtagcttgggttcttgtgtccatttccaaacataatgaacttgt

SEQ ID NO: 213414 - DNA, 620 bp, Glycine max
  unsure (1)..(620): unsure at all n locations
accaaaaccaatcggatcgtttcctctgcggagtcagaaatccatggatccctacaagaatgggccatcaagcgccttcaattctcccttctggactactaattccggtgctcccatctggaacaacaactcatcgctgactgttggatctagaggtccaattctgctggaagattaccatctggtggagaagcttgcaaactttgacagggaacggatccccgaacgtgttgtccatgctcgtggagctagcgcaaagggtttctttgaagtcacgcatgacatttctcacctcacatgtgccgatttcctccgagcccctggagttcagacccctctcatcgtccgtttctccactgttatccacgaacgtggcagccctgaaaccctcagggatcccagaggtttcgctgtgaaattctacactagagagggtaacttcgaccttgtgggaaacaacttccctgtcttcttcgtccgcgatggcctcaagtttcctgacatggtccatgctctcaaacccaaccccaagtcccacatccaggagaattggaggatcctcgatttcttctccaccatcccgaaagccttacatgttcttcttcttatncgatgacgtg

SEQ ID NO: 213415 - DNA, 489 bp, Glycine max
gacattataaaattttattcgaaatataaatgaagactaaaccccaaatgaacggagaatcatgggacgtccagatcctcatccttgtcacaatggacatatattattaagtggacaagtcaaaaagttgagttcatgaaataaacaatatacagttattctgtaataaaaggaccagtcctttcaaattattacagtgccacagacttctcacttgttcctacatctgcaactcctagaagctatggtatccaccaccaatcttagatacttggcttcaagttcaagtgagatgctatcttttgtccaagagaacgatcagcctgagaccagtatgatatccagatgctgcggatttcatgggtgacacgtgggtcagacaaagcatcaacccatcggcggacaaatctttcttgcctgtcagagggccaggatcggtatctctccccaggttgcttgaagttgttctccttctcaatcatgcacttt

SEQ ID NO: 213416 - DNA, 221 bp, Glycine max
ctctgatattgttcattatttgaagtacgtgaccatacacaaatctaaaaactctcaaaagtcattttgggactttgacgctcactttccggggactatagacggtggcataggcccaggcgtcgatgtgacagggtcagccaggtgatcgatgaggatcttacaatggaccctggccggtgacaatggcctgaacaaagaagccaaacatagcgaacatg

SEQ ID NO: 213417 - DNA, 550 bp, Glycine max
  unsure (1)..(550): unsure at all n locations
tccaatggtgaagatctagaaggttatgctggtgcaggtctttatgacagtgtgccaatggatgaagccgagaaggtggtgcttgattattcatcagacaaactgatccttgatggtagttttcgccagtcaatcttgtccagcattgcccgtgcaggaaatgaaattgaagagttgtatggcactcctcaggacattgaaggtgtcatcaaggatggcaaagtctatgttgtccagaccagaccacaaatgtaaacttgcatacccatgtcttctaagccacctacctcaactatgttcatccccgagcaacacgtcgtttcaaacgtggccgtggcagcttctgtgagttcaagagtaacccccggattaccaaacatggccttatagatttattacatgatatattgaaaattaaggaataagtgtataaaaacggaatattgtaaattaagaaaaatttagacggtcttatatattctttttccctactatatacaatatagngtatctagttacttcttcctaatcaaaattatatttttacttg

SEQ ID NO: 213418 - DNA, 502 bp, Glycine max
caagtaaaaatataattttgattaggaagaagtaactagatacactatattgtatatagtagggaaaaagaatatataagaccgtctaaatttttcttaatttacaatattccgtttttatacacttattccttaattttcaatatatcatgtaataaatctataaggccatgtttggtaatccgggggttactcttgaactcacagaagctgccacggccacgtttgaaacgacgtgttgctcggggatgaacatagttgaggtaggtggcttagaagacatgggtatgcaagtttacatttgtggtctggtctggacaacatagactttgccatccttgatgacaccttcaatgtcctgaggagtgccatacaactcttcaatttgatttcctgcacgggcaatgctggacaagattgactggcgaaaactaccatcaaggatcagtttgtctgatgaataatcaagcaccaccttctcggattcatccattggcacact

SEQ ID NO: 213419 - DNA, 507 bp, Glycine max
  unsure (1)..(507): unsure at all n locations
aaaacatggctctaacacttcgttcttcaacttcttttattaatcagaaggaaaccaaagtgctcaaaacttctgacaatgcccctgcaatagttagtttttcaaaattcaagccatcatcatcattgttccggctccgggcaaaaaattccatgcaagaagctcatcacactcgtgagaaatgggagaaggtgctggctccgtcggtcgcacatagccacaatgattcaaagagagtacctgtgtatgtgatgttgccattagacacagtaacaatgggaggaagcttgaacaagcccagagcgatgaatgcgagtttgatggccctgaagagtgcaggggttgaaggtgtaatggtggatgcttggtggggttttggtggagaaagaaaggcctttgaagtacaactgggaaccctatgctgaacttgtgcagatgctgcaaatgcatggcttgaagcttcaagatgttatgtctttccatcagngngggggaaatgttggagac

SEQ ID NO: 213420 - DNA, 450 bp, Glycine max
ctgtagcttccctttttctataaaaaaatatcttatgatgcttttaactatataccaagatgcctgaacttgcaaaaatatgcaattacacaagagcagcctcttgcgtgtgcttttcctgtgttgctttgatgtgcccaacataaagatcactcccatgggaatcagctgccggaagtctctctctgcgaccaccctcagacatgcttcttacgaaatccactaggtgccgccagttgtcagcttcaaacaacctcttgttcattcttagatatgtgaatgcagccaatccactgccggattctgacttacttgttgataaaacttgagcatatgcatctgcatcatatctctccaatgcattgtcccccgcaagctctgctctagctgatgttgttgccatcttcacctggtgaactaaccgttcaggtgagcagtttgcaaagtctg

SEQ ID NO: 213421 - DNA, 586 bp, Glycine max
  unsure (1)..(586): unsure at all n locations
gcgcaaagaacaacaaactaattaggtactgaccatttccgtctatatataaggccaataacccaacacgttctataaacatatagtgactaacctcccactgaagagtaattggtggattccagcaatggccgtggttcatggcagttgggtcaagcttgatcaaagaggagaagggcaaggagcgagaagctcacatgctatagccatagtagcacagaaggtgtatgcatttggtggcgaattcgtgccacgtgtccccgttgataacaaacttcacgtgttcgacctagagactttgacttggtccgtggctgatgcatcaggggatgccccaccgccacgtgtcggtgtcacaatggccgtagtgggagaaaccatatatgtctttggtggaagagatggtgaacacaaagagctcaatgagctctattcttttgacacaagggccaacaaatgggccttgattcaagtggcgatattgggcctnctcaccggagcttaccactcatgaccgcagatgacaacacgtgtatgntttcggtggtgtggggttcacgggaggctaatgactgtgggctttgat

SEQ ID NO: 213422 - DNA, 303 bp, Glycine max
  unsure (1)..(303): unsure at all n locations
agctggttgggagaaagcacttccgacatacacaccagaaagccctgctgatgctacaagaaatctgtctcagcaaaatctaaatgcccttgttaaggttcttcctggtctacttggtggtaattcnnaccttgacaattacctcccactgtaatcttcaccttttggtgattcctataactgtgctgccggatgcataactgtgaggctcggggttaaagatcatcatgtgaaatgaacagatgtcggggcttccccacgtggttcccccttaatacaatactgtgatggaaccaccccttt

SEQ ID NO: 213423 - DNA, 454 bp, Glycine max
gtccagaattgagtgctagagtgagcatcactaattcaactacaccacagagcaagccaaatagttgttacaaattcatacaacttcattaattcaactcatccttgaatgtaagtggttcctctgacaatcatatgcaagaacaatctaatcttccttattggggctaaagtgatatctcaaaaaacaagtcatgtaacagtaacccaaagccacaagtgaaaaccacaagttctagatgagataaaagaaactcaacaaatatatctacgaaagttctttggcagcagcaataacagcttccttggtgataccaaactccttgtatatttttccagctggagcacttgctccaaatcgatcaatgcctatggcctttcctttgcttccaacaatcttgtgccaaccaaatgttgatcctgcctcaatgctaactctagctggtactgaagca

SEQ ID NO: 213424 - DNA, 573 bp, Glycine max
  unsure (1)..(573): unsure at all n locations
agcaaagacaatgctatcttataactgatatttgaagcgggagcatcaatacaatacaatatgtaactatgaactatcaatatatgatcgttattatgtctgtgatacacacaattaaggccataatatacttatgtgatttacaacaacttctagcttattttatacatcatgccaacccaactaggagcaattttcatcatacaattacacttatctttaatcatcattcatcaatactggcatcagcaatacgctctaaactctgaagcatgacaaggtggtagtcaccagggaccatattgttatgcaatttatgccacaattggataagatgcacaagttgcaacaccacacatgttcttccccaattccatcttgaagtagccattttcaccccagctttctccccatgaattttttatgagccaatatgggacaccattttcaactccatatccaacagcaagaacggcatggttcacatcctgggaagtgctaccacaagtgtcactagtgaaaactncattctcgtagaaatggacccattcaccacctgaaagggcacactac

SEQ ID NO: 213425 - DNA, 473 bp, Glycine max
  unsure (1)..(473): unsure at all n locations
catcaaaattagtagagcattaggagcattgttgatttagtctgtatcacataagagactttacaaaataggtagcaatgcatagaaaggcatatataatttagtaccgtctaaaggtaagattcaagcgaccagggcgtagattagtatgttggagcaagaggttgggggcagtgtttggatgaatagaggcgacgccatggaatatatttctagaggggccaccaaagatcaaaacatcaccggactggagtagcaatttttgaggctggtcgagatccctgtggtcagcgtagaggaagtcagcagagtctccaatggagaaggatatgacgggcaagcctaggcgaagactatctggactttcatccttgtcctgatgaagacccagacggccggtttgggagtaaaagttgacaatgcagatgtcagggggaaagggnggaaggagggcattggaatccttgagtgca

SEQ ID NO: 213426 - DNA, 454 bp, Glycine max
cctgtggttggatgaaacttaagagcagtggattatcatcattatcacatatgatgaagcaatattcaagaggtgcaagaactgtctgaataggaataagagtttatgtacaacgggaaatgaaaatagttgtcatttgaacacactatgctgtggcagcagcttgttcttcaacagcctgtgatgctggcagaagggtgcaaatcaggatgcggtcaccgtacacattatcaacacgtcctgtggtaggccagaactttgaagcacggagccaaggagctgggaaggctgcatactccctggagtatggatttgtccatgcatcagccatgagcagtgatggtggacgatgggcgctcttaagtacatttgtgctaatgtcagcatttccgtaatgaatctcagcaatttcatgtctaatggaaataagagcatcacagaaccttgctagttc

SEQ ID NO: 213427 - DNA, 503 bp, Glycine max
aaaacagaagatatctacttcagaattttggaaaggtacttgaaactttaaaactcatcttaagttaaagaagattgacacaggtactatctttacacagattcagatcctgccaatcccattatccgtagtgacatgcccaggacatcaaacaagccgggccctagttgcatgtgaaagtaattattgagaagtaggctatgtagcagctgcaaccagtgcagatctagcacgtgtaaaagaagcaataaccgatccaagctgaagcttatcgatgcacccaaaacttaatctgtactgtatatctgccaaatcattggtcaactgtactcgcacagctgaaggcatcttagtctgaagaacaaacattgtcacttctctgacaatatcaatcagggccaaccgtttccttgtcttcatttcatctattcttttaaagctatctgcaaattgttcatttagaagccagtaagatgttagctcaatgcttttggcatggattc

SEQ ID NO: 213428 - DNA, 536 bp, Glycine max
gtctactactcgcggcctttttttttttttttttatttacaacaaacatgatatatatagtattacatatcacacaaccataataagcaagactggtttaagacaaacattacaaaccctcaccaatacaaataattgataatcacattactacaatccttaaacttgaaaatatgctctttgccggttcttgcgtgtgttgtcctattgctgccgaatatgagaagtatatgttccatcgatatgtatttctgtatttcttttaaccgtgatacatactgtgataccatcgatatgacactcaacttatatttgcatctcacaacttatctatcaatgaattatactatttatattcataaaaaatgaagaacgagaagaatatctgaagtgttggtgtggaagctgttctgccaccaataggtagaaaagccccattactccagtgtggccacggctgctgctgtagttagactctagagttatagtttcaccatcaattatctttacagaaacctgttgagggatacatgtgc

SEQ ID NO: 213429 - DNA, 568 bp, Glycine max
  unsure (1)..(568): unsure at all n locations
aaacttaaggcttaagccatggcatcctcatcctctctgcatctatctcaggcccttctggcacgtgctgtgtaccttcatggctcttcttcttctgaccgtgtctcactctccttcccatcattctctggcctcaagtcacattctacatgcaaagcagcagcagccacgtcctcgcgtagaaggggtgcttgtccatccaccaacgttgttcgagccgctgcggttgagacactcgaccaaaccaccgaggtttctctggtggagaaatccgtcaacaccattcggtttttggccattgatgcagttgagaaggccaactctggtcaccctggtctccccatggggtgtgctccaatgggtcacattctctacgatgagataatgaggtacaatcctaagaaccccgcttggttcaaccgtgaccgtttcgttctctctgctggacatggctgcatgctccaatatgctctccttcaccttgctggctatgacactgttcaggaacaagaccttaaggaattccgacaatggngaagcagaactcctggacatcctgagaactttg

SEQ ID NO: 213430 - DNA, 541 bp, Glycine max
gttacaaattcatacaacttcattaattcaactcatccttcaatgtaagtggttcctctgacaatcatatgcaagaacaatctaatcttccttattgtggctaaagtgatatctcaaaaaacaagtcatgtaacagtaacccaaagccacaagtgaaaaccacaagttctagatgagataaaagaaactcaacaaatatatctacgaaagttctttggcagcagcaataacagcttccttggtgataccaaactccttgtatatttttccagctggagcacttgctccaaatcgatcaatgcctatggcctttcctttgcttccaacaatcttgtgccaaccaaatgttgatcctgcctcaatgctaactctagctgttactgaagcaggtagaacactctccttgtattcatctgactgctcatcaaaaagttcccagctaacaaaagaaacaactctaacagcttttccttccttccttagatcctcagcagcagcagcagcaatttccaactcagaaccagttccaatcaaaataaca

SEQ ID NO: 213431 - DNA, 569 bp, Glycine max
caaaaatatgccactcccatgatgcccctagatgaagaaattctttctaaagttgcacaagatatggttgaggaatggtttgattgtgttgatgaggaggattcctttgaggaagtttctttaagtgcagcacttaatggtgttgagggtttggactatatggaaagaattcctcttgccacatctgagggttttcctcatgtgctttcacgcaaaaatggtgaaaaaggcaaaagaagatttgtttctggggatggtgaagagatgacattgattccgggaaccagtgttgaagaggcttacaacaagctaatagttgaacttgagaaaagtgttcctacattggttggcattgaatgtcccaaggatgagaaacttcctcgtcgcaaaatttttgacaaacctaagacgcgctgcttcactattctccctatggagtttaatcttgtggtccgtcaaaagtttttaaattttgtgaggttcattatgaagaaaagggacaagcttagttgtcaagttggaatcaacccatactccatggaaaggactggtttggcccatagattact

SEQ ID NO: 213432 - DNA, 508 bp, Glycine max
aaacacactcattgcacatagtaatgcgctttatttaagtgaataaaatattacatactagttcacaaatgcaaaaggacactcatcaaccagatatttgagactcttacagttctcaagaagtcgcgtcagcatagggttagtggcgttagaactcagaatttcattcttaacgccaaaaagaacagccagtaaagctactggaaaaggatcaactctagtaagaaaaacaattttcttacctctcccaagtgctgtgcgaatccttttgttgatatctgaggagcgattgttaactgcagaactaatccaagcagtggtgggtaaaccaccacgtccactaccacatgtaacatttacaacgacagcttctgaaggtaattgacttacaggataaagacaattcacaaaaattggtaaccaagaatccactggaaaatttccatcaaagaattcttgtgtgttagccaacacaagcttatcatcaaaaacaatcttgtttggaaaa

SEQ ID NO: 213433 - DNA, 576 bp, Glycine max
  unsure (1)..(576): unsure at all n locations
gctcctgcagctccccttgcaagaaaagattacctctttgctcaacaaactgctgagaacattgctgcgctcctcgctcctcagtctggtttctactatgatatttgggtggatggggaaaagattttgacatcagaaccacctgaagtagttcaggcacgaaatgacaattctcatggtacaaacttcccggattcccccgagcccatctatggaactcagttcttgccaaggaaattcaaaattgctgttactgtgccaactgataactccgtggacattctcacaaatgatattggtgttgttgttgttaccgatgacgatggggagcctcaagggttcaacatatatgttggtggtggaatgggaagaactcataggttggaaaccacttttcctcgcttggcagaaccaataggttacgtaccaaaggaggatattttgtatgcagtgaaagcaattgttgttacacaacgagaaaatgggagaagagatgaccgcaagtatagtagattgaaatatttgataagctcttgnngaattgaaaagttagaagtgtagttgagcaatattatg

SEQ ID NO: 213434 - DNA, 580 bp, Glycine max
  unsure (1)..(580): unsure at all n locations
ttttacttcccctatggctcgtcactccttgctcttagccctcctcctcttcgccgccgtggccaccggcgcgatggcggtggccgcgtccgacgccgacgacatcctgatccgtcaggtggtgccagatgttggcgaagccgaagaggaggacaacctgctgaacgccgagcaccacttcgcgagcttcaaggccaagttcgccaagacctacgccaccaaggaggagcacgatcatcgcttcggcgtcttcaagtccaacctccgcagagccaggctgcacgccaagctcgacccctccgccgtccacggcgtcaccaaattctccgatctaactccggccgagttccgccgccagttcctcggcctcaagccgctccgcttcccggcgcacgcccagaaggcgcccatcctccccaccaaggatctccccaaggatttcgattggcgagacaaaggagccgtcactaacgtcaaggaccaaggggcgtgtggttcgtgttggtctttcagtacgacgggagcngtggaaggagctcataattggccactggtgagctcgtgagcctttacgagcaac

SEQ ID NO: 213435 - DNA, 380 bp, Glycine max
ggggatccttttggggttggcactaccacatccataagaaccaacattgacaggggcacgtatattagtttaattatgcaataactgaaacataatcaggggcaagtattcccctgttgcagtttgaaacaaccccaccccgccaatctccatagagaggtgcttatcttgcaccatttttaggaccacacatttccttggatttcccacttgtttttgtcaagcattcataccgaaattacctactacataaacaacatgggcttagcagtttcctgatcctatacggagataattttaccacgtccaaatgagaaagtgcacaacataaatttttatacaaactccccttagtccagtatcacatcacaaccacaatc

SEQ ID NO: 213436 - DNA, 513 bp, Glycine max
aaacaatatagatacgatcttttatcctataattttatcaattatgcagataagaaagactcatatatttatggatatagatccctatttcaagtaaaaaaaaaccaagtgatttcttctaattacaacacgtataaaaaagaattattggatatcatagataatctctttatcaagaattatatatcggaagatgcgattctagatatggaaaaaaatatgtatagaaagtattttgattggatgggaatcaatagagaaatactaaatcgttccatatcgaatccagaattttggttcttttcaaaatttgtgatattttatgacgcatataggggtaactcgcaggttataccaatcaaattactttttttttcttctaatgtaaatcaaaatgttagtgaaaataaaaagaacattactagaaagaaaaaaaatgaatctcttgaattggagttagagactcgaaatcgggcaaaagcagaataccctgatcaacgaaatctttgatca

SEQ ID NO: 213437 - DNA, 522 bp, Glycine max
gatctcttgttcttgtaatatatttataaaaatttttcttattaacatgaattttttctgggtatttgtgataaatttttcgtttattcttttgaattaatgaaagacctatggtttgatacataaaaaattgtttattgttttttctagacaggcgaactggttcgataacaaatatttcttttttcataaatttgttatttttctttttccttaagcctagaagaattaaattcttctgattttgaatcatcataatatctagacctagttctcctctttgaatagaggctattgtaatttctcttaaattttttaatctaatcaggagacaatatactttgacattgttaaatattctttgacctaagaaattattccaatttaaatgtaaaatcaaaaaatttcttagtaagaaattaagttctgcctccatctcgggcttggctttctttttctttatacccttactattcttttcactgtctgatcctacataatcgttttccatatcttttcttg

SEQ ID NO: 213438 - DNA, 493 bp, Glycine max
ctaaaccttacactgaaagcatactcactttttctgtgcagaacgactggcgctactggacgaagactttgacttaccctgtggagatgtaatggacctcggggattacatggtccgagaggagcggaagatcacatcccgcgccctccagaagactctcctcatggtaaggaaaggattgcaaaccccgaactgcctggacgagactacatgattatacgcggggactttgctcgacggaactgatgattatattagcaccgacctgggattaggcctgtatctgtgcgctcggacaagggcgagatatttagggctggggcgatggtattaaaaccatgaagaaaggtgaaaatgctattttaaccatgtcctcccgagctattttatggtgaatgtggctgcaattcaactattactgctaatgctacacttcaaattgatgcttatctggtgtcatggactagtgtgaaggacatatgcaaggatgggg

SEQ ID NO: 213439 - DNA, 434 bp, Glycine max
accagcagcttcaagtttttctttagtgaacaaatcccaggactccttctctttctcaaatgaaactacctaaacttccaaataaacagttggggtaggaggaactaccaacccctcctgctgggactttgatgaaccaaaagcatattcaggcgcgatggtcatcagggcaacctcaccctttttcatagggaatacacctctattgagcccatcagcaacttgttcctcacctgggaagaatgcaaaccgtctgctcttctgtatgatggaccttttccaaaaaggcggcaccatcttgtagcttaccaagctcgttgaactttagcaatggccccttcatttggacgctcatatcctgccccttacttcaggatcttccttatgaccttgttgtcatgagttacttcagacacagttttacatgaaactaa

SEQ ID NO: 213440 - DNA, 470 bp, Glycine max
ataaattagtacaagaagctatgctgcttttccactaaagtagcaatgccaaatcctgttgttgaacgcttcttgtcatttcacataggaccaaccatgtcaatgtgcatccattgaaccttttcatcaacaaactgttttaagaagagagcagccacaatagcagcaccttgtcgaccaccagtgttcacatgtcagcaactcctgatttcattgtttcccagtaactttcccctaatggcaacctccatagtttctccccactcacatcagaagcttcaaaaacttcctttgctaggtcatcactgggtgtaaacacaccagcaattgagggtccaagggcaacaacgcaggccccagtcaaggttgccaagtcaataatcttttcaacaccttgattacaagcatataccagagcatctgccagggtaagtctaccttcagcatcagtgttgttaacctctatagtc

SEQ ID NO: 213441 - DNA, 552 bp, Glycine max
gtggatatgtccggattgaattattcccggcagctgagtctactcggccgccctttttttttttttttgattttgggttctgaacaaaacccagatatattacgcgccaaaaatgtcttctgattgtctaaacaaaactgtgtcactcggcttacacagaaacattggacagaagtttgtaacttaattttcaatgataacgtaagaaaaagaaaacctagaacaaactgaatgcatcatgaaatcaagctccaacaatttcagtgggttcctctgccactatttcatcagcaggtctgtctaccttggcaccaacatcctctgagtaatctccatgaacctccatcagtttcccaagatcaaacttaggggctttcaggatcttgactttacgaacaaacacattctgcagagggtaaatactagatgtcgccttctcaatctcttttccaataatctcaggaataaacttgcggaccaactccttcaaatcacaggatgttgcctggttggtcatgatctccctcatcttcctacgaatcctgctaatct

SEQ ID NO: 213442 - DNA, 550 bp, Glycine max
ttgatggtcttgcctctcgctcggctgcatactaccagcaaggtgcccgtttcgccaaatggcgtactgttgtgagcatccccaacggtccctctgctctggcagttaaggaagctgcctggggtctggctcgctatgcagcaattgctcaggacaatggattggtcccaattgtggaaccagagatcttgcttgatggggagcatggtattgacagaacttttgaagtagcaaaaaaggtctgggcagaggttttcttctaccttgctgagaacaatgtcctttttgagggtattcttcttaagcctagcatggttacacctggagctgagtccaaggacaaggccagtcctcagacagttgctgattacaccctcaagctccttcacaggagaattccccctgctgtccctggaattatgtttttgtctggcggacagtctgaggttgaagctaccctcaacttgaatgccatgaaccaatctccaaacccgtggcacgtgtcgttctcgtatgccagagccctccaaaacactgccttgaagacatg

SEQ ID NO: 213443 - DNA, 532 bp, Glycine max
  unsure (1)..(532): unsure at all n locations
gagattcaaccatgtttgttatatattgagacataatcaatcaagtacaccactcacagcagaaggtttataagctgtaaaggtacatgtaaccataaacaaaaatagtctccaagactataaaaacattacattttagacaaattagtcttcttccacttcatcctccgtcaacacctactataactgctggtgttgctgctgcctaacatgtatcatattcactacatacatcttagtaggagtagcctttgacgaacaactccttcttggcttcctcggattcaccctcaccggtgtacttcccaagctgggcgagcgagttggacttggcacggaaaaggagtgcatcttgtgccgccttcacgttctctgggcggcctccccatgtcttcaaggcagtgttntggagggctctggcatacgagaacgacacgtgccacgggtttggagattggttcatggcattcaagttgagggtagcttcaacctcagactgtccaccagacaaaaacataattccagggacagc

SEQ ID NO: 213444 - DNA, 558 bp, Glycine max
gcaaattctcctcctacaccaacaaaaatggcaccttctccacaagaaatcatcttccgatccccactccccgatattcccatccccacacatctcccattgtactcttactgcttccaaaacttgtcaaagttccatgaccgtccatgcctcatcgacggcgacaccggcgagaccctcacctacgccgacgtcgacctcgctgctcgccgcatcgcctccggcctccacaaaatcggcatccgccagggtgacgtcatcatgctcgtcctacgcaactgcccgcagttcgccctcgccttcctcggcgccacccaccgtggcgccgtcgtcaccacagccaaccccttctacacgccggcggagcttgcgaagcaagcgacggccacgaaaaccaggctcgtcataacgcaatccgcgtacgttgagaaaatcaagagtttcgcggacagcagcagcgatgtcatggtgatgtgcattgatgatgatttttcttatgaaaacgacggcgttttgcatttctcaacgctcagtaacgccgacgaaacggaagcccct

SEQ ID NO: 213445 - DNA, 581 bp, Glycine max
ctctcttcgttctatcaccgaaacccttcttccattaccggcgaacgaagtcggtggcagaaaaggaacaacctccattcccaaatcgtaaaatccgatgacgaccgctgcaagacccacatgggcacctgctaaaggtggcaatgaacaaggcggtactcgaattttcggtccctcacaaaagtactcttctagggacatcgcatcgcacaccactctcaagcccaggaaggaagggcaggacactcaggatgaattaaagagaagaaacctacgtgatgaactggaagatcgtgaacgaaggcatttctcatcaaaaaataaatcttatgatgacagggatcacggaaagggtagccatctgtttttggaaggttccaagagagacattgaagatcgcattgttgctcgtagtgttgatgcagatgattctgacgttgaagtcaaaagtgatgatgacagtgatgaagatgatgatgatgaggatgacactgaagcattgctggctgagcttgaacaaataaagaaagaaagggcagaggataagctacgcaaggaacgacaacacaggaggaggagct

SEQ ID NO: 213446 - DNA, 592 bp, Glycine max
  unsure (1)..(592): unsure at all n locations
caagcttgccttcaacttccataaagaagtgtgacattttcactggggaatgggtgccgaacccaaaggctccatattacacaaacaaaacatgctgggctattcatgagcaccaaaactgcatgaagtatggaagaccagactctgagctcatgaagtggaagtggaagccaaacggatgtgacctacctgtgttcaaccccttccaattcctagagattatgaggggaaaatccatggcatttgttggtgactcagttggcagaaatcagatgcagtccatgatttgccttttatcaagggtggaatggcccatagatgtatcatataaaagagatgactattttatgcggtggaggtacccaagttacaacttcaccatggctgctttttggacaactcatttagtgagatccaaagaagcagatgcaaagggtccaggcccaacaggcctttgcaacctttaccttgatgagccagatgagaaatggataacccaagttgaagattttgactatgtcattcttaatggaggacatnggtttacccggtcaatggtgttctatgagaagcaaaaattgttggatgccat

SEQ ID NO: 213447 - DNA, 473 bp, Glycine max
gaatcaaatttgatcttttttataaaagatttacaatacatgtgcgcaaggaagtttacaattacatgcaagattccataaaaaaaaattgataaatgtatgcaatcaatttcatttgtcaatttgaatgcaaatgaagcctctcttcagctgagctcacaccctccatcttcaacattcctagtagaaaatcactccatgtgtgtataggccccggcaagcaccaatgcacacaatcattgtacaatgtcacattttcattaagccagtgcccatatctacttgggtgaccatctggtctcagcaatgatgcttgtgtgatatcaaatagcctatatttcaaacccttctttttggcttccttctccgcaattttgaactcctctaattgaatcatataaaactccaaattgaggccctctaattgtgtctcatcgctcttaaatggcttagttctaatgcaattcccaccc

SEQ ID NO: 213448 - DNA, 632 bp, Glycine max
  unsure (1)..(632): unsure at all n locations
ggagtgtgtgcgagttgtttatttcaaagaatagattggatccaaccaaactgcactttttagttataactaagaaaatgtgcataatcccgcgaattacttctgaaaattacttctgaattaatgaaattttttcaataatttaagaaaaaatatttaagaactatagcatttcgcgatttattggtaatccactttgattctctattaaccaataattttggactattaccatggttaaagtgaatagtttgaagtctagacgcagtgtagtactctttctaccactatgttaatacagaaatgaaatggtttcgataaaattattagatttttttttcgatatagaacactcatgtcgataaaatggcttgaatcctatttacttacggcaagaaattgaaaaacgggttaatttaaccctcccttttgtacaatgcgtaatcgatgacctatgtataaatgaataagaattctttggatttgagaaaaaaaacaactttgctgacatatattttgttggtcagaagagtcctncgaatattctggtcttatattgggattgttttcaatattttaaaaataanaatagcgaagagaggataggctcattacataaaaaaatggtaaat

SEQ ID NO: 213449 - DNA, 428 bp, Glycine max
tttttttttttttttttttttttttttttttttttttttttttttttttttttttttttttttttttttttttttttttttttttttttttttaatttccaaccaaacccatttttttaaaaatacaaaattaccccccaaggaaaaaaaaagattttaaaagccccctttttacaaaatggggaggggaaattaaaacggcttaaaaggggcaaccaactttttcccccccggcccgggaaaaaaaaaagccccccccgggctggaaaaggcccctcaaaaagggcctcggcccccccaaggaaggcctgggaaaaaaaaaaaaattctttgaaaggggggttattccggttaaaaaaccccccccccccaccaaaaagcccccccccccgcccaattctaaaagaacaaaaaacccccaccgcccc

SEQ ID NO: 213450 - DNA, 524 bp, Glycine max
  unsure (1)..(524): unsure at all n locations
gcgagaaatggcgatggcaatggcgcttcgcaggctttcatcttcaattgacaagcctctgcgccctctgttcaatgccggttccctctactacaagtcgtctttgcctgatgaagctgtttacgacaaggagcgacccggagttacatggccgaagcagttgaatgctccacttgaggtcgtggatcctgagattgctgatattattgagcttgagaaagctaggcaatggaaggggctagaattgataccgtcagagaatttcacctctgtgtctgtgatgcaagcggttggatcggttatgaccaacaaatacagtgaggggtaccctggtgcaagatattatggtggaaatgagtatattgacatggctgaaacactgtgccaaaagcgtgccctagaagcttttagattggatcccgctaaatggggagtgaacgtgcagcctctgtcagggtctcctgcaaatntccacgtttacactgcattgcttaaacctcatgaaagaatcatggcacttgatc

SEQ ID NO: 213451 - DNA, 469 bp, Glycine max
aataaaatcatgacggcactaatcttcaaaatcatgcagtgtaacaataaatgcattacaagaccatagataacaaattctatggtaactcatccaacaacgctaatcaatttagtttaacacactaaatggctggaagaaaccaaaagagaaaataacgaagtcaccatgccttcttcccctcagtttccccctttgcttgttggtgacagcatggcatcatgcattacaactacagaaaagcatctttctcaagtagctttaggacttcattttgattgtttagcttcgcaacatcgattggagttttaccatccatattctggagagtaactgcagcaccattttcaaggagaagggccacacattcctttctgccataaccagctgcataatggagagcagtgttcttattcttatccaaagcatccacttttgctccagcctcgaggagaacttgagcacattt

SEQ ID NO: 213452 - DNA, 478 bp, Glycine max
aaatactaacaaatacaaacggcatttattgagataggtcaacgagttgcattcatggagttatgggtacacacaacataatattgcaagaaaaggattagttctttcaggtaatccaaaatcacatccttatcgtactctttgcacgtctgcaactctaacaatcattctggagttggcaacaacattaaatatttggcctcgtgctgagatgagaagctatcttttggcctagagaacggtcagcctgagaccagtatgatatccagacactgcggatctcatgggtgacccgtgggtcagataaagcatcaacccatcggcgagcaaatctatcttgcctgtcaggtgcccaagaccggtatctctctccgggctgcttgaagttgttctccttctcaattccacacttttcacgccttccactgcagatagcaggaggtatggggaacctttctgcatgacgaacaggatcata

SEQ ID NO: 213453 - DNA, 525 bp, Glycine max
aacaaagaaaaaaaaaaacccttagccaacacaaccatcatggccacctctgctattcagcaatcagcattcactggtcaaactgctctgaagcagctcaatgagttcgtccgcaagaccggtggcgccggcaaaggtcgcactaacatgcgccgcaccgtcaagagtgctcctcagagcatttggtatggccctgaccgtcccaagtacttgggtccattctcggagcagattccatcatacctgaccggagaattccctggtgactacggatgggacactgctggattatcagctgacccggaaaccttcgccaggaaccgggagctggaggtgattcacagcagatgggcaatgcttggtgcccttggctgcaccttcccagagatccttgagaagaatggtgtcaaattcggcgaggccgtgtggttcaaggccggtgcacagatcttctcagagggaggccttgactacttgggcaacccaaacctgatccatgctcagagcatccttgctatctgggct

SEQ ID NO: 213454 - DNA, 500 bp, Glycine max
ggggacccaaatttctaatatataaaaatataatggttctcatacagatttttctgctacacaggtgtagttacattagtgaaaatggagttaaacacaagggaactgcaaaagggagcagaagattgcattgcatgtaggcatcctcattgtccagggacaaagttagtggcataagcccaagcattgttggcaacaggatcagcaacgtggtcgtaaaggttctgaatagggcccttgccagtgacaatagcctgaacaaagaaaccaaacatggagaacataggcaagcgaccgttcttgagttccttgaccttcaactcagcgaatgcatcagggtcatcagccagaccaagagggtcaaaagcaccaccagggtagattgggtcaagtccttcaccaagtggtcctgcaccaactctgtaaccttcaacaaaccccatgagcacaacctgaacagcccagatagcaaggatgctctgagcatggatcaggtttgg

SEQ ID NO: 213455 - DNA, 396 bp, Glycine max
tttgtttttttttttttttttttttttttttttttttttttttttttttttttttttttttttttttttttgtttttttttgggaacgggccactagaaccccctttttttgcacatttttgtttggttcaaaaaaaaaaaaaagttaaaggggggggaaaacccccttgagggtaaaaaacttttccccaaaaaaaccctgttcttttatgggaacaaaggggggggtgccagaaccccccctttgatgaaatgtcggcataaaaatatgatcctttaacccctggtgggaaaaaatggttatgtttatttgcacactcccctcaaatttaaccccttgaccggccccccttggggggaaaaaaaaaaaaccctaaaaccttttaaagccccctt

SEQ ID NO: 213456 - DNA, 528 bp, Glycine max
  unsure (1)..(528): unsure at all n locations
ctgaagttacccaaaacttgcctttcaagtgtgttcagtttcttatattggtgtatttaattttggagtgacaagatcttggcttgggaacagtaaaagaaagcagaaagagcgagtttgcatttaagtctctacaggtgaaatctgagatttgcttcatgttttctcaaatctgtcaagaaatatcaatttcattgaacacacacgcattgctggttggaaactgaaccaaagagcaagacccatcattattgaccctgctctttacttatcaaagaaatctgatttagcattgactactcaacgaagaacacttccgacgtcttttaaactgtttactggctcagcttgggttgtactgactcggtcctttgtggagtattgtatatgnngatggggataactttccacggactatgctaatgtattacacaaaatttatctcctcgccagagggatattttcacactgtcgtttgtaacactgaggaatttcgtcacacggcggtaaaccatgatcttcactaca

SEQ ID NO: 213457 - DNA, 439 bp, Glycine max
aaccaaccaaaagtccactgtgaaatttaattgcctttttttgtaactcaacaaaaagtgttgcaattgcataaatggttgcccggcagtgcaaccaaaagcgtgcctagaccgaaacaagcaccaaaactgctggtgtgagtgcttgttgattgttaatatgagaacctatattgaacacaaaattcagaccttttacatcagatatatatgatctataaccacacttatgtacacttgacatcattcatcctacttggagggtacccctttgtcacaaacactgcttgcttagagattctttagataacagcacctgaagcagctcacgtagcctctcagcaccaggtcctgacctaaacattgtatcattgccacgaacagaacaagggtctgccccaccatctgtgttcccatcacaccatgcaccaggtgaaaa

SEQ ID NO: 213458 - DNA, 597 bp, Glycine max
  unsure (1)..(597): unsure at all n locations
tagagttttctcttttccactgaaaatcaaattagggtttggatttcggaattgccacagaatcatggccactctgaaagagcttcttcctcctgcaaaatcctcctccaccgcctactacgaccacaccaacgatccatggttcaagcagcgtttctcctcagaagaggaggagaaatccgccgccgccgccgccgccaagcagaagcccgttcccccctacctgaagcgcgccggcttcgttcctcggaaaatcgaggacttcggagacggcggcgccttccctgagatccacgttgcacagtatcctctcgacatgggaagagaaaagtccggcgccaaacctggatccaaaatcctccctgtcaccgtcgacgctaacggcaacgttgcctacgatgccatcgtgaggcaaaacgagaacgcaagaaaaattgtctacacgcagcagaaggatcttatccctaagtttctcaagaacgacgaagatgancgacgacgtcgtttccgacgacgaagcacagaaacagatcgaggaaacgatgcaggagaccaaggccgctttggagaaaatcgtgaacgttagggtaagcgctg

SEQ ID NO: 213459 - DNA, 570 bp, Glycine max
aatttttcttctctaactttcgcatattcgaaaaccaaaagcatgggtcagggaacaccgggcggtctgaaccggcagggtcttccgggggaccggaagccggacggcggcgacaagaaggagaagaagttcgagccggcggcgccgccggcccgcgtgggccgtaagcagcgtaagcagaagggcccggaggcggcggcgcggctgccgacggtgacgccgctgtcgaagtgcaagctaaggctgctgaagctggagcgcataaaggactacctcttgatggaggaggagttcgtggcgaaccaggagaggctgaagccgcaggaggagaaggccgaggaagacagatccaaggtcgatgatctccgaggttctcctatgagcgttggtaacctagaggaactcattgacgagagtcatgccatagtttcgtcctcggtggggcccgagtactatgttggtatcttgtctttcgtcgataaggatcagctcgagcctggatgcgctattttgatgcataacaaggttctctctgtttgtgggcttcttcaagatgaagttgatccaatg

SEQ ID NO: 213460 - DNA, 451 bp, Glycine max
ggcaggaaaattttcccgatttttttaaatcaaagaaagctatgtaactatagttgagattaaatcccgtgataatgtagacccataaacgaccacaaatcaaaatacaaacatccgttcacagaacaacaaaaagactgtaataaagaaagaaggccggggtaaatgatgaagatgcttcacatatacagtccttctggcaccccttctttcttcttaaacataaccttatcctttgccttcttgaagtcggcatgcgtcaccttcatccggcgttctcgtaaagcaagtaagccagcttcagtacatattgcttttatatcagctccagagaactcatccttagtcataacaaattcttctaagttgacatcatcagctaatgtcatccttgaagtatctctggaaaatgcgtcttcttgttttgatatcagggagaggaaattcaatc

SEQ ID NO: 213461 - DNA, 528 bp, Glycine max
  unsure (1)..(528): unsure at all n locations
ggacagatggaagggtcttgcctatgatatctcagacgaccaacaagacatcacaagaggaaagggtttggttgactcccttttccaagctccacaggatgctggaactcactatgcagtcatgagctcctacgagtacctcagcactggacttcgccagtacttggacaacaaaatggatggattctacattgctccagcttttatggacaagcttgttgttcacatctccaagaacttcatgaccctgcccaacatcaaggttcctctcattcttggtatctggggaggcaagggacaaggaaaatctttccaatgtgagcttgtctttgccaagatgggaatcaaccccatcatgatgagtgctggagagttggaaagtggaaatgcaggagagccagcaaaactgatcaggcagagataccgtgaagctgcagacatgatcaagaaagggaaagatgtgcgctctcttcataacgatcttgatgcangagctggtcgttttggtggaccacacatacactgtga

SEQ ID NO: 213462 - DNA, 508 bp, Glycine max
aaaggaaaaggcaccaaattcaatttaagtggacactgtaactcaaaattatagaggaagacggtccaatatgaaaaatatagtaagatcatctcaaacttagcatcttctctttgcacctaagacattgagaatgctaagaatgttacacgcaagttccatcacaacttctagcacttggattagtacaacaaccttcacgaacagaaatatttacttgccaagtttgctttgcctccaattcaagactggaagaaagttcccctctgaatagcatcctcgttagcatttccaagagcagcctcgttcaagtacttgtcagccaattggactctcttgacattctcttgttcttggacaagcatgttaccatacagcaagagcttctccagagtcatcttgggctgctcaaaggttggaggtccatcttttgagttcacaagcttcttcccaacactgtcaacaccaacaccagaaatccacttcctcacttcatcatcatatactc

SEQ ID NO: 213463 - DNA, 531 bp, Glycine max
  unsure (1)..(531): unsure at all n locations
aaccaataaatttgagacatctacttctatagtgaaaatacggactacaaatcagtttcaaatgacaaccatcaaatttggaacatacatttaaactttcaacagacactcatctaggaagaagcctgtcagatattgaaactgtgtacatgtagtctcaatgcatgtaagtgtattactttcccaaactgttaatgccaatgacatcttgcagctgtataactcccaagtcccaaataccgaaatcctctctcgggtatagacgaaaagctaaatcctcagaactgcttgggcttggaatctgctaatgagactggtatagctctgccattcaagtccacgccatttaaggactgaattgcactgttgacctcatcagggctactgaaagtcacaaatccaaagcctcttgatcgtccactttccctgtcatagattaccctagcttccaagacattcccttgttcacgaaacaatggactaagtgctacattgtcaacaccccaagcatgattacttacatgnaacacg

SEQ ID NO: 213464 - DNA, 435 bp, Glycine max
tgtcctttttttttttttttttttttttttttttttttttttttttttttttttttttttttttttttttttttttttttttttttttttttttacaccaaaaaaacgccggggtaaattccccacggatacggggggcaaaaaccccaaggggggaagccaaaacggaaaaaaacccggggggagcccaaaaaaaaacccctgggggaaaaaacaccgcggggagggggggccaaaacaaaagaaggggtaaaagggcccgggggaaaaaagggggcccaaaccccctgcgggggggtcactggggaaaaaaaaagggggggggttgcccacccccaacctggggagttccccccccactaaaagggaccccagggcccctttaggcaccttccgggggccccccccagagaaaaaaaacttgggggccccccc

SEQ ID NO: 213465 - DNA, 497 bp, Glycine max
tttttttttttttttttttttttttttttttttttttttttttttttttttttttttttttttttttttttttttttggggacccaaacccaaatggaaaaaaaaaagcccgcgagaggaaaacccggttccaaggccataacccaagaagctcaaaccccctacctgaggggaaccctaaacgcaagcaaaacgaaataaatttaaaaacccaggtttgccccaacctttttttcccccaaagggggtttttaatttgtacccatttgaagggggcaaacccccccaatttcggctttttccctaaaaaaaaaaaccacagggtcccaaaaaaaaccctatgggcccactggcccgtaattggggccaaaaaagggcccccaataaagcccaaaaaaaggggtaaaagctccccaatcaggcccaaaattttttgggccaaaaaccccccaaaaggcaacccccctttggttaaccaccgggacttaagggttttg

SEQ ID NO: 213466 - DNA, 512 bp, Glycine max
ctttccttcattttctctcttcctctcaccgagtcacgcactcggcttgactcgtacgaactccgatccccccccgagtcacactcaaccagcaccaccgcccgatccgacgatgtctcgcgcctcctccgccgcagattccgccgcctccggtgagatcatactgttcggagtcagagtcgtcgtcgattccatgaggaagagcgtcagcatgagcaacctctcacagtacgagcatcctcaagacggcagcaacaacaaagacgctctcgccgccggttacgcctccgccgacgacgccgctcctcagaactccggccgcctccgggagcgcgagcgaaagcgaggagttccgtggacggaggaagagcacaagctgtttttggttggattgcagaaggtagggaaaggtgattggagaggaatctccaaaaactacgtcaaaacgcgaacgccaacgcaggttgcgagccatgctcagaagtactttcttcgacgaagcaacctcaatc

SEQ ID NO: 213467 - DNA, 419 bp, Glycine max
  unsure (1)..(419): unsure at all n locations
ctcccaacccccacccgtagtttctaccaccttcagtcacggcgtaatacactaaccaacccagcatgtcgctgcctgcttgtcccgccgaacaactggcccaacttctcggcccaaacaccacagacgcctncggcgncgnctnccttatctgcggccagttcgccgccgtggacagcaagttcgtctacacggccttcgccgtcgacaacacctacctcctcttttccgcctacctcgttttttctatgcagctcggcttcgccatgctctgcgccggctccgtccgcgccaagaacaccatgaacatcatgctcaccaacgtcctggacgctgccgccggcggnctcttctactacctcttcggcttcgccttcgctttcggctccccctccaacggcttcatcggtaaacatttc

SEQ ID NO: 213468 - DNA, 559 bp, Glycine max
aacatgcccatcctcgacaagatcaaagaggcattctcctcttcatcctccaaggaggacccgctccgccgactcggccaagagcacctccggaggcctaggcaacgagggtctgcctaatcttaccgccaaagacgacaagacggccgttacgcccagccacactgccgctacagaggacaagctgccagagctgcctgaaaaggctgtctttgaccacgacaaggtcactgtcatcttcgtgctgggtggaccgggagctggcaagggcacacaatgtgagaggatggtcaaagattatggattcgtccatctttctgctggagacctgctacgagccgagcagcaacgaccgggatctacatacggagagatgatccagacgtatatcaaagagggacaaatcgtccccatggaggtgactgtcaagctcctcgagaacgctatgcgagatgccctcaaccagccaccctctttcgaaccctcatctcctctcagcagtggatggcagaatggtcgaggtcgattcctcatcgacggtttcccacggaagatggat

SEQ ID NO: 213469 - DNA, 524 bp, Glycine max
ctatgcatgtatgtctgcaatacatgtggaagcggtatgataagagcatgacacgcgcatccgcaaatctctccccctacaggtcatggaatccgctctagcagaccatgaccgacgctcgtctatgtcccgctgccttagaacgaccgcatctagacaacagggccgagctgaggaatcgctccatccgaagtcgcaggcaacgtggcattctcgagaggcttgacgctctcagtctgatgctttggcaaccgctcttccagcgccagagtgaccttggcgtatacctcgtcgacggaaggagacgagtcgacttcgacgactttgccttctttgcggtacatgtcgacgacgggcatggaagtctcgacgaatgttcggaaacgcttaacgatggactccttgttgtcgtccgcccttccggaagtcttgccccgctcgagcaatcgaccgagcatgacttcttctgtggtcgagaagaagagaacgaaggacgacttgcagaccgactcgtcaaacttgag

SEQ ID NO: 213470 - DNA, 557 bp, Glycine max
  unsure (1)..(557): unsure at all n locations
cactcataacacaaagcacaaagcaaagctcatccttgagttaaaaaatggcagcagcttcttccatggctctctcatccccatccttggctggcaaggccgtgaagctgggcccatcagccccagaagtgggaagggtgagcatgaggaagaccgtcaccaagcaggtctcctcaggaagcccatggtacggcccagaccgagtcaagtacttgggcccattctctggcgagcccccgtcctacctaaccggtgagttcccaggcgactacggctgggacactgctgggctttccgcagacccagaaaccttcgccaagaaccgtgaactcgaagtgatccactccaggtgggccatgctcggagccttgggctgcgtcttcccggagttgctgtcccgcacggggtgaagttcggagaagccgtgtggttcaaggccgggtcccagatcttcagcgagggtgggctcgactacttgggcaacccaagcctgatccacgcccaaagcatcctcggcatctgggccacacangttatcctaatgggtgcccgtggag

SEQ ID NO: 213471 - DNA, 502 bp, Glycine max
  unsure (1)..(502): unsure at all n locations
gtaaaaagcaagtaacattaagttggattcggatacacaagataattcacattatctgaagtacttcaccaaacacaaatctaaaaactctcaaaagtcatttcgttctttgacgctcactttccggggacgaagttggtggcataggcccaggcgttgttgttgacagggtcagcaaggtgatcggcgaggttctccaatggaccctttccggtgacaatggcctgaacaaagaagccaaacatagagaacatggccaatcgtccgttcttgagttccttcaccttaagctcagcaaaagcctctgggtcatcagcaaggcccaatgggtcgaagctgccacctgggtagattgggtcagtgacctcaccgagggggccaccagcaatacggtaaccttcaacggcacccattaggataacttgtgtggcccanatggcgaggatgctctgggcgtggatcaagcttgggttgcccaagtagtcgagcccaccctcgctga

SEQ ID NO: 213472 - DNA, 547 bp, Glycine max
ctattagccacaaaacacacacacacatattctcacacaaactgcaaccatggctactaccttatgttacaattctcttaacccttcaacaaccgttttctcaagaacccatttctcagttcccttgaataaagagcttccactggatgcttcaccttttgttgttggctataactgtggtgtaggatgcagaacaaggaagcaaaggaagaaagtgatgcatgtgaagtgtgcagtggtggaggctccaccaggtgtttcaccctcagcaaaagatgggaatggaaccaccccttcgaagaagcagcttcgtatacttgtggctggtggagggattgagggtttggtttttgctttggctgcaaagagaaaggggtttgaggtgatggtgtttgagaaggacttgagtgctataagaggggagggacagtataggggtccaattcagattcagagcaatgctttggctgctttggaagctattgattcagaggttgctgatgaagttatgagagatgcttgcatcactggtgatagaatcaatgga

SEQ ID NO: 213473 - DNA, 471 bp, Glycine max
cacgggcaagtttatgggtggcatgttataaatctaactttaacaaattacaaatgtcatacacaaaaagttttggaggggagtaacaaatttatacccaagagtccctcttaaatgtccatataggcatgtaacatatcagatcttaaatgactagactggggtataataccccaccctaaaacaatgcagatggtcctatacaatagcaaattggggctgtataatttttccataacttacaaattgcaattgagcaaaatcagtcatactccctgcaaagctagggggctttcattttctgagacttttggaacagagcttgtcaccttaacacggaacgaaaccttctcagaaccaaactgaataacatcagatggacggatgcgagcaggataattaggaggtacccggtcctgctttccttcgttgacaatgatccaggtgccatgctcactccgtaaatcaatc

SEQ ID NO: 213474 - DNA, 613 bp, Glycine max
  unsure (1)..(613): unsure at all n locations
ggtgaatggtggcatgcggggtttcacttaacgaccgcaattgttggacccacgatactaaccctgccatacgcgttcaggggattggggtggggacttggatttatgtgcttgacggtgatggggatcgtcaccttctactcttacttcctcatgtccaaagtgctcgatcactgcgaaaaatccggtcgccggcatattcgtttccgggaactagccgctgacgtcttaggtgcgtcattactatgcataatgctaccatggttacgttacttggtttgtgtcaccgcacaaacaagaaaactttaactttcttgtttctccttttcctcgctttcagactgcgtgttaggttcatcattaactgtcttcttgacttgtttaatcaattcttttttattacttttccttaaagactcttagatttaaataattagaggcttgtgacaaattcggattgcaaaatcattntaaaggtgcaaaggtaggaattgtgaaatatgatattttaatttatcattttatgtataaaaaggtgaattacacctcttatgtgcaaatttntttcgtttagaaaattttcttttataagatttatcttctttctttattt

SEQ ID NO: 213475 - DNA, 516 bp, Glycine max
  unsure (1)..(516): unsure at all n locations
cagattatactttatgaaattattatacgaagcattcacatttttactgcacctgaatactcaaccaaaaaccacactgcaaatacaatgcctcaaacaaaatatttaatgaaaacataaaacatcaatctacacaatctcaactattttagtgaaacaaaaaaatccaactgtggcattattttagcccagcgaagaagacacagttactatccgcatgtcacaatggagctgtaaccgcgagcctgcagtatacagccatgagcataagagttttgcatggttccgtgtggttaggccgagctaatcttcattggtcatcaggaaagggatgcataacttgacccagcaaacagcaacaacacacaaatgcatcaaggtgaacctactccagggaagagttctgatattttattgaagacatccataacctccttatcattttggtatntagtaatattcattggattctgcgaacaatccatgatagctgcttgaactctaggattttgaaat

SEQ ID NO: 213476 - DNA, 505 bp, Glycine max
ctaaacttacgatagggatgaaaatatgtaatttagatctttaaaaaaaaatccatatgttcggaatagacctaaaatggaatagatgtatctagggattagtcgtttcaaaaagaattctccctagatacacaatacacatggcattctatttttttttatttcaaaatggaatcaattttataagtttaaaaaagacctaaagttagggatttctcaataggtaatgttgctccaatacctaaccaaagggcaactacagtaccaatcaaaaagatggtggttgctactggacggcgaaatgggttttggaatttattaacattctccaaaaagggtactgttaataatcctgtaggtaccgaaaccattaaaagaacgcccaataacttattgggcactgtacgaagtatttgaaatacgggaaagaaataccattcgggtaatatttccaaaggagttgcaaatggatccgcgggttccccaatcatggatggttctagaa

SEQ ID NO: 213477 - DNA, 475 bp, Glycine max
aggtccgaaagatcactatcattatcgctgaacaatgttatttaacaaaagtatcaaccacaaataaaaacaacaacccaacttcccaatcatcgtcacgtccagcaaaatacattcaaaagctatctaaaatctggggaacccacattggcattaaaaaccatgaccatacaattttttagagaaatattatgggcaccatgcctcttcaacaatcccctaaacgttgcttaggcatcagcaaacccaagctcggaaagcttttggtgagcctcagcgtaatcagcaaagaaggcatcttcgtccgctgcatatttatcaacgagagggcggaatacagggtcagacaaaagagccttgtcagaaggcagctgaaggagaccttccttctgaccactcaacaactccgcgaagtatgagttgtcgaaaataagaggattagaggtccagggacccataaatccagaacgctcct

SEQ ID NO: 213478 - DNA, 404 bp, Glycine max
aaaataacacacacttgacacatcattaccacatttacaagaggtgtggaaattttcaaatagacggagcttatctaacaagagggacatgtctaatttcctttatcgaattccacacacgagccaactagagaaaacccccattcccgatcatgccaaggattccgcattttcagaaaatctggcagtaacctgtggcacagaaaaagctggcgtaacagcattcccagcaatttcaaaatcttgagaaattcccaggggaatatcaaaaactgtagactggttgggattgtcaataaggaaactcaagtgccataaagtttgatttgcccacatccaactccacatttcaaaaccgttattaggaccacatacctttattgggaagatcaattcccaggaat

SEQ ID NO: 213479 - DNA, 563 bp, Glycine max
  unsure (1)..(563): unsure at all n locations
gcgttcttgttgtacggaccgccggggacggggaaatcgtatttggccaaggccgttgccacagaagctgattctacgtttttcagtgtttcttcatcagacctggtttcaaagtggatgggagaaagtgaaaagctggtctcaaatcttttccaaatggctcgcgaaagtgcaccttctataatattcgttgatgaaatagattctctatgtggtcaacgtggagaagggaatgagagtgaagcttcaaggcgtattaaaactgagcttctggtgcagatgcagggtgtgggacacaatgatcagaaagttcttgttcttgcagctacaaatacaccttatgctctagaccaggcaataaggcggcgtttcgataagcgtatatacatacccctacctgatttaaaggctcgccaacacatgttcaaggtgcacctaggagatactccccataacttggctgaaagtgattttgaacatttggctcgcaagacagaggggttttcaggttcagatatatctgtctgtgtgaaggatgttttattngaacctgttcgcaaaac

SEQ ID NO: 213480 - DNA, 614 bp, Glycine max
  unsure (1)..(614): unsure at all n locations
acacattctggtcaccggtggtgccggtttcattggcacccacaccgtcgttcagcttctcaaagctggcttcagcgtttcaataatcgacaatttcgataactccgtcatggaagcagtggaccgcgtccgccaagtggttggccctctgctttctcagaacctccaattcacccagggcgatctccggaatagggatgacttggagaaactcttctccaaaacaacatttgatgccgtgatccactttgctggcttgaaagcggttgctgaaagcgttgcgaagccccgtcgctattttgattttaatttggttggcaccatcaacctctacgaatttatggcaaagtataattgcaaaaagatggttttctcatcatctgcaaccgtttatggccaacctgaaaagataccgtgtgaggaggatttcaagttacaagctatgaatccctatggacggaccaagctttntctggaagaaattgcccgagatattcagaaagctgaaccagaatgggagatcatattactgagatacttcaatccagttggggctcatgaaagtggcaaactcggtgaagatcccaagggcattccaaataacctcatgcctt

SEQ ID NO: 213481 - DNA, 546 bp, Glycine max
aatatcaaatcaatggccagtctaatttaaagatattgtttaaatacatagctttaacttcttgaaatgctgccaaatttttattgtcaagattatacaacgaactgcctaaacaaatcatccaacatgaaagtattctatataagagatgcctatttatgtgaaaagcattcgtagatgagcagtatatttctcaagctaattcaaggcttccccgcgtaaccccagggattgttctttgcccaattccattggtccctgcacatctcctccacaccatagtttgccttccaaccaagttctttctcagctctctctgtagatgcataaacctcagtcgcatctcccggtcttcttggacataattttactggaattttcttgccagaagccttttcaaatgctgcaaccatttcaagcacagatgttccacgaccagttcccaggttgtaagcagtacaacctatgttctccgttgtgaagagctttcgcagggcagcaatatggccatctgccaagtccatcacatggatataagtcccgatc

SEQ ID NO: 213482 - DNA, 343 bp, Glycine max
aaagggacacaaacccaacatacttggtgagtctattgatatctagggcaactcgatgcactcaatgcagccattcctttctcttcttaaaaatcctccaagtcgtaactcataaaaccttctatgactcaaaaatccggtagagaatttcatgataagagctgtgcaagaaacaaatgatcccctctttcactgcttatacccaccggatcctcacacatatttgtctcctttcatcaaagaaccttattcttgaaccttgaacgtagaacttacttctattttcactagggaactactctctgatcatacctgctataactttctattggagatacacttt

SEQ ID NO: 213483 - DNA, 539 bp, Glycine max
gtcgcagcaaaaccaagccacccactaacttgtttggtccaagacatggctctgatcctgcatgctaccaaaacaaacaagaatgccttcaagactctgattgcggcagagtacagtggcgtccaagtggaattggcccctaatttcgagatgggtgtctctaacaaaactcctgaatttctcaagatgaatcctattggaaaggttcctgttttggaaacgcccgatggtccagtctttgagagcaatgcaatcgctcgttacgttgctcgactaaagggtgacaacgctttgttctcatcttctgccattgataatgcccacattgaccagtggattgatttttcatccttggagatcgatgctaatctcatgaaattgctcctaccaagacttggatttgccccataccttcctccagttgaggagggtgcaaattctgcgttgaagagagcatttgaggccttgaacactcatcttgcctccaatacttaccttgttggccattctggtacccttgctgacatcataacaacatg

SEQ ID NO: 213484 - DNA, 386 bp, Glycine max
aaataaatgtgtatactggtcttgctatagtcataaaagataatgtgtaacaaaatgaagctttaagtttcagggttgaagatcccaaccaaaacagctattacagaaataggatagaaaccaatgacatacgaaaaagacacacgacaaaaatcagtattttgactagggactaaaatgttgttgctgacttgaagcacttagcatccaaaagaggttctccctcaaatggtgcataatcctcgatcatctgattgacgcgctctttctgagtttcatcagagatatcaaccttggtccagtgatagagctccatatcatagcattcatcaatgacagattgtggaatctcttggacgcggaagagccacaaccccttcacctta

SEQ ID NO: 213485 - DNA, 564 bp, Glycine max
gaagcctccaggtttccttcttctaaaggaagtaaatatattataaatgagcaggaggaaatatctcaacagcatgttaatggcaatagcttggcagataaactagggttttccaattcaagctacagggaggacccatcttctggaagctttttgaatgttctggcaaagccttgggaggggccaattgggagtgctgaccagtgtattagcagtggtcaagagggccttacttatgatgacaactctatacatggatacttaaatgatgttttggttgaaaatgcaattgtggatgatactgatctgaatcctttggagtttttagcttccctgttccctggttttgcagcagaaagccttgcggaagcttactttgctaatggatgtgatttacatctgaccactgagatgctcaatcagttagagcttcaagttgatggcggtttcaatcagaatctgaattcaaagactctgtcagctcccaatctcagtgcaatggactaccctgcacttacttcaccagatggccagactgcttcagtaaaatatgtggttgataat

SEQ ID NO: 213486 - DNA, 561 bp, Glycine max
  unsure (1)..(561): unsure at all n locations
cctgttcttcgggcatatacagatacaacaataactaaaatgtccgtgttggtggactttatactgtgtcaaaaaacttgtacacattcttggctggttcaatatatcacaacacgtagtaggcctggctgagtttccatgaagtcaatgccctcttcaagaagaaaacgctgtacagctattggaagtctcgcaggagtgcgagaacccctggtatgatgacctgtccccacaagaatataaacctgcaaacgctgctcggcagctatggcagtgcttttcagcacactcaactcatgtttcagcacatgaatggcttcacttgcgtgcaacccatgtaggtctactatcctctcatttcctcttccattgccctgcacctctggagcaactggatttctctggcggtaaatggattcttgagcttttccatgagcagccttcatatgcatgttgtgcagttgccctttagcacttagttcctttgctagggctttatcaccaattagataggctngctgtgcctgctcaaatatgcattacgtaagcatgcatgatcgc

SEQ ID NO: 213487 - DNA, 547 bp, Glycine max
atataagaccactttatttacaacaaacatgatatatatagtattacatatcacacaaccataataagcaagactggtttaagacaaacattacaaaccctcaccaatacaaataattgataatcacattactacaatccttaaacttgaaaatatgctctttgccggttcttgcgtgtgttgtcctattgctgccgaatatgagaagtatatgttccatcgatatgtatttctgtatttcttttaaccgtgatacatactgtgataccatcgatatgacactcaacttatatttgcatctcacaacttatctatcaatgaattatactatttatattcataaaaaatgaagaacgagaagaatatctgaagtgttggtgtggaagctgttctgccaccaataggtagaaaagccccattactccagtgtggccacggctgctgctgtagttagactctagagttatagtttcaccatcaattatctttacagaacctggttgaggataacatgtgctcattccctacatgtaggctactttcgttc

SEQ ID NO: 213488 - DNA, 485 bp, Glycine max
aaggggaaaatatacaaagatatttaaccactcaataaagtctgatgtaatactatgaattctacactagcattgtgtggtttgtaatacaagaccggtaggattactcatggactgttgcaacttgtaacatcagctgagtatctaagaatagttaaaaacatagagagccatggccaacattaacatgcttgaccaacattgatcattacatctaaatgtcttcaagatcagggagaggaaaccgaagaatcgcagcagtgccacttatctgggctagatggtctccagagacatgcatggacgaaaatacatggacagagccccctgaatccttaacagagttgaccaagttaacatacttttttcttgctgctatatctgaattcctgaaaagctcatccgtaatgagaagcatttgtacagctagtcgttcattggcaacctcaacatgtttcattccataacatgcacgttatggatca

SEQ ID NO: 213489 - DNA, 549 bp, Glycine max
gtgtgagtaagtatatatgactaggaattaattgagtaattttttaattaactagcagggaaccccattttgattattattttcccaatactaagcgagaaaggtcttggcagcatctaagctagggaaataagtgggctcaaggaatatctgagtgaacccattatcggcctcggagctccccatcataaccggcacaacctgcttataggcgtagaagaacctcttcatcgtcacctcaatcgcctgcatcccctgcaaaacatgaaccttctcgaacccggtccttttctgtttctccgagtaaaccttcatcgccgactccatcattccgggcccacccgtggggtccaccttcacctccaatatctccggcaccttctgcctcagatccctacacattctcggcaccttcacgagctccctcgacctgaagcaaaacgccaccatttccccgcaatttctcatcatgcccaactccttcttcaagcctaagaaatccctcggatccatcatacgtgcacgtccttaacctgcgttaacaacttc

SEQ ID NO: 213490 - DNA, 449 bp, Glycine max
aatcaacatcagttctattattcctttgcgtattggaaataaaataattcacatatggtaatgttgttggcttccgccatgcactttaatacccataattacacagatagcagggcatctattatcatgataaaatcaaacggagaatctctccagagagcttgaatgatttttctgtttcttccagacagtggtccttttcttcccgactccaaggttcagcaactttattcaacttgtctctcacattctgcaacaatcgcggaaggtcatcatcccatttgtagaactccaacgccttgttgttaagtaacttttcagcaacctttttcccaatcattcgaccaccagctgaatgagcaaagtagatattgtaaaaatggcaaatgaatgcttggggatccttcacagataactccttaagatattgcgcataggtaagaccagga

SEQ ID NO: 213491 - DNA, 605 bp, Glycine max
gccgcccttttttttttttttttttaaagtagcaaagacaatgctatcttataactgatatttgaagcgggagcatcaatacaatacaatatgtaactatgaactatcaatatatgatcgttattatgtctgtgatacacacaattaaggccataatatacttatgtgatttacaacaacttctagcttattttatacatcatgccaacccaactaggagcaattttcatcatacaattacacttatctttaatcatcattcatcaatactggcatcagcaatacgctctaaactctgaagcatgacaaggtggtagtcaccagggaccatattgttatgcaatttatgccacaattggataagatgcacaagttgcaacaccacacatgttcttccccaattccatcttgaagtagccattttcaccccagctttctccccatgaattttttatgagccaatatgggacaccattttcaactccatatccaacagcaagaacggcatggttcacatcctgggaagtgctaccacaagtgtcactagtgaaaactccattctcgtagaaatggaacccattcaccacctgaaaggccacactaac

SEQ ID NO: 213492 - DNA, 555 bp, Glycine max
tcgcgatctagaacattgaagattccacaacagtgggagggagatccaaaaagagagagtggaaaagatggcgcggttgatcacagtggtgtggtgcgcggtggcggtgctattatgcgccgcggccggtgcgtcgtgggtggaggaggcggcgaacccgatacgaatggtgtctggcgtggaggcggaggtggttcgggtgatcggggagtgccggcgtgcgttgaagtttgctaggttcgtgagcaggttcgggaagagttaccaaagcgaggaagagatgaaggagaggtacgagatattctcgcagaatctcaggttcatccgctcccacaacaagaagcgtttgccctatactctctctgttaatcattttgctgattggacttgggaggagttcaaaagacacagactaggagctgcccaaaattgctctgccactcttaacggcaaccacaagctcaccgatgctgttcttcctccaacgaaagactggagaaaagaaggtatagtgagttcagttaaagatcaacgcagctgcggatcatgctggac

SEQ ID NO: 213493 - DNA, 442 bp, Glycine max
ccatcccaaaaaaaatattttttcatttaaattagcaattaaaaacttaaaactaatgtagcgactccaagccggcctgtgacaaaggcagccccatttaaacaaaactaattctcaagtcaatattgccgctgcatcctcatttaacaaagggaatgagtaagttttctgcataaaatagcttccaaataaacatatagaaggatgttatcgaagctttgcttttcaaatctacagatttggcatgaaaccagagaattgaagccagaacagggtgtcccagacccgtgacaattttgctccaaagacaaggagatgcagctcccaccaggagggcgactccataagctttttcaagaaggataacacaagtccagaataccggtttctgacctaaacgcactgaaaaagatgggatgccaaatactttatctccttcaat

SEQ ID NO: 213494 - DNA, 597 bp, Glycine max
caacactcctatttttccatttaatctcccacttctgagttgtcacataaaaaccctaattcccaattcctttctccaatcgctcctccctccgcgccacgtcgctaggctctgtagggttctgagttccgattcgcgagggaaaatgagcacgcagaagaagcgaccgtaccacatagaagcgttcaagcaccgcgccgtgggggatcccaagtacgccgagaagacatggaaggttctggaacacgctattcatgagatatacaatcacaacgctagtggccttagctttgaagagctttacaggaatgcttataacatggtgttacaaaaatttggggagaaactttacacaggacttgtgacgaccatgacttctcatctaaaagaaatttctcaatcaattgaatctgctcaaggagaaattttcttggaagagatcaacaggaagtgggtagatcataataaggccttacaaatgatccgagatatactgatgtacatggatcgaacttttataccgagcaaccataaaactcctgttcacgagcttggattgaatctttggagagattgtgtgatcattccagcaaaact

SEQ ID NO: 213495 - DNA, 517 bp, Glycine max
ataaaaaaaaaattggtttatttttgtttagaaataagaagctaaaaatgatatatttaagttttgcagcctgaaaagaagtaaccctgagaaatctaggttttgttgagtatgcagagagttacactacttgcggcaatttgtgatgtgcactcaaacttatgacagacagaatcacacaagagccatgccaaatcaaaagcacatacagttcaagcaagatagcggtacagttttctgtccactttatccctctccaaaaactcacgctcaataagggattcaatccttttcttaataacaacaggattaggcaaaaaccgtgactgcagctgctttgtgacctcagcaacaatattattatgatctagagtccgcctagacttcattatcctcacaatggctgcttcgatctgtggctttctgtcttcttccactctttgcctagtttctaggttttctggttcagactccctctgagcaacaacagtccctatctttaccttgaagaacttac

SEQ ID NO: 213496 - DNA, 372 bp, Glycine max
agtctctactctctatcactagtctgtattacatattgcttacaagatggcaacatggtcagcgtgccttgtacggaatggtttatctacaccgcgctatataataactcttaataaggacttccatggcagaagatatctctactgatcttggagactatcattattgcacagcaataaggcatgaaccgcattttccataaaggcctctttggagcaaaggcaagaagaagggcgaagggggtttctgaaactgttgcttggaaatctgggagaaggatggcctgcactattgggaagtgacaaagcttatgctgatgaacaaggcgtttcattctccagaatgtcttactccacgtttctggagtattt

SEQ ID NO: 213497 - DNA, 412 bp, Glycine max
aaaagtaactagcaaatatataggtataggccaatttttgtcttaaaatacaagatataccaattctgatgcaaaagaccgaaaaacaataaaagaattttgtttttttggggtagaggataataataacacctaactattagcatgtatgagtattgatgtacaaaattacaaacgcaactgtagtttgcataatgcacaagcaatgtaaatcttgggaacatcaagtttctttggtcagtgccctcctgggctcctattccatgacaaataagagggatctccaagttgccttggcttgacaagatatacgacggtaaaggccattgacaaaaagaagctcagtcctccaacagtgagataagcaatgccaaggaagtcattctttccaccgagccagctagtagttgac

SEQ ID NO: 213498 - DNA, 494 bp, Glycine max
aaggggaaaatatacaaagatatttaaccactcaataaagtctgatgtaatactatgaattttacactagcattgtgtggtttgtaatacaagaccgctaggattactcagggactgttgcaacttgcaacatcagctgagtatttaagaatagtaaaaaacagagagagccatggccaacattaacatgcttgaccaacattgaccatcacatctcaatgtcttcaagatcagggagaggaaaccgaagaatcgcagcaatgccacttatctgggctagttgatctccagagacatgcatggacgaaaatacatggacagagccccctgaatccttaacagagttgaccaagttaacatacttttttcttgctgctatatctgaattcctgaaaagctcatccgtaatgagaagcatttgtacagctagtcgttcattggcaacctcaacatgtttcattccataacaagcacgtgatggatcatttgaaagc

SEQ ID NO: 213499 - DNA, 305 bp, Glycine max
gaaaaatctagtaaaatcatctgaaacttggcatcttctctttgcacctaagacattgagaattctaagaatgttacacgcaagtcccatcacaacttctagcacttggatcagcacaaccttcaggaacagaaatatttacttgccaagattgctttgcctacaattcaagattggaagaaagttgccctgtgaatagcatcctcgatagcatttccaagtgcagcctcgttcaaggacttgtcagccaattggactctcttgacatactctcgctcttggacaagcatgttaccatacgtcaa

SEQ ID NO: 213500 - DNA, 447 bp, Glycine max
agggttaatatattgaaattgatgattaaatacaagctttaaatccaagaatgccaacaacaaattatttccttgctccaacttccaatacaaacttttatggcagacatgagattattccataagataaaaatatgatccaaacttacaagggtctatatgggttcatagacatctgctgcaggggctgggggagcattagctagagcagatgacacaacaaaggcaccaaataagattgtgatactggcagtgaagttgacaagcaaagcctaagaaccatatttgtccaatcctgagttctcaaggaaagtgagcttatccagaaacccaagagcagcagtgcccacagccaagacagattcaaacagcccaaatagcgcgtgccaaggaagtgaagcgcgtttaatgtctggagtcccaccagggaagaaaaagacacaaacc

SEQ ID NO: 213501 - DNA, 483 bp, Glycine max
agttattccgatattcggacgcatcaacttgttatgaaatcacattgatagcctctactcgtgtcctagctcgtctaagagctagatttgcctcaattgtttgtctcttgccttccgccttattcaaattagcttctgctatttcaagagtttgctgtgcttcttgtggatcaatgtcactacccttttccgcatcatttactaagacagtgatctcattattgcttattctagcaaaaccgcccatcagagccatcgttaaccattggtctttaagaagacgtattctcaaaatacctatatctacggctgtggcaataggcgcatgatttggtaatactccaattggtccgctattagtagataaaatgatttccttcacttccgaatcccaaacaattcgattgcgggtcagtacacagagatttaaagtcatttcttcaaattgctctccatctctaagttcgtagctttcgcagtagc

SEQ ID NO: 213502 - DNA, 285 bp, Glycine max
cctaaaaagcgcaagaaaacaaaatccccaaaatatctctcgctctgaaaccgccatggatttgcagcagagcgagttcgatcgcctcctgttcttcgagcacgctcgtaaggccgcagaagccgaatacgagaagaaccctctcgacgctgataacttaacaagatggggtggagctttattagagttgactcatttaaagagttttcctgaatcgaaaaaaacgccccaagaggctgtttaaaatctagaggaggctcttgcggaaaatcccaagaagcatga

SEQ ID NO: 213503 - DNA, 591 bp, Glycine max
  unsure (1)..(591): unsure at all n locations
aggaagatggagaagcagaacgaagaagaagaagagcaaaagaagaagaagaagagttcggtggtgataagaataccttcttatcaggaagtggttgaaagttcgcaggcgaaatccactccttcgtctctcttcgttccctcccaaaccttttccgaagctttcgccttcgtcaaatcctccgacttctactctcctcctccgaaatcgagggaaactggtcaatcggacgctccatcttcaacatcgacaccatctcccgctactgctgcagcttcgtcaacaataccttcctctcaaaatcgcaattcaattcttgtcagccacagacagaagggaaatcccttgctaaaacacattaggaacgttagatgggcatttgctgatgttgtttgtgactacatgcttggccaaagctcctgtgctctctatctcagtcttcggtatcatcttctgcatccagactacttgtactatagaataagggagttgcagaagaatttcaagcttcgtgtggttntatgccatgttgatgtggaagatgtaataaagcctcttcttgaagtaccaaaacagctatgcttcatgact

SEQ ID NO: 213504 - DNA, 612 bp, Glycine max
  unsure (1)..(612): unsure at all n locations
ggagggtctcattgccgtttttgaccttggaggtggaacatttgatgtgtccatcttagaaatttctaatggtgtttttgaggtgaaagcaacaaatggtgacactttcttgggaggagaggattttgacaatgccttattggattttctggtgaatgaattcaaaagaaccgagagtatcgacctttcaaaggacaggcttgcactgcagaggcttcgtgaagctgctgagaaagctaagatcgagctgtcttcaacatctcaaactgagatcaacctgcctttcatcactgctgatgcatctggtgctaagcatctgaacataacattgactagatcgaagtttgaggctttggtgaatcacttgattgaaaggaccaaggtaccatgtaaaagctgcttgaaggatgctaacatctctatcaaggatgttgatgaggttcttctagttggagggatgactcgtgttcctaaagtccaagaggtggtttcagagatctttggaaagtctcctagtaaaggagtaaaccctgatgaggcagttgccatgggggcggcaatccaaggtggtattctacggngagatgttaaagagctactactcctagatgt

SEQ ID NO: 213505 - DNA, 403 bp, Glycine max
aggcaaaattttgaatatcgttattcaaacaggcataatttggttctccagaagtactacaagtttaaaaggccttaaggtaaaaaatgaactccatcttttagtacaaaaaaccttatattatatgctaaatgaaaaaagatgattcatctctaacttgtgatctagacaaataaatcagtaaaaagtggatacaaactcctccccgacttacttcttcacctcctcatattctgcctcaggagcctgatccccaccctgagaaccaccagctgaggaaccgccactagaaccacctgacatgtgctctccaatcttggacacagctttgtttgcagcatcaagctttgacttgatttcatcaacattatcccctgacatcgcctgtctcaaatccgaaact

SEQ ID NO: 213506 - DNA, 539 bp, Glycine max
  unsure (1)..(539): unsure at all n locations
ggatttaggggggtgagaaaggagaagggtggcttcagaatcttcactatggtgtgtttggccttggaaacaggcagtatgagcattttaacaaggtggcgaaggtagtggatgacatgctcgttgagcaaggggggaagcgccttgtgccagtgggtctaggtgatgatgatcaatgcattgaggatgactttactgcatggaaagaagaactgtggccagcattggatgaattgcttagagatgaggacgatgcaactgtgtctacaccttatactgctgcagttttggagtaccgggttgttattcatgatccattggaagcatctgtcgacgaaaagaagtggcataatgtaaatggtcacgccattgtggatgctcaacatccagtcagggcaaatgtggctgtgagaaaggagcttcatactcctgcatctgatcgatcttgcactcatttggaatttgacatttcaggcactggagttacatatgaaactggngaccatgttggtgtttactgtgagaatttgtctgaaact

SEQ ID NO: 213507 - DNA, 524 bp, Glycine max
agttcatagaaaatagaaatcaagggggtagataacagagagaatatgatacaaattcttttttgtttttgacataaaaaaaccttaggctagtaactgcgatagcatgaccagaatcaaaattacaaataaattagactcattccacttccacaatctcatccaaagcatagttgtttgttgatacattggcatagttgactttgttgaatcgaaccacaacagggtagcgagtgttggggtcctgatcaacagcaaccactgaaccagtgcctttgtaccagtaagattccttcctaagaatattcaccttagcacctctcttggggccaataggtggcggctttggtttagcttcagcttcagctgggggtgtggcggtggcgggtgccaccgctgcaagctcatctgaagcccttacaacacgcctagaagcggtgttctttgtgttgaacatgaccacccttgagtttgtggtggcagctgcaacattaagtgacaacacaaacccagatgctgctgat

SEQ ID NO: 213508 - DNA, 612 bp, Glycine max
cggctcgagcgaaggtggtctcgattgcaagtgatccacgatacactctacgcttcacaaaaccttcaaacccaattccacagaattcttctgcttcaccatgccaccaaagcctttagactatgggtcaataaatgaaaacgtgaagaagagtcaatatgctgtcagaggtgaattataccttcgagcttctgaacttcagaaagagggcaaaaagattatctttactaatgttggcaacccgcatgcattgggacagaaaccactgagcttccctcgccaggttgttgctttgtgccaagctccattcctacttgatgatcctaatgttggactgctattccctgctgatgcaattgcaagagctaaacactatctttcattgacctcgggtggtttaggtgcttatagtgactcccgtggccttccaggagtgaggaaggaagttgctgagttcatactcaggcgtgatggttatccaactgatccagagctcatatatctcactgatggtgcaagcaaaggagtgatgcagatattaaatactatcatcaggggtcaagacgatgggatttggttccagtcccacatacccactctactcagcaacaa

SEQ ID NO: 213509 - DNA, 623 bp, Glycine max
  unsure (1)..(623): unsure at all n locations
gctgcttttgtccttttgccacgcttaagatcacccaagagagaacctaagacacacaacacaacacaaacacacagagttagaggagaaatcatcatggcatcagcagcatctgggtttgtgttgtcacttaatgttgcagctgccaccacaaactcaagggtggtcatgttcaacacaaagaacaacgcttctaggcttgttgtaagggcttcagatgagcctgcagcggcggcacccgccaccgccacacccccagctgaagctgaagctaaaccaaagccaccacctattggccccaagagaggtgctaaggtgaagattcttaggaaggaatcttactggtacaaaggcactggttcagtggttgctgttgatcaggaccccaacactcgctaccctgttgtggttcgattcaacaaagtcaactatgccaatgtatcaacaaacaactatgctttggatgagattgtggaagtggaatgagtctaatttatttgtaattntgattctggtcatgctatcgcagntactagcctaaggttttttatgtcaaaaacaaaaaagaattgnatcatattctctctggtatctacccccttgatttctattttctatgactt

SEQ ID NO: 213510 - DNA, 550 bp, Glycine max
  unsure (1)..(550): unsure at all n locations
agttcatagaaaatagaaatcaagggggtagataacagagagaatatgatacaaattcttttttgtttttgacataaaaaaaccttaggctagtaactgcgatagcatgaccagaatcaaaattacaaataaattagactcattccacttccacaatctcatccaaagcatagttgtttgttgatacattggcatagttgactttgttgaatcgaaccacaacagggtagcgagtgttggggtcctgatcaacagcaaccactgaaccagtgcctttgtaccagtaagattccttcctaagaatcttcaccttagcacctctcttggggccaataggtggtggctttggtttagcttcagcttcacctgggggtgtggcggtggcgggtgccgccgctgcaggctcatctgaagcccttacaacaagcctagaagcgttgttctttgtgttgaacatgaccacccttgagtttgtggtggcagctgcaacattaagtgacaacacanacccagatgctgctgatgccatgatgatttctcctctaactct

SEQ ID NO: 213511 - DNA, 435 bp, Glycine max
atgggggaaaaaaaggggtcccattttaagcaagagacattttttattcacccacccacccaccaagccaaccccattttttactttcaccggatttcaattatccatagcaagggataacgggcacaggcgtggataaaaagaaacccaaccttgtcatatacttgggggaagagggccacaaattttacataaaaaacatggggggggccagagaaaataaagagatgcctatttatgactctggggttatttttgattttgcaaattaaattacacaatcacagccgtacattacacatgagttgggccttttccaacttaaaagcagaggataacattggcccatgacgcgacacatgccccacctaataatcataattttacatctttacatacaaaatacaaagactttaaatttttaaaagaagaaaa

SEQ ID NO: 213512 - DNA, 452 bp, Glycine max
  unsure (1)..(452): unsure at all n locations
aactcgatactccaatgactgattagcatttcactaaatcaactataaacaaccagatatattggtcaaaaacaagaaccacggtaacacgaaaccataaagaaactcgaactcaaaccacaacaactaaaaatacggggcataatcataaaccctaattgacgacatcaagccttagtttttccagcctccattaccaccattaccaccacgagagtaaccacggtctttgccaccggcataaccaccaccaccaccaccaccatagccaccgccataaccaccgtcacgggtacggtattcaccaccggcaccggcaccggcactacgaccaccatatccaccgccaccacgattggattcttcttcttcttcgncggcgccgacggcgacaccgggggactgagcttcattgacagtgatattacggccggccaagttctgtccattca

SEQ ID NO: 213513 - DNA, 467 bp, Glycine max
aaaaaatgaaacttttgtttctaatttcaaggtcttgcccaacatccttgagctagattgaagctgttgaaatattattttatcaagtccactttcaacacagaaattcaggatgaaaatgttcttttagcaactttgattacaccgagacatatcaatgccacacagtggggggaaatcaacaaatacaaaaggcaagactcaacactacagtacttattattagcctgaaagagcatagttgagagcgctatggacatcaaccccaatctgagcttcagctctctccaaatcagttgtggctgagttcagtttctgagtgaactcttggagacccttctggactagattcacatcaattcggtgtaccggcacggcctcaacagctattatatcagccacagagtttgcatggatgaatgcaaagccactgctgacaaagtacttggtcacatcgttcccttcat

SEQ ID NO: 213514 - DNA, 368 bp, Glycine max
aaatatataatgatcatgaaggatgaaattagtgtatactaatttattactttattcatttcagtgcgtgggttaacatactagtgatcatatataactgctgccttcttggcactcagatagccacaagtccatatgttctgtaatctgttgccttactttgtgaactgcatcaggtgaggagcagatcttctcattaccttcaaggaccaaaggagattgaggacatcctcgaaaatcagtacaatgggcacaattgctacatgtgatggtgtcggaaggcagatcaggagatgaagcttgatcggacgcctgacgccaaggatcctgtgagccatttgcacatactattttcgaaccagcaattt

SEQ ID NO: 213515 - DNA, 253 bp, Glycine max
  unsure (1)..(253): unsure at all n locations
aatgattcctgaccgtccccttgtgtcgtgtgctgtctatgctttcgcgtttgccatctccagtccaattggtgtggccattggaatcatattggatgccacaacacagggtcacgtggcggattggatctttgctatatcaatgggtctggcttgtggagtgtntatctatgtatcagtaaaccatctgttggcaaaagggtacatgccccacagaccgacaaaggttgactcggcctatttaaagtttctt

SEQ ID NO: 213516 - DNA, 572 bp, Glycine max
  unsure (1)..(572): unsure at all n locations
gtgtgactcgcgcgcggcacggaattaactgtgcccagagctcgaccgangcatcagctaggtgcgggccggcccgctccatttatatatttttttattatattgtcttgttattttgctttatttgttgttgttataattctttcctaattgttgtgggtgatcagtatcattgtataatttgatttgagttaaactagcagagccattagattccgaggaatggcgcaccacataattttgaacctcgcgacaagttccaaacccaactttaacgcgaacttgagataattccgagaggtcaaaatgtgatccaaccttacaaggggctatctggggacaaacacatctgccgccggggctgggggagcatcagctagggcagataacacaacacaggccccaaataacaacgcgataacggcagtgaacttgacacgcaaagcctcagaaccatatttgtcccatcccgagttctcaaggaaagggagcttcttccgaaacccaagagcatcagggcccacagccaagacaaggacaaacagcccaaatagcgcgtgccaaggaagtga

SEQ ID NO: 213517 - DNA, 560 bp, Glycine max
aaacacactcattgcacatagtaatgcgctttatttaagtgaataaaatattacatactagttcacaaatgcaaaaggacactcatcaaccagatatttgagactcttacagttctcaagaagtcgcgtcagcatagggttagtggcgttagaactcagaatttcattcttaacgccaaaaagaacagccagtaaagctactggaaaaggatcaactctagtaagaaaaacaattttcttacctctcccaagtgctgtgcgaatccttttgttgatatctgaggagcgattgttaactgcagaactaatccaagcagtggtgggtaaaccaccacgtccactaccacatgtaacatttacaacgacagcttctgaaggtaattgacttacaggataaagacaattcacaaaaattggtaaccaagaatccactggaaaatttccatcaaagaattcttgtgtgttagccaacacaagcttatcatcaaaaacaatcttgtttggaaaagctttacctgctccttgtaaacccaacaaatcaatgctcaacagtagatcaa

SEQ ID NO: 213518 - DNA, 606 bp, Glycine max
atcataatcagtcatagcttcggcgacttcacgatattcctttcttcttctgattgagccaccgacagagcctgcgattaccgtggcggtttcagaatggcggacaagtacaacctcaagaaccccgccgtgaagcggatcctccaggagctcaaggagatgaactccaacccttccgacgatttcatgagcctccctctcgaggaaaatatatttgaatggcaatttgcgattagagggcctcgtgatactgaatttgagggtggtatttatcatggacggattcagttgccttcagagtatccattcaaacccccttcatttatgttgttgactcctaatggtcgtttcgagactcaaaccaagatttgcttgagcatatcaaatcatcaccctgagcattggcagccatcatggagcgtgaggactgctttagttgcattgattgcattcatgcctaccaacccaaatggtgcattgggatcgttagactacaagaaagaagagaggcgtacactggcagttaaatctcgtgaagctccttcttaaattcggactcctgaacgtcaaaagctgatcgatgagatacacgagtacatggtaagc

SEQ ID NO: 213519 - DNA, 570 bp, Glycine max
cgatgaatacatcctagtcatcgttatgccatctctaagagagaagcatgatgaattcatgctgagggagcttgtccaaagatggctaaatcataaagtcatggtccggtggctttcgcgcttcttccattatcttgatcgctacttcatttctcgacgctccctgcctggactcggtgcagttggcctcacttgcttccgtgaatcggtttatatggaggtacgagtcaatgctaggaaagctgtgattgcacttattgataaagaacgtgagggtgaacaaattgatagatcgttgttgaaaaatgttcttgatatatttgttgagattggtatgggtgaaatgggtcaatatgaacaggattttgaggtacatatgcttgaggatactgccgattattacaaaagtaaggctgcaaactggattgagattgactcctgcccagattatatgcttaaggctgaggattgcttgagaagggagagagatagagtgtctcattacttacactgtaacactgagcagaaattggtagagaaagtgcaactagagctgctggtgactcatgc

SEQ ID NO: 213520 - DNA, 628 bp, Glycine max
  unsure (1)..(628): unsure at all n locations
gctgcttttgtccttttgccacgcttaagatcacccaagagagaacctaagacacacaacacagcacaaacacacagagttagaggagaaatcatcatggcatcagcagcatctgggtttgtgttgacacttaatgttgcagctgccaccacaaactcaagggtggtcatgttcaacacaaagaacaacgcttctaggcttgttgtaagggcttcagatgagcctgcagcggcggcacccgacaccgccacacccccagctgaagctgaagctaaaccaaagccaccacctattggccccaagagaggtgctaaggtgaagattcttaggaaggaatcttactggtacaaaggcactggttcagtggttgctgttgatcaggaccccaacactcgctaccctgttgtggttcgattcaacaaagtcaactatgccaatgtatcaacaaacaactatgctttggatgagattgtggaagtggaatgagtctaatttatttgtaattttgattctggtcatgctatcgcagttactagcctaaggttgttttatgtcaaaaacaaaaaagaatttgnatcatattctctctgatatctacccccttgagttctattntctatgaactaac

SEQ ID NO: 213521 - DNA, 473 bp, Glycine max
agttcatagaaaatagaaatcaagggggtagataacagagagaatatgatacaaattcttttttgtttttgacataaaaaaaccttaggctagtaactgcgatagcatgaccagaatcaaaattacaaatcaattagactcattccacttccacaatctcatgcaaagcatagttgtttgttgatacattggcatagttgactttgttgaatcgaaccacaacagggtagcgagtgttggggtcctgatcaacagcaaccactgaaccagtgcctttgtaccagtaagaatccttcctaagaatatttaccttagcacctctcttggggccaataggtggaggcttgggtttagcttcagcttcacctgggggtgtggcggtggcgggtgccaccgctgcaagctcatctgaagcccttacaacacgcctagaagcggcgttctttgtgttgaacatgaccacccttgagttt

SEQ ID NO: 213522 - DNA, 387 bp, Glycine max
ggctaaaggaagcttaagtttacattcacacaataataagtacacaatctcatggttatgaacctaatgtcagagctacaagagtaactgtttcggtacacatacaaggcacacaggaaattgcagcagcatctgcaatacatttcttattcataatttatattctaatcacaattcatttattggcagctccagtcattcatagcttcattcatgcatccaacaacttcagcaagtccttctcaatgctcaaaggagaagttgtgggtgcatagcgatcaaccacatttccctctttatcaacaaggaacttggagaagttccatttgataccatccccaaagagtccacctttgcttgattttagatacttgtacagtggagcag

SEQ ID NO: 213523 - DNA, 563 bp, Glycine max
agtaaaacaccttctattatttgaagccacaaagttcagcagaaccacaatgaacaccaggaaatattaattgattatctcaagtgttttttttagtagtgagacaatgtaactcaaaattataaaggataacaatccaatatgaacaagataaattatttgattatatcaagtcatagcttctcttcaagtggagaatgcttaggttctcagggtgtgtataagcaggttccatcatcacttcttgcagttgggtcgaagtttgaggcatttggatcagtacaaccttcaggaacgggaatttttacttgctgggctgctttgccatagaaagttcctcttttgatggcatcctgattagcatcaccaagagcagcctcgttcaagtacttgtctgccagttgtactctcttcacattctcttgttcttggacaagcatgttaccatactccaagagcttgctcaaagtcatcttcggttggtcaaaggttggaggtccttccttggagttcacaagcttcttcccaatcaagtcaacaccaacaccagaaatccacttcct

SEQ ID NO: 213524 - DNA, 465 bp, Glycine max
accaaaatgaaattccataacatcaaaacactaaaatatcaaaccaaattcatccaacttggttggtcattgatattaaaaaacacagtaaattactccttagaacaaaactttgacaaactcatgctctagtgttaattaagaatatgttctgaacaaaaaagctgaatagactacaccaattaatcgaagagactgaaacccatatcatcatcagattcctctttctcctccaccttttcctccttctttgcctcagcagcaggagcagcagcagcagcacctcccccaggagctgcggcgacggcaacggcaccaccaccaccagaaggaaccgtggccaacttttccctaccggcagcaataagctcaactatatccttacccttaacttcagacaaaaacgattcaatcctatcttcatctgcttctactccaacggagccaaagatttccttgatgaca

SEQ ID NO: 213525 - DNA, 439 bp, Glycine max
  unsure (1)..(439): unsure at all n locations
acaaaaaataaactttattaactaaaacgaacaggtagcataacattaatatcgtgtcaaggaaaaaattaaatgtagaaaagcaacaaatgcgcaagcggaaagagaaagacatcaagactttaacattgcacacattgtaaaatgtagacaatgtaactcaaaattatacaggataacaatccaatatgaacaagataacttattttattatctcaactcttagcttctctccaagtggagaatgcttaggttctcagggtgtgtataagcaggttccatcatcacttcttgcagttgggtcgaagtttgaggcatttggatcagtacaaccttcaggaacgggaatgtttacttgctgagctgctttgccatagaaagttcctctgttgatggaatctcgattagcatcaccaagagcagnctctttcaagtactt

SEQ ID NO: 213526 - DNA, 423 bp, Glycine max
aaaaaaatcaagactttgttcaaaatccctagaaaaggaatagtaacttaaatcattttcatctggacacaaaattaataacattacaacttgcaaatctaatctgaaaccagttcccaaagaaaatacaaaaaacgccactgtatacttagccattaaaaggaaactcaatcagccggacttggaagatcactcaagttaccactcaaaacgagctaggtttaggcctttgggctgcaacattcactctgattgccctcccatccaaactctgaccatcaagggcagcaattgcatcattcatatcagtctcactggacatcgtgacaaagccaaaaccacgtgatcgaccagtctctctgtcatagaccacccgagcattctcaaccttaccatgttcactgaaaatttgctcggctcgag

SEQ ID NO: 213527 - DNA, 420 bp, Glycine max
gaacgaaaagctcatgaatatttcacgacttcataatgtagcaaatccgaacagcttttctaaatacaagtgaaatacttaaaattgaaatacacaagtttatacgctaacaagactcttgccaagaattatgtcatctgttgagaaatcagcctctttccgatatgttcctctaccaaagtccaggttgtacgagtctgctagaccctctacaagtccaaattcaggttccaatccaagcacgctctttgctttctcaactgatgcatagaaatgctggtcacggaatggaaatgattactttttcccaaaatcaaaatctttagggttgcagtgaatgatctctggctctgggaacccaccagccttagcacatgctcttgctaatcatgacatgtgacatacttatctcccgagatg

SEQ ID NO: 213528 - DNA, 418 bp, Glycine max
gtaaaacagcaagtcacattaagcctggattgcggatacacaagataattcacattatctgaagtacttcaccaaacacaaatctaaaaactctcaatagtcatttggctctttgacgctcactttccggggacgaagtcggtggcataggcccaagcgtcgttgttgacagggtcagcaaggcgatcggcgaggtctctccaatggaccctttccggggacaatggcctgcacaaagaagccagacatacagaacatggtcaatcgtccgttcttgaggaccttcaccttaagctcaacagaagcctctggggcatcagcaaggcccaatgggtccaagctgccacctgggtagattgggtcagtgacctcaccgagggggccaccagcaatacggtaactcttaacggcacccatt

SEQ ID NO: 213529 - DNA, 409 bp, Glycine max
tttgagaaaaaaaaaaaaaaaaaaaaaaaaaaaaggaaaaaaaaaaaaacggcccccccccccccccccccgccccgtcccccccccccccccggccccccctccccccccccccccccccccccccccgcccccctcccccgcccccccccccccccccccccccccctccccccccccccccccccccccccccccccccccccccccccccccccctccccccccccccccccccccccccccccccccccccccccctcccccccgcgccccctcccatcactccccccccccccccctgccacccccccccccccccccccccttcgccccccccccccttccccccccccccccaccccccgccccccgccgccccccccccccctcctcccccccccccccc

SEQ ID NO: 213530 - DNA, 580 bp, Glycine max
  unsure (1)..(580): unsure at all n locations
cacctatcgcatgcacacatgcaccctttttataaacattaatgataaaaaaaatcttgtgtataaggaaaggaattaaaggaaagcaatataatcaattttaatctttaaaaaaaactttaatcttttcagacctatatttttacatttccaacagcttactggcaatgagacattttttctttaagaatagtgcattacgcttcaattcatactactctaaactcatcttttgaattttattttactttttatttgctttattgtttgttattcattccttattttcatttttgaaaattaagttgtctgttgctgtgttctcactgtcaagtttctacattcctttgctaatattttttttcctaacatgccttttaatttttacctatatttttctttagaattatatatttgngtgagaactgttttccctttccccctcctctatctcttctaatttctttcttgccagcaattcacctccagtatgtgtgaaatggtcgtctttgtattaaaaaaaatagaaatccctatagtaaaatcgtacctgtccacaaataaatcaaactgaatgctg

SEQ ID NO: 213531 - DNA, 414 bp, Glycine max
ccagcaaactactatttttttatggaatcttagccaattaacaagcaaacagaaatcctttttattttttagacccataagagaaaaaatttttccccaccccagggccagaaggcaacttgagaagcaccaaagggctcgtatgacttgacattcaagggtcaaagaccaagctttttgtttttcgcttcacgggttcaaagagcccagacgatagataacgctctccaaaactggggaagaccgcaacaaggggttttccagcattttcgggcctcttcgttattttaactgcagcagctgcagcaccaccagatgattttcccaccaggaaaccttttttcaatgcaagaagcttagcagtttcaatagctttttcacttgaaatttgaacaactttttcaggtaaatcaa

SEQ ID NO: 213532 - DNA, 509 bp, Glycine max
gagccggagcaaacacttattgtcaatgagataaaagtcatcacgaaagaaaacttagaacgatgcatcccccatcatacacgacatgggaacaaatggactaccgaaatatggtgttatttaaaagacaataattataagttcacagaagcaatggcaggacagcttttcaggtcaaagacaagctaatgatgcttcgggatataaacatttcaggggtaaccaaaccatacaatcaaaatcttcaaacaacaacttgtccaaagagctgctttcggatctctggaagctttttacggaacactacatcaagtcgtgcatcaagagtattttcgcacacaatcttttcatcacgagaagccaacaccaccccaccagagcagtagagatcatgagaattgtgatgactgggtccaagtggaagataaacttggttgtcaacaatgatctctgggggatcaacatttgctttctcagcatactcctgtgcagatgaatccagcacatgc

SEQ ID NO: 213533 - DNA, 574 bp, Glycine max
gcatattcgtctgtaattcttcgattttttgagacttaccctctattaaaaactttggaaatcccatatatattataacttgaataagatcaattcttttttgaatctttatctgtccaattccctcaacaccagaggatattcttatatttttttgtatataatttttgatacaatctcgtatttttttatcttcttgtatattctcggaataatttgttggttgagcaaaccaaaaagaaaataaacaaataagacgtatcattttttgtcccataattccccactactatacataaaatgatacgtcttatttgtttattttctttttttttttctaaagatatctatagataaatatatctatatatatctatagatatctttataacccattctagctcattgactaagttcggtgactagcattagctactgtaaaaaaaaaaccaattcaaaaaatcgaataaaacacgactaattttattaatttaaatatttaatttcattaaatatttaattaaagaatttttttttttttattaaaaaaatgaattggattcattttaataaa

SEQ ID NO: 213534 - DNA, 414 bp, Glycine max
ccacattgtaagcaaattaaaatagcatgtgaatatgggacaaatccaaatattgctgctgcattgtcacatcatctacagacccttgaaaactaacagcagtcaaatatgttcgccatttggaatttgaatccaaatccagagcatcgataatataaccctatgtacagcgccaatgtctgactgatagcagatccataacattatctatcactgatcataacacaatggcaaggatctttatgatacgtgcagcattatgtgaacaaaggtggaagcgcctccagatggtgctacagcccttcggctctccttgtacttcatcattgactgcttctgcacgttcacatatgcttacactgtttacacactgctgaccttgatcttacctccgaaggacctatggggtttcac

SEQ ID NO: 213535 - DNA, 382 bp, Glycine max
tgggaaatgccctacctttgagtgcggtttgaactattgatttacgtaattggaagtaaccaactaggtttacggcgaaacctagaaatcgatcactgatccaattggagtacctctacaggatagacctcaacagaaaactgaagagtaacggcagcaagtgattgagttcagtagttcctcatataaaattattgactctcgagatatagtaatatggagaagacaaaattgtttcaagcaccgacagaaccggaagcaccctttgtttcaaagtttcaaagaggggaggacgggttattcacatttcatttgatggtaagaggcgaattgaaagctaagctgtggtatttctaaagattccccccgggaaaatagagat

SEQ ID NO: 213536 - DNA, 599 bp, Glycine max
ccgctcactacaccgccttttccacacttccatcgtccggcacttcatggccgcggcggagcccactataagcccatctaacacgcgcgtgggctggatcggcacgggcgtcatgggccagtccatgtgcgcccacctcatccgtgccggctacaccctcaccgtcttcaaccgcaccccctccaaggcccagcccctcctcgacctcggggcctacttcgccccctccccccacgccgtcgcagcccgctccgacgtcgtcttctccatcgtcggctacccctcggacgtccgctcagtcctcctccacccctcctccggcgccctctccgccctccgccccggcggcgtcctcgtcgacatgaccacctccgaaccctccctcgccgtcgaaatcgcggacgccgctaccgccaaaggctgccactcaatcgacgcccccgtgtccggcggcgacaccggcgcgaagaacggaaccctagcaatcttcgccggcggggaagaatcgacggtgaagcgtatggaagccttgttctcccatttggggaaagtgaactacatgggagggagtgggaaggacagttcgcgaaactggcgat

SEQ ID NO: 213537 - DNA, 530 bp, Glycine max
aaacagccaaatagttattatgcgatagcattcattctgcaaagtagactatagatacaatacaatgcatgtttaaaaatttcaggtattggaggagggaggaagagtaacattgttgagtcgctcaaggaccaaaataagagcctgagtgcccaaattaccttcaccgtgagccctaagcgacacataaagctgttgagcgagagccaagccaggcaaagcaatccccatattctgacactccttcaagcaaatccccaaatccttaacgaagtggttcacgaagaaccccggttccaaatccctattcaagattctctttccgtacaaatcaagcgacttggaaccggccgcgccggtggaaatggcgtccaggtacaaccccacatccagccccgccttgtgcgcgtacaccatcccctccaccaaccccaccatcgtcgaagctatcgtcacctgattcgccaagttcgcgaactgtcccttcccactccctcccatgtaggtcactttccccaaatgggagaaca

SEQ ID NO: 213538 - DNA, 635 bp, Glycine max
  unsure (1)..(635): unsure at all n locations
aagtagttgagaactaagaaggagaagcaaatggcttcctcaatgatctcttccccagctgttaccactgtcaaccgtgccggtgccggcatggttgctccattcactggcctcaagtccatggctggcttccccaccaggaagaccaacaatgacattacctccattgctagcaacggtggaagagtgcaatgcatgcaggtgtggccaccagttggcaagaagaagtttgagactctttcctacctgccagaccttgatgatgcacaattggcaaaggaagtagaataccttcttaggaagggatggattccttgcttggaattcgagttggagcacggtttcgtgtaccgtgagcacaacaggtcaccaggatactacgatggacgctactggaccatgtggaagctgcctatgtttggttgcactgatgcttctcaggtgttgaaggagcttcaagaggctaagactgcataccccaacggcttcatccgtatcatcggattcgacaacgttcgccaagtgcagtgcatcagcttcatcgcctacaaagccccaggcttctaagtgtgaaaaanttgcanagcatttgtagccgccaccccactttgtttgttgtactaaactacatccca

SEQ ID NO: 213539 - DNA, 621 bp, Glycine max
  unsure (1)..(621): unsure at all n locations
gaaaatgaacgacgcagatgtctcaaagcaaatccagcagatggtgcagttcatccgccaggaagctgaggaaaaggccaacgagatctctgtctccgccgaagaggaattcaatatcgagaagctgcagttggtcgaagccgacaagaagaagatcaggcaagaatacgaacgcaaagagcgccaagttgaaattcgcaagaagattgagtactcgatgcagctaaatgcttctcggattaaagttcttcaagctcaagatgacgtgatcagttccatgaaagaagctgcatccaaggaactgttgaatgtgagtcatcatcatcatttgaatctactgagtcatcatcatcatgagtacagaaaccttctgaaagatctcattgttcagtgtttgcttagactgaaagaaccttcagtcctattgagatgtcggaaagatgacctgcacttggtagagcatgtgctggattcatctgcacaggagtatgctgagaaagcaaatgttgatcccccagagatcattgttgacaaccaagtttatcttccacctggacccagtcatcacaattctcatgatctctactgctctggnggggtggggttgcttctcgtgatgga

SEQ ID NO: 213540 - DNA, 464 bp, Glycine max
gagccggagcaaacacttattgtcaatgagataaaagtcatcacgaaagaaaacttagaacgatgcatcccccatcatacacgacatgggaacaaatggactaccgaaatatggtgttatttaaaagacaataattataagtacacagaagcaatggcgggacagcttttcaggtcaaagacaagctaatgatgcttcgggatataaacatttcaggggtaaccaaaccatacaatcaaaatctttaaacaacaacttgtccaaagagctgctttcggatctctggaagctttttacggaacactacatcaagtcgtgcatcaagagtattttcgcacacaatctttccatcacgagaagccaacaccaccccaccagagcagtagagatcatgagaattgtgatgactgggtccaggtggaagataaacttggttgtcaacaatgatctctgggggatcaaca

SEQ ID NO: 213541 - DNA, 603 bp, Glycine max
  unsure (1)..(603): unsure at all n locations
tgcttcaccttctgctctagaaaattcagtgctgaaacatggcttcggctactctctctgtagccaaaccagcccttcaggcaaatgggaaaggcttctctgaattctctggcctccgaagctcatcaggcttccttcccttttctagaaaatcttcagaggatttccattctgtcattgccttccagacctatgcagttggaagcagtggaggatacaagaagggtgtgacagaagcaaaactgaaggttgccataaacgggtttggaaggattggaaggaacttcttgaggtgctggcacggtcgcaaagactcccctcttgatgtcattgccatcaacgacaccggcggcgtgaaacaagcctctcaccttctcaaatacgattccatcctcggaaccttcgatgctgatgtcaagcctgttggcagcaatgtcatctccgtggatggaaaggaaatcaaagttgtttctgaccgcaaccctgccaaccttccttggaaggacttgnggatagacttggtgattgaaggaaccggngtgtttgtagacagagaaggtgcanggaaacacattcagcaggagctaagaggtgctcatcact

SEQ ID NO: 213542 - DNA, 520 bp, Glycine max
caaggtaagaattttattgcacaatgagaaggcagagaaaattgatggttctgtttctcagtacaagtttaaaagaaaaatgaagcaacaagtgttgtagtggtagtagtagtagtaagcatacaaaattacaatggcatggtacatacataataatttaattaccaatgagaatttgtttggctctcacttccatttgttggcaacaatgtcagccaaatccacaaccctttgggagtagccccattcattgtcataccaagcaatgaccttcaccatgtcatctcccatgaccatggtcaacgaggagtcaacggttgaggacacatcagtgcacctgaagtcaacggacacaagtggctcatcacacacagagaggattcccttgagctcattgtctgcactctctctgaatgctgcattcacttcttctgcaaaggtcttttttgagacctgaacgacgaggtccaccactgatacgttcggtgttggcacacggagtgcaatgccattgagtttg

SEQ ID NO: 213543 - DNA, 579 bp, Glycine max
ggtgtctgtcccgaattattcccgggtccgagcaccacactatactactcggcggctcgcccttttttttttttttttttttttttttttttttaaaaggaaaaggcaccaaattcaatttaagtggacactgaaactcaaaattatagatgaagacggtccaatatgaagaatataggaagatcatctcaaacttagcgtcttctttttgcacctaaaacattgagaatgctaaaaacgttacacgcaagttccatcacaacttctagcgcttggattagtacaacaaccttcacgaacagaactatttacttgccaagtttgctttgcctacaatccaggactggaataaagttcccctgtgaatagcatacggcgttagcatatccaagagcagcctacgttcaagtacttgtcagccaattggactctcttgacattctttagctcttggacaagcatgttaccatacagcaaggagttctccagagttaaattgggctagtaaaggttggaggtacatcttttgagatcacaagcttattcccaacactgtcaactccaacgccagaaatccac

SEQ ID NO: 213544 - DNA, 651 bp, Glycine max
  unsure (1)..(651): unsure at all n locations
gaaaggacaatcctccatagaatatttgcacaatcctctgtgggctgaaaccttaacgtggacaactccggagaaactcttgaaacctctcccacgcttcagccaaactctcctgctcctgcactaaattcccaatatccctctgtatttgatcagttttaactacagagaaatatttctcaaggaatttattaacgcagtcctcccaagtcgtgatcttgtgttcaggtaaagcacaaagtcaatcccaggctttcccattcagtgagaatggaaaagcatccaatctcacatactctgtgggcacgctttgcacattgatggtgccagtcaacctcaggtacgtggggtcttcagagtctgcctcatggaactgattgctttctataatctgcaagaagccatgtctcagctcaaaattgacttctgcccccagagttggcaacaatatgttattagctatctccacttgaggagtgagatagtctaacaaggtctgctctacctgctcattaacaacagtctcacccnccattgcctctgtttccagccatgtttcttctcctctgcttagctctattcctgcgagcaactntctcgatcttaggtcgtgtagaagcacttgtcactgagatcgagtgagcatgaaac

SEQ ID NO: 213545 - DNA, 548 bp, Glycine max
gttcaactgaggtgatggcttagaatttgccttctcccgcccaagtgaagcccttatttttctgttcaaataactccacaaaacttccaggtagcttttctttgaagagaaaagatagtgacacaacagtagagagacgagtttattgctctgccgctgctcaatcaccaccaccagcatggccaggaacagctattcccgagccttctgatttcaagacatgggatgggcaaaaacctatttctgtcttaggatctacgggttcaattggaactcagacactgagtatagtggctgagttcccagaaagatttaaagttgtgagccttgctgctggctctaatattactcttcttgctgaccagattaaaacatttaagcctgaagttgttggtcttagaaatgagtctttaattgatgaactcaaagaggctttggctgatgtggatcacaaacccgaaatcatccctggagagcaaggagtcattgaggccgctcgtcaccctgatgccaccactgtagttacaggcatagttggttgtgcagga

SEQ ID NO: 213546 - DNA, 438 bp, Glycine max
gatctcttgttcttgtaatatatttataaaaatttttcttattaacatgaattttttctgggtatttgtgataaatttttcgtttattcttttgaattaatgaaagacctatggtttgatacataaaaaattgtttattgttttttctagacaggcgaactggttcgataacaaatatttcttttttcataaatttgttatttttctttttccttaagcctagaagaattaaattcttctgattttgaatcatcataatatctagacctagttctcctctttgaatagaggctattgtaatttctcttaaattttttaatctaatcaggagacaatatactttgacattgttaaatattctttgacctaagaaattattccaatttaaatgtaaaatcaaaaaatttcttagtaagaaattaagttctgcctccatct

SEQ ID NO: 213547 - DNA, 437 bp, Glycine max
ggatcgttgagaacagtaaactgattggaatttccagtaatcagctgagtaagagttacatggaacattgcaactaactattaccaggtacaccaaattgaatataccccttcaaaacatcaggaagtcttgccctaccaaacagcacttaaatcataaatttcttcaatgactccgattagatcattcacagttgactaaaagatccaacaattgcgaaacacctaccggtgcaatagttcggcgtctacagaatttttcatgaacatagcttattcatccccatttgaatttcgaggggaagggcttatagaagcattagggcgaccagatggtgagacactgccaggggttagacaacgcccatcgcggttacgatgtgcaggactttcaccccgtggactctttctaggggaaggactcctttgaggggaagt

SEQ ID NO: 213548 - DNA, 574 bp, Glycine max
  unsure (1)..(574): unsure at all n locations
ccccgccccccccccccccccccccccccatgangtnnngatgaagagtaagtaagntaggaattngggtggaggttatagatggggaggggangnanttttttttttttctttttttttttttcttcttttttccccctccttttttttctcttttttccccccccccccccccccccccccccccccccccccccacacccccccccccccccccccccccccccccccccccccccccccccccccccccccccccccccccccccccccccccccccccccccccccccccccccccccacccccccccccccccccccccccccccccccccccacccccccccccccacccccccacccccccccccccacccccccccccccccccccccccccccccccccacccccccccccccccccccccccacccccccccccccccccccccccccaccccccccccccccccccccccacccccccccccccccccccccccccccccccccacaccccccccccccccccccccccccccccacccccccccccccccccccccccccc

SEQ ID NO: 213549 - DNA, 413 bp, Glycine max
ggaaggaaatggaaaggaaaacattgagggaggaaccttgagtacttatcaaagatactcagggaacatggaaatagaaaaatttttcatttttaagatccttaggaaaaaaatttttccccctatccaagggacgagtgttccttgaaaaagataaaatggcttatatgacttgaaatttaaggcccaaataccataccttctgttttttcttcacgtggtaaaagaacaccgcccatttttatcgctctctaaaacttgggaagaccgcaacaatgagttttccagcattttctggcctctttgtttttttaaccgcggcagttgcagctggaccagaataatatttcccacacgaataattttttttttatgcaaaaaggttagcagttataatagctttttttcctgaa

SEQ ID NO: 213550 - DNA, 424 bp, Glycine max
accaacataaatttactttgttattatagggattaacagaaatatgtgactaaattgcagggacttggctgaagatatagcatatatctttttttctaaaagccgataaaatagacaatgaattgccggtttaacagattaagcaggtggtccaacagctacaccatccttgagcctggatttaccatacagggtttcttcaaaccggatgatctcattcttggatccataagcaacttgagttctctcatcaatgttagggatgactttgtctagcacagactgatgaccatcactggtggaacctccggctttttcaatcaagaaccccaacggagctacctcaaacaacagtctcaacttggctttggctgatgatgatgtcacattgggaaaatgcctttttcttttacaaaatttgggt

SEQ ID NO: 213551 - DNA, 489 bp, Glycine max
accaacataaaggtactttgttattatagggattaacaaaaatatgtgactaaattgcagggccttgtctgaaaatatagcatatatctttttttctaaaagccgataaaatagacaatgaattgccggtttaacagattaagcaggtggtccaacagctacaccattcttgagcctggatttaccatacagggtttcttcaaaccggatgatctcattcttggatccataagcaacttgggttctctcatcaatgttagggatgactttgtctagcacagactgatgaccatcactgctgtaacctccggctttttcaatcaaaaaccccaacggagctaccttaaacaacagtctcagcttggctttggctgatgatgatgtcacattggtgaagatgcctttttcttttacaataatctggttgacatctggcaccattcctcccgtgtttctcaatgtgtacttttcattggcctaggatcgatc

SEQ ID NO: 213552 - DNA, 331 bp, Glycine max
attcatggttttatggttacacacaacataattttgcttgataaggaggggcaaaaacaagtaaaccggcctcacatccaaagcgacacggggcacgtaaacaactgtaacaaacacccaggagaaggcaacaaccctcaccctaaggccaaaaggggacaccacaagcccccaacaggccgaagaaccgacaaacctgaaaccagactgaattacagacaccccccatctgaggggaaaaccaagggtcacaaaaaccaacgggcgatcttcgagcaaagcgaatcatgcccgccagagcccaagacccgcatccaaactccgggctgca

SEQ ID NO: 213553 - DNA, 445 bp, Glycine max
aaaactcgaactcaaaattattatttaagctgagacaaactcgcttggttattagtgcaccaaaaaaacaatgtatatcaaagcccttaaaggagcttctctgcatactatagggggttacggataacctggtccatggaggggcttctcaatgagagctccatgaacctagaagatgatagcatccgggtagagcactaacgagggggggccatatccacggcaatcggagtgagataaaaactatggggcatccctttggtaagataaggctccacattaattgttgggcttcatgaaggcctcatagtactgcatttccgtgttcctcaccaagttcatcttcggcaggcatagcagcaccgggggccggcttagcccttcgagtggcggtgccgtctgaaccatcgggcagcgaaaggggtggttcttgatggccccaaca

SEQ ID NO: 213554 - DNA, 525 bp, Glycine max
  unsure (1)..(525): unsure at all n locations
gagcgagttaattgttttaactccatcttcaacacggatgacaaccattccagaaagcaacaaaaatggaaattacattttttttttcagacacatggggggatgtgtccaacaagagaacaacaaatgcaacaaaaatcaaaaacagagaaaaacaacttgtagctttatttacacacagggagaccaaagaaaaagcggttcagaaaactccaccagccatggaaggaatgtcatcaaagcaccaaaggttcatgaggtttccaccatcctgagttgtgtcaccagatagcaaggattccaatgaagtatcgccccagctcccttcaagataaggcatctgaaagaacttcaactcagattcaatatccacaagctcctcagagagtgtctttgcagaatcatcttcaatagataccacattctgagagttaggctgctgctggttggcattttgcacaaaatgagattcacaatccanaggagcagaaagcatggatgagatctcaggagcataatcaaatg

SEQ ID NO: 213555 - DNA, 518 bp, Glycine max
gatctcttgttcttgtaatatatttataaaaatttttgttattaacatgaattttttctgggtatttgtgataaatttttcgtttattcttttgaattaatgaaagacctatggtttgatacataaaaaattggttattgttttttctagacaggcgaactggttcgataacaaatatttcttttttcataaatatgctatttttctttttccttaagcctagaagaattaaattcttctgattttgaatcatcataatatctagacctagttctcctctttgaatagaggctattgtaatttctcttaaattttttaatctaatcaggagacaatatactttgacattgttaaatattctttgacctaagaaattattccaatttaaatgtaaaatcaaaaaatttcttagtaagaaattaagttctgcctccatcttggtcttggctttctttttctttatacccttactattcttttcactgtctgatcctacataatcgatttcaatatctttt

SEQ ID NO: 213556 - DNA, 815 bp, Glycine max
  unsure (1)..(815): unsure at all n locations
tttgaggttantaaaagtagatggtnagattagatanaaacatgcgaaatagatacctgaaatccgctagctaaaataaagatcaaccaaatgaatctatatgaaaaaagcccccctaattcctttacaacacgaacacccccgcccccccccactccccccccccccccccccccccccccccccccccccactccccacccccccccaccccctatcacctccccacccaccccactcgcaccatccagaccccgactcaccatcccccactgcgatacccgacccccctatccccaagccccacccacccccccccccgtccctccccccctccctcccccccccccccccccccccccaccccccccgccccccccccccccccccccccccccccccccccccccccccccccccccccccccccccccccccccccccccccccccccccccccccccccccccccccccccccccccccccccccccccccccccccccccccccccccccccccccccccccccccccccccccccccccccccccccccccccccccccccccccccccccccccccccccccccccccccccccccccccccccccccccccccccccccccccccccccccccccccccccccccccccccccccccccccccccccccccccccccccccccccccccccccccccccccccccccccccccccccccccccccccccccccccccccccccccccccccccccccccccccccccccccccccccccccccccccccccccccccccccccc

SEQ ID NO: 213557 - DNA, 550 bp, Glycine max
  unsure (1)..(550): unsure at all n locations
gatctcttgttcttgtaatatatttataaaaatttttcttattaacatgaattttttctgggtatttgtgataaatttttcgtttattcttttgaattaatgaaagacctatggtttgatacataaaaaattgtttattgttttttctagacaggcgaactggttcgataacaaatatttcttttttcataaatttgttatttttctttttccttaagcctagaagaattaaattcttctgattttgaatcatcataatatctagacctagttctcctctttgaatagaggctattgtaatttctcttaaattttttaatctaatcaggagacaatatactttgacattgttaaatattctttgacctaagaaattattccaatttaaatgtaaaatcaaaaaatttcttagtaagaaattaagttctgccctccatcttgttcttggctttctttntctttatccccttactattcttttcactgtctgatcctacataatcgntttcaatatctttttctgggttgagatagatgattcaagatttcg

SEQ ID NO: 213558 - DNA, 361 bp, Glycine max
gtggcatagcggactgattaatggctcgactcgactgagtatactagctcgcgggctgtccttttttttttttttttattttttgattttgtttgttttttttttatggaaactttttttgtttttttcaattggacatgatttactttatgtttactatgttgctggagagaatcttaaacggatacagtgggaaaaagtttgaagttcaaatcccatagctcaaaagtaccattaacgaaatcataatgtgctccttttaaagccagagttttgttaacaacttcatttctaacaaatggatatgttaataggttaccaagtgatacgttcacagcttaccttttacaggtagttcatt

SEQ ID NO: 213559 - DNA, 416 bp, Glycine max
ggatctgaattgtgttgagcaggtgatactgtcacgttgtttgcatcaagcagagaggcagttcctgtaaagatactttgcaaacctgtactggaagtagagacaccagaagtaacattctttatgccagaggaaggaggcagagatcctttgactgatcctagcttaattgtatctgaggcaggtgatgcaaaaatctgggggctattgtcagttacaggagttggagaagcaatccatggccctcgaaggggggtttgggacattcaaggggtgttgtgtccaaaaaaattcctgacacgagaattttgataaggatgtcttggtgtaattgcctggggataattcacgacagaaccttttttaatggtccaagattgcacggattcaatacctagacctagagttgatcgact

SEQ ID NO: 213560 - DNA, 536 bp, Glycine max
agttcatagaaaatagaaatcaagggggtagataacagagagaatatgatacaaattcttttttgtttttgacataaaaaaaccttaggctagtaactgcgatagcatgaccagaatcaaaattacaaataaattagactcattccacttccacaatctcatccaaagcatagttgtttgttgatacattggcatagttgactttgttgaatcgaaccacaacagggtagcgagtgttggggtcctgatcaacagcaaccactgaaccagtgcctttgtaccagtaagattccttcctaagaatcttcaccttagcacctctcttggggccaataggtggtggctttggtttagcttcagcttcacctgggggtgtggcggtggcgggtgcccccgctgcaggctcatctgaagcccttacaacaagcctagaagcgttgttctttgtgttgaacatgaccacccttgagtttgtggtggcagctgcaacattaagtgacaacacaaacccagatgctgctgatgccatgatgatt

SEQ ID NO: 213561 - DNA, 498 bp, Glycine max
aaaaccatagacgttgttccttcatatataagacccaaaagcgaaaaaaagcaaataacaatacatatactttgtcgttaattaacattaatttgtagctgtaaataataagcatattaggcagcagaaggtgctggcacaaactgaaagcccccagcatccaatagtgccgatgtgaaacgttccacgttgacagagttgttattgtagtccagtgtctcatcttcatatatgtcccaccacttcttcacaagcatcttgatatcttccctatccatgttctcttccttcccagtgaacctccaaggcttagacccagcagcacagtaatgaaccacttgaactttatcaagttcaacattttcagggtgacgccacaacatggccagcacaaggttgtacatgttcggtattggcttggacttgtccttgaagtacatgttgagaaagtcctgctcagcacaagaagtgggcttggtgagttggacaaggttggag

SEQ ID NO: 213562 - DNA, 490 bp, Glycine max
  unsure (1)..(490): unsure at all n locations
aagctgaaacggttttcatttatcattaaagatcaactgctgaacaattacaatggtaaaacaaaacaaatgaaagaattaattctgccatcaaactccactttatctcagttcactgttctaataacaaacattttttaagaaaaatcttcaatcggtgcaaggggctactgtattgcaaaacgaggacgctgtacctacaccaagccattctgctgcatttaaaagcatttcctgtgtacaattgaaggaccagactcatactctgccttcgcaatccacatttgttggaaagtgctgagagaagccaagatagagccaccaatccagacactgtactttctctcaggtggagcaaccaccttgatcttcatgctgcttggggccaaagcagngatttccttgctcattctatcagcaatacctgggaacatagtagaaccaccacttgagactatgtttccatacaagtccttcctgatatcaacat

SEQ ID NO: 213563 - DNA, 458 bp, Glycine max
caaaaatgtctcacttcggacgttcgggtcccccagacatttccgacactgactctcttctggttctcaacatcaccttccgtaccaccgccgacgacctattccctctctgggacaagcacgggaaggtcgtggacatcttcatgcacaaggatcgaagaactggagagtcatggggttttgcatccgcgcgtgacaagtatgctgatgaggctcagaaggccgtggagaggctcgacgggagagtggatgacggtcgtgaaataaccggacagtttgcgaaagatgggcctaaagctgagaggattcacaaaggaaggattattgaaacatccgcgagatcaaggcgatcaaggagccgtagcccaaggaaaaggcatcgtgatgattacacagatcgagattataggaggctagagtcgcagcagaagttatgagaggtatgaacgtgacaggca

SEQ ID NO: 213564 - DNA, 458 bp, Glycine max
ggcaaaatccctcaaactgagagattaacctgtcaactgcaaggtctaatagttaccaaacaccgaagtagacgacatagcaagtcaaaatataaaaccattcaaaacatcaggaagtctgaccctaccaaacagcacttagatcataaaatccttcaatgactccgataagatcattcacatagactaaaagatccaacaatagcaaaacagctacaggtgcaatagtccggcgtctccagaatttttcatgaacatagcttattcatccccatttgaatttcgaggggaagggcttcgagaagcatcagggcgaccgcgtggtgagacactgcgaggggtaggagaacgcccatcgcggctacgatttgcaggactttcaccccgtggactcttcctaggggaaggactcctttgaggggaagtgctcctctgaggggaaggactccttcgaggac

SEQ ID NO: 213565 - DNA, 550 bp, Glycine max
caaaaatgtctcacttcggacgttcgggtcccccagacatttccgacacttactctcttctggttctgaacatcaccttccgtaccaccgccgacgacctattccctctcttcgacaagtacgggaaggtcctcgacatcttatcccaaggatcgaagaactggtgagtcaaggggttttgcattcgtgcgttacaagtatgctgatgaggctcagaaggctcgtgagaggctcgacgggagaatggttgatggtcgagaaataaccgtgcagtttgcgaaatatgggcctaatgctgagaggattcacaaaggaaggattattgaaacatccccgagatcaaggcgatcaaggagccgtagcccaaggaaaaggcatcgtgatgattacaaagatcgagattataggaggcgaagtcccagcagaagttatgataggtatgaacgtgacaggcaccgtgggagagacaaagattatcgtagcagaagcaggagccgtagtgccagtcttgattacaagggtcgtggtaggggacgctatgatgatgagc

SEQ ID NO: 213566 - DNA, 519 bp, Glycine max
ggcaaaatccctcaaactgagagattaacctgtcagctgcaaggtctaatagttaccaaacaccgaagtagacgacatagcaagtcaaaatataaaaccattcaaaacatcaggaagtctgaccctaccaaacagcacttagatcataaaatccttcaatgactccgataagatcattcacatagactaaaagatccaacaatagcaaaacagctacaggtgcaatagtccggcgtctccagaatttttcatgaacatagcttattcatccccatttgaatttcgaggggaagggcttcgagaagcatcagggcgaccgcgtggtgagacactgcgaggggtaggagaacgcccatcgcggctacgatttgcaggactttcaccccgtggactcttcctaggggaaggactcctttgaggggaagtgctcctctgaggggaaggactccttcgaggactaggactgcgccgtgcaggggagccgctatcaactgatctgctccggctctactattacgc

SEQ ID NO: 213567 - DNA, 500 bp, Glycine max
aaaccctacttctacttcccccctttgctctcaaaccttatcacctaatccttatcctcccaaaccagaaaaccatgtctacctccgcagcttccctcgcactcccaaccctcactctgcgaacccgacaacctctatgttctccccagtgcttctcctcgaccctctccctcacacccaacaacaaacccatttccatttctgctgtttttctcaaaccaacaactctgtcgtcgtctcgcttcgttccccacgtcgcggtgtcgtcggatttggggcaggaggaggacaccttcagtgacggagacggccccagcttctcccccgaccttaagctctttgtcgggaatcttgcgttcaacgtcgacagcgcgcagctcgcggagctctttgagagtgccgggaatgtggaggcgggtgaggtgatttatgataagactactgggaggagcagggggtttgcgtttcgcaccatgtcttcggctgaggaagctgaagcg

SEQ ID NO: 213568 - DNA, 544 bp, Glycine max
aacctataaatttgagacatctacttctatagtgaaaagacggactacagatcagtttcaaatgacaaccatcaaatttggaacatacatttaaactttcaacagacactcatttaggaatgaagcctgtcaaatattgaaactgtgtacatgtagtctcaatgcatgtaagggtatttgtttcccaaactgtttttgccaatgacatcttgcagctgtataactcccaagtcccaaataccgaaatcctctctcgggtattgactaaatgctaaatgctcagaactgcttgggcttggaatctgctaatgagactcgtatagctctgccattcaagttcacgccatttaaggactgaattgcactggtgacctcatcaaggctactgaaagtcacagatccaaagcctctagatcgttcactttccctgtcatagattaccctagcttccaagacattccctagtgcacgaaacaatgacttaagtgctacattgtcaacacccgaagcatgattacttacatgaacacgggtttactatctg

SEQ ID NO: 213569 - DNA, 622 bp, Glycine max
  unsure (1)..(622): unsure at all n locations
cgaattcactgtccaagaaaataggttgtggatgttgcaatgtcgaagcggaaaacgtactggtaaaggtgcattcaaaatagctgtagatatggttaatgaggggcttgttgatattcgttctgcaatcaagatggtagagccacagcatcttgatcaacttctccacccacagtttgaggatccatctacttacaaggataaagtgatcgccgttggtttgcctgcatcccctggagccgcagtagggcaggttgtattcactgctgatgatgctgaagaatggcatgcacaaggaaagagtgtcatcttggtgaggaatgagactagtccagaggatgttgggggtatgcatgcagctactggaatcttgacagctagaggtggtatgacatctcatgctgctgttgtagcccgtggatggngaaagtgttgtgtgtctggttgctctgacatccttgtaaatgatgctgagaaggtgtttgtagttggggataaagtgataggagaaggaaaatggatctcactgaatggatctacaggtgaggtgatactgggaaagcaccactttctccttcggctctaagtgatgatttggaaatttcatgttttggctgatgaa

SEQ ID NO: 213570 - DNA, 619 bp, Glycine max
ctttcacctacacaagtttctattcaaaggaaattggtcatttgaatggctcagttgttgtctccagtgtacactgaacctctcaaatcgaatttaagttccataagctcatggaggatgctaccaaagactgcaactgctttcaattttgtaacacacaatggcaaacgaagagggtgtggaagggtaagagttgcttctgaggaaaaatctttttcaacgagtggcactgctgttgtagatgactactatgcagttttgggtctgcttccagatgccactccagggcagatcaagaaagcgtactacaattgcatgaaagcttgccacccggatttgagtgacaatgatcctgaggctacaaatttctgcacgtttatcaatgaagtatatggggtgctcagtgatcccatccagcgtatgatttatgatgaaattcatgggtattctttgacttcaatcaatccttttctagatgattctagtccaaaggatcatgtctttgttgatgaattcagctgcatatgctgcataaactgtgccaatgtagcttgtgatgtgttcgaatagaggaagagtttggaagagccagatgtacagccaatgcgggaagcctgaa

SEQ ID NO: 213571 - DNA, 545 bp, Glycine max
tctcaatgggttcttcttctattacaacatcgcccgcaaccatgaccatggctgcgatcgtgctcctgttcacggtctttgccgtttcctccgccctagacatgtcgataatctcgtacgacagcgcccacgcggacaaggccgtcacgttgcgcaccgaggaggagctgatgtccatgtacgagcagtggctcgtgaagcacgggaaggtgtacaacgcgctcggcgagaaggagaagcgcttccagatcttcaaggacaacctgcgattcatcgacgaccacaactgcgcggaggaccgaacctacaagctcggactgaaccggttcgctgatctcaccaacgaggaatacagggccaagtacttgggaaccaagatcgatcccaaccggaggctcggaaagaccccgagcaaccgctacgcgccacgtgtcggcgacaaattgcctgattccgttgattggaggaaggaaggtgctgttcctcctgtcaaagaccaaggaggctgtgggagctgttgcgcattctcagcaatcggtgcagta

SEQ ID NO: 213572 - DNA, 261 bp, Glycine max
ccacattgtaagcaaattaaaatagcatgtgaatatgggacaaatccaaatattgctgctgcattgccacataatctacagaaccttgaaaactaacagcaatcaaatatgttcgccatttggaatctgaatacaaatacagtgcatcgataatataaccctatgtacagagccaatgtctgactgaaacttgatacagaacattatctattttgcatcataatacaagggttaagatctttatgccacgtgcactgttat

SEQ ID NO: 213573 - DNA, 546 bp, Glycine max
aaactacaaaggtttatccaatgtcaaaaactacttccaccatgtcggctacatccccaatgcaccacacttagacgacaactgcgatgacaccctcgtatctgccatcaaaacctaccaaaagaattacaacctgaacgtcaccggcatgttcgacatcaacacatcttaaacaaatcatgacaccccggtgtggcgtccccgacataatgatcaacacagacaaaaccacatcgtgaggcatgatctcggactataccttcttcaaagacatgccgcggtggcaagctggaaccacacaactcacctacgctttctacccggagccaagacttgatgacactttcaaaagcgcgattgcaagggccttcagcacgtggaccccagtggtgaacatcgcgttccaagagacgacgtcgtatgaaacagccaacattaagattcttttcgcgagtaagaaccacggcgatccgcatccttatgatgggccaggtgggatattgggccatgcatgcgctcccactgatgggaggcgccactttgacg

SEQ ID NO: 213574 - DNA, 419 bp, Glycine max
agctcactaccttgcggtcgtccttttgtttcctgtggaagtgttaaagcaaatgccaaaacgtttggtatatttgacacatatgaggaaacactactcattaagtgcttatcctgtatgcatcggctaatctacagctggttccttctgaatctagagaaagctgtgatacgatctcctacgcgctcttgccagggttgttgaactagagtcagtgaagctggataactggggcaaatctctaatgcaacttaccgaaatatatctctagtactaggcaagccccacctagctatcacggttacggggtgataccatagatcctttgtacccggtgtatggcaaagtagacctaaactgacacttgctcagctgagggcatattaaaggtaacaacgaacgttgttacgtccgtcaaa

SEQ ID NO: 213575 - DNA, 506 bp, Glycine max
gatttattctgggatttacgttgttctggggttgtttgctgagaattatcggttacattcgaagcaggaagaggatgaaaaaaatttggtgtcaaagggtgctgtggttaaaggtgttctcctccaacagctagttcaggctgtggttgcaaccctttgtttgcgctgacaggaagtgacaaccaaaatactacaagccataatacttctctacttgttttagcaaggcaatttgttactgctatgcttgtaatggatgcatggcaatactttatgcacagatacatgcatcacaacaagttcctttacaaacatatccactctctacatcacagactcattgtaccctattcatatggagctctgtacaatcaccccgtcgaggggcttctgaatgacactgttggtggggctttatctttcctactctccgggatgagtcctcgagcctccatcttcttcttctcctttgccaccattaaaacagtggatgatcactgcgggtt

SEQ ID NO: 213576 - DNA, 436 bp, Glycine max
aactggggaacgatattgatttttaaaataaaaacataaacgacatattttcgttgaagcgaggttcattccttatttcaaaacattgtaaacaggagcactttatccagagatgcaatgcacaggttcaagggagacacttgtcaaacagttcagacatatgagaacacttcataaaagggattccccttaggcaaccaccatgaaggcgaaggacaagatgcaaaggggattccttctgaatgttgaaatgtgtcaagggacgaccattttccaatggcttccgagtaaaaatgatcctctgctgatctggagggataccttgcatgacctgaaacttagcttgcacattgtgaataggatcagagctttccaccttcaggggacaggtgatgcctgttagagtgttcacaaaaatgtgcataccttcacgaag

SEQ ID NO: 213577 - DNA, 634 bp, Glycine max
gtggttccctcagacatatctgtaacgctgcttcttctgtgaggcatcaatggagacaaaagctttgtccttcgctctgtctctcaatgacctcaccaacaaccgcttcacttccaatacgccacatgctgccgccaaagtttccgtctttaccgtcagatgctcttcttcgggtagtggagagaggccttggaagaattcagatgctagacttgtgcttgaagatggttcaatttggagagcaaaatcgtttggtgcttcagggacccaagttggcgaggttgttttcaatacatcattgacagggtatcaagaaattttgactgatcctagttatgctggccagtttgtgctcatgacaaacccacatattgggaatactggcataaattttgatgatgaggaatcaatacagtgtttccttgctggacttgtaattagaagtttgagtatcagtacctctaactggagatgtaagaagcctctgggggattacctagctgaaaggaatatcatgggaatttatgatgttgatactcgtgcaatcacgcggcgattgcggcaagatggcagtcttattggtgttttgagcactgacaattcaaaaagggatgaggactgcttcacatgtcta

SEQ ID NO: 213578 - DNA, 478 bp, Glycine max
agtaattactctcataaaattggtgatgccagcaaccaaaattttggtgttgactgcgatgagcagtagtacattaggcctcattgaggtttatgacaatcatggccgtgcttacccttgcaaaggaaatgaacatgagaaaatcttaatcttatagatccctagaaaaccttaataaactcatctacaaaatcatagaaatggactcataacttcgtaatttttcagcagatgcattattctttttgccccgaacgaacaagagcagctcccttcaaccacttatgcatccaaagcctgtgctgctgatagttggtgtagactttcttttggtctgttttttccttgcttcattagctctacaaactccctaaaagcatagtcagaatcatgaggtccaggggatgcttcagggtggtattgaagaaacataagttgttgagcggtgaaagcaagaccagcacaacttcatcattta

SEQ ID NO: 213579 - DNA, 550 bp, Glycine max
gcctgagccaccaccagagggtcgcttgcccgatgccactaagggttctgaccatttgagagatgtgtttggcaaagctatggggcttactgaccaagatatcgttgctctatctgggggtcacactattggagctgcacacaaggagcgttctggatttgagggtccctggacctctaatcctcttattttcgacaactcatacttcacggagttgtagagtggtgagaaggaaggtctccttcagctaccttctgacaaggctcttttgactgaccctgtattccgccctctcgttgataaatatgcagcggacgaagatgccttctttgctgattacgctgaggctcaccaaaagctttccgagcttgggtttgctgatgcctaagcaacgtttaggggattgttgaagaggcatggtgcccataatatttctctaaaaaattgtatggacatggtttttaatgccaatgtgggctccgcagattttagatagcttttgaatgtattttgctggacgtgacgatgactgtgaagccgggtgtggttt

SEQ ID NO: 213580 - DNA, 517 bp, Glycine max
aggtccgaaagatcactatcattatcgctgaacaatgttatttaacaaaagtatcaaccaccaataaaagcaacaacccaactttccaatcatcgtcacgttcagccaaatacattcaaaagctatctaaaatctggggaacccacattggcattaaaaaccatgaccatacaattttttagagaaatattatgggcaccatgcctcttcaacaatcccctaaacgttgcttaggcatcagcaaacccaagctcggaaagcttttggtgagcctcagcgtaatcgggaaagaaggcatctttggccggtggatatttatcaacgagagggcggaatacagggtcagacaaaagagccttgtcagaaggtagctgaaggagaccttacttctgaccactcaacaacttcgtgaagtatgagttgtcgaaaataagaggattagaggtccagggaccctcaaatgcagaacgcttcttgtgtgcagcttcaatagtgtgacccccagatagagcaacga

SEQ ID NO: 213581 - DNA, 605 bp, Glycine max
atttaaacttcttctgtctctttctcagttctctgtttaatttcaagttcaagctggtgaaatcttggattagtgctcccactctcctatctggtataggacttcgtgggtagacttttctatttctctcctttctttcactctcttcttctcactgatccgcattgccgttcaaagtggtcttatttgaaaaacacttgggcgttggtgcaaatgtttgcttcgttaattttctctggggacaacaggctcactgagaaaacaatttttacttgcagagatttggacatcttggttgtttattatacaatagcaactcaatttagaaaatttctaccgcattacattaggtggcatctgtataccttgttgatctacattctcccatcttttctcactgctgaaattaaatataagcggaatttgagtaatattcatatttccggcttattttacgacggcagatacaaattctggactaaacacgagaaaaatcttgctttgacagaagaggaaaagatggaggtgattagaaatagaggcattcctgctgatgttcttgcaaagcgagctcatgaaattgaaaacatgttgctcatgaaagc

SEQ ID NO: 213582 - DNA, 432 bp, Glycine max
aaaataacacgcacttcacacatcattacgacaattaaaagaggtggggaaattttcaaatcgaccgagcattctcaacaagaggggcatgtcttaattccctttattgaattaaacgaacgaccaaacgaatgaaaaccccaattccagatcatgccgaggattccgcattttcagaaaatctggcagtcgcctgtggaacagaaaaagctggcataagagtattaccagcaatttcaaaatcttgggaaattcccaagagaatatcaaaaactgtaaactgtttgggattgtcaataaggaaactcaagtgccatgaagtttgatttgcccactcagaactccacatttcaaaaccattattaggaccacatacctctattgggaagatcaattcccacgaatgtggttcccattttgtccacttacatg

SEQ ID NO: 213583 - DNA, 599 bp, Glycine max
  unsure (1)..(599): unsure at all n locations
agaccagaccagaccgggtatcagacacaactcaagcaaaagaaataagaagcagaaaaatggaaaatggcagaggcagattatactgttccattgagcgacattgctgcatcacgttctgactctgaatgataagagacaaacgcatagaccctgcgattccctttcctcaaatcttgcaacacccttacactagctacaataccaaatctaccaaaaagttgtttcaagtcttgaggccccgcactcctggaaagattgccaacatacaacttatgaggaccttcatagtatataactctcttgggtgatgagttcattgtttcaagattccttctcttgggattcatctcagctgaaaatctaacccgcacttcacgcccaccaaaatccttgagtcgtaaaaaaccgaaatttcagataaaacagcagccagaagatatgaacgaaatagaagcagggagtgggagtgactaaccgatgcatccaatgccgcaattgctnttcttgccgagttaatagaagccattgtgacataagcactccctctactntcaccagtttccgcactccggcanacctgaaaagagaaatcacga

SEQ ID NO: 213584 - DNA, 639 bp, Glycine max
  unsure (1)..(639): unsure at all n locations
gctttgaatctccctgttgacatacatgggtttgcttctctgattacaaaaatcacttttggggagatggggaggttcgaaaaccatgttgtcaaaggaggcatcaagttgccaattgggttcaggttttgtcccaccgatgaagagcttttccttactacctcaagaagaaggcgtttgctcaacaattacccgcttcagtcatttcagagtttgacgtgtttcagactgagccatggaaacttccaggtgaattgagggaaaataggtacttttttagcaatagatcaaatggaaacatcaagagacctgctggttctgggtgctggaaatctgtaggcaaagaaaaacaaatcatccattcagagagcaatcaagttattgggatgaaggaaacactgtttttttgcaaagggtcccatgagacaagaactcagtgggtcatgcacgaattgcgccttgtagcttcctacccatgtcagatgccagtggcagattttgctgtgtatcgcatatttcagaanaacaagatgaagacaagaagatcacatgggaagaagccctctagtagcagcaaacttcagagacttngtgatgttaaagctagtttctttgacttcacttgtgattttaatcatg

SEQ ID NO: 213585 - DNA, 601 bp, Glycine max
aaaatctttccaatgtgagcttgtctttgccaagatgggaatcaaccccatcatgatgagtgctggagagttggaaagtggaaatgcaggagagccagcaaaactgatcaggcagagataccgtgaagctgcagacatgatcaagaagggaaagatgtgcgctctcttcatcaacgatcttgatgcaggagctggtcgtcttggtggaaccacacaatacactgtgaacaaccagatggtgaatgccactctcatgaacattgctgataaccccaccaatgtgcagcttccaggtatgtacaacaaggaagagaacccccgtgttcccatcattgtcaccggtaacgatttctcaacactctatgcacctctcatccgtgatgggcgtatggagaagttctactgggcaccaacaagggaagaccgcattggtgtttgcaccggaattttccgcactgatggtattcctgaacaggacattgtcaagcttgttgacaccttccctggccaatccattgatttctttggtgcactgagggccagagtatatgatgatgaagtgaggaagtggatttctggtgtggtgttgacagtgttggga

SEQ ID NO: 213586 - DNA, 622 bp, Glycine max
ttttcaaataaagtaaacattgttattcatatttatgtcacccgagaatcagatcctccattggaagagggatatagttacaaaccaataaaatcttcattctgtcctatggctagtgattgtggcatgtctgttttggttggtacaggagacaatttttggtctggactatatgtcatctcatctaccgttggctttgtgatattgctggctttgttgtatgtttactacgtaaccccatttcacatagaaacatggtggtacaggggactactatatgtaatctgcatggttgcaagtgttgttatctttggtggttctgtggttgcaatgtggcatatttgggaaaagcaaaattctttgaaggacaagtccaatgatacaaaggttgataagattcatcaaaatggctctttggctaccaaggatcaaagtcaagacagtagtattgcaaagtcaacggtcattcattatggttccaggccaaactttaaagaaatttatgactcgatatcagagaaatggcgccttgttgatgtgggtgtcatagtttgtggcccttaacacttcagacaagtgttgctgaagaaatcaggtcacacagtatgacaagacaacgcct

SEQ ID NO: 213587 - DNA, 502 bp, Glycine max
agctaacaattgtctctacatataccaacgtaagtacgtaacccagaaaatacctcccaattaaataggtctaaagaccctctaccccctcaccaaatatcccttttctatcactacaaaactgctggctgctttttagctctctgaaacagccaaaaaacagattaatttttttatgaaaggaacatttatcaaacacaagaattgcatttacaatcaatttccctcaattaagctcttcaacctattacgggcttcttcagacagactgcaagttttgaatcttcgcctttggggtggacatgattcaacaatgctttcaatgggcgacaagtatacgacaatcacagtgagattatctgatgtatttaggcgcaatgcttccttgactagctctctggcacattgctgtgggtcatcatgccttcttaatcctcgacgaacaagactaactgcaacttggctagacattacatcccaaatcccatcacatccaatgatc

SEQ ID NO: 213588 - DNA, 557 bp, Glycine max
agccatgaagatcgttcggagagacctagtacctaatggacctggcagcgttaagatggtggcagtggattcggatgatctctggtttgcgtataacttgatagctcccggagactctgtcatggccgatactgtcaggaaggttctaagagaagctgctaatggcggacgggaagcagaacgcgtcaagctcaaattggaaattaaagtcgaagagctttctgattatgacaaagaaggttctattttgcgtgttcgtggaaagaacattttggagaatgaatatgtcaagattggagcatttcatactttagaactcgaactgcagcggccgtttgtgctcagaaaggatgtttgggattctttggctttggaggtactacagcaggcctccgatcctggtgcaagtgctgatctagcagtggtgttgatgcaagaaggattagcccatatcctccttgttggtagaagtatgactgttactcgttcgcggatagaaacatcaattcctcgcaaacatgggcctgcaattgctggttatgagaaagctttggata

SEQ ID NO: 213589 - DNA, 514 bp, Glycine max
aaggggaaaatatacaaagatatttaaccactcaataaagtctgatgtaatactatgaattttacactagcattgtgtggtttgtaatacaagaccgattggattactcagggactgttgcaacttgcaacatcagctgagtatttaagaatagtaaaaaacagagagagccatggccaacattaacatgcttgaccaacattgtccatcacatctgaatgtcttcaagatcagggagaggaaaccgaagaatcgcagcaatgccacttatctgggctagttgttcttcagagacatgcatggacgaaaatacatggacagagccccctgaatccttaacagagttgaccaagttaacatacttttttcttgttgctatatctgaattcctgaaaagctcatccgtaatgagaagcatttgtacagctagtcgttcattggcaacctcaacatgtttcattccataacatgcacgtgatggatcttttgaaagcatgtcgtagaaatccttcat

SEQ ID NO: 213590 - DNA, 483 bp, Glycine max
gcgtcgtctccaatctgcgctgcctacgacaactacctccgcctccctgagctcagagccctctgggcctacaacgacttccctaattgggccaacgagcccatcttaaagcccaccttacacgccctcgaaatcacctttcgcttactcgcagccgtggtatccgacccgaggccgtacataaacaagcgcgagtggacccggcgggtggagtctgtcgccacggaccaaattcagatcatagctatgctgtgtgaatatgaagaagaaaaccccgagacacgtggcacgacgccaccggtgagtgacattaacggcttcatcgctcaaagcagaagctacagcgaggagagcctgctcccgcgcctcgccacgtggcacaaatacaacgacgtggcgcggagaatcctcgattcggtagagtaccagatgatgaggtgcacgcacaccttaggtttaggagaggcgaatctcgcgggtaag

SEQ ID NO: 213591 - DNA, 526 bp, Glycine max
gtgtgagtaagtatatatgactaggaattagttgattaattgtttaattaactagcagggaaccccattttgattattattttcccaataataagcgagaaaggtcttggcagcatctaagctagggaaataagtgggttcaaggaatatctgagtgaacccattatcggcctcggagctccccatcataaccgccacaacctgcttataggcgtagaagaacctcttcatcgccacctcaatcgcctgcatcccctgcaaaacatgaaccttctcgaacccgtaccttttctctttctccgagtaaaccttcatcgccggctgcatcatcccgggcccacccgtggggtccacctccacctccaatatctccggcaccttatgcctcagatccctacacatcctaggcaccttcacgagcttcctcgacctgaagcaaaacgccaccatttccccgcaatttctcatcatccccaactgcttcttcaacctcaagaaatcctccggatccatcatcacgtgcacg

SEQ ID NO: 213592 - DNA, 492 bp, Glycine max
aatcaacatcagttctattattcctttgcgtattggaaataaaataattcacatatggtaatgttgttggcttccgccatgcactttaatacccataattacacagatagcagggcatctattatcatgataaaatcaaacggagaatctctccagagagcttgaatgatttttctgtttcttccagacagtggtccttttcttcccgactccaaggttcagcaactttattcaacttgtctctcacattctgcaacaatcgtggaaggtcatcatcccatttgtagaactccaacgccttgttgttaagtaacttttcagcaacctttttcccaatcattcgaccaccagctgaatgagcaaagtagatattgtaaaaatggcaaatgaatgcttggggatccttcacagataactccttaagatattgagcataggtaagaccaggagaagaaggttcaagaatggtataaccttgctccttgaaccact

SEQ ID NO: 213593 - DNA, 569 bp, Glycine max
  unsure (1)..(569): unsure at all n locations
gttccctgtatccactcctcgtcagggaagatctgaagcagtgctagctgctcacgtcctgtaatggacgcatactcctccggcgaagaagtggttgttaagactagaaaaccatatacaatcactaagcaaagggaacgatggacagaggaggagcataataggtttctagaagctttgaaactacacgggcgagcatgggagcgcatagaagagcatataggaacaaagactgccgtgcaaataaggagtcatgcacagaagttctttacaaagctggagaaagaggcccttgtaaagggtgttccaattggacaggctcttgatatagacattccccctccacggcccanaagatagccaaacaatccttatcctcggaagaccaggattggtaccacatcattacataatggagcaaaggatggaaaactcaatttagttgaatcttcacatgtttatcaagcactggacttgaaaaaagaaccacttgcagagaaacatgatttagacgaagggctaacaactgtaaaagaaaataatgatgagaaccacgctaagttttactc

SEQ ID NO: 213594 - DNA, 488 bp, Glycine max
tttaatttcttttctttttctttttgtttttatatgttatttgggatctagttgcatttatggatttatggtttcacacaacatattattgtaagatattggattatttctgtcaaggaatccaaaatggcattctaatcgaactttttgaacgtgtgcaactgtaacaatcattctggagtaggcaacaacataaaacatttggcctcgtgctgagatgacaagctatcttcaggcctagagaacggacagcctgagaccagtatgatatccagacactggggatctcatgggtgacccaagggtcagataaagcatcaacccatgggcgagcaaatctatcttgcctgtcaagtgcccaagaccggtatctctctccaggctgattgaagaaggactgccttctaattccacactgttcacgccttccactgcatatagcaggacggatggggaacctttcttgatgacgaacaagatcatacctt

SEQ ID NO: 213595 - DNA, 499 bp, Glycine max
ctgaatatgtctgcttcttttctatggaaacccttttgacttttccaaagtgtacatgatttacttcaggtttactatgttgctggagagaatcttaaacggatacagtgggaaaaagtttgaagttcaaatcccatagctcaaaagtaccattaacgaaatcataatgtgctcctttcaaagccagagttttgttaacaactgcatctctaacaaatggatatgttaataggttaccaagtgatacgttcacagcttccttctcacagttagtacattgctctgagaaacttaagtcacttggtcctgctttaaccttggactttgctggagtacaaatttggacccattgctctatgaattcacttgcagggggcccgtcatctgggatagacatgagcccctttatacctccacagcaactgtgtccaataactacaatattctccacctttaaatgcaatactgcatattcaatggcagccccagctcctgaata

SEQ ID NO: 213596 - DNA, 601 bp, Glycine max
cttaactccaattctagaataaaattcctattcttcttctcatttcaactctttgcaattgcgatctttcattccttttttttactcttggtaagcgtagttcggtgttggagaaccagcttccagttccagaatactgctgaacagaggtcggcttcgctttattgagactcagttgtgtttctactaggttatcttctctgaattgcaaatgaatgatcgttgaaaaaccatgaagaaggtgaggagaaagatcggcaagtatgaggtgggccggactattggcgaaggcaccttcgccaaggttaagttcgcaagaaactcggagacaggggagagcgtggctattaaagtcatggctaagaccaccattctccagcacagaatggctgaacagattaaaagagagatatccattatgaagattgtcaggcatcctaatatagttagattgcacgaagttttggctagccagaccaagatctacataatccttgaatttgtaatgggaggggaactatatgataaaattggtcagctgggagagctttttgaaatgaatctaggcactactttcacaacttatagacgcagttgatca

SEQ ID NO: 213597 - DNA, 568 bp, Glycine max
gcccactgatgtgcctgatacaggtttgctttgtgatctcctctggtcagacccaagcaaagaggtccaaggttggggaatgaatgacaggggagtttcatatacatttggtgctgataaggtctcagagtttcttcagaaacatgatttggatcttatttgtcgtgctcatcaggtggtggaggatgggtacgagttctttgctaaccggcagcttgtaacaatattttcagcacctaattattgtggagagtttgacaatgctggcgctatgatgagtgttgatgagacactaatgtgctctttccaaatattaaagccagctgataaaaaagcaaagctcaactttggaagtactactactactaagccaggaaactctccagcaggcataaagtccttcctgggtacaaaagtatgaagttaattttggtgaaattgatgccacaaccgtcagcttggtcttgaagatgtaatagttgaagaaaaggaaagtagagttccatttaatcatgatattttggaattggtaaaacaaagggaaacaccatcatgaactatgtagact

SEQ ID NO: 213598 - DNA, 611 bp, Glycine max
agccatgaagatcgttcggagagacctagtacctaatggacctggcagcgttaagatggtggcagtggattcggatgatctctggtttgcgtataacttgatagctcccggagactctgtcatggccgttactgtcaggaaggttctaagagaagctgctaatggcggacgggaagcagaacgcgtcaagctcaaattggaaattaaagtcgaagagctttctgattatgacaaagaaggttctattttgcgtgttcgtggaaagaacattttggagaatgaatatgtcaagattggagcatttcatactttagaactcgaactgcagcggccgtttgtgctcagaaaggatgtttgggattctttggctttggaggtactacagcaggcctccgatcctggtgcaagtgctgatctagcagtggtgttgatgcaagaaggattagcccatatcctccttgttggtagaagtatgactggtactcgttcgcggatagaaacatcaattcctcgcaaacatgggcctgcaattgctggttatgagatagctttggatagttctttcagatggttttgcagctttcttgaacatatagatttcatgtgggtcg

SEQ ID NO: 213599 - DNA, 533 bp, Glycine max
gctgctcgaattattccggtcacagctactgtcggggccgccttttttttttttttttaggggaaattacaaagatatttaaccctaagaagtctgatgtatctatgaattacactacattggggttgaatacaagaccgtggattctcaggacttgtgcacttgaacatcagctgagtatttaagaatagtaaaaaacagagagagccatggccaacattaacatgcttgaccaacattgtccatcacatctcaatgtcttcaagatcagggagaggaaaccgaaaaatcgcagcaatgccacttatctgggctaggtgttcttcagagacatgcatggacgaaaatacatggacagagccccctgaatccttaacagagttgaccaagttaacatacttttttcttgtggctatatctgaattgctgaaaagctgattcgtaatgagaagcatttgtacagctagtcgctcattggcgacctcaacatgtttcattccataacaagcacgtgatggatcatttgcaagcat

SEQ ID NO: 213600 - DNA, 306 bp, Glycine max
tggacgggtggtaacttgcctgcccaacaccaagatactggaaagagagtccaattgtctgacaagtacttgaacgaggcctggactgggaaatgctaactacgatgctgtgaacagaggaactctctcacaatcttgaatcggaggcagaggcaacgtgtaccgtaaatgtgtacgtgactgagagatgtgctgacccacgctatcaaagttgagatgggactctgcgttgacatgcttagaattctgactggcttatgggcatagagaatatgccgagctggagacgataacactatattgatg

SEQ ID NO: 213601 - DNA, 305 bp, Glycine max
gaaaaatatagtaaaatcatctcaaacttggcatcttctctttgcacctaagacattgagaattctaagaatgttacacgcaagtcccatcacaacttctagcacttggatcagcacaaccttcaggaacagaaatatttacttgccaagtttgctttgcctccaattcaagattggaagaaagttcccctgttaatagcatcctcgttagcatttccaagtgcagcctcgttcaagtacttgtcagccaattggactctcttgacattctcttgttcttggacaagcatgttaccatacgtgaa

SEQ ID NO: 213602 - DNA, 448 bp, Glycine max
agggttaatatattgaaattgatgattaaatacaagctttaaatccaagaatacaaacaacaaattatttccttcctccaactcccaatacaaacttttatagcagacatgagattattccataaaataaaaatttgatacaaacttacaagtgtctatatggcttcataggcatctgctgcaggggctgggggagcatcagctagagcagataacacaacaaaggccccaaataagattgtgataatggcagtgaaattgacaagcaaagccttagaaccatatttgtccaatcctgagttctcaaggaaagtgagcttttccagaaacccaagagcagcagtgcccacaggcaagacaaattcaaacaggccaaatagcgcgtgccaaggaagtgaggcccgtttaatggctggagtcccaccagggaagaaaaagatcacaaacc

SEQ ID NO: 213603 - DNA, 531 bp, Glycine max
caaaaaaatgggtggtttagctagcaatcttcctctaattgttatggtgggtctgcaaattcattatgcagcacttgctatattcacaagagccgctttgttagatggattgagtacgacggtctttgtagtgtacaggcaaggcatagccactttggctttggcgcctatgtttttctctcctaagcggagacaatcagtgaaagattctttgggattcaggagcttctttttgatgtttgtgaccgctcttgttggagtcacagcaaatcagaatgcatactttaaaggtttattttatgcatcctctactgcagctaccgctatgagtaatctgataccagcattaacgtttgtaattgcggcaattgcgggatttgagaaagttgacataagcttaagaagcacggccaagatattagggacagtttgttgcgtcgctggagccttaaccatggctttggtcaaaggacagaagctgttacacacagagttccttccttctatacatcttactggcagtgaaggtga

SEQ ID NO: 213604 - DNA, 565 bp, Glycine max
  unsure (1)..(565): unsure at all n locations
caaaaaaatgggtggtttagctagcaatcttcctctaattgttatggtgggtctgcaaattcattatgcagcacttgctatattcacaagagccgctttgttagatggattgagtacgactgtctttgtagtgtacaggcaaggcatagccactttggctgtggcgcctatgtttttctctgctaagcggagacaatcagagaaagattctttgggattcaggagcttctttttgatgtttgtgaccgctcttgttggagtcacagcaaatcagaatgcatactttaaaggtttattttatgcatcctctactgcagctaccgctatgagtaatctgataccagcattaacgtttgtaattgcggcaattgcgggatttgagaaagttgacataagcttaagaagcacggccaagatattagggacagtttgttgcgtcgctggagccttaaccatggctntggtcataggacagaagctgttacacacagaggttcctttcttctatacatcttactggcagtgaaggtgacgattggctgctgtgatgtctattgctcttagc

SEQ ID NO: 213605 - DNA, 390 bp, Glycine max
atggaaacccggtttacttttttcaaagtgtcatgattttactttatgtttactatgttgatggggagaaaaataaacgggagcaacaggaaaaaagttcgaagcaaaaatcccatagctcaaaagtaccattacccaaatcgggatgtgctcctttcagagccagagttttgctaacgcccccatctataacaaaaggctatgttaataggggaccaagtgatacccacacagggggcttctcccagaccgtacaaggctctgagagactcaagtcactcccccctgctataaccttggactttgcccgagtacgggggcggacccattgctctatgaaaacactggctttggtccccccaaaagggaccgacatgagccccattatac

SEQ ID NO: 213606 - DNA, 499 bp, Glycine max
ctgaatatgtctgcttcttttctatggaaacccttttgacttttccaaagtgtacatgatttacttcaggtttactatgttgctggagagaatcttaaacggatacagtgggaaaaagtttgaagttcaaatcccatagctcaaaagtaccattaacgaaatcataatgtgctcctttcaaagccagagttttgttaacaactccatctctaacaaatggatatgttaataggttaccaagtgatacgttcacagcttccttctcacagttagtacattgctctgagaaacttaagtcacttggtcctgctttaaccttggactttgctggagtacaaatttggacccattgctctatgaattcacttgcagtggtcccgtcatctgggatagacatgagcccctttatacctccacagcaactgtgtccaataactacaatattctccacctttaaatgcaatactgcatattcaatggcagccccagctcctgaata

SEQ ID NO: 213607 - DNA, 589 bp, Glycine max
  unsure (1)..(589): unsure at all n locations
ctcttgtgttgttgccttcatggccaagccagtgtccattgaggtatggaacccaagtggcaaatacagagttgttagcaccaaaccaatgcctggaactcgttggatcaatcttctcgttcaaaatgatgttcgccttgaaatatgtaccgagaagaaaacgattctgtcagttgaagacatcattgctttgattggtgataagtgtgatggagttattggacagctgactgaagactggggagaacagttgttctctactttgagcaaagccggaggcaaagctttcagtaacatggctgttggttataacaacgtggatgttgatgctgcaaacaagtatggtgttgctgttggaaatactcctggagtgctcactgagacaacagctgagttggcagcttcattgtctttggcagctgctagaaggatagttgaggcagatgagttcatgagggcaggattatatgatggatggctacctcatctatttgttggaaacttgctcaagggacanactgttggtgtaattggagctggtcgaattggatccgcttatgcaagaatgatggttgaggggttcaagatg

SEQ ID NO: 213608 - DNA, 528 bp, Glycine max
  unsure (1)..(528): unsure at all n locations
agtgtagggacataaggtataacttcatttatgtttaattaatgtttgaaatactacaaacacatgatgctattattaacctgacagtctttatatgcacagtgccatcagcaccccacatacacaaaaaaaagaacagactagccacagagcccaactcaacagacaaaaattggtcatttgtgcaattgaaggcccttgtaggatagaaccatgtatgtttatagctttgaagttggcaaacccagggcttttgcattaacaatgcttggggatgcagctggtggttgagcattctcattgaggaatggttcaaccctattggcatcaaaccaaactgggtaccctttgatcttccccagcacgtttagagctgctagtgtagccattccctcacgagtccacttggaggcagatgcaatgtggggtaccacaatggcattcttcaactctgcaagcccgggtttcatgtagggctcttcctaaacacgtcaaggcctactcgaaacatcnggttctgttttaaat

SEQ ID NO: 213609 - DNA, 555 bp, Glycine max
gtttggtggggaatcgcccttaacatgatcgcatattttgttgcttctcatgcagcaggggcgtgctggtacttgctggggatacaaagggcagccaagtgtctcaaagtgcagtgtgcgaaaacaagtggttgtggcatgaaaatcctgtcttgtcaaacgcctatatattacggaagcaacagtttgctagttagggataaggcaaggttggcttgggcagagaacagggaagtgagacacacatgcctaaatggtcctgacagctacaactatggagcttatagatggactgttcagcttgtcacaaacgataatcgattggaaaagatacttttccctatcttctggggcctaatgactctcagcacttttggaaacctagagagtacaactgaatggctagaagtagttttcaacatcattgtgctgaccagtggccttcttcttgtcactatgttgattggaaacatcaaggtatttttgcacgcaacaacgtcaaagaagcaagcaatgcaattgaagatgaggattattgaatggtggatgagaaaa

SEQ ID NO: 213610 - DNA, 537 bp, Glycine max
  unsure (1)..(537): unsure at all n locations
gtctttgccaaaatcgcatcactcgtcgcccccaattcacattccctcccccaccccctttctctccaggatctctcctcgtaccaccgccacctcgaaccacccctccaaggcggaacaacctcgtcctcacgcaacaaatgcctcagactctcactctacctcgccaccttcctgttcctaacttacctactcttcctcctcctctactcctactgggcccacgcttcctccgccaagtactacgttgtcctcgactgcggcagcaccggcacccgcgtctacgtctaccgcgcctacgtgcgcttcaaccgccacaccactctgccaatcgccatcaccttcctgagaaacccctcccacaagaagcctcccaccggccgcgcctacgatcgaatcgaaaccgaacccggtatcgataaattagtaaacaacgtgtctggtttgaacaatgcactgaaacctttgctcaggtgggccaagaagcagataccagtgcgtgctcacaagtctacattnntgttcctttatgccact

SEQ ID NO: 213611 - DNA, 352 bp, Glycine max
  unsure (1)..(352): unsure at all n locations
gagttgtgtacttaaccataaacaaaaatagtctccaagactataaaaacattacattttagacaaattagtcttccacttcatcgtccgtcaacacctactgtaactgctggtgttgctgcctaacaagtatcatattcactgcanacatcttagtaggagtagctattgacgaacaactccttcttggcttgctcggattcaccctcaccagtgtacttcccaagctgagcgagcgagttggacttggcacggaatgcgagtgcatgttgagctgccttcacgttgtctgggcagtctccccatgtctccaaggcagtgttatggcgacccttgtaagttccaacgaata

SEQ ID NO: 213612 - DNA, 614 bp, Glycine max
  unsure (1)..(614): unsure at all n locations
gacgatctcgccattatgctggcactaggtatttgaggcgaggtgtaaatgacaagggtagagtagctaatgatgtggagacagaacaaattgtatttgaggatgttcctgaaggtcttccagtccaaatatgctctgttgtccagaatcggggttcaatccctctcttctggtcacaggaaacttcacgtctaaatcttaagccggatattatattgtcaaagaaagatcagaattatgaagccactagacttcactttgaaaatcttgtcaaaagatacgggcatcctgtaataattttgaatttgattaagtcacacgagaggaaacctcgagagtccatacttcgttctgagtttggtaaggctattgatttcattaacaaagatttatcacaggagaacaggttgaggtttcttcattgggatcttaaacattttcagagcaaagcgacaaatgttntgctacttctgggaaaagtggctgcatatgctttgacagtaacaggttttttatattgtcaagtgccaccaactcctagacctgaagactgtataaaatgtccatctattagctttcatccacaagacaagctgatgtcgacaacaaagatg

SEQ ID NO: 213613 - DNA, 565 bp, Glycine max
  unsure (1)..(565): unsure at all n locations
caaaatattgcagaatcaaaagtagctctagtatatggtcaaatgaatgaaccgcccggagctcgtatgagagttggtttaactgccctgactatggcggaatattttcgagatgtcaatgaacaagatgtacttctatttatcgacaatatctttcgcttcgtccaagcaggatctgaagtatctgccttattgggtcgaatgccttctgctgtgggttatcaacccactcttagtactgaaatgggttctttacaagaaagaatcacttctaccaaagaggggtccataacttctattcaagcagtttatgtacccgcagacgatttaaccgatcctgcgcctgctacgacatttgcacatttagatgctactactgtactatcaagaggattagcggccaaaggtatctatccagcagtagatcctttagattcaacctcaactatgctccaacctcgaatcggtggtgaagaacattatgagactgcgcanagagttaaacaaactntacaacgttacanagaacttcaagacattatagctatccttggcttggacgaat

SEQ ID NO: 213614 - DNA, 490 bp, Glycine max
aggtattccgatattcggacgcatcaacttgttatgaaatcacattgatagcctctactcgtgtcctagctcgtctaagagctagatttgcctcaattgttggtctattgccttccgccttattcaaattagcttctgctatttcaagagtttgctgtgcttcttgtggatcaatgtcactacccttttccgcatcattgactaaaacagtgatctcattattggctattctagcaaaaccgcccatcagagccatcgttaaccattggtctttaagaagacgtattgtcaaaatacctatatctacggctgtggcaataggcgcatgatttggtaatactacaatttgcccgctattagtagataaaatgatttccttcacttgcgaatcccaaacagttcgattgggggtcagtacacaaagatttaaagtcatttcttcaaattgctcttcatttctaagttcgtagctttcgcagtagcttcatcg

SEQ ID NO: 213615 - DNA, 500 bp, Glycine max
  unsure (1)..(500): unsure at all n locations
gacgaagtgaggaagtggatttctggtgttggtgttgacggcattgggaagaagcttgtgaactcaaaagatggacctccaacctttgagcagcccaagatgactctggagaagctcttgacgtatggtaacatgcttgtccaagaacaagagaatgtcaagagagtccaattggctgacaagtacttgaacgaggctgcacttggaaatgctaacgaggatgctattaacaggggaactttcttccaatcttgaattggaggcaaagcaaacttggcaagtaaatatttctgttcctgaaggttgtgctgatccaagtgctagaagttgtgatgggacttgcgtgtaacattcttagaattctcaatgtcttaggtgcaaagagaagatgccaagtttgagatgattttactatatttttcatattggactgtcttcctctataattttgagttaaagtgtccacttaaattgaatntggtgccttttccttttgtcct

SEQ ID NO: 213616 - DNA, 448 bp, Glycine max
aggacaaaaggaaaaggcaccagattcaatttaagtggacactttaactcaaaattatagaggaagacagtccaatatgaaaaatatagtaaaatcatctcaaacttggcatcttctctttgcacctaagacattgagaattctaagaatgttacacgcaagtcccatcacaacttctagcacttggatcagcacaaccttcaggaacagaaatatttacttgccaagtttgctttgcctccaattcaagattggaagaaagttcccctgttaatagcatcctcgttagcatttccaagtgcagcctcgttcaagtacttgtcagccaattggactctcttgacattctcttgttcttggacaagcatgttaccatacgtcaagagcttctccagagtcatcttgggctgctcaaaggttggaggtccatcttttgagttcacaagct

SEQ ID NO: 213617 - DNA, 362 bp, Glycine max
  unsure (1)..(362): unsure at all n locations
cctgtggttggattaaactcaagagcagtggattatcatcattatcacatatgatgaatcactattcaataggtgcataaactagatgaactggaatactaactgatgtacaacggaactgaatatagatgtcattccaacacactatgctgnggcatcaacttgttcttcaacagcctgtgatgctggcagaagggtgcacaaacaagtagctgataccgatcacattatcaacgggaactacggtatgccacaactttgaagcacggagccaaggagctgggaaagctgcatactgcctggagtatggatttgtccatgcatcatccattagcagtgctggtggacgatgggcgctctta

SEQ ID NO: 213618 - DNA, 600 bp, Glycine max
cggctcgagcgcactgaacgaagatagaaaagagttttagcatcgtgattcgtgacctatcaatggcgcagacgacccatcccatggacatcgacgaccacacttacaccgccagtcctgacaagggcaaaagtgtcgtcttcgccggaaaccctcccgccgccggcaaggccattccgtgggtcgaaaaataccgccctcagtccctcgacgacgtcgctgctcaccgtgacattgtcgatacaattgataggctaaccactgagaacagattgccccatcttctgttgtatggccctcctggcacgggcaaaacatcaacgattcttgctgtggcacgcaaactgtatggttcacagtaccaaaatatgattttggagctcaatgcatccgatgatagaggaattgatgtcgtgcgccagcagattcaagattttgctagcactcagagcttatcatttggtgttaagtcctctgtaaaattggtattgttagatgaagcagatgccatgacaaaggatgcccaatttgcgctacgtagagtgattgagaaatatacaaaaagcactaggtttgcacttatctgtaatcatgtaaaca

SEQ ID NO: 213619 - DNA, 444 bp, Glycine max
aaaacagaagatatctacttcagaattttggaaaggtacttgaagctttaaaactcatcttaagttaaaaaagattgacacagttactatctttacacaaattaagatccttccaatcccattatccgtagtgacatgcccaggaaatcaaacaagccaggccctagtagtatgtgaaagtaatttttcagaagtaggctatgtagcagctgcaaccagtgcagatctagcacgtgtaaaagaagcaataaccgatccaagctgaagcttatcgttgcacccaaaacttaatctgtactctatatctgccaaatcattcatcaactgtactcgcacagctgaaggcatcttaatcgtaaaaacaaacattgtcacttctgtgacaatatcaatcagggccaacccttttcttggcttcatttcatctaatcttttaaagctatc

SEQ ID NO: 213620 - DNA, 567 bp, Glycine max
cggctcgagcgcactgaacgaagatagaaaagagttttagcatcgtgattcgtgacctatcaatggcgcagacgacccatcccatggacatcgacgaccacacttacaccgccagtcctgacaagggcaaaagtgtcgtcttcgccggaaaccctcccgccgccggcaaggccattccgtgggtcgaaaaataccgccctcagtccctcgacgacgtcgctgctcaccgtgacattgtcgatacaattgataggctaaccactgagaacagattgccccatcttctgttgtatggccctcctggcacgggcaaaacatcaacgattcttgctgtggcacgcaaactgtatggttcacagtaccaaaatatgattttggagctcaatgcatccgatgatagaggaattgatgtcgtgcgccagcagattcaagattttgctagcactcagagcttatcatttggtgttaagtcctctgtaaaattggtatttgtagatgaagcagatgccatgacaaaggatgcccaatttgcgctacgtagagtgagtgagaaatatacaaaaagca

SEQ ID NO: 213621 - DNA, 523 bp, Glycine max
aaaacagaagatatctacttcagaattttggaaaggtacttgaaactttaaaactcatcttaagttaaaaaagattgacacagttactatctttacacaaattaagatccttccaatcccattatccgtagtgacatgcccaggaaatcaaacaagccaggccctagtagtatgtgaaagtaatttttcagaagtaggctatgtagcagctgcaaccagtgcagatctagcacgtgtaaaagaagcaataaccgatccaagctgaagcttatcgttgcacccaaaacttaatctgtactctatatctgccaaatcattcatcaactgtactcgcacagctgaaggcatcttaatcttaaaaacaaacattgtcacttctctgacaatatcaatcagggccaaccctttccttgtcttcatttcatctattcttttaaagctatctgcaaattgttcatttagaagccagtaagatattagctcaatgtcttttggcaatggatttccagtgcacaggtaaaca

SEQ ID NO: 213622 - DNA, 501 bp, Glycine max
acagccttgaacttgaactatcgtgtcttcttggctttctctgttcaggatcaacatggatattgtatcacgagctttgctatttccgttggctatacttgtgctcatattaagcacaccttgctcaggtgcttttgggaagagtggaactaatgtgaaaacagctatttttctgtcccccaagtttgaacttggaccaggatcggtagccaataaatatgattatgacgctgattttccaagaggtcatatagcacttaagagtttcaatgctgaagtagttgatgaagcagggaaccctgtgcctcttcatgaaacttatctccaccactgggttgttgtaagatactatcaacctaaatatgcgacgacacacacaaactatgatggacataggatacttcacaactctgaccatatatttgcgaggaacagcggcttatgccagagagatactctaggacaatactatggccttggatctgaaacacgaggaacagg

SEQ ID NO: 213623 - DNA, 511 bp, Glycine max
acaacaaacatgatatatatagtattacatatcacacaaccataataagcaagactggtttaagacaaacattacaaaccctcaccaatacaaataattgataatcacattactacaatccttaaacttgaaaatatgctctttgccggttcttgcgtgtgttgtcctattgctgccgaatatgagaagtatatgttccatcgatatgtatttctgtatttcttttaaccgtgatacatactgtgataccatcgatatgacactcaacttatatttgcatctcacaacttatctatcaatgaattatactatttatattcataaaaaatgaagaacgagaagaatatctgaagtgttggtgtggaagctgttctgccaccaataggtagaaaagccccattactccagtgtggccacggctgctgctgtagttagactctagagttatagtttcaccatcaattatctttacagaacctggttgaggataacatgtgctcattcctacaat

SEQ ID NO: 213624 - DNA, 597 bp, Glycine max
cctccttaaaatattactttctcttctaaatcgtccttaaagtaaacaaattatataagtaatccctcgagtattaaaaatcatgctaaatagtctttcaagcatcgaacaatccttcaaactagttcctggaagttagtaaaaaatatcaaagtagggattaaattgatgaacattcaaaataccttagggactacttatataatttcattacttcaaagactttagagaaagagtaatacttaaaagaccgaattgatggtttattcgtttcccaatctattcatgtggatttgtcttcattcccaaatgctgggttgtgtctactgtctagcggatctattcaatgtcctttatagcatcctttgcaagtcgtgtgacatatgcagcagctaatgcagtggccaacagtcccagccccagtgttagcaactgactgtttcctccaaatatattactaagttcagattcatcttgaattattgctcttccaaaagcaccagcactgacataagcccatgttcctggaagcatccccaaccaacttcccaatacatatggaataaacttaacagatgttaatccatataaataatt

SEQ ID NO: 213625 - DNA, 600 bp, Glycine max
  unsure (1)..(600): unsure at all n locations
cggctcgagctttctctttctctccgacctagcgagaccgagcgatccgatcctaaccccgcgatgctccgccgcgcaaccacctccctcatctccggcgcctcccgccgccgcctctccaccgacgtgccggcgacgccggcggcggattccgtcttcgcggaggcgtggaagaaagtgagccccaacatcgacccgccgaagacgccgctggcgtacatgaagccccgaccacccactccttcgactctcccctccaaactcaccgtcaacttcgtcttgccctacgcttctcaattggccgcaaaagaggttgatatggtcattgtaccagcaacaactgggcagatgggtgttctcccaggacatgtagcaacaattgcagagttgaaacctggtgtcctatctgtacatgaagggaacgatgtgaccaagtactttgtcagcagtggctttgcattcatccatgcaaactctgtggctgatataatagctgttgaggccgtgccggtagaccgaattgatgtgaatctagtccagaagggtctccaagagttcactcagaaactggactcagccacaactganttggagaaagct

SEQ ID NO: 213626 - DNA, 527 bp, Glycine max
aaaaaatgaaacttttgtttctaatttcaaggtcttgcccaacatccttgagctagattgaagctgctgaaatattattttatcaagtccactttcaacacagaaattcaggatgaaaatgttcttttagcagactttgattacaccgagacaaatcaatgccacacagtggggggaaattgacaaatgcgaaaggcgagactcaacactacagtacttattattagcctgaaagagcagagttgagagcgctatggacatcaaccccaatctgagcttcagctgtctccaaatcagttgcggctgagttcagtttctgagtagaactcttggagacccttctggactagattcacatcaattcggtctaccggcacggcctcaacagctattatatcagccacagagtttgcatggatgaatgcaaagccactgcttgcaaagtacttggtcacatggttcccttcatgtacagataggacaccaggtttcaactctgcaatggtgctacatgtcctgggagaaca

SEQ ID NO: 213627 - DNA, 498 bp, Glycine max
tcaggattccttaaatgcaaagcttaatagaacaaaaactgaaaacccctggttcgtttttggtggctcatatgctggagcactcagtgcatggttccgtctcaagtttccccatttaacatgtggaagtctggcaagttctgcagctgttcttgctgtttataactgcacagaatatgatcaacagattggtgagtcagcaggtgctgtatgtaaagcagtattacaagaaactactcaactcattgagcacacacttgcatcctatggaaaggaactcatggcttcttttaatgcacatgatctcgataaagatggagactttatgtatctaattgctgatgctgcatgctgtagcatttccatatgcgcatcctgatgaggtttgcaagcctatggttgaagcacataatgctggagaggacttgggggatgctcatgcccaatacgttaaagagtactacattggaacctttggcgttaatgtgcacacttatg

SEQ ID NO: 213628 - DNA, 429 bp, Glycine max
aaatatataatgatcatgaaggatgaaaggagtgtatactaatttattactttattcatttcagtgcgtgggttaacatactagtgatcatatataactgctgccttctgggcactcagatagccacaagtccatatgttctgcaatctgatgccttactttgagaactgcatcaggtgaggagcagttcttctcattaccttcaaggaccaaaggagattgaggacatcctcgaaaatcagtacactgggcacaattgctacatgtgatggtgtcggaaggcagatcaggagatgaagtttgcttggacgcatgatgccaaggatcctgtgagccatttgcaaatactatgttcgaaccagcgatttttgagcctccgatgtataaattaagggcatcaaccataggaaagatgccctctacaagata

SEQ ID NO: 213629 - DNA, 270 bp, Glycine max
ttcgttttttatttttatcttttttttttttttttttttttgattctttttttgatcttcttatttagtttccgttgatatttgatccacacaaggaaaagcacattgccattcgatggacattgcgggcaaaccgaaaacgaccgggtcgacagatggcaagacaatagagctccgggggaagggacgctgccaacggaagaggagaggccaggcgcaaaaaggaagagtcccctagaatggcagaggcaaacagagcttttgcacatt

SEQ ID NO: 213630 - DNA, 404 bp, Glycine max
caaaagatggacctccaacctttgagcagcccaagatgactctggagaagctcttgacgtatggtaacatgcttgtccaagaacaagagaatgtcaagagagtccaattggctgacaagtacttgaacgaggctgcacttggaaatgctaacgaggatgctattaacaggggaactttcttccaatcttgaattggaggcaaagcaaacttggcaagtaaatatttctgttcctgaaggttgtgctgatccaagtgctagaagttgtgatgggacttgcgtgtaacattcttagaattctcaatgtcttaggtgcaaagagaagatgccaagtttgagatgattttactatatttttcatattggactgtcttcctctataattttgagttaaagtgtccactt

SEQ ID NO: 213631 - DNA, 404 bp, Glycine max
aagtggacactttaactcaaaattatagaggaagacagtccaatatgaaaaatatagtaaaatcatctcaaacttggcatcttctctttgcacctaagacattgagaattctaagaatgttacacgcaagtcccatcacaacttctagcacttggatcagcacaaccttcaggaacagaaatatttacttgccaagtttgctttgcctccaattcaagattggaagaaagttcccctgttaatagcatcctcgttagcatttccaagtgcagcctcgttcaagtacttgtcagccaattggactctcttgacattctcttgttcttggacaagcatgttaccatacgtcaagagcttctccagagtcatcttgggctgctcaaaggttggaggtccatcttttg

SEQ ID NO: 213632 - DNA, 560 bp, Glycine max
ggtcattggtgcgaaaatggcaaactctaattgaagcccatgtggatgtgaagacaactgataactacacattgaggatgttttgcattggatttaccaagagaagagctaaccaagtgaagagaacctgctatgcacaatcaagccagattagacagattcgtaggaagatgagggagatcatgaccaaccaggcaacatcctgtgatttgaaggagttggtccgcaagtttattcctgagattattggaaaagagattgagaaggcgacatctagtatttaccctctgcagaatgtgtttgttcgtaaagtcaagatcctgaaagcccctaagtttgatcttgggaaactgatggaggttcatggagattactcagaggatgttggtgccaaggtagacagacctgctgatgaaatagtggcagaggaacccactgaaattgttggagcttgatttcatgatgcattcagtttgttctaggttttctttttcttacgttatcattgaaaattaagttacaaacttctgtccaatgtttctgtgtaagccgagtgacac

SEQ ID NO: 213633 - DNA, 636 bp, Glycine max
ggattgcagaagctaaaatcacttacagttgcatcttgcaaaggagtaacagatattgggcttgaagctgtaggaaagggttgtccaaatctgaaaattgcacacctccacaagtgtgcatttctgtcagacaatgggttgatgtcattcgccaaggctgcttcatcacttgaaagcctacgattggaagagtgccacagaattacccaacttgggttttttggtgtcctttttaactgtggtgcaaaattgaaggctatctctttggtgagctgctatgggatcaaagatctgaacttggtgttgccaacagtatctccatgtgaatcacttcggtcgttgtctatcagtaactgttctggatttggcaacgcctccctgtctgtattgggaaagctgtgccctcagcttcagcatgttgaattgagtggacttgagggagtgacagatgcagggcttcttccactccttgagagttccgaggctggtttggttaaagtgaaccttagtggttgcacaaacattatccgacaagtagtttcatccttggccaatctgcatggttggactcttgagaatctaaaccttgatggttgcaaaatatcagtgatgctagcttgatggcaattgctgaaa

SEQ ID NO: 213634 - DNA, 582 bp, Glycine max
acttgctgactcgtcagcggccgacctttttttttttttttagcaacttggaatgagactgaaaattttatttatttcattacatttcataacatacagaacaaagggcaggtatgaacatcattagacaatataggaggagcagttgccaagttcaaaaaaatgaagccttaaaaaactaggacttggtcaaaataacaacccttcccaaagggacaaaaaggttgtggttatggcagacctatatagcttgctgccacagccaagcccctaaaaacaagacttcataaacaccgaccttgacaactgcaaccaccctaatgacagcacatgacactgaaacttctaacctgcccttcgagtaaaactgatacccaaacatcatgtgaagaacatagttcaaccacatgacacatttggtaaacaaagactgatacagtggtacaggtagctgtaaaaacttagaaaactaagacacacatggtggcaaaaccgatgcaaagccgagctaataacatcaggtgccaacaccagtaacaaagatttctaacttcagaacccggtagctatgttctcagatat

SEQ ID NO: 213635 - DNA, 610 bp, Glycine max
ggaaagtttgaatatatttagaaagattgtggatttggtggacatttgtcactctcagggagttgcattgcataacctgtgtccatcttatattaaattgtcgccatcaaaccagatcatgtaccttggtttacctgttcaaaaacagatggtggatagtgttgtaaattctgaagttgttcacttagataattcttttattagaaaaaggctgtcagagcaagtaacatttccctcccttgatatggggtcaaagaaaaaaaaatttaatgagaatgtgagagttactggtggtgacttgtgcctcgaaactgcaagtgataggaaacttcatagtcatacagttggatcacaagattattacaatgaatatgaggaaggtacccaattttctaaatataacattggaagaatgtctagcatccctcgcgtatctaatgcaggtcaaatgccattgacttcatgtgaaaaatttgaaaataaatggtacacaagtcctgagggaggttacacaacatcatcaaatatctattgtcttggtgttctccttttcagttacttggtcattttgactctgaaagaacacatattgcagccatgtctgatcttc

SEQ ID NO: 213636 - DNA, 585 bp, Glycine max
  unsure (1)..(585): unsure at all n locations
cttgagaggctttaagaatactgctggaattgagcctgaagatgttgcaaagcgcctcatggactacggttttcatgcaccaacaatgtcatggcctgtgcctggcacactcatgattgagcctactgagagtgaaagcaaggccgagttagacaggttctgtgatgctcttatttccattagacaagaaattgctgagattgagaaaggaaaggttgacattaacaacaatgtacttaagggcgcccctcatccaccatcactgctcatggctgatgcatggacaaaaccatactccagggaatatgcagccttcccagctccttggctccgtactgcaaagttctggcctaccacaggacgtgttgataatgtgtacggtgaccgcaacctcatttgcacccttctcccagcatcacaggctgttgaagaacaagcagctgccacagcataatgtgttcaaatgacaactattttcatttcccgttgtacataaactcttattcctattcatacagntcttgcacttgttgaatattgcttcatcatatgtgacaatgatgataatccactgctcttaagttt

SEQ ID NO: 213637 - DNA, 554 bp, Glycine max
gccataagtcccttccctattgtaatttctgccagcctcaaaaaagacttgctctgcctctgccactctctgagtaggactacactgccatggctgcctcagtctccactgttggagctgtcaacggagctccactgagcttgaacagctctggagctggagcttcagttcccagttcagccttctttggcaccagcttgaagaaggttattgcctcaagggtccctaacgtcaagatttcttctggaagtttcaaaatcgttgccgcggaaaaagagattgatgagaaacaacagacagacaaggacagatggaaaggtcttgcctatgatgtttcagacgaccagcaagacatcacaagagggaagggtttggttgattccctcttccaagctccacaggatactggaactcactatgcaatcatgagctcttatgagtaccttagcactggacttaaacagtacaacttggataacaacatggacggtttttacattgctcctgcttttatggacaaagcttgttgtcacatcagcaagaacttcatgacc

SEQ ID NO: 213638 - DNA, 519 bp, Glycine max
tttgtttttttttttgtctactttcattttttattttaaataccgcgactaatcacataaaatttgtgtttgttctttttatatttatattatttatatttttattctttgtacaatttattactagtatagtaatcgattccctaaatctatgaacccctccaactaaatccaataatttttttattttattattaatcaagaatttcgtgtatagctagaacggccctcacaaattgcaaatactaatttgttaagaattaatcgaattgaggctatagcatcatcattagctggaattgaaatatcggcgaggtccgggtcacaatttgtatcgattgaacaaattgttggaatttccaaagttatacattctcgaagagccgcatattcttcttgttgatcgacgattattacaatatcaggtaaccccgtcatatatttaatgccggcaagatatgtttccaaatgagctaaatgtcttttgaatatagcggcatctctttttgaaaactattg

SEQ ID NO: 213639 - DNA, 565 bp, Glycine max
ctggaatcaatgattcaattcagcatagacaactttgtaatttgcaattggtggatttgctgagcatgtgttatctgctcccttgtacatcatgccagaacatttcattcatgaacactccaattaacttcatgagattgtatgcttgtaaattttattgttgttaatcaatgataagctctatgttctttagtgatgagtaacattttggttctttcagactttgtcctcatgggctacttccagtgttgaagaggtggcttcaacaggacctggcattcgctttttccagctatatgtgtacaaggacaggaatgtggttgctcagcttgtgagaagagctgaaagggctggattcaaagccattgcccttactgttgataccccaatactaggacgcagagaagctgatatcaagaacagattcacattgccgccatttttgacattgaagaactttgaaggattggaccttggaaagatggacaaagctgatgactctggacttgcttcatatgtttctggtcaaaatgatcgtactttaagctggaaggatgtgaagtgg

SEQ ID NO: 213640 - DNA, 405 bp, Glycine max
aaggcagcagcagcagtagtcccccaagtttcatcatataagggttaaaaaaaattaagccttgggttttccaaatccaaccttaaatgagttctccaaaaaggaaaaaaaaggggggtcatgaaacacatatagaacgggttcctccattggtctgccccacattatacaaactggggtcaaagggggggcaaattttttataattttggcaatgcgcggggaaaaatgcgagggtggtcccaatcagggacaatgggatcacgagggatatccttggggggggggcaacccctcaagggcctgggtagctcaaactcctcacggagcatccgcaggacgttttttacaccagccttttctttagcggccaaggggaacaccccagggggtccaataaatatgc

SEQ ID NO: 213641 - DNA, 576 bp, Glycine max
  unsure (1)..(576): unsure at all n locations
agtttccagatatggttcatgctcttaaacccaatcccaagaaccacatccaggagaattggaggatccttgacttcttctctcactttccagaaagccttcacatgttcacctttttatttgatgatttgggtgttccacaagattacaggcatatggatggttttggagttaacacatacacactgatcaacaaggctgggaaagcagtgtatgtgaaatttcactggaagaccactagtggtataaagtgtctattggaggaagaggccattaaggtgggaggagccaaccacagccatgccactcaagaccttcatgattcaattgctgctggtaactatcctgagtggaaactgttcgttcagacaatagatcctgagcatgaagacaaatttgactttgaccctcttgatgttactaagacttggcctgaggacattatacccttgcagcctgttggtcgcttggtcctgaataaaaacatagataatttctttgctgagaatgaacaacttgcantttgccctgccattgtggntcctggtgtatactactcagatgantagatgcttc

SEQ ID NO: 213642 - DNA, 454 bp, Glycine max
aaatactaacaaatacaaacggcatttattgagataggtgaacgagttgcattcatggagttatgggtacacacaacataatattgcaagaaaaggattagttctttcaggtaatccaaaatcacatccttatcgtactctttgcacgtctgcaactctaacaatcattctggagttggcaacaacattaaatatttggcctcgtgctgagatgagaagctatcttttggcctagagaacggtcagcctgagaccagtatgatatccagacactgcggatctcatgggtgacccgtgggtcagataaagcatcaacccatcggcgagcaaatctatcttgcctgtcaggtgcccaagaccggtatctctctccgggctgctagaagttgttctccttctcaattccacacttttcacgccttccactgcagatagcaggaggtatggggaacct

SEQ ID NO: 213643 - DNA, 580 bp, Glycine max
  unsure (1)..(580): unsure at all n locations
gtttcagttgttcctccatggcaattaattccagctgaaggaaaagttgaggaatgtccactggaggagcttggtcttgaaaatgaatcagaaaaaccaagcaatgcattactaggacgggcatggtcgccgggttggagaaatgctgacaaggctttaacagaattcgtggagcagcatctactagactactccaagaaaaggctgaaggttggtggagactccacctcactcttgtccccatatcttcattttggagaattgagtgtgaggaaagtttttcaagtgacacgtatgaagcaaatattatggacaaatgaaggcaacagtgctggtgaagagagtgtaaatcttttcctcagggccattggacttagggagtactcacgctatctttgtttcaactttcctttcacccatgagaaagcacttctgggacacttaaagttttttccttggaatcctgatgctgatatctntaagaattggagacaaggtaggactggctttcctttggttgatgcaggaatgagagaacnnttgggcactggctggattcacaacagaataagagtaatag

SEQ ID NO: 213644 - DNA, 579 bp, Glycine max
  unsure (1)..(579): unsure at all n locations
gtttcagttgttcctccatggcaattaattccagctgaaggaaaagttgaggaatgtccactggaggagcttggtcttgaaaatgaatcagaaaaaccaagcaatgcattactaggacgggcatggtcgccgggttggagaaatgctgacaaggctttaacagaattcgtggagcagcatctactagactactccaagaaaaggctgaaggttggtggagactccacctcactcttgtccccatatcttcattttggagaattgagtgtgaggaaagtttttcaagtgacacgtatgaagcaaatattatggacaaatgaaggcaacagtgctggtgaagagagtgtaaatcttttcctcagggccattggacttagggagtactcacgctatctttgtttcaactttcctttcacccatgagaaagcacttctgggacacttaaagttttttccttggaatcctgatgctgatatctntaagaaatggagacanggtaggactggctcttctttggttgatgcangaatgagagaancttgggcaactggctggattacaacagaataagaggtatag

SEQ ID NO: 213645 - DNA, 603 bp, Glycine max
  unsure (1)..(603): unsure at all n locations
ttgacttatccagatgccaatctttcaaaagaggctttaactgccataagtgtagtcctgtctctaaatccaacttcaactattgctcacatatctggtattggtataaaagccatcccttctatttcacacttatccagtctccgtgctgtcaacttgtcaaacaatttcatagttcacatctcaccaggagttctaccaaagggtattcaaacacttaacttgtcaaaaaacaaaatcagcacccttgagggcctcagagaattggccaagttgcggatacttgacctaagctacaaccgcatttcgagaattggacaaggtttgtcaagttgtacactaatcaaagagctgtatcttgttgggaacaagataagtgatgttgaagggctacacaggctattgaagctaacagttctagacttgagcttcaacaagatcacaacagcaaaagcattaggccagcttgtggctaacttcaactcacttaaggcccttaatctccttggaaattcaattcaaagcaacatcagcgatgaccagctaagcanagcagtctgtggtcttcttccaaagatggtgtacctgaacaaagcacctgtc

SEQ ID NO: 213646 - DNA, 585 bp, Glycine max
acgaaacatggcaagagtggtggcactccaacagaaccaactatctttctctaccttagcttcctctctttctgacttcagtggaaccagacttcaaactcaacttcagttcaagagaaagcaatgccatccaaaagggtctttctacgtctccgcatcgagcaccaagaaaatcctaataatgggaggcaccaggtttattggtgtgtttttgtctaggctccttgtcaaagagggtcaccaggtgactttattcacaagaggtaaagcgcctgtcactcaacagttgccaggtgaatcagacagtgattatgctgatttttcttccaagatcttgcatttgaaaggagacaggaaggacttcgactttgtaaaatccagtctctcagcagagggatttgatgttgtttatgacataaatggacgcgaggcagatgaagttgaacccatactggatgctctgcctaatctggagcagtttatttactgctcttctgccggtgtctatctcaaatctgatctattacctcacgcagagactgatgcagttgatcctaagagcagacacaagggatagcttgagac

SEQ ID NO: 213647 - DNA, 310 bp, Glycine max
atgaacgaaaagctcatgaatatttcacgacttcataaggtagcaaactccgaacaaggttttctaaatacaggcgaaatacttaaaattgcactagaaaagtttatacgctaacaagactcttgccaagaatgatgtcatctgatgagaaatcagcctctttccgatatggacctctaccaaagtccaggttgtactagtctggttgaccctttacaagttcaaatgcatgttccaatcgcagcacgctattaggtttgtaaactggtgcaaagaaatgctcgtcacggaacgggacagatgacttttt

SEQ ID NO: 213648 - DNA, 615 bp, Glycine max
  unsure (1)..(615): unsure at all n locations
ccacttgccatggcagcagcagcgtcaatgtgtatgagcttcaacctggcaacagcattcaagggtctctctttttcttcttcttcctcatcgttcttcgctggaagtggtagttattctctccgcgcgggtcccacctcggtggtgtcgctgccccggcgctgcccgctgaccatagagaacgcccacaagaagggggcgggcagcaccaagaacggccgcgactcgcagggcaagcgtctcggagtcaagatatacggcgaccaggtcgccaagcccggctccatcatcgtccgccagcgcggaaccaagtttcatgcaggaaagaatgtggggcttggcaaagattataccattttctccttgattgatggagttgtaaaatttgagaaatatggacctgacaggaaaaaggtgagtgtttaccctcaagaagtacagcctgagaaccccaacagctatagagcaaggaagagagagtacttccgagtgaggcgtgaacgcanaanagctagacaagaaggagcaatacttaaatctcaactggtgctggcttctgcagatgatgcagcaatcactaatccagtgtgttgattctgattcaatcgtctaaat

SEQ ID NO: 213649 - DNA, 514 bp, Glycine max
attccaaatactacaaaacaaatgctcatactgtagaattcatcaagcaatgttttgattcaaatggcgcatgatgactgattgtgcattgctacttcaacaaaactcaatacaatgctaaaggatctacggataaacaagagtaaaaaatggggaccagggtattttacacatttagacgattgaatcagaatcaacacactggattagtgattgctgcatcatctgcagaagccagcaccacttgagatttaagtattgctccttattgtctagcttttttgcgtgtcacgcctcactctgaagaactctctcttccttgctctatagctgttggggttctcaggctgaacttcttgagggtaaacactgaccttattcctgtctggtgcatatttcttgaattttacaactacatcaatcaaggacaaaatggtataagttatggcaagccccacattatttcctgcatgaaacttggttccgcgcttgcggacgatgatggaaacgggct

SEQ ID NO: 213650 - DNA, 546 bp, Glycine max
  unsure (1)..(546): unsure at all n locations
ctcataacacaaagcacaaagcaaagctcatccttgagttaaaaaatggcagcagcttcttccatggctctctcatccccatccttggctggcaaggccgtgaagctgggcccatcagccccagaagtgggaagggtgagcatgaggaagaccgtcaccaagcaggtctcctcaggaagcccatggtacggcccagaccgagtcaagtacttgggcccattctctggcgagcccccgtcctacctaaccggtgagttcccaggcgactacggctgggacactgctgggctttccgcagacccagaaaccttcgccaagaaccgtgaactcgaagtgatccactccaggtgggccatgctcggagccttgggctgcgtcttcccggagttgctgtcccgcaacggggtgaagttcggagaagccgtgtggttcaaggccgggtcccagatcttcagcgagggtgggctcgactactngggcaacccaagcctgatccacgcccagagcatcctcgccatctgggccacacaagttatcctaatgggt

SEQ ID NO: 213651 - DNA, 412 bp, Glycine max
atcagcgtgacgaccttgttgtcgtcctttttttttttgtgctatgtaagcacttctcatgtagatgtgcagggggatacacaggattattcaccttatcatgagtactttaccaaacactaatctattaactttcaaaagggattgtgtacgatgacgcttactgttcggggaccaatttgatggctttggaccacagcgctgttgttggctgggtcagcttagatgctcggctatgtttttcaatggaccctgtgccctgaaaaaggtctgagctgagagcgccacatgttggaacatggaccctcgtccggccatgagatcctgcaccttaagctgagcaagagcctctgggtcatcagtagggcccattgggtctaaactgccacctgggaaaatcgggtcaatgacc

SEQ ID NO: 213652 - DNA, 423 bp, Glycine max
agcattggaccaatttgtttcttgagcaaatactaatgtacaatgatgcctccacatagacagcaatggctaagcacagggaaatggatttgaagttaagtactttattggatcagagagaaaacctatacattcagaactcacattctgatgcccgtggatgactgctgtttccaacatcaaatgtgcctggcaggaataagtcatcttcttctgcacttatcagggcattctttgctatgcattggaatgcttctacaacattaagaccttctttggccgatgtctcaaaatatggaatatttccttttgatgcacaccaagcccgagccttgttttctgacaccactctgctgttcccaccatcaatatctatcttgtttcctatgacaacaaaaggaaaattctgtggatcagaaggac

SEQ ID NO: 213653 - DNA, 461 bp, Glycine max
tcgcgatctataaccccgatatagcagtaaaagcaagacgcgtaggcggatcaactcatcaagttcccgttgaaataggatccacacaaggaaaagcacttgccattcgttggttattgggggcatcccgaaaacgtccgggtcgaaatatggctttcaaattaagttccgaattagtggatgctgccaaaggtagtggcgatgccatacgcaaaaaggaagagactcatagaatggcagaggcaaatagagcttttgcacattttcgttaatccatgaacaggatctatatagacacatagacccatgaatccatacatctcgatcgaaaaagaatcgaaattgatgaatatatctctcgaaacaaacgaaaaggaaacgaaaaacaaaaacataaatcatggatcaattaagccctctcgggactcgcttaagaatgagaaagaggaatcttatgtaaa

SEQ ID NO: 213654 - DNA, 428 bp, Glycine max
  unsure (1)..(428): unsure at all n locations
gaagtaaaaagccttagccttgcctacaactccaaacacaaagacatcatcatccatggatggctacgggtacactgtcggagctgacaacagagctcttttgaacctgaatggtgctggagctggagctacagctcccagggcagccgtgattgggaccacgcttgaacaatgtgattgcctcaagggtccccaacagcaaggtttgcggtggaagctacaagattgctgctgcagaagagaagacagagattgatgagaccccacaggacgactaggacagatgggaggggcttgcctatgatatatcagacgacccacaagacatcacaagaggaaagggtttggaagactccctttttcagctgcacaggatgctggaactcactatgcagncatgagcttctacgagtacctgagtactggac

SEQ ID NO: 213655 - DNA, 491 bp, Glycine max
atggcttcatgtagcgcacctccctccctgatgctggtccaccctcaagacctctctcgctctcagagaaccacattctctctctatcctctcctttttaagccctgcaaatgcctccacatagagcccaaatccaggacttgccatgccctcgtcgccgctttggctgcagaggtccaagtgcctctaactgtccacgacacggaggaggacgacggttctgatggctccaccgccacctgcggcgtcaccaccaccaccaccaccaccaagcctaagaaaggcaaggccgcgttgcctcttaagagggacaggacgagatctaagaggttcttggaaattcaacaattgagggagcgttagaaagagtatgacttgaagaccagcaatatctttggttgaagagacagctaacacctagtttgtagaaacagtagaagcccattttcgcctcaacattgaccctaaatataacgatcaacaattaagag

SEQ ID NO: 213656 - DNA, 621 bp, Glycine max
  unsure (1)..(621): unsure at all n locations
atcaaatcctaatgatatgactggggagactggtactcttggttatatggctccagaggttttaaatggcaacccctataacaggaaatgtgatgtgtacagttttggcatctgtttatgggaaatatattgttgtgacatgccatatcctgacctaagtttctcagaaatcacttcagctgttgttcgccagaacttaagaccagaagtaccaagatgttgcccgagttctctggcaaatgtaatgaagaagtgctgggatgccagtcccgataagcggccggagatggatgaggtagtttccatgctggaggccattgacacatccaaaggtggaggtatgatccctcttgatcagcagcagggttgtttctgcttccgcaagcatagagggccttgatgttttatttgttagcccagcaaacaatttggttataatggattttcactatttgaagaatcaatttgtacctatagtgagaaagcagcatttggatcctagatgagacaaatacacagtagggggtacagttaagaggagctggtgacatgtcaatatgttggtgggtgtgtaaaactgnacctctgaatttctttacctttttttcccccacattggtt

SEQ ID NO: 213657 - DNA, 473 bp, Glycine max
tttttcttttttttttttttttttttttttttgtttttttgtttactccaattgcggattatcatttcattgaatcgactataaacagccagatattttggtcaaaaacaagaaccacggtgacacaaaaccttaaagatcctcaaactcaaacacaactaaaagtactgagcctaatcataaaccctaatcaacgacatcaagccctagtttcttaaggctacatcaccaccgttaccaccacgagagaaaccacggttaccaccaccaccataaccacggtctctggcgccgccattgacaccgttaccggcaccgtcatattcaccggcgccgtcttaacctacaccgccaccggtacggttgtatccccgttcaccaccgggaccaccaccaccattttcaccaccgggaccaccaccatatgcaccaccttcaccgactgcgccgacaccggcaccacgggactgagc

SEQ ID NO: 213658 - DNA, 412 bp, Glycine max
ttttttttttttttttttttttttttttttttttttttttttttttttttttatttttttttttttttttttttttttttttttttttttttggaacacccccagaacaagggggggggttttttataaaaccaaaaaagaggccggggaggggcaaaaccaaggggtttaaacattttttaaccccccccaccccccataatggggggggtcaaaggggccccggggagcaccccacctaaattttttccaccccttcggaaaggggaggggggcaacgtttttccctggggggccaaaacgggggagaaaaaaacaagcttcccccaagggggggaaaaacaacagaaggggcgccgcccgcttttggggggatccccccacactatgtggcgggggggggaacccctgg

SEQ ID NO: 213659 - DNA, 450 bp, Glycine max
atcctgcgattaagtcccggctcgccgagtctcactaggcgcgggctcgccctttttttttttatttttcattttttttatatttttattatctgtcaaaacgcgcgggagagctctttaccaaagattggtttcaacctaattaaagggtggctgtgtaaaagcaaacgacttagttgtctttgaacccataccttttaaatatctaatcggacgttcgggtgctttatctggacgatgctgtgctgtgccctgtctactatgaagcctatccaccagcgtcgcactggcccatgctgttaccttgtgatgttgacagctgtctagtacaaaagattggcgcagctggtaccttacattgcggcccccactgatacactgctttaaccatacatggctaagctggtgatgtgactgaccgcctttttgccataaccattttgctctggg

SEQ ID NO: 213660 - DNA, 606 bp, Glycine max
acgaagcttgcgcgtgctctcatcagtggccagcctgtagaaccaggtccacaaccccctgacctgcttgataagcaaataagcttattaacaccagttgtgatggatgcaacccctattggtgtaaagtttggggattgtagctctgatgttcccaagaactcgaactttaagagaggtgacatggtgtctgttactttctggtctgcgtgccctcgtaacgaccttatgactgaaggtacattttccctggtggaatttctccaaggaaaggatacttgggttcctgcttatgatgatgatgatttctgcctgcgcttcaagtggactaggcctttcaaactcagctctcacagtaaagctaccatagaatggagaatcccacaggatgtaacttctggtgtatacagaatcaaacattttggggctgcaaagggcttgttaggatcaatttatcactttactggatcatctagtgcatttgtagttgcataagaaaggggggcatactgattgataaacgtgtttatggttcaacaccaatctactatatgtggttattgactgactgtgcacaatcctaaaattaataaggatgattcttcg

SEQ ID NO: 213661 - DNA, 507 bp, Glycine max
ccggtggaatcatccttgatttaattttaatgtattctgccacagttcagtacaataaaccacaatatagtagtaatggtgttcgaaccattaaacacgtttaatcaatcagtatgcccccctttactatgcaactacaaatgcactagatgaaccagtaaagtgatgaattgatcctaacaagccctttgcagccccaaaatgtttgattctgtatacaccaggagttacatcctgtgggattctccattctatggtagctttactgtgagaactgagtttgaaaggcctagaccacttgaagcgcaggcagaaatcatcatcatcataagcaggaacccaagtatcctttccttggagaaattccaccagggaaaatgtaccttcagtcataaggtcgttacgagggcacgcagaccagaaagtaacagacaccatgtcacctcttttaagttcgagttcttgggaacatcagagctacaatccccaaactttacaccaataggg

SEQ ID NO: 213662 - DNA, 619 bp, Glycine max
cgaattatatctacaatttctcgtttgtgacgaacgagaacgagagctatttcacatactccatgtataactcgtccatcatatcgcggttcgtgatggatgtctcggggcaggtcaagcaattcacgtggttggaaaaatgctcagcagtggaacttgttttggtcgcagccgagacaacagtgtgaggtttatgccttttgtggcgcgtttgggagctgcactgaaaattcaatgccgtattgtaactgtttacctggttttgagccgaaatcaccgtctgattggaatctggttgattactcaggtgggtgtgaaaggaaaaccatgttgcaatgcgagaatttgaatccctctaacggggataaggacgggtttgtagcaattccaaacattgcattacctaaacatgaacaatctgtgggatcagggaatgcaggggaatgtgaatcaatttgcttgaacaactgctcctgcaaagcttatgcatttgacagtaacgggtgttcattttggttgacaacctctgaatttacaccagtatctcagatgatagtagcggacaaactttgatgtcaaacttgcacatctgagtttatgatgataaaagcaaaattgg

SEQ ID NO: 213663 - DNA, 567 bp, Glycine max
  unsure (1)..(567): unsure at all n locations
tgaagaggcttacaacaagctaatagttgaacttgagaaaagtgttcctacattggttggcattgaatgtcccaaggatgagaaacttcctcgtcgcaaaatttttgacaaacctaagacgcgctgcttcactattctccctatggagtttaatcttgtggtccgtcaaaagtttttaaattttgtgaggttcattatgaagaaaagggacaagcttagttgtcaagttggaatcaacccatactccatggaatggactggtttggccaatagattactgagtaagggcaacgatattctgtgttgcgattatgctagttttgatggtttgattaccaagcaagttatgagcaagatggcagaaatgataaacagtctttgtggtggtgatgaaaaattgatgcgtgaaaggacacacctgctgttggcttgttgttcaagaatggcaatttgtaagaaagatgtttggagagttgaatgtggaatcccttctggatttccgctcacangtatttgtaatagcatttttaatgagatgctcattagatatagctatgaaaaattact

SEQ ID NO: 213664 - DNA, 441 bp, Glycine max
aaacacactcattggacatagtaatgcgctttatttaagtgaataaaatattacatactagttcacaaatgcaaaaggacactcatcaaccagatatttgagactcttacagttctcaaaaagtcgcgtcagcataggggtagtggcgttagaactcaaaatttcattcttaacgccaaaaagaacagccagtaaagctactggaaaaggatcaacttttgtaagaaaaacaatttttttacctctcccaagtgctgggcgaatccttttgttgatatctgaggagcgattgttaactgcagaactaatccaagcagtggtgggtaaaccaccacgttcactaccacatgttacatttacaacgacagcttctgaagggaattgacttacaggataaagacaattcacaaaaattggtgaccaagaatccactggaaaatt

SEQ ID NO: 213665 - DNA, 499 bp, Glycine max
gagcaatacaaagacccaaattcaagcctatgtttttgatgtaattagggcaagtgttccaaaactaaacttggatgatgcttttgagcagaaaagtgaaattgccagagctgtggaagaagaacttgagaaggctatgtcagcttatgggtatgaaattgttcaaacactgattgttgatatagatccagatgtgcatgtgaagcgggctatgaatgaaatcaatgctgctgcaagattgaggttggcagctaatgagaaggcagaggcagagaagatcttgctaatcaaacgagctgagggcgaggcagagtctaagtatctttctggtctgggtattgctcgccaacgtcaagcaattgtggatggcttgagagatagtgtgcttggattctcagttaatgtacctgggacaagtgcaagagatgtcatggacatggtccttgtcactcagtattttgacactatgaaagacattggtgctgcctccaagttttct

SEQ ID NO: 213666 - DNA, 383 bp, Glycine max
aaaggaaaggggcttttttggtaacgacattacctatatatatatatatttcactacccaattttaattaaaaatggccttggggttcacattatttaccttaaaaatgcggttacaagacctatacccagttcctttggaagctcatccccaacggggacaagagtccagacaacacgaaaaattgcatttgccacaagggcctttctccatgtgccaacctgtggcacatcatttaaccatggttttttcggtgccctttgacataacaaaacataaagcccccaagggagggaaagagggccaccaagcccttcttatccaagccatgtatatgttggtaaaacaaagcccaatagcgcatttttttcaaaagcaccctg

SEQ ID NO: 213667 - DNA, 543 bp, Glycine max
agaagaacgagtgagtgtgtagttgaaagaatgctatgttgatgatgacacatggatgatggatcatggatcatggatcatggatggatgattaagatttttcttcaacacaagggaaggtagcaaatagaaaaaagcacctcaatttgtgaaagcattgcttgcagtacataagcactaacaacacagtgtgtgaatatatataaactaggtagcgtagtagtactattattactaaacttgttacatcaaaaaaacaaatggagacacacgctgagataagggtgtcaaagttcaagagggtttgtgtcttctgtggtagtagccctggcaaaaagagaagctaccaagatgctgccattgaacttggcaatgaattggtctcaaggaacattgatctggtctatggaggaggaagcattggtttgatgggtttggtttcccaagctgttcatgatggtggtaggcatgtcataggagttattcccaagacactcatgcctcgagagctaactggtgaaacagtgggagaaagaaaagctg

SEQ ID NO: 213668 - DNA, 520 bp, Glycine max
cagaagttaaagaagagggtatttttactcgtaccagtactttggagagtatcgattgtgtggaaaccatagaacaggggtttattcccttgactcgtattgaagataatttgaatgggacacaaattgcacataaagctggcgaattatctgtatttttgggtgtaccacttttttactgatgagaattgaacttaattagaaattaaattgcacaaaaagcttcagaattgtcctatttattgagtgtacctttatgaaatattttgaaaaaaaaaaaacgtttttttttttaaaaatataaccatttttatagatgaggcgatatttgtttacgaaatgcgataattgtcttcctaacccgaagtgctctttggtgtatttataagaagtcatagttttttgttgaatcggaacaattgttatcctttcgaaacaccaaaatgtacttatttgaaatgacagcgaaaactgtcgagttcaaatcatacatgcctcctttttctaaaaaaacaaggga

SEQ ID NO: 213669 - DNA, 578 bp, Glycine max
tttcttttttttttttctattatactgatattatactgaatagaattacataaagtatcaacaaaaaaattgagttatttttatgagtttaatatgttgataaatatgcgggactagaaattcattttggacaattgaaccttctcaaattgtttcttcttaagaactaaaaagatttgtgctaaaataatagatgcgaagaagaacaagagaccttggacacgtaacggatcttgaagtactatttccgcatccccctgaccaaatccacccacatttggattacttgttaatggctgatcaagttcgatagattcaccttctgaaacaagaagttctggtcctggaggtataatatcaatcacttcacgcccatccaatgcatccactatagttatttcgtatccccctttttcttttcgtatgatcatggttaccatacccgctgctgcagcattatacacattattattactcttgctcccgacaagataaatctgaccccttcccctgttcccacctacgtatataggatattttaagagatgaacatctctcttagtagtgggatcccggga

SEQ ID NO: 213670 - DNA, 498 bp, Glycine max
aaattcaagtagacataattaactctaattgcagggcaggaacaaatggttctaagtaaaatttctccgccacccaccccaatccactggcgtgcgactgggttccaaaacaaatcaaaatttacctaacaaatttttagcattacaaccaagtttcttccaattacaaccaccatatcaaaatatcacagcactcatattacgccaaaaaatgctggcaccccaatcatccaaagttggaccctcaggatattttacattcggtcttctctcctcctcggagcacacgtgatgatttcatcaactctaaggatcatctcagctgcctctgttgaagatagcaatacagcttgcttgactttgaatgcttcgcatatcccccgttcagccatgtctccaacagagccagaaataacatcaattccagcagtgcagccctcctctgatgctctgcacgagctgagaaataactcagcactgtccaaaccagatatcagc

SEQ ID NO: 213671 - DNA, 505 bp, Glycine max
  unsure (1)..(505): unsure at all n locations
acaagtagttgagaactaagaaggagaagcaaatggcttcctcaatgatctcttccccagctgttaccactgtcaaccgtgccggtgccggcatggttgctccattcactggccttaagtccatggctggcttccccaccaggaagaccaacaatgacattacctccattgctagcaacggtggaagagtgcaatgcatgcaggtgtggccaccagttggcaagaagaagtatgagactctttcctacctgccagaccttgatgatgcacaattggcaaaggaagtagaataccttcttaggaagggatggattccttgcttggaattcgagttggagcacggtttcgtgtaccgtgagcacaacaggtcaccaggatactacgatggacgctactggaccatgtggaagctgcctatgtttggttgcactgatgcttctcaggtgttgaaggagcttcaagaggctaagactgcataccccaacggcttcattcgnatcatcgg

SEQ ID NO: 213672 - DNA, 385 bp, Glycine max
gattaaaacatatgactatttctacattacttcatagagtcacaccccagccatgacacatataacatcttgttcatgcgttcgcatcaggataagaacatcacagtggttgttgaacataggtattgttatcaaattaggacaccgcccttccctatcccctaataacagacgttatcttaccccaaaaaaacaggacgagaaaagcaaacccacaaaagttctcataggatgccatgcatgtcaatatacattatctaaacacacattagcccatggtatacttctgggtacagatgcgtgcagtggccttatacttggcccggacagttttagacatgtgagcgatttacggaacaagtggatcatcaggatttggatcagt

SEQ ID NO: 213673 - DNA, 494 bp, Glycine max
  unsure (1)..(494): unsure at all n locations
ggcccctctctatgcacgttccacggttgagtttttgccaaaatttagtgtgagaggagtctggcagagatggcgtgagtcatatccaaccgatggttctaaggctgaagaggctttaactgggttcactgtagatccaactatctatgcccgagtgatacaagggtctcatgcaagggatcctgagctacaagctgcttcagtatctgctgcaaaaacacagcgtgttatcatgtgtgggacctctgcactcacactgcctgttatgcaacaatgggaagccatcactgggcatcgtttattggaacgatatggcatgactgaatttgttatggcattgtctaatccattggaaggcgagcgccagcctgtaaccganggcaaaccatttcctggtatacaggccaagattattgcatatgaagacagtgtcaatggaaatactggaatgggtgagctatgcattacaagcccttcattcgataaagaatatt

SEQ ID NO: 213674 - DNA, 534 bp, Glycine max
ctcagtgaagaaagaaagatatgagataattccttctttatcttttttcatagcagtgaagaaaaaactgagaaagcatgggcgtggactactacaagattcttcaggtagatagaagtgccaaagatgaggatcttaagaaagcatatcgaaggctagccatgaagtggcaccctgataagaaccctaacaacaagaaagaggctgaagctaaattcaagcaaatctccgaagcttatgatgttttgagtgatccacagaagcgaggaatttatgatcagtatggtgaggaggggttgaatggggtgccgccaggcgcaggtggttttcctggtggtggcgacggtgggccgacgtcattccggttcaaccccagaagtgcagatgatatattttccgagtttttcgggttttcgagaccctttggtggtggaatgggggacatgggtggccgagctggtggctctggattttcaggggtggcccgtttggtgaagatatctttgctcaatttatgaatgcagctgttgagag

SEQ ID NO: 213675 - DNA, 441 bp, Glycine max
aacaaatatcatcctttaataaactgttctaactgaaatccaattcacagcggcagcaatttccatttgaaaacaaataaaccgagcataaaataactggcatcttacaatgttagctaaatgggaggaagagctactgctgttgcttaaggagatgtcaataatcgcttgatgccacttttctgttcggatgtaagcctggagggaaacttgattttgaacttgattcttaagtttcccttcttggaaggttcttttggaatgggcataccctctcctttgacaacttcttcatatgtaggactaatagcggaggtaatggggaatgtaagattccccccatcaagggttgttagctgcactgtgtaacctgtgaagggttctacaagcgatatcttgtgggcgacaacaagatcattgccatcccttttaagagactat

SEQ ID NO: 213676 - DNA, 413 bp, Glycine max
caacaataacacacactttgcacatcattactacaaaaacaaaacgtgtgtgaatattcaaatcaactgagcattcatcaacaggagggacatgtctaaattcctatattgaattaaacatacgaacaaacgaaagacagcacacatgctatatcaagcatgggattcacttattatcaaaagatctcggagatgacctgcggaacatgaaaagttggcataggaatttatccagcatgttcaaaagcttgtcaatttacccagagaatatcaaaaactgcttactgactgggaatgccactaatgaaactcatgtgccaagaagcaagatttgcccactcatagactcccagtgccaacaccttcattaagaccacttgcctttattgggaagatcaatacccaggaacgtg

SEQ ID NO: 213677 - DNA, 447 bp, Glycine max
aggacaaaaggaaaaggcaccaaattcaatttaagtggacactttaactcaaaattatagaggaagaccgtccaatatgaaaaatatagtaaaatcatctcaaacttggcatcttctctttgcacctaagacattgagaattctaagaatgttacacgcaagtcccatcacaacttctagcacttggatcagcacaaccttcaggaacagaaatatttacttgccaagtttgctttgcctccaattcaagattggaagaaagttcccctgttaatagcatcctcgttagcatttccaagtgcagcctcgttcaagtacttgtcagccaattggactctcttgacattctcttgttcttggacaagcatgttaccatacgtcaagagcttctccagagtcatcttgggctgctcaaaggttggaggtccatcttttgagttcacaagc

SEQ ID NO: 213678 - DNA, 556 bp, Glycine max
  unsure (1)..(556): unsure at all n locations
gtgcctctcgnnnnngggtaccgccctcgaggactactcgtcggccgccctcgccctttttttttactcaccatctcatcttcactatcatcgtcatcactcgccaattcatcttccatcccagcctccacaacattctcatccatatacctaacctcatgaatcctccccttcttcttcttcttcttctccgtccctccctcaatcgaatcactaacctcaccatccctctccttctcattcttcttctcctcaaccttaaatccctcaatcttcaacttcacatcaggaacagtctggtagaccggcagagccacgctctccagcagcttcaaatgcagcgacctcacattgccccacttcttgggcacaacctccacaatcccctcaatcgcggcaacgacattctccacaatctcatccctctccatcctcaccttggcaaccctaaccacactacaggtccccgtcctcatgaacagcatcgcggacgagcaggccctctccacctgctccttccagctccccttcttcaggtccaccggcaccggaatct

SEQ ID NO: 213679 - DNA, 470 bp, Glycine max
aacatcgtaatcataatttagattgttccccttaaagcagaggttcggactacaggcaacatctagtgctgatttttcaattacaatacccatacagaatataattggaaaggtaatatatttacattcagaatgaaacagcagcgtcagcatccatatcagtcacctctctgacgaggtttttggtggaaggcaaaccagctgttacatcctcttcaatcccacattcgtttgtccctcttcggatcttgaagtaaccatcatctccccattctctgttccactgatttgcgagaagccaatagtcctccccatcatcagttgttccccacccaattagctttactgcatgaccacctagttcataaccagtgatgtgtttgtaaactcctgatttgtagtaagcaaaatcctcataaacggtaaatgcaacttcaactggcccattcttgtaaacttccgccatgata

SEQ ID NO: 213680 - DNA, 468 bp, Glycine max
aacatcgtaatcataatttagattgttccccttaaagcagaggttcggactacaggcaacatctagtgctgatttttcaattacaatacccatacagaatataattggaaaggtaatatatttacattcagaatgaaacagcagcgtcagcatccatatcagtcacctctctgacgaggtttttggtggaaggcaaaccagctgttacatcctcttcaatcccacattcgtttgtccctcttcggatcttgaagtaaccatcatctccccattctctgttccactgatttgcgagaagccaatagtcctccccatcatcagttgttccccacccaattagctttactgcatgaccacctagttcataaccagtgatgtgtttgtaaactcctgatttgtaagaagcaaaatccttataaacggaaaatgcaacttcaactgcccattctttgtaaacttcgcatgata

SEQ ID NO: 213681 - DNA, 403 bp, Glycine max
agcgaacaacaaacacaatatctcatcttattgggacttgacgtggactatcaaattatgtaaaacacaaagtattacattgattgccaaataaagctcaaagactttatgaataacttctgcgacatgccgtaagcaaaggaatggctgcctctgagagagcaccatgatgaacatgatcaaagacgaacgggctacctgtctacgtgatatggatcccagacccaatatactctagctgacggccttgaccggaacgcacgaaaattcgagttccattgacctctagtggttttgcacatacaacactacgacgggtggtgtattctgcttcgtggccacatcaagcgacctgtgggagtttcaatgcatgtttcgtggggtgggtaaatagagaggcctt

SEQ ID NO: 213682 - DNA, 472 bp, Glycine max
aacaccccccacgaagcaccaattatggctctgaatctttgtatctcacctaagtttaaatgggttccttccttagatagtgcttcctattctttgagaccttcacttgggtcttgttttggtaacataaacattgctagtgtgagtctaagtactactagaagtttgagtttgaggaggagtgggagtgttagtgtaagatctagtttagaaactgcggggcccacagtcacagtgggacaggtcactgaggttaacaaggacaccttctggccgatcgttaaggctgccggggataaaaccgctgtccttgacatgtacacacaatggtgtggcccttgcaaagtgatggctccaaagtttcaagaattatctgaaaagtatctggatgttgtctttctaaagcttgattgcaaccaatacaacaggcccctggcaatagagctggggattaaagtggttcccactttca

SEQ ID NO: 213683 - DNA, 611 bp, Glycine max
cagtgacttgagaatggccttgccagtggtcgtcgacgcagagtacctcaaagaggtcgacaaggctcgccgcgatctccgcgcactcatcgctaacaggaactgcgctcctctcatgcttcgattggcctggcacgatgccggaacttacgatgctaagaccaagactggtggacctaacggctcgatccgtaacgaggaagagtattctcacggcgccaacaatggctggaagaaggctattgatttctgtaaggaagtgaaggaaaaacatccctaaaatacatatgcagatctctaccagcttgcgggtgttgatgcagttgacgttaccgcgggtcccacaattgatttcactcctggtagaagggatccaacaatatcttctaatgaagggcggcttcctgatgctaaaagggtgtttcacagctccatgatatcttttatcgaatgggcttgactgaccgaggatattgtgcactatctggaggacatacactgtggagagcacatccagagagatcagggtttgatggcccttggacagaggacccttttgagtttgacaactcatactttgtggaactttgaaagaagattatgctgggctg

SEQ ID NO: 213684 - DNA, 489 bp, Glycine max
aactgggaatgctaaaatttgtattaacatattaggaagttgctaccaaattgagtatttagggatagttttagtctattcatataaaaaaaagtctgaatggctcgcgcattattctttattggtgctcagtaaacagaatctgaagctgcaaaaatgaaccctgttttcacattatgggtcagggtcacgcctacgctacagccaagcgaaatgaacaagtccagtttacttccctcttttgcgaacttcatacaagtaactgatgatcaccactgcggcagtaactacaactcctacagcaccttgtgccagtatggtcccatccttaatagaaatcggctttgaacttggcacaaagcctagctctgaaaggttcttatgtgattcagcataatctcgaaaaaatgcatcctgcgcctttgcatatagctcaacataacggcgaaactcagcatcctccaataaagccctgtctgttggaagttt

SEQ ID NO: 213685 - DNA, 360 bp, Glycine max
ctcgagccgaatcggctcgagcaaaggttgctgtaggagataagattgcagtagtgctaagtgctaacacctgctgtgaacaatggcctctgcatcagcatctctgctcaagtcttcacttgctcttgacaagtctgagtgggtgaagggacaaacccttcgccaaccttttgcatcagctgtgagatgcaaccccaccaccccatcaggcctcaccatcagagctggttcctatgctgatgagctcgttacgaccgcgaaaacagtggcttcaccagggaggggtattacggccatggatgagtccaatgctacctgtgggaagcgtttggcttcgattgggctagagaacactggagc

SEQ ID NO: 213686 - DNA, 525 bp, Glycine max
gccgagcttaaaccattttgttatatattgagacataatcaagtacacaactcatagcaaaaggtttattaagctgtaaaggtgcatttaaccataaacaaaaatagtctccaagactataaaaacattacattttagacaaattagtcttccacttcatcgtccgtcaacacctactgtaactgctggtgttgctgcctaacaagtatcatattcactgcaaacatcttagtaggagtagcttttgacgaacaactccttcttggcttcctcggattcaccctcaccagtgtacttcccaagctgagcgagtgagttggacttggcacggaatgcgagtgcatcttgtgctgccttcacgttctctgggcggcctccccatgtcttcaaggcagtgttttggagggctctggcatacgagaatgacacgtgccacgggtttggagattggttcatggcattcaaaatgagggtagctttaacctcagactgtccaccaaacaaaaacataatttcagggacagc

SEQ ID NO: 213687 - DNA, 457 bp, Glycine max
tttcgttctttttttttttttcgttttcagaacagtataaaatttatattcacaaataaagagacatataccctggataccggagatgactacggagtcaataaggtggcctactgcctcctaatgcagctgcggaaaacgtacaatttatcggcaccatcaaagggggcggccgggatctgcccagccaaaactatagatttatttccatcagggggtataactggcttaatgtgatccccggggccaaatggtgactgaatgacatgtggttaaacaaccaaatgcggtactgtgatgtatctatgtagataaacggttgcttccagactgtccattttattgtcaacagccgttcacggcacaccgtctgtatgagcctgccttcacacagaacctgatagatgctccacaccatcaactctgccaaacgagcatattgctccatgctacaccc

SEQ ID NO: 213688 - DNA, 455 bp, Glycine max
atggggaagacacactcattgcacatagtaatgcgctttatttaagtgaataaaatattgcatactagttcacaaatgcaaaaggacactcatgaaccagatatttgagactcttacaggtctcaagaagtcgcgtcagcatagggttagtggcgtacgatctcaaaatctcattcttaacgcccaaaagaacggtcgatcctggtgctgcagaaggatgaactgtaggaagaaaaacaattgagttacctctcccaagtgctgcgcaaatccttttgctgatatctgaggagcgattgttaactgcaaaactaatccaagcagtggggggtaaaccaccacgtccactaccgcatgtaacatgtacaacgacagcttatgaaggtagttgacttacaggattaagacaattggcataaattggtaaccgacaatccactgggaaatttccatca

SEQ ID NO: 213689 - DNA, 530 bp, Glycine max
tcgtcctttttttttactcaccatctcatcttcactatcatcgtcatcactcgccaattcatcttccatcccagcctccacaacattctcatccatatacctaacctcatgaatcctccccttcttcttcttcttcttctccgtccctccctcaatcgaatcactaacctcaccatccctctccttctcattcttcttctcctcaaccttaaatccctcaatcttcaactgcacatcaggaacagtctggtagaccggcagagccacgctctccagcagcttcaaatgcagcgacctcacattgccccacttcttgggcacaacctccacaatcccctcaatcgcggcaacgacattctccacaatctcatccctctccatcctcaccttggcaaccctaaccacactacaggtccccgtcctcatgaacagcatcgtggacgagcaggccctctacacctgctccttccagctccccttcttcaggtccaccggcaccggaatcttcctcttctagaaaaaactcttcc

SEQ ID NO: 213690 - DNA, 496 bp, Glycine max
agcatcacaaataacaaacgtattcacacgtcccacaactttgttttcgacgaatacacacatcaactaattagaatattataaccgtaagatattatttgcagaagcctattgtctagttacaacaacctttttacacttcaatcatttgaaactgctgtaagagatacttccccttttgctccttcttccaccttattccactgcttgtcaacatccacagaacttttcttgctctcgaacacttttgccgtgtcataagaagcatgtaaccccaatagcacatagtataccaagagaaaccctgtccagaccccaaacctgataaatgaatctttatcaatagagccaagaaggaatatgttaatagcaatagataaagaaggtagccatggaaccaaaggcaccccccaaagtttcgggtgctttgcctgtggaacaaaaagccaaagacctccagtccctaaaatccacaacggcacagaaactgcatacc

SEQ ID NO: 213691 - DNA, 404 bp, Glycine max
atgcactgtgttatttcaggtccgcgacgatcgagctcactcggccgcggccgcccttttttttttttttttaaaccataaaaaacagttaacaaaacttccttataaattaaatgcaaatttaagacatccctcctcagcagcaaaggaaatggactaaaaccctatggctgcttgtgaatttgaaaatctcagacttttaccatcaaaacaaaaaacagtactcatcaaaaacaatcagcaacgaaaatgttaccgccgatcaagaacccagttttgaaggctacggctacatgaaatcggcggacacttcaaaatataactggtaaaacaaacacctaagactctgcaaagataaactactgtaaaggaacaagtttttttgaaaccacgttgatgatcac

SEQ ID NO: 213692 - DNA, 495 bp, Glycine max
cgttgccattctcatcctcctctgtctctctctctccaccatagccatggagccttacaagctccggccattcagcgccttcaattcttccttctggactacaaattctggtgctcctgtttggaacaacaacttctctttaaccgttggagctagaggtccaattctgcttgaggattatcatcttgcggagaagcttgcaaactttgacagggaacgtatcccacaacgtgttgtccatgccaggggagctagtgcaaagggtttctttgaggtcacacatgacatttctcacctgacatgtgcagatttccttcgagcccctggagatcagacgcctgtgattgagcgtttctcaactgtcattcatgagcgtggtagccctgaaaccttgagggaccctcgaggttttgccgtgaagttttacaccagagagggtaactttgaccttgctggaaacaaccttcccgtcttcttgaacgtgacggcatgaaa

SEQ ID NO: 213693 - DNA, 414 bp, Glycine max
gtccattgtgttattcccgggtcggctacctgacgtctcactacggcgcggcgctcgccctttttttttttttttctaagcacatacaaacggcatttattgagatagctcatcgagttgcatgcttggtgttatgggtacacaactaaaattgcaagaaatggatcagtcctttaaaattgatcgacaatcacattcttattgtactctttgcgcgcttgcaactctaacaatcattctggggttggcacccacatttaatattgggcctcatgctcagactagatgctatattttggtctagagaacggtcagcctgacacccgtaagatgtcctgacactgcggactacatgggtgacccgtgggttgtataagtcatcagccctcggagagaaatatatcctgcctgtat

SEQ ID NO: 213694 - DNA, 368 bp, Glycine max
atgagctcctacgagtacctcagcactggacttcgccagtacttggacaacaaaatggatggattctacattgctccagcttttatggacaagcttgttgttcacatctccaagaacttcatgaccctgcccaacatcaaggttcctctcattcttggtatctggggaggcaagggacaaggaaaatctttccaatgtgagcttgtctttgccaagatgggaatcaaccccatcatgatgagtgctggagagttggaaagcggaaatgcacgagagccagcaaaactgatcaggcagacataccgtgacgctgcagacatgatcgagaatggaaagatgtgcgctctctttatcaacgatcttgatgc

SEQ ID NO: 213695 - DNA, 538 bp, Glycine max
aatggcctcagccgcatcccccaccactttctctctcctccactccgccaccccttcctcctcctccaccgccacctccgcctccccctccccctcgcgcgtgcagctcacctcctccctccgcgcccgcccgctgcgccgtctgggcttcgccgcggcggacccgctgctcgcggcgagtgtagcggcgcgcgtggcggcggtgagaggaggaggaaagggcgcgaggggggtggtgtcgatggcgaagaagagcgtgggggacctgagcgcggcggacctgaaggggaagaaggtcttcgtcagggccgacctcaacgtcccgctcgacgacaaccagaacatcaccgacgacaccagaatccgcgccgccattcccaccatcaaacatctcatccaaaacggcgccaaagtcattctctccagccacttggggcggccgaagggtgtcactcccaaatacagcttggcgcctctagtaccccggctttctgagctcattggtatccacattgtcaaggccgaggacagtattggt

SEQ ID NO: 213696 - DNA, 512 bp, Glycine max
gccagcaactaaaagatttatttgaatttatggctctcagccagggtttacagttacacgcaatttatgtgtgaagccaataataactcaagcaagataaaatttacactaacagacttcgaagggtcctacaacatatgctcttttacaagattgacaacactgacacctgaggatgggaaaattttccaagatgaaaagtgtcttacacagcgactgggacggcttcatcaagagcaaggactcctggaagctctttgccttccaataactccaaactggcaccaccaccagtagatatgtggctcatgacactagcaactcctactttctccacagctgcaacagaatctcctcctccaataattgtgggcaccccctttccactgaggtcagccagcttctttgcaatagcctctgtaccaacagcaaacttgtcaaactcaaacactcccattggtccattccatatgatggtttgggtagtatccaatgcttcactgaatgattta

SEQ ID NO: 213697 - DNA, 554 bp, Glycine max
tcaaaacactcataacacaaagcacaaagcaaagctcatccttgagttaaaaaatggcagcagcttcttccatggctctctcatccccatccttggctggcaaggccgtgaagctgggcccatcagccccagaagtgggaagggtgagcatgaggaagaccgtcaccaagcaggtctcctcaggaagcccatggtacggcccagaccgagtcaagtacttgggcccattctctggcgagcccccgtcctacctaaccggtgagttcccaggcgactacggctgggacactgctgggctttccgcagacccagaaaccttcgccaagaaccgtgaactcgaagtgatccactccaggtgggccatgctcggagccttgggctgcgtcttcccggagttgctgtcccgcaacggggtgaagttcggagaagccgtgtggttcaaggccgggtcccagatcttcagcgagggtgggctcgactacttgggcaacccaagcctgatccacgcccagagcatcctcgccatctgggccacacaagttatcctaatgggt

SEQ ID NO: 213698 - DNA, 501 bp, Glycine max
gtaaaaagcaagtaacattaagttggattcggatacacaagataattcacattatctgaagtacttcaccaaacacaaatctaaaaactctcaaaagtcatttcgttctttgacgctcactttccggggacgaagttggtggcataggcccaggcgttgttgttgacagggtcagcaaggtgatcggcgaggttctccaatggaccctttccggtgacaatggcctgaacaaagaagccaaacatagagaacatggccaatcgtccgttcttgagttccttcaccttaagctcagcaaaagcctgtgggtcatcagcaaggcccaatgggtcgaagctgccacctgggtagattgggtcagtgacctcaccgagggggccaccagcaatacggtaaccttcaacggcacccattaggataacttgtgtggcccagatggcgaggatgctctgggcgtggatcaggcttgggttgcccaagtagtcgagcccaccctcgctg

SEQ ID NO: 213699 - DNA, 402 bp, Glycine max
tacttgtatatacatattttgtcccgtctttgtaaatacaattgggacactactaggattgggaagaagggtctttacatttttagtttggcaaatagatattgcaactacctttgaataaatctatttctgaagaagcaattacaactttcaagggatgatagcattttgtggcataaggattaaggaggcataaaggaccaattgctttggaatattcactcatgacaaggcacagggtcatgcgtgtatgccaacacatagtaatgatgtgtgtttatattcagtaggcaactggcagatcgggttatcccttgtcacttttgtataattattttggaagaatttatgatgtcaaagttattgattaatattaatggcgacattgtatttattatttgt

SEQ ID NO: 213700 - DNA, 493 bp, Glycine max
tgaactgtcgaattcaggcccgcgaccatcgacgctcactacggccgcggtcgccctttttttttttttttttttttttttttttttacttaaggtaaaggctccaaatttaatttaagtggacactttaactcaaaacaatagcggaagacagcccaatatgaaaaataaaggaaaggcggcgcaaaattggcaacttttctttgcacccaggacattgagaattctaagaatgttacacgcaaggcccatcacaactggtagcacttggatcagcacaaccttcaggaacaaaaatacccacctgcccagtttgctttgcctccaattcaagacgggaagaaagcccccccgttaataggaaactcgttagcatttccaagagcaaccttggtcaagcacccgccagccaattggactctcttgacattctcttgctcttggacaagcatgttaccatacgtcaagagcttctccagagtcatcttgggct

SEQ ID NO: 213701 - DNA, 450 bp, Glycine max
aacatcaaaccaaaaataaagagtgaccccctttaagcggaggaatggactacaggcaacatttattgctgatcacttgaataacaatacccatacaggatataagagggaaggcactgtattaacattcaaaaagaatcaacagtgtgagcctacctgtaagccacctaactgacaaggcttcctgcggaaggcaaaccagaagaaacattcttttcaacaccacattactccatccctattctgatcatgaaagaaccataatggccaaatgcgatgatcaactgattagcgggaagccaatattccgaccgatcataaatggccgcgcagccaacttgctaaactgcgtgaccacctaaatgatcaccagtgatgtgtatgtaaacttctcgggtggtgcatacaaaaggctaatgaacgggaaatgcaactctaactggaccattc

SEQ ID NO: 213702 - DNA, 498 bp, Glycine max
ctcataacacaaagcacaaagcaaagctcatccttgagttaaaaaatggcagcagcttcttccatggctctctcatccccatccttggctggcaaggccgtgaagctgggcccatcagccccagaagtgggaagggtgagcatgaggaagaccgtcaccaagcaggtctcctcaggaagcccatggtacggcccagaccgagtcaagtacttgggcccattctctggcgagcccccgtcctacctaaccggcgagttcccacgcgactacggctgggacactgctgggctttccgcagacccagaaaccttcgccaagaaccgtgaactcgaagtgatccactccaggtgggccatgctcggagccttgggctgcgtcttcccggagttgctgtcccgcaacggggtgaagctcggagaagccgtgtggttcaaggccgggtcccagatcttcagcgagggtgggctcgactacttgggcaacccaagcctgatccac

SEQ ID NO: 213703 - DNA, 468 bp, Glycine max
cacagaccaaagtgcagagaacaacaaagttcacaactttaaggaaaattgaaatggcccaagtgagcagagtgcacaatcttgctcaaagcactcaaatttttggccattcttccaactccaacaaactcaaatcggtgaattcggtttcattgaggccacgcctttggggggcctcaaaatctcgcatcccgatgcataaaaatggaagctttatgggaaattttaatgtggggaagggaaattccggcgtgtttaaggtttctgcatcggtcgccgccgcagagaagccgtcaacgtcgccggagatcgtgttggaacccatcaaagacttctcgggtaccatcacattgccagggtccaagtctctgtccaatcgaattttgcttcttgctgctctctttgagggaacaaactgtgtagacaacttgttgtatagtgaggatattcaattacatgcttggtgca

SEQ ID NO: 213704 - DNA, 542 bp, Glycine max
  unsure (1)..(542): unsure at all n locations
ctatatcggttaaaattttagggtcttcccttagactggtattttcaataggaccaagactatccattgatttacttaattcacacctgtattctaacttcctattaaacaacatagaattaaaccaccatttttccatcgagtttttcctctatttacacaaaaatataatgaatgtatagtcattggatgaagaataaaataatagaaatattccattttgaatattctatctcatgtatttactataaaaaaagtatataaatcaaataactaggattagtaactgaaaataataaagagcgagttggtgttaaaaagaaatgataataaaatcaaaaataataagaaacattaaaaaaaaagggcctcaataggggtaatctatttatctatttatgagtccaattacttcatttagcgactattttttttctttttcctatattctatcttttatctctatacattttttcattttgctttgaagatcgatgcaaanttcatttctttttctggctatagaaaactacatcctatca

SEQ ID NO: 213705 - DNA, 601 bp, Glycine max
  unsure (1)..(601): unsure at all n locations
gcaagatagacttgacaactactgtcctaggcttcaaaatatccatgccaatcatgattgccccaacagcctttcagaaaatggctcatcctgagggagaatatgcaacagcaagagctgcatctgctgctggaacaatcatgactttgtcctcatgggctacttccagtgttgaagaggtggcttcaacaggacctggcattcgctttttccagctatatgtgtacaaggacaggaatgtggttgctcagcttgtgagaagagctgaaagggctggattcaaagccattgcccttactgttgataccccaatactaggacgcagagaagctgatatcaagaacagattcacattgccgccatttttgacattgaagaactttgaaggattggaccttggaaagatggacaaagctgatgactctggacttgcttcatatgtttctggacaaattgatcgtactttaagctggaaggatgtgaagtggcttcaaacaatcaccaaactgccaattctggtgaagggtgtgctgactgctgaggacacaaggatagctatacanagtggtgcagctggaattatagtgtccaatcatggagc

SEQ ID NO: 213706 - DNA, 447 bp, Glycine max
ctcaaaattaagaatatacaatgagtgaattaatgcagcagcagcagtagtcacacaagtatcatcatataatgcttaaaagaaattaagcatagagttttccaaatacaaccttaaatgagttctccaaaaaggaaaagaaaggaggttcatgaaacacatatagaactgtttcctccattgttctgcaccacattatacaaacttggctcaaatgaggagcaaatttttcataatcttggcaatgcgcggggaagaatgcgaggttggtcccaatcagtgacaatgtgatcacgagtgatatccttgagtgaggggcaaccactcaaggccatggttagctcaaactcctcacgtaggatccgcagcacgtttcttacaccagcctgtccttcagcagccaaggagaacaccacagggcgtccaataaatatgccagaggcacct

SEQ ID NO: 213707 - DNA, 346 bp, Glycine max
aagtacacaactcatagcaaaaggtttattaagctgtaaaggtgcatttaaccataaacaaaaatagtctccaagactataaaaacattacattttagacaaattagtcttccacttcatcgtccgtcaacacctactgtaactgctggtgttgctgcctaacaagtatcatattcactgcaaacatcttagtaggagtagcttttgacgaacaactccttcttggcttcctcggattcaccctcaccagagtactttccaagctgagcgagtgagttggacttggcacggaatgcgagtgcatcttgtgctgccttcacgttctctgggcggtctccccatgttt

SEQ ID NO: 213708 - DNA, 572 bp, Glycine max
cttctggttctttgaagaagaacccttctctttgcgcgtgtcccgttctcttctccaatcctcctccatccccactgtgtgatctgatcctaaaccctatagccatgactaccatggaggttaagctatggaatgacaagcgcgagagagaaatgtatgacaactttggggagctttatgccattatcaaagccgctgagaggcttgagaaggcctatgttagagatataatctcaccccaggaatatgagttagagtgccagaagctcatagctcatttcaaaaccttagcttccacccttaaagacaccgtgcctagcattgagcgatttgcagatacttacaagatggagtgcccagcggcgattaaccgtcttgtggtttccggtgttcctgctacggtggagcatcgtgcgactgtggctgcctctgcttccacctcggctgctattgtggccgagtgcgtccagaattttattacttctatggattctttgaaacttaacatggtggctgtggatcaggtgcacccgttgctctcggcctttatgcttcactcaataagttgacta

SEQ ID NO: 213709 - DNA, 507 bp, Glycine max
cttctggttctttgaagaagaacccttctctttgcgcgtgtcccgttctcttctccaatcctcctccatccccactgtgtgatctgatcctaaaccctatagccatgactaccatggaggttaagctatggaatgacaagcgcgagagagaaatgtatgacaactttggggagctttatgccattatcaaagccgctgagaggcttgagaaggcctatgttagagatataatctcaccccaggaatatgagttagagtgccagaagctcatagctcatttcaaaaccttagcttccacccttaaagacaccgtgcctagcattgagcgatttgcagatacttacaagatggagtgcccagcggcgattaaccgtcttgtggtttccggtgttcctgctacggtggagcatcgagcgactgtggctgcctctgcttccacctcggctgctattgtggacgagtgcgttcagaattttattacttctatggattctttgaaacttaaca

SEQ ID NO: 213710 - DNA, 548 bp, Glycine max
cacaatataaaataaagcttcaatgatcagcacatagccatcatttgtaaatatccaggatccagcattaaaaatgtatgagctgtgaccaaatagaaaattcctttccaatcatcagattagtatccaaagaaaaaaaaacatgaaaaaaaaggaaattctgatttaatgtacaagcactggccactcagtcatgtaccagcattgggcagggctgccataaaggaattgtaagaagactcaagatcaaagtgaagctgccgcgcctgttgttcagtcaactcatcagctgcacccatcttggataacctcgcaatccactccttcatttttgttttcccctcaaaatcaggtggcaggatagtcaacttattgagtgaagcataaaggtccgagagcaacgggtgcacctgatccacagccaccatgttaagtttcaaagaatccatagaagtaataaaattctggacgcactcggccacaatagcagccgaggtggaagcagaggcagccacagtcgcacgatgctccaccgtagcaggaacacc

SEQ ID NO: 213711 - DNA, 589 bp, Glycine max
  unsure (1)..(589): unsure at all n locations
aaaccctagaacgggagagatttcattccccaaaaaatctcttccttctctctcctcatttctgagttcccaactttcctcacctgagatctggtgtgacgtgcatcacaattgaatcgaattgaaatttgttgtcgtggttgcagcaaggaatgccgctggtattagcgaaaagcgattcgatccagattcgcgaggtatggaacgataacctggaagaggagttcgcgttgattcgcgaaattgtggacgattacccttacatcgccatggacacggagtttccagggatcgttctccgacctgtggggaatttcaagaacagctacgattaccattaccaaaccctaaaggacaacgtcgacatgctcaaactcatccaattgggcctcactttctccgacgagcacggcaaccttcccacgtgcggcgacgaatccggcacgtgctgcatctggcaattcaactttcgcgaatcaacgttaacgaggacgtcttcgccaacgactccatcgagctcttgcggcagagcgggattgattttcagaggaacaacgaanacggcatcgacgccaccgtttcgggagct

SEQ ID NO: 213712 - DNA, 602 bp, Glycine max
gccggccatgtttgccgagccgtacgtcgccgacagcaaggacccggcgtactcgccgcccacaccaggcatgaaggtgcagacgaataagaacgccctcgttcccgagatcgtccccactttcgagccttccgacgccgacattcccgacaactatgtcacccagaccgtgttgaagcaaaaatacctcccgcccatcacatggcggaatctgctctccaacatccaatgggtttcgttcttggcgttgacgatcacgcctgctctggccatctacggcctgtgcacggtgccttacaatcagaagacggcgatctgggctgtcatttactactacatcaccggtctcggcatcactgctggctaccatcgtctgtgggcacaccgctcgtacaacgcttcggtgcccctccagtacgcgctttcgctcgccggcgccggcgccgttcagggctcgatcaagtggtggtcccgtggccaccgtgcgcaccaccggtacaccgacaccaagctggacccttactcggcgcacgagggcttctggtgggcgcacgtcggatggatgctcggcaagccgcgcggcaagattggcgttgccgaca

SEQ ID NO: 213713 - DNA, 502 bp, Glycine max
gggactcactctggcagcggcactctcggtggctataatctttctgtggtgagttgtcaagatgtacacatcaaggaagaaaatccacaaggataaggatgctgagccaactgaatttgaggaatcagtcggacaggcattgtttgatctggaaaataccaacaatgagctgaaaagtgatctgaaagatttatacataaactcagctgtccaaattgatgtttctgggaaccgcaaggctgaggttatccatgtcccctacagattaaggaaaggattccggaagattcatgtcaggcttgtgagagaacttgagaaaaagtttagtggaaaggatgtaatcctgattgccacccggaggatattgaggccaccaaagaaaggttctgctgttcagcgtccccgcacccgaacacttactgctgtacacgaggcaatgctggaagatattgtattgcctgctgagaattgtggaaagcgttgtaagtataaaaatgatggt

SEQ ID NO: 213714 - DNA, 523 bp, Glycine max
  unsure (1)..(523): unsure at all n locations
ccaaaacaaaacactgacataaatagtagaaatacgggcatcatttgttataagaaaatatatcaaattctacattgataaaccaggagacagtattttctataagtaccacccctaaagaaaatccagaattaaagccaacttaacaaaaccagcatccaccatatataattcagaaacaaatgcaaagctaacaaatagaacctaagcctcggtggtaggatactcaaacacaatatctttgcccgaaagtttcctgtatactgcagcaaaagtctccaatttgtactcggtgttgtttcgctccttggggtccaaaaagaccttcataatcttggaaccatcaattttatacctaacacgctttccaacaatctcagcaggcaatacaatatcttccagcattgcctcgtgtacagcagtgagtgttcgggtgcggggacgctgaacagcagaaccttttttggtggcctcaatatcctncgggtggcaatcaggattacatcctttccactaaactttt

SEQ ID NO: 213715 - DNA, 403 bp, Glycine max
ctcacccttactatcttctgccttctcttcttttgacttatcaatattatccttatcctcatcttcatccttctcatcctcctccatcaccacttcaactttctcattttctttgctctcctccttctccttaataccaccctccacttccatagcatttactactggtttctcagattcctcttttccattttctggctcaccttccattgttggcttaatctcagcgtcttcatccattttatcattttcagatatatgatcatctgtcttatcctcttctatttctttcaactcatcacctttgttatcttctacttttttcacaccatcaacttccccatcctacttaacttctttcacacatgacacaccatgcacttccttatcctcttttacttct

SEQ ID NO: 213716 - DNA, 547 bp, Glycine max
gtggattggttgcagctggtgtcatcccatcaccttttgattatgctgatgtagttactaccacaactcacaagtcacttcgaggaccacgtggagctatgatattctacagaaaaggggttaaagaaattaacaaacacggaaaagaggtattgtatgactacgaagacaaaatcaaccaagctgttttccctggactgcaaggtggccctcacaaccacactattactggtttagctgttgcgttgaagcaggccactactcccgaatatagagcatatcaagagcaagttctcagcaacagctttaaatttgcacaggctctgagtgagagaagctatgagcttgtctctggtggaaccgagaatcacctggttttggtgaatctgaagaataagggtattgatggctccagagttgagaaagtgttggaagcagttcatattgcagctaataaaaacactgttcctggagatgtgtctgccatggttcctggtggcatcaggatgggaacccctgctcttacttctagaggatttgttgagga

SEQ ID NO: 213717 - DNA, 422 bp, Glycine max
gacttactggtcggcggccgccctttttttttttttttttttttttttttttttttgataagatcattaacgatatcattaagaaaacactaaaagatataactcgaacgccaaagaaactgaaaaaaagaaaaatcaattaaaaaacttaaaatattatgattccttgttctttttttcctcctccttctcctgaaacatcacaccactttctagaagtcatcaccatcgtaaccaagatcatcctccactctttccgccacgtcatcttcaacttcatttcccacctcatgaccctcatcttgttcaagttccttctaatcatgatcaactccaccatactcctcaggttcatactcaggatcattatccttcaaatctaagcgtgcatctttctaatattcatctatggagtccttaac

SEQ ID NO: 213718 - DNA, 520 bp, Glycine max
ctatgacatgattcaatcgatgcaccaaaaagaattagcagagatctcgaggtggtggaaagacttgggacttattgaaagacttggttttggaagagatggaccaagagagtgtttcttatgggcattggggatttttccagaaccctcgtcattcaagttgccgtattgaacttgcaaaagccatctgcgttttacaagttatagatgatgtgttcgacacttacggaacattagatgaacttgttctttttactaaggcaatcaaaaggtgggatcttgatgcgatggagcaactacctgaatatatgaaaatatgttatatggcattgtacaacaccacccatgaaattgcatacaaaattcagaaagaccacagcctaactgtagttgcttgtttgaaaataacatggatagacttaattgaagcttatcttaaagaagccaactggttcaacaacaaacatgtgccaactttttagcaatatttggataatggggtgatttcttcaggatcata

SEQ ID NO: 213719 - DNA, 549 bp, Glycine max
ggtctttggggaaagttctgaatactccagaagttgtgcgtgtatatattggctcatttaatgttaagcctataaacgaaggctttgttggcccattaggacaggaactttttgagaaggaacagaatgatctcttggcagacttgggtagatattccaaggaaggcatgcgacagtcggatcaatgaatttgtgaaacgtgctagatctgctaaaattcatgcatatataattagtcatcttaggaatgagatgcctgcaatgatgggcaaagctaagactcaacaaaggcttatagataatcttgaagacgaatttagaaaggttcaaagggagtttcatctaccagctggtgattttcccaatgtagaacacttcagagaggttttgagtggctatagcattgacaaatttgagaaactaaagcccaaaatgattcaagccgtcgatgatatgcttggatatgaaataccagagttattaaagaaattcagaaatccttatgattgaattaaaagaatgtttaaacatgttattatgtgatgaatg

SEQ ID NO: 213720 - DNA, 585 bp, Glycine max
tcatgataaagaaaagctgcaatcaatccttgaaactagggatcttgacattaaggatctgaaggatgaagtcaaacaactcaatagaatctgtgaagactctaaaatgatcaagaatgaattgtctgagctcacctatgtattaaaaaaaattatggatattttgggagctggtgaatgggttgtagataggaaatctaaaggttcgaaggaattaataccagcattggagaagcatatcattgccattctttcagaatctgaaaattcaaaatccaaggctcaggaacttgatattaagttagttggaagtcagaaggttattgatgaattaacgaccaaggttaaattacttgaagattcactccaagataggacttctcagccagacattgtacaggagaggagcatatatgaagcaccctcattacctgctggatctgagataattgaagttgaagagggatcatcacttagcaagaaagcaatatctcctgtcccatcggctgctcatgtgcggaatatgcgaaaaggatctactgaccatcttgcactcgatattagtggggagtctgataatttgat

SEQ ID NO: 213721 - DNA, 415 bp, Glycine max
gaccgcgtgggtccggtcgcgagcatacccggtcgacggctccttttttttttttttttttttttttttttttttttttttttttttttttttttttttttttttttttggggatttaaataagtcatccttaaaatttttgtacatttttgttcccttaacgttcgaaaaaattcatttacctattttttcccccccaaatcctttgattttgaagctgtcagaccatgggggggtaatgccatgggggggcttccattttaaagaaaaagaaggctggcaaaaaagggggccaaacattgtagaccaggatctttgaatccctaagaggggattgcgggaaacaaataggggattgacgagacttaggaaaaacaggcttaagaagcaaatggaaagacctggattaaagggg

SEQ ID NO: 213722 - DNA, 498 bp, Glycine max
  unsure (1)..(498): unsure at all n locations
accgccacaaatttctccatagttatgggcacttccattctcgacgccctgaacgttcgcgtggaaggttccggcgacaagtaccttgtcctggcccacggcttcggcacggaccaatccgcgtggcagcgcgtgctcccttactttacccgcaactacagcgtcattctctacgacctcgtctgcgccggcagcgtcaaccccgaccacttcgactaccgccgttataccaccctcgacgcctacgtcgacgacctcctcaacatcctcgacgccctccgcgtcccccgctgcgcctacgtcggccactccatctccgccatgatcggcatgctcgccttcatccgccgcccggacctcttctacaaactcatcctcatcggcgcctcccctagattcctgaacgacaaggactaccacggnggatttgagcagggagaaatcgagcaggtgttttcggcaatggaggcgaactacgaggcgtgggtcaacggattc

SEQ ID NO: 213723 - DNA, 471 bp, Glycine max
cttttctctctcgttttttctcaaaaagttgcaagagttaaagcaaaaaccaaagtgagagagaaaatgatgaagccatcgatgctcagatctcttcactctgccgccacccgcggcgcctcccacctctcccgccgtggctacgcctccgagccggtgccggagcgcaaggtggccgttctaggtgccgccggcgggatcgggcaacccctctcccttctcatgaagctcaaccccctcgtttccagcctctccctctacgatatcgccggaactcccggtgtcgccgccgatgtcagccacatcaacaccggatctgaggtagtggggtaccaaggtgacgaagagctcggaaaagctttggagggtgcagatgttgttataattcctgctggtgtgcccagaaagcctggtatgactcgtgatgatctttttaacatcaatgctggcattgttaagacactgtgtact

SEQ ID NO: 213724 - DNA, 444 bp, Glycine max
agcaacaaaaagctctcagacttaaattattaaatcatggcgtatacctactctaaataaaacaacaaagtcgccacaccactgccggcaacaatacaacaatggttctgagattgcaaaatttgatttggttcttgaaggaataacattaacattagcctaccagacacgtatgtgataacatgttcaattactggttggcaaatttgattcccttctcaattgatgatttgagttcaggcttaaggctttcgaggccttgttgctcaaaatctgagagaggtcctaagcccagaacttcctccactccattcttcccaagcctcaccttggaagcaaagtagggaagttcagtaacagtggattgcacgaatgagcactccacaacatctgggactccattgaggcccttaaggcaagcatcagcaaatagggcaccagcat

SEQ ID NO: 213725 - DNA, 578 bp, Glycine max
  unsure (1)..(578): unsure at all n locations
tagggttatcatttctccatttccattttctctctcacttttcaagaatcgtaagctatgggaaagtcttacccaactgtgagtgctgattaccagaaggccgttgagaaggcgaagaagaagctcagaggctttatcgctgagaagagatgcgctcctctaatgctccgtttggcatggcactctgctggaacctttgacaagggcacgaagaccggtggacccttcggaaccatcaagcaccctgccgaactggctcacagcgctaacaacggtcttgacatcgctgttaggcttttggagccactcaaggcggagttccctattttgagctacgccgatttctaccagttggctggcgttgttgccgttgaggtcacgggtggacctgaagttccattccaccctggaagagaggacaagcctgagccaccaccagnagggtcgcttgcccgatgccactaagggttctgaccatttgagagatgtgtatggcaaagctatggggcttactgaccaagatatcgttgctctatctgggggtcacactattggagctgcacacaaggagcgttctg

SEQ ID NO: 213726 - DNA, 352 bp, Glycine max
agggccgaaagaacactttcattatcgctgaacaatgttttttaacaaaagtttcagccccaattaaaaacaccatcccaacttcccaatcattggaacgtccagcaaaataccttcaaaagctttttaaaatctggggaacccactttggcattaaaaaccaggaccatacaattttttaaagaaaaattatgggcaccatgcctttttaacaatcccctaaacgttggttaggccttagcaaacccaagcttggaaagcttttggggagcctcagcgtaatcaggaaagaaggccttttcgtccgctgcatttttatcaacgagagggcggaataccgggtcaaacaaaa

SEQ ID NO: 213727 - DNA, 482 bp, Glycine max
cattcgaattcattttatttatatattaatattatattcaaatgaaataaaaagatattaaaagatactaattataagaatttgaaagtgaaattataaagttattaaatgattaatcaatttttttctacctgttcctgtagtaaaaagagttccatctgttcttgaatagcttccttcaaaaggacttctgcttccccagtgaatgtcttggtagaagatatgatttctttgaattgaggtttattcgtgtttaagtaagcacgtaactcaacaagaaatttccttacctgtccaatttctaatgaatcaagataaccattcgttccagtataaatagttattatctgttcttccacggtaagaggagctgattgggattgtttaagcaactcgcgcaatcgttgacctcttgctaattgattttgagtagctttatcgagatcagaagcgaattgggcaaaagcttctaattctgcgaa

SEQ ID NO: 213728 - DNA, 521 bp, Glycine max
gaagttaaaagccttagccttccctacaactccaaacacaaagacatcatcatccatggctgcctccgtctccactgtcggagctgtcaacagagctcttttgaacctgaatggttctggagctggagcttcagctcccagttcagccttctttgggaccagcttgaagaaggttattgcctcaagggtccccaacagcaaggtttccggtggaagcttcaagattgttgctgtagaagagaagaaagagattgaagagacccagcagaccgacaaggacagatggaagggtcttgcctatgatatctcagacgaccaacaagacatcacaagaggaaagggtttggttgactcccttttccaagctccacaggatgctggaactcactatgcagtcatgagctcctacgagtacctcagcactggacttcgccagtacttggacaacaaaatggatggattctacattgctccagcttttatggacaagcttgttgttcacatctccaagaacttcatga

SEQ ID NO: 213729 - DNA, 482 bp, Glycine max
ctctctcttgcttgcgaaggaagggtcccacgtacacttgtttatcattcaacagcaagagagagaaagtgctgctgacaaggcaaaattcaacaatgtttttgtgaagaatctatcagaatcaaccaccgatgatgagttgaaaaacacttttggtgaatttggaactattactagtgctgtagtaatgagggatggggatgggaaatcaaagtgttttggatttgtgaattatgagaatgctgatgatgctgctagggctgttgaggctctcaatggcaaaaattttgatgacaaagaatggtgtgttggaaaagctcagaagaaatctgaaagggagaatgaattgaaacaacgatttgagcagagcatgaaagaagctgctgataaatatcaaggcgcaaacttgtatgtaaaaaatttagatgatagcattggtgatgaaaaacttaaggagctgttcttcccttttggtaccatta

SEQ ID NO: 213730 - DNA, 600 bp, Glycine max
  unsure (1)..(600): unsure at all n locations
gatcttgcaaaaaaaaaaaaacacaatggcagcgagcgctcccactccacgcgaagagttcgtgtacatggcgaagctggcggagcaggccgagcgctacgaggagatggtggagttcatggagaaggtctccgccttcgccgagagcgaggagctgaccgtggaggagcgcaacctcctctccgtcgcctacaagaacgtaatcggcgctcgccgcgcctcctggcgcatcatctcctccattgagcagaaggaggagagccgcggcaacgaggaccacgtcgccgtcatccgtgactaccgctccaagatcgaggccgagctctccaacatctgcgacggaatcctcaagctcctcgacacgcgccttgtcccctacgccgnctccggcgactccaaggtcttctacctcaagatgaaaggagactaccacaggtacctcgctgagttcaagaccggcgccgaccgcaaggaagccgncgagagcacgctctccgnctacaaagccgatcatgacattgctaacaccgagctgccttcactcaccctatcaggctgggtctngctctgaatttctctgtgtttactatgagattctta

SEQ ID NO: 213731 - DNA, 288 bp, Glycine max
aaaataacacacacttcacacatcattacgacaattaaaagaggtgtggaaattttcaaatagacagagcatactcaacaagagggtcatgtctaatttcctttattgaattaaacaaacgaacaaacgaaagaaaacacaaattccagatcatgcagaggattccgcattttcagaagatctggcagtagcctgtggaacagaaaaagctggcataagagttttaccagcaatttcaaaaacttgagaaatttccaagagaatatcaaaaactggagaccggttggg

SEQ ID NO: 213732 - DNA, 491 bp, Glycine max
  unsure (1)..(491): unsure at all n locations
gttgtggtggaggagttgcagctgcagttcttgcaaattctggtcataaagtagtagtccttgagaaaggagagtattttgtttcacatgattattcttcccttgaaggtccatccatggatgaacaatacgaatccgggcggattatgccgagtcttgatgggaagatgatgatcctggctggctcaacagttggtggaggctctgctgtaaactggtctgcaagcatcagaacacctgattctgttctgagggaatggcctaaaaaatataaaattccactctttggtagctccgattaccaatctgcgatggactcggtgtgcagaaggattggcgtaacagagaagtgcaagaaggaaagctttcagaaccaaattctcatacaaggatgtgagaaaatgggcttgaaagtagagtctgtggctataaattcctcagcagatcactattgtggntcatgctgttatggttgccgaacatgagataag

SEQ ID NO: 213733 - DNA, 511 bp, Glycine max
cactacactttgtctctgttctgtgtgtgcgagaaatggcgatggcaatggcgcttcgcaggctttcatcttcaattgacaagcctctgcgccctctcttcaatgccggttccctctactacaagtcgtctttgcctgatgaaagctgttaacgacaaggagcgacccggagttacatggccgaagcagttgaatgctccacttgaggtcgtggatcctgagattgctgatattattgagcttgagaaagctaggcaatggaaggggctagaattgataccgtcagagaatttcacctctgtgtctgtgatgcaagcggttggatcggttatgaccaacaaatacagtgaggggtaccctggtgcaagatattatggtggaaatgagtatattgacatggctgaaacactgtgccaaaagcgtgccctataagcttttagattggatcccgctaaatggggagtgaacgtgcagcctatgtcagggtctcctgcaatttccacgttacact

SEQ ID NO: 213734 - DNA, 595 bp, Glycine max
taaaagccttagccttccctacaactccaaacacaaagacatcatcatccatggctgcctccgtctccactgtcggagctgtcaacagagctcttttgaacctgaatggttctggagctggagcttcagctcccagttcagccttctttgggaccagcttgaagaaggttattgcctcaagggtccccaacagcaaggtttccggtggaagcttcaagattgttgctgtagaagagaagaaagagattgaagagacccagcagaccgacaaggacagatggaagggtcttgcctatgatatctcagacgaccaacaagacatcacaagaggaaagggtttggttgactcccttttccaagctccacaggatgctggaactcactatgcagtcatgagctcctacgagtacctcagcactggacttcgccagtacttggacaacaaaatggatggattctacattgctccagcttttatggacaagcttgttgttcacatcttcaagaacttcatgaccctgcccaacatcaaggttcctttcattcttggtatctggggagggcagggacaaggaaaatctttccaatgtgagct

SEQ ID NO: 213735 - DNA, 392 bp, Glycine max
tcacttgtcggcggccgccctttttttttttttttttttttttttttttttttttttttttttttttataggacaaaaggaaaaggcaccaaattcaatttaagtggacactgtaactcaaaattatagaggaagacggtccaatttgaaaaatatagtaagatcatcttaaacttagcatcttctttttgcacctaaaacattgagaatgctaaaaatgttacacgcaagttccatcacaacttttagcacttggattagtacaacaaccttcacgaacagaaatatttacttgccaagtttgctttggcttcaattcaagactggaagaaaggtcccctctgaatagcatcctcgttagcatttccaagagcagcctcgttcaagtactt

SEQ ID NO: 213736 - DNA, 463 bp, Glycine max
ctcagaaagcatagcattctatggtggagagaggaaagaagaaacttatattcaacagaagtttaaaaccttggttaggcacatgtatagtgtgctacatgaccattggtggtttggcatgattcaggacttattattgaagtaccttggtgctactgatgctgttattttgattattgaacctttcttttctggtcatctaaggcctgatagttcaactttagggcgtgcagagatgttaagcaatcttagatatcatactagtgtcataatttccttatttcaggctctaggaactctttctatcagtgcaagactgctcaatcgtcttagagggtatgctgatcgcatttatgaattaatggctgtatcaagggagctaagcttggagaatgagacatcttccctgcaaagaaatgcaagtagaaattgcatacgtgaagctaactacattgaatttgat

SEQ ID NO: 213737 - DNA, 479 bp, Glycine max
attaaaattaaccatagttaatataatggggtcggggattaaggtttcgttttctgtgttgtgattgttagggttagtcattgagggtgatcatgctgcgtatgctcaagactcaccaacagactttgttaatgcacacagcgcttgatgatcacaggttggtgtttcaaatatacgttgagatgacacaggtgtgggttttgcacagaactatgctaaccaacgcaaaggtgactgcaaacttgaccactctggtggtgatggaaaataccgtgagaatcttgccggacgcaccgggcacctaagtggttcaaatgcaaagaaattgtcggttgatgagaaatccaagtatgactacaattccaacacgtgcgtaggtggggagtgcaagcactacactcaggttgtttggaaaaactttgtgcgtcttggatgttgcaaagataagtgtgacaatggaagcacttttattacttgca

SEQ ID NO: 213738 - DNA, 434 bp, Glycine max
acaccccacaacgttcaaaactaacatcattatatattaatcatgggagtcatgtcctcacatgtttttattactatccaccgggaaaatatcatttcccccatgaatttatagtcgtcacgtagctaaatccatgatgttaagaattatttcttaatatataagccagcaatctgaagggggagcttggtagctggtacactgcaactacttagtaggggttttggccaacatagttgccaggaggagcattgttgcacgtaatgaaagagccttcattgtcacaccttacttttccacatccaagacgcacagagttttttcaaacaacctgagtgtagtgcctgaactccccaccaacgcacgtgtaggaattgtagccatactttggattttcatcaacccacaattttactggatttgcaccacttaag

SEQ ID NO: 213739 - DNA, 458 bp, Glycine max
cgttgccattctcatcctcttctttctctctctaccattgccatggatccctacaagcgccggacgtccagcgccttcaatactcccttctggactacaaattctggggctcctatttggaacaactactttccttttaaagcgttcggagctagaatgtcccattctgctcggaggattatcatctctggggagaagctagcaaattttgatagggaacgaatcccagaacgtgttgtacatgccaggggcgctagtgcaaagggtttctatgaggtcacccatgacatctctcacctgacatgtgcagatctccttcgagcccctggagtccagacgcctgtaattgctcgattctcaactggcattcatgagcgagggagccctgaaaccctgagggacccttgaggatttgccgtggagttttacaccagagagggtaactttgaccttgttgg

SEQ ID NO: 213740 - DNA, 538 bp, Glycine max
cgttgacgttctcatcctattctttgtctctctaccattgccatggaaccctacaagcgcgggacatgcagcgccttcaattctgccttctggactacaaattctggtgctgctatttggaacaacaacttccttctaaccgttggagcttcaggtccaattctgctggaggattatcatcgcgcggagaagatcgcaagtttcgatagggaacgtatcccagagcgtgttgtccatgccatgggcgctagcgcagagggtttctttgaagtcacccatgacatttttgacctgacatgtgcagattcccttcgagcccctggagttcagacacctgacttcgatcgtctctcaactggcattcatgagcgtggtagccctgaaaccttgaaggaccctcgaggacttgccgtgaagttacacaccagagagggtttctttgaccttgctggaaacaaccttaccatgttctttgtacgtgatggcatgaaatttgcagatatgggtgatgctcttagaccccaaccccagaaccaca

SEQ ID NO: 213741 - DNA, 582 bp, Glycine max
agcaccttcttctctcgtgtttcacaaactaaagaacaacaatatgcctccaatcttgccggatttctgcaactcggtgaaactcaagtacgtgaaactagggtaccaatacctggtgaaccacattctgactctcactctcatacccatgatgatcgccatcttcatggagattctacgcttaggccctgaagagatcctgaacctgtggcactccctccacttggaccttgtccaaatcctctgctgcgccttcctcatcatcttcatcgccaccgtctacttcatgtccaaaccccgcaccatctacctcgtcgactacgcctgcttcaagccacccgtcacctgccgcgttcccttcgcaaccttcatggaacactccaggctcatccttaaagacaaccctaagagcgtcgagttccaaatgcgtattctcgaacgttccggtctcggtgaagaaacatgtctccccccagcaatccactacatccctcccaagcccaccatggaggccgcccgaggagaagccgaacttgttatcttctccgccatggatgctttgttcaacaaaacaggtctcaa

SEQ ID NO: 213742 - DNA, 347 bp, Glycine max
cataaaataagcaattatcttcttgttcttgaacaattctccatcctagagcttaacgatctcaggaatatcgaccgggtaacgatcaatgcaatcagcccaaggcccatcaaccggtgtcttaatgcttctgttgcacttccacacagcactgttgcattcaaagccactcccagacgctatctgccacaccctatcacccttcttcatcctccccttggactcaatgtagttgagctcataccacagcgaagaagacgaagtgttcccaaacctgtgaagggtcattctagaagcctcaacgtgttccgtagaaagctgaagattcttctgaagctcatcaatca

SEQ ID NO: 213743 - DNA, 601 bp, Glycine max
  unsure (1)..(601): unsure at all n locations
gtgcatacatagctatctatttatctatagcaagtgcgtcaagagacacgtggtaccctagctagagtgccattctgtggtttctttctttctttctttctgcatcacatcacaatttgcattgcctcgtgtcctttttcttctttgctctccaaaaatctcacacacacaggtatctagcaaatgggttctcaccaacaagaaccatggctattggagaatgggaaaccaagggttttgaccaaggagaccaggcatggccgttctgcacacagaatgtcctccacctctttgcgcaagaaatctagccgaactcttgtctcaaaggttccatgtgccactctcagaaactttctttcaaatttgcaagaggttattcttggcaccaagctttccattctcatccctgctattccagctgccatcgntgctgagtgctttggctttggaagaccttggatttttatattaagcttacttggacttacaccacttgctgaacgtgtgagcttcattacagaacaagttgccttttacactggtcccacagttggaggacttctgaatgctacatgtggaaatgntactgagctcataatag

SEQ ID NO: 213744 - DNA, 595 bp, Glycine max
aagttttcaaagccaagcaaatacgagctttacccaattttcttgctgttgaattttccactgttcaatcttcaaaatcacatttttctcgatcttcaccttctgggttgctttttttttttcttcttcttcttcttcttcttttgatttcgctatggaatcgaaaaaccctgcgaggtttacgctggggaagcagtcgtcgcttgccccagaacgccataacaaagaagcagagctccaaaaagatggggaagctgttgatcagggtgtgaggttgatgtattccgcattcgaacgcgatgtggatggaattcgcgacgcgttggagtctggtgtgagtgtgaattacaaggatattgataatcgcactgctcttcatgttgcggcgtgtgagggctccactgatgttgttgatttattgctccaaataagtgctgaagttgaccccaaagatcgatgggggagcacgccactcgcagatgctattttttataaaacgaatgacgtgatcaaactattggagaagcatggagcaaagcctttgattgcccctatgcatgttaatcatgcgcgtgaagtcccagagtatgaaatc

SEQ ID NO: 213745 - DNA, 508 bp, Glycine max
gttacataataatgtacatgacagggagcaaattccttagaatacgtgtatatgttacatacaaatactaattctgtcaccagacataaatgtaattggaaataaatcatcgagtataaagaatcttgaaagacgaaaacaaccatgaacctgtgaatgaatacacacgagaaaacgttgcaaagctccaactcaagaagtcaaatttggttgctatcttttatctttataccaatattttagttacaggataagaccaatgttctccttcatattctgcttgatgtggagcgagatgaaccgacacgactacttccatttgaatgatctctcttcaacaaggcctccagattttggaagcatttcaatggcctaaccttccaatgtcttttgtgaccaattgtgttgtagatggactccagctttgttattatttgcctaaatgttggccgctttgctggattctcattccagcactcttcaatcaattctcgaattccatgggagt

SEQ ID NO: 213746 - DNA, 449 bp, Glycine max
cattcgaattcattttatttatatattaatattatattcaaatgaaataaaaagatattaaaagatactaattataagaatttgaaagtgaaattataaagttattaaatgattaatcaatttttttctacctgttcctgtagtaaaaagagttccatctgttcttgaatagcttccttcaaaaggacttctgcttccccagtgaatgtcttggtagaagatatgatttcttggaatggaggttatttcgggtttaagtaagcacgtaactcaacaagaaatttccttacctgtccaatttctaatgaatcaagataaccattcgttccagtataaatagttattatctgttcttccacggtaagaggagctgattgggattgtttaagcaactggcgcaatcgttgacctcttgctaattgattttgagtagctttatcgagatcaga

SEQ ID NO: 213747 - DNA, 466 bp, Glycine max
agtaaaaaattgagctcgaaaactcacacacaccatcaatttaaaccttgaattttaaacattgtaattggaggtcgatataatatacaaccatgacagtactctcagtagtgctaggaaagttgggtcaagggataatgcagcaacaccatgcatgaagttactaacaaaatctgagccaacaaacaaaacagaaaacaaaacactctatgactcaagctgagcataccagatgccctggatcttgacatcctttggagcctttgctcccaaatcagtgtcagatggttgaacactctcgaacacaccgataacctcacccgtctcaggcttggtcttggtgacactcaaggtgattttgcccttggatgatgaggcacttttattggtttccttggcaagttcttcctcatctcctcttccaccagcaggcatagcaactgcattgtcataacctgtggaagca

SEQ ID NO: 213748 - DNA, 515 bp, Glycine max
  unsure (1)..(515): unsure at all n locations
aaatgataatcacatttcccagaaattatggcatgcccttcaggttgcttaaatgggggaggtcaaattaaaccaaattcagggcaatctcctaaagaactaagtcagttgttagaatcagtttacatggaaaatgttttggtagcatcaccatttgacaatcccatcattaaaggcttatatgacaagtggcttgaacagcctggttctgtgaaagctaggagatacatgcacacacaatatcatcctgttgaaaaaagcattacttctcagttgcataattggtgaggtgttgaaactgaacttttcatattgcttattctcaaggtcattttgtggtattactattaggcggaagagtactttaatccttttgctatggctccttgtggatatgtttgcatattggagtcgtccaattttggtattgaacagattnntttgatgtatatagatccttgatctgcacccatttagatagaaagaattatgcattttgtaatttaccatttgga

SEQ ID NO: 213749 - DNA, 350 bp, Glycine max
ttatgtcggcggccgcccttttttttttttttttttttttttttttttttttttttttttttttttttttgggtttttttttttttttttttaattttttttcttaaatttaaactccatagaacccaaaaaaaaacaaacacgcccaaacatatccgaaaaaacacgacaaaaataccaccaccaaaaaacaggaccccaacaccaagaacggggcgcaaacccaaagaaaagccaaagaaacccgcaggggaaccccacaacagggccccgaacattacaagccaacaaacgggaaccaaggcacaaaaaagcgaaaagccacaccaaaaaaaaacaggccgaagaac

SEQ ID NO: 213750 - DNA, 497 bp, Glycine max
caccaaccttcaaagtccatgaagtctgctccattttgccgccacaagaaaccccaccaacaactcttcccttcaccctcttcgacgtcctatggcttcggatccccccagcggagcgtctcttcttctattccttcccaaacccaacaacaacattatttttcgacaccaccgttctcccaaatctcaaacacttcctctccctcactctccaccacttgccttctctggccggcaccatcacatggcccaatcactcacccctccctctcataacctacactcccggcaacaccatccccttcacaatcgcccaatccaacgcagatttcaacaccctctcttcaaacctctctcaagtcaaccaccaccttcaaaacctaataccccacttaaccatttcccatgaagaagcttccgtgttagcacttcaactcaccctctttctcaaccaaggcttttcgattggaatcacaacccaccacgctgcacttgat

SEQ ID NO: 213751 - DNA, 541 bp, Glycine max
ctctcatctcatcggatcgatcaagcatcagggagctttgagggttgattctctggtgtggtagcgatcagcacaatagaaaatgttttttgacggatatggatatcatgggacatcatttgagcagatatatcgatgctacccagcttcctttattgaaaagccccacatcgagagtggtgacaaaatgatcatgcctacatcagaccttgaccgggtagcatctctgcatattgattacccaatggtgcttgaactgcggaatgatgctgccgagcgggtttctcattgagggggtctggagttcattgctgaggaaggcatgatatacatgccatactggatgatggagaacatgcttttacaagagggggacattgtcaaagcgaaaaatgtgacacttacaaaggggacatatgttaagctacagccccacacaaaagactctttggatattttcaagccaaaagctatcttagaaacaacattgaggagatttttctgcttgactactggagatagcattatggcggcttacaac

SEQ ID NO: 213752 - DNA, 406 bp, Glycine max
gaaaagttgcaaaacttttttaagaagtgaataacttacaaacacctaaaacacaataattacaggattgacgtacaatctttatactttcgtattacaagtgatagataaatttgtcactgcttctgtcgttgtatatttcatggttgcaaattgcaatgttaacataatccaaaaacaagctttggtagggttgcaattagtgattcgggtaccaaaacatgccttttatgccctctgggtcagcttcaaagcctaaattgcgataaaattccacaacttgactatctgcaaacagagttatattgccaatgtccctttgcagaagagttcgaatcagtttctctataagagctttaccaagaccttggccctggtagccaggatcaactaggacatcccaaat

SEQ ID NO: 213753 - DNA, 409 bp, Glycine max
gcgatctagggccacagcaacaataacaatggcagcctcactacaagctgcagctaccttcatgcaacccaccaaggtgggcatggccactcgcaacctcaaatctacacaatgcatttctaaggcttttggcttggaacccgctgcagctaaactcatttgctcccttaagcccgatctcaaagattttgctcaaaaatgtgtcgacgccaccaaaattgcaggattcgcccttgccacctcagctctcgttgtttctggagcgagtgcagaaggtgttccaaagaggctaaccttcgacgaaattcagagcaagacatacttggaagtgaagggaactggaactgctaatcagtgcccaaccattgaatgtggagtggactcatttgccttcaggcagggaaataca

SEQ ID NO: 213754 - DNA, 590 bp, Glycine max
gcgagatattgtactggtgaggtctcggtcaaaactactggaggaattgcaaaagctccttcccccaacagtactgatacctgaaaagagattggaacatctagttgaacaagcccttatcttgcaacgagaggcgtgcctgtttcataactcattggataaagagatgtcattatattcagatcatcactgtggaaaaactcagataccttctaggacattacagatattagaagcacacgatgatgaagtttggtatgtgcaattttcgcataatgggaaatatttagcttcagcatcaaatgatcgatctgcaatcatttgggaggttgacatgaatggtgaactgtctgtcaagcataaattgtctggtcaccagaaacctgtttcttctgtttcatggagtcctaatgaccaagagctcctcacgtgtggtgtggaggaggctgttaggcgttgggatgtctctaccggtacgtgcctgcaagtttatgaaaaaaacggtcctggcctcatctcctgtgcatggtttccaagtgggaaatatatactttctggccttagtgacaagagcatttgcatgtgggatt

SEQ ID NO: 213755 - DNA, 431 bp, Glycine max
gagattgatgaaaagtcacatgcatgtttaggtatgaatgtcgtctacttgtgatagtgaaggtatttacacgtacaattgcaaggttaaaaaaagaaatggaattggaaacagtttgcgtaggttcatctaaattcgccgccattgcagtaatggacgccattggtgcgtacattagggtactttacattcaggcgctttaggccccatatccgaattgtccggtcatcactggcggaggctaacatgtgtgggttagctggattccagctcacacagttaactgctccagaatgaccaggcaatgtctctattaaatcccccgagcttctgtgccatatgtaaacctgagaatcctcactaccactagcaataaaagattgctcaagaccaccaaagcaagatctgataacgaaccggctgcgtttatg

SEQ ID NO: 213756 - DNA, 597 bp, Glycine max
gaaaaaacaattggaaaatggaattaattgtttgtttgatgcaaagcactttgcagttaccatactgtcatcatttcattcccccctaacaatttgccaactaagaaaccccacctttccagctttttgctctctcaaaacttgctcctattgttgttgttgttaccaaaaggttgttccaaatctggatttcaaaaacaatatagattcgccgcaacccatttgaatctctgagagaaggagcatatcaaaatcatttttctttttcctgaagagcaaatgggggcgtatagagctgatgaggattacgattatctgttcaaggttgagctgattggggactctggtgtgggaaaatcgaaccttttgtctaggttcaccaagaacgaattcagccttgaatccaagtccaccattggggttgagtttgccaccagaagcattatggttgatgaaaaggtactcaaagctcatatttgggacactgctggccaggaaaggtaccgagcaatcactagtgcatattatcgaggagccgatggtgctttattagtctatgatgttacccgccatgtacatttgaaaatatgagagatg

SEQ ID NO: 213757 - DNA, 379 bp, Glycine max
agcaaaatggaagtgcatgcttcctgaaaaattgacttgaattgaacagatttctctgcatagcaaagcagaaagttgagattgtaatgctctctagacaatcattttcatgctttaagggtgaaactctacatggatataaacagaacatatacagaggtttttactgcatgctcaagcagaacaacatccatctttcttaacagccgatacgtcatcacgagacccaacatttatcgtctgtccttttggtaatgctgctggatcatcaccaatttcaagggccttcttgcttacaacatgatagatctgtgtcagcacttctgtgaaggcattttcaacgttcatggactcgagggcagatgtttccatgaaaaac

SEQ ID NO: 213758 - DNA, 550 bp, Glycine max
gggaaagtgtacgagaaaattatctctctctatatatagatagataaatgataaaagcctggagggtgcgtcccatccctgaaaatgctatgaggtgttgggaaatggttgaagtagttgaataggaggatcgctatgactatagcttcttggtaaatttaccaaagatgaaaatgatttatttgatattatggatgactggttgcggagggaccgtttcgtttttgtaggttggtccggtctattactctttccttgcgcctatttcgccttggggggttggttcacaggtacgacctttgtaacttcatggtatactcatggattggcaagttcttatttggaaggctgcaacttcttaaccgctgcagtctccactcctgctaatagtttagcacactctttgttgttactgcggggtcctgaagcacagggagattttacccgttggtgtcaattaggtggtctgtggacttttgttgctctccacggcgctttcgcattaataggtttcatgttacgtcaatatgaacttgctcgatctgttcaa

SEQ ID NO: 213759 - DNA, 482 bp, Glycine max
aagaaaaaagaaagttctaattattaataaattatatctatatatatatatatacagatagatattctatatcttttatcttaattaatatttgacccctccttataatgtgttatagttttctttatttttaggaacttatccattccttttttaatgtgcccgacaatccgaaagaattctgggggaggggtcatttcgtttttgatctagaataaatagagcttcaagaaatgagagaattaagaatacccacgagaaacactaatccaatccataatgatgtaccggaaaatacaacatttttgttattcgaccaaccttcaggagaagcaaatacaacaggtacactaatcaataaaataaatgaaatagcaattaatgcaaaaacagctaattggaaagcaatagtcatgtttctaatcctccaatttaccaacaaaagaacctttaccattgatcccccaaccccttgatccctt

SEQ ID NO: 213760 - DNA, 545 bp, Glycine max
  unsure (1)..(545): unsure at all n locations
gcatttggaaatttggctgatgacaccatcaattttgaggcttttccccacaagctggtgcagtttggagagattcaggaaaaagttgtattgaaattttcacaagaggaatttcttacagcttgttcaactcaggtgcgtcctgcaacaactctgttggctgatgggtgtccatatttgtatgctatggtgcatgatagttcagtgtctacaataccaggtgattttgtcattggtgttaagttgacaaccataaacaatatgtgtgcatatgggctcaatcctggtatttcaggttctcgtgttttgggcaccattcctcagtctatttcacagcaaactgtttggaatcaaatggccacagtgagaacaccattgaattttgattctagcaagcagagcttttgtcaattttctatcgaccttctcggtggaggaattttagtggacaaaactggagattggatcacacttatacaaaattctccaattagtaacttgtngagagttgctgcttggaaacaggctgtgtaatggttaaaatt

SEQ ID NO: 213761 - DNA, 329 bp, Glycine max
aaaataacacacacttcacacatcattacgacaattaaaagaggtgtggaaattttcaaatagacagagcatactcaacaagagggtcatgtctaatttcctttattgaattaaacaaacgaacaaacgaaagaaaacacaaattccagatcatgccgaggattccgcattttcagaagatctggcagtagcctgtggaacagaaaaagctggcataagagtattaccagcaatttcaaaatcttgagaaattcccaagagaatatcaaaaactgtagactgtttgggattgtcaataaggaaactcaagtgccatgaagtttgatttg

SEQ ID NO: 213762 - DNA, 564 bp, Glycine max
accagcaggtgagttgcgttacccttcgtacccatagcaaaatgggacatggaaattcccaggaatgggtgctttccaatgctatgacaagtatatgttgagtagcttaaaagctgctgctgaagctcacggtaagcctgaatggggaagcacaggccctactgatgctggccactataacaactggccagaagacactcaatttttccgcaaagaaggtggtggatgggatggtccatatggtgagtttttcctcacttggtactctcagatgctgttggaacatggtgacaggattctctcatcagccacgtcgatctttgacaacactggagttaagatctcagtgaaggttgccggcattcactggcactatggtacaaggtctcacgccccagaactcactgcaaggtattacaacacccgattccgtgatggctacctccccattgctcaaatgctggcgcgccacggagccatctttaacttcacctgtgtcgagatgcgcgatcaccagcagccacaagaggccctttgtgcacctgagaagctggtgaagcaagt

SEQ ID NO: 213763 - DNA, 593 bp, Glycine max
accgaacactcttcttcaatcaagcgaaggtggtctcgattgcaagtgatccacgatacactctacgcttcacaaaaccttcaaacccaattccacagaattcttctgcttcaccatgccaccaaagcctttagactatgggtcaataaatgaaaacgtgaagaagagtcaatatgctgtcagaggtgaattataccttcgagcttctgaacttcagaaagagggcaaaaagattatctttactaatgttggcaacccgcatgcattgggacagaaaccactgagcttccctcgccagggtgttgctttgtgccaagctccattcctacttgatgatcctaatgttggactgctattccctgctgatgcaattgcaagagctaaacactatctttcattgacctcgggtggtttaggtgcttatagtgactcccgtggccttccatgagtgaggaaggaagttgctgagttcatactcatgcgtgatggttatccaactgatccagagctcatatatctcactgatggtgcaagcaaaggagtgatgcaaatattaaatactatcatcaggggtcaagacgatgggattttgg

SEQ ID NO: 213764 - DNA, 525 bp, Glycine max
  unsure (1)..(525): unsure at all n locations
tgaagtcttgcccttctctcttcaactccaaacacaagacatcatcatccatggctgcctccgtctccactgtcggagctgtcaacagagctcttttgaacctgaatgggtctggacctggggtttcagctcccagttcatccttctttgggagcagcttgaagaaggttattggctcaagggtccccaacacaaagatttcctctggaagcttcaagattgttgctgtagaagagaagaaagagattgaagagacccagcagaccgacaaggacagatggaagggtcttgcctatgatatctcagacgaccaacaggacatcacaagaggaaagggtttggttgactcccttttccaagctccacaggatgctggaactcactatgctgtcatgagctcctacgagtaccttagcactggacttcgccagtacttggacaacaacatggatggattttacattgctccagcttttatggacaaacttgntgttcacattaccaagaacttcatgaccctgccca

SEQ ID NO: 213765 - DNA, 516 bp, Glycine max
  unsure (1)..(516): unsure at all n locations
tgaagtcttgcccttctctcttcaactccaaacacaagacatcatcatccatggctgcctccgtctccactgtcggagctgtcaacagagctcttttgaacctgaatgggtctggacctggggtttcagctcccagttcatccttctttgggagcagcttgaagaaggttattggctcaagggtccccaacacaaagatttcctctggaagcttcaagattgttgctgtagaagagaagaaagagattgaagagacccagcagaccgacaaggacagatggaagggtcttgcctatgatatctcagacgaccaacaggacatcacaagaggaaagggtttggttgactcccttttccaagctccacaggatgctggaactcactatgctgtcatgagctcctacgagtaccttagcactggacttcgccagtacttggacaacaacatggatggattttacattgctccagcttttatggacaanacttgtgttcacattaccaagaacttcatga

SEQ ID NO: 213766 - DNA, 522 bp, Glycine max
tctctctctctctctcgctctctgatctgatttgtttcaggagccacccgctcctgcaggtttcttttgcggttggagtggaaggccattctcgcaacgtttgagttcagcagatccagaatttttcataaaacaggtttaagagaatgaagaataccgaacgaattgccaattaggctgtagcaggtttaaccttagcgcctcttgatgtgaaagtagatccgaatttaaatgatattttgactgcttccctcactgtcgatgagggctgttaccgctccgttaaaccaaccccaccaactgagacaatgtccaatgaacatgccatgcgttttacctttgttgggagtgcaatgttattgtcactcttcttactcttcaagattctattccaggacttggtgaacactgcaatgacaggctacatttctgtacttgggattgttgctctttcgggaacaatattaccatttattaaacggtctctgccaaagcattgggatgacgaccttatagtctggc

SEQ ID NO: 213767 - DNA, 532 bp, Glycine max
atggaaacccagactggggcagtcagccagtaaaagcaaaacgccaatttgaaaaataagtaatacatttttttttaatcacaatcagttacagaggtgtgctgctgaaataagttagctttaaaagaaacggttttctcagaaaaaagcagtatttgttctgtgactcggaagtattggtattgggcatgcttcaacttattcaacctttttgctagacttgtcgtcagcactctcttgaggtgaattggcagtctttgactcatcgaactccaacaactgtttgacatcaccattccataagcaatgagcagccaaaaatccaattacagaaggtacaatatacaaaagagcaggctgtgcagcctgaaaccagttcatcacaacaattgtaaggaccaagccaacagtgtatcctacaaatgcactcttgaaatactggggctgttttcctctagatacatcaaatcgcaaagccaatgctacaaaaataccagggataacaatatcaccaagggccaacattgaaaat

SEQ ID NO: 213768 - DNA, 505 bp, Glycine max
ggaacttcactctaaagggatcttcattctgaaccttaaaccttttaatgttcttctcaatggtaatgatcaagcaattttgggagatgttggtattcctagccttttgcttggctcatcattcataagctcggacattgcctaagaggttttggacctcccaattacatggctccagagcaatgggaaccagaggtcagaggtcctatatcttttgaaacagattcttggggattcggctgcaccattgtcgaaatgttgaccggtaatcaaccttggtatggatgttctgttggcagaatataccagtctgttgttgaaaagcatgaaaaacccaatattccaagtggccttccttcttcagttgagaatgtcctcaggggatgctttgagtatgatttgaggaatcgccctttaatggtcgatattctgagtgtctttaaagtgctctgaatgaactgaccaataatcatggagaatggagatatcaaagaaatgggaaagt

SEQ ID NO: 213769 - DNA, 362 bp, Glycine max
cgcagatgtctcaaagcaaatccagcagatggtgcagttcatccgccaggaagctgaggaaaaggccaacgagatctctgtctccgccgaagaggaattcaatatcgagaagctgcagttggtcgaagccgacaagaagaaggatcaggcaagaatacgaacgcaaagagcgccaagttgaaattcgcaagaagattgagtactcgatgcagcaaatgcttctcggattaaagttcttcaagctcaagatgacgtgatcagttccatgaaagaagctgcatccaaggaactgtggaatgtgagtcataatcatcattggaatctactgagtcatcatcatcaggagaacaaaacctttttga

SEQ ID NO: 213770 - DNA, 440 bp, Glycine max
aaataatccctgttttattttatttttttaaaatcaaagcagcaatgagccggagcaaacacttattgtcaatgagataaaagtcatcacgaaagaaaacttagaacgatgcatcccccatcatacacgacatgggaacaaatggactaccgaaatatggtgttatttaaaagacaataattataagtacacagaagcaatggcaggacagcttttcaggtcaaagacaagctaatgatgcttcgggatataaacatttcaggggtaaccaaaccatacaatcaaaatcttcaaacaacaacttgtccaaagagctgctttcggatctctggaagctttttacggaacactacatcaagtcgtgcatcaagagtattttcgcacacaatctttccatcacgagaagccaacaccaccccaccagagcagtagagatcatg

SEQ ID NO: 213771 - DNA, 480 bp, Glycine max
  unsure (1)..(480): unsure at all n locations
cattttgctagcgcaatcatcttgttccccaattaattaggttttttcagagtatcacattttgcatcgattcctctacgcacgccaccgtcaatcatctcagcacaacgttgcgattcggacaatcgcaatacggtctgacctgtaccttagatagtttcaccagtcaagtctttctgtgtggcatatcaaatttcattaggactaaccagactgcaaaacaaggcatacttattgactccatttggctaaaatgacaganatccttagctacaccgcttccagacagttatctcaaatgttccttgccattgccttctttcacggttctgaatattttctagcagttgtcatttcatgggagatcaaatgtaactctaaagtctcttttgattagcaaacattatattggggcaatgatcttttcgttgcttggatacatcattgagattgttttagtacctgagctaaaggaacatt

SEQ ID NO: 213772 - DNA, 633 bp, Glycine max
  unsure (1)..(633): unsure at all n locations
atttagttggaggggttcatagatttagggaatcgattactatactagtaataaattgtacaaaaaataaaaatataaataatataaatataaaaagaacaaacacaaattttatgtgattagtcgcggtatttaaaataaaaaaatgaaagtagacaaataaaaaaggaaaggagatgtttgaataaaaataattccccttcaagttcttattttttgagaggacaggacaatatgaatgttttattatgctctatcaacacattaaaaagattatatgatatatctgctgtggaagtaggtcaacatttctattggcaaatagggagtttccaagtacatgcccaagtacttattacttgttgggttgtaattgctctcttattggtttcagccattctaattattcgaaatctgcaaaccattcccgctttcggtcagaatttctttgaatatgttcttgaattcattcgagacgtgagcaaaactcatattggagaagaatatggtacgtgggttcctcttattggaactgtgntactatttattgctgatactaatgggncgggggctctttaaccttggaaatcatacaattacctcacggtgagttagctgcacccacaaatgata

SEQ ID NO: 213773 - DNA, 524 bp, Glycine max
aattcctgggcggcggccgccctttttttttttttttgaatatccaatatatactaatatatgctaatatatgctaatcgaatatctatctatatctatctacctatatctatatagatataggtagatagatatagatgtttactaagtagattatattgagccgcaatatatgtgcggcaagctaaacgaaaaggactattttgtagaaaactggtcaatgatggccttccatggattcacctatataagccgcagctaaagtagcaaaaatgagagcttgaataccgcttgtgaataatccaaggaacatgacaggtataggaactactaaaggtactaaagaaacaagaacaacaactactaattcatcagctaatatatttccgaaaagtcgaaaactaagagataagggttttgtgaaatcttctaagatgttaatcggtaaaaggattggggttggttggatgtatttattaaaataagctaatcctttttttgaaagacccgcatagaaatatgca

SEQ ID NO: 213774 - DNA, 415 bp, Glycine max
ctctgagcaaggtcgagaggggcgagagcgagttggatcggttgtcaaggcacaggatctccctcggtgtggctgctgggcttgaatacctttacatgaatcacaacccacgaatcattcatagagatctcaagcctgcttatatcctccttgaccatgacatggaggcatgaattgctgattttggactctccaaggctatgcccgattacaagactcacataacaacctccaatgtggctggcactgtgggctatattgctcctgagtatcatcagatactcaagctcactgataagtgtgatatttacagttatggagtgattctcggcgtattgggcattgggaagcttgcttctgaagatttctttcagcacactgaatagatcagttcggtcaagcggatgaagaagac

SEQ ID NO: 213775 - DNA, 540 bp, Glycine max
ggtttgtattagaggacctaacgtgaccaaagggtataaaaacaaccctgatgcgaatgattctgcgtttcaattcgggtggttccacactggtgatatcgggttttttgattcggatgggtatttgcaccttgttggtcgcatcaaggagcttattaaccgtggaggggagaaaatatcaccaatagaggttgatgctgtccttctatctcatccagacattgctcaggcagttgcattcggagtaccagatgacaaatatggcgaacaggtatgtgtttttaattagtgggaaatacatctcttataaaacgggtttagttcttaatagtctagtaaaaactaaaaagtagatttatgataaattgaggttatgatatattttaaactaaatcaagttgatacacttaattgtttattttaaaaaaatcattttagaggaatcgtgtgcatggtccttgactccttgttacctttattacttttgattttccgcctcacccttggtttatttatctcttctttaatcactttgggttc

SEQ ID NO: 213776 - DNA, 455 bp, Glycine max
aaattagttcattctctttgcgcagttccctacctctcctttcaagatgcagatcttcgtcaagaccctcaccggaaagaccatcacccttgaggtggaaagctctgacaccatcgacaacgtcaaggccaagatccaggacaaggaaggaattcccccggatcagcaacgtctcatcttcgccggaaagcagctcgaggacggccgtaccctcgccgactacaacatccagaaggagtcaacccttcaccttgtccttcgtctacggggtggcatgcagatcttcgtcaagactctcactggcaaaaccataaccctagaggtcgaaagctctgacaccattgacaacgtcaaggccaagatccaagacaaggagggaatccccccagaccagcaacgtctcatcttcgtcggaaagcaacttgaggacgggcgcactctcgccgactacaaca

SEQ ID NO: 213777 - DNA, 270 bp, Glycine max
ggaaaacaaacagtagtaacattaatgggacaattgagttcaacccaaaccaaacttattttcaaaggtcattacagacccatttcacattacatttttttttaaaatgtttgggaaaatccaacatcgaacattacacagaaatcagctccagtttaaaaccccccacaaaaacccaacaccaagggcagagttgactccttttggaggttgaagacagcgagggcccttccatcctttacctgttggccagaaaaaaaaacccttttt

SEQ ID NO: 213778 - DNA, 509 bp, Glycine max
aagaaatataactaatattctttagaataatcaaaaagaatattaaattcaaataaattttagatagaaaaaagacttaaaaaggaggatttgaaatgcgagatctaaaaacatatctttccgtggcaccagtagtaagtactctatggttcggggctttggcgggtctcttgatagagatcaatcgtttttttccagatgcattgatattcccttttttttcattctagttattgacacggaaaggggtgaagaagattatagatccaattaagtattaaatatatgtaattaatatgtaattaatctcctcttctttatttcgacttttatttcttcttttttttacaattgtaatagaataagttaggaaagagaaagaataagggttaatttggcctaattgaaattcggagtgaaactcgggatctcgtccaggcttccatggaattgaattaataattcaattccatttctattaataaaagagtgaaagcagaaatttaaat

SEQ ID NO: 213779 - DNA, 545 bp, Glycine max
acaacataaaaacccaaattgaattgtcgtaattttcaaacaaaacatcaatcaatatttcattcaaatctcaattcaaaattggatttagaattcttaatttctatattttttttttcttaaagtagtagttctagcggttgactcgcttttttcaaattgtttttcattattaagaaaaggtaacaaagataaaatacgagcttgttttatagcaattgttattaatcgttgttgttttaaggtcaatctatttacgcgtctggataatatttttccttgttcactaataaatcgactaattaaacccatgtttttataatcaattcggtcccccgattggatcgggggcaaacgcctacgaaaagatcgcttggatttcataaagagtcgcttagatttttccatggtttatttatccctattccaaaaatcacatttattacaagaaatactataaaggatttgtttttttattctgacttttttaatatatggtggtatttttttaatatatgttggtatatactgatatttgatatatt

SEQ ID NO: 213780 - DNA, 548 bp, Glycine max
gaggaaaagaggagaggcggggcggagcagagacgaatggcagatcagagcgagcattcgaaaacggcgttgcctccggaggaccaggaccgtcccgttcgggtatacgcggatggcatctacgatctcttccactttggccacgcccgctcccttgagcaagccaagaaatcaaggagtttcttcaaggttccattcacagacacttactttgggattttaggtttccgaatacatacttgcttgttgggtgttgcaacgatcaagtcacccacaaatacaaaggcaaaactgttatgacagaggccgaacgatacgaatccctgcgccactgcaaatgggtggatgaagttattcctgatgccccctgggttatcaatcaagagtttcttgacaagcacaacattgactatgtggctcatgactctcttccttatgctgatgccagtggtgctgccaatgatgtttatgaatttgttaaatctggtgggaggtttaaggaaacaaaacggacctgagggatatccacgtcagatgtataatgagga

SEQ ID NO: 213781 - DNA, 269 bp, Glycine max
cgttttggctgctgcttatgcccacgagctcccccgatatggaattacacttggattaaccaactacgctgctgcctacgccaccggacttttgttggctagacgagttctcaccaagctcaacctcgctgacaagtacaagggtatctgtcaacgtaactggagaggattacaacgttgaggagatcgatgatgctccccgacctttcctcgctttattggatgttggacttcgacgaacaccacccggatgcagagtcttcgctgcc

SEQ ID NO: 213782 - DNA, 401 bp, Glycine max
cttgcacattgacaacctttattttttctttattatatcaccttggcttactcttgagcggaagccttgttagctctgggtactctgaccttgacagcgttctttcgttgcttgttgttaagtcgttgagccttcttggaagagtgcttggggggctttcgctcagccttcttgatggagggatcagctcggatagcagcatgagccttcttgtagagagcctcgagtccttcagccttaactccagccttgacgtatcgggagaagaccttggagaacttctcgttgtcttgctcagccaaaagcttcatgtaatcagcaacgtgtcctccgaagatgtactttctaaggacatcggcgttgagcttgttagcctcatcgtcgtatccaacgtatcttcg

SEQ ID NO: 213783 - DNA, 439 bp, Glycine max
agataattcatctgatgaaatgaggaagaagactgctgcaagtgagaagtcaccttttcatacagtgcatagtgagatatctcaggaccataagaaatgcattggtggcttttctcctattatcaatcaaaagagttcaaaaggaccaaagggccgcaaggtttctgatttactcaataccattgatgtgcttgctaattctgagactgaaatacaggctacttccactgctggtaataaacctgaaaatctggaggataataacatcaaggagggctctattgtagaggctttcaaagatggagaaggattcacagcagcatggtacacagccagcatattaaacttgaaggatggtaaagcttatgtatgctatgttgtgcttctagatgacgaatgtgcaggacctttgaaggaatggatttcccttgaaggtgga

SEQ ID NO: 213784 - DNA, 518 bp, Glycine max
cagaagaagctccagaacattggagaaaactacatccgattttcgcgaagcaacgcaacgacggcgatgggagcgtccacttcggcggagccgagagtgtcggcggagcagaaagaggcggaggccgtcacagccttcacccggagctctccccctgcttcagaaagccttctccaagctcgctaatcccgagaccaacgccgttcccttagaaaatctccagcaatgcttcagtttcggtcgcgaaggtcgaagttattccggaagcaacgtgccagattcgtttccggtgttgttagatcacttagcctcatccctagttgatcaatttttcgtgcctgacaaagagggaataatttgggttgaattcgtgagggggtacaacaagtgctgtgctatggtgtccgcgtaggtttctttgaatatgctcatgagaggtgttcgctgctatttcacaaagtgcgaacgtgcctttgatttggagtttgaatcaggggatgatgattgcaaggtaaacg

SEQ ID NO: 213785 - DNA, 478 bp, Glycine max
  unsure (1)..(478): unsure at all n locations
acacaaaccccgtatagtgcattaagcgatatatttgttaatatatacattttttgtagtatgtacggctacttaaggatcacgagcctgaaaagtaatgacaaaacataatataaagcatgaaatatattccacgcttatgcctgttaagtattgcactaagcaatgcaacactagagatgatccaactcagcggtcttcctttcgtacagcatttggatcagacatcatgtccatcatcattttctcaggtgaatcctcccaactcgcaaatgtcttcaagtcaacttttcttctttgctcagtgaaaagctcttctctcttctcgtaagagttctgcacttnctttgctactttcccaccaagtccccaaacttcaacttcagaaatcagaccctcgacaggaaggaaaccctgatctggaaagagagatccactcccgtaagttttgtcaatagcatgatggcgaacagtcact

SEQ ID NO: 213786 - DNA, 429 bp, Glycine max
ggtgggagaaaccgggtcacagcccactattcgggtatgacttttggtaccaaccacgtcacaataccatgattagcacatcatggggtgctcctagtgcttttacaaaaggtgttaacttacagcatctctctgatggattatacgggaggcatctccatgtatatagctggcctgggggcgaactgagacaaacaatggaccttggtgattcagggcttatacccttagagataaggtttttgcatgatcctgctaaagatacaggttttgtcggcagtgcattgacaagtaacatgatacgattttttaagacccatgatgaatcgtggagccatgaggttgccatatcagcgaaaccatagaaagtgcagaactggattcttgctgaaatgcctgagcttataactgactctgtgatttctcttg

SEQ ID NO: 213787 - DNA, 535 bp, Glycine max
aattcctggtcggcggccgtccttttttttttttttttttttttctaagatgagcttaatatatttatgcaattgcaaactgtcttcaaaaagttgaagattcacaagagcattatttatagcatagtagctcattacaaccatatgacagatccgtttattaaagggaaataatgacacgtatgtttaaatccatatatctgaagtacagtcaccaccaggatatctcatctcatgggcaagagaaggaccatcaggctcagttccaaagtccacaaagaagttggggttgattttcagtccacctttctcagtatcaacatcaatctgtattatgtgggagcctttctggacaagctctggataaaattgtttgtcccaagtactaaatagtgagttggtagcatagagccgcttcccatctaaactcaattgaatcatctgagggccccctgtaacttgtttccctgaatctctggaacttcagctggccatgtttcaccatcatcagttatagctactacagggctttctt

SEQ ID NO: 213788 - DNA, 502 bp, Glycine max
ggagatacttctcaatttataccatccagggatgctgacattgctatcctggaagaaccagaacatttgaattggtatcatcatggaaagcgttggacggacaaattcaaccatgttgttggtattgtccacacaaattatttagaatatatcaagagggagaaaaatggggcactccaggcattcctggtgaaacacataaacaactgggttacaagagcatactgccacaaggttcttcgtctctcagctgctactcaggatttaccaaagtctgtaatttgcaatgttcatggtgtgaatcccaaattcttgaaaattggagaaaagattgctgcagagagggagctggggcaaaaagcctttacaaaaggggcatatttcctgggaaagtttggtgtgggcaaagggatataaggagttgattgatttattagcaaagcataaggctgaccttgatggtttaagttggatgtatttggaaatggagaggatgctaatg

SEQ ID NO: 213789 - DNA, 470 bp, Glycine max
gcgagtttatggtcacaacttcattatgtttcgtgtgataatctggaaatgcaagaagcttatcttgtcaatctcgtaaatgtgttacgagaattgtatttgcacagaccagaggaagctcgtcaattgagaaggaaagctctctctcgtattgaatggctgcaaaaagctgatgtgcctaccatagcacagattgaagagttccattcgatgcagaggatgatgaatgctcctgattcaaatgataatattgatctactgatgagcattgatttgttgggtttacaaggagcaggtaaagcttttccaaacaagaatgtttttgatgataagcttgtgttggctaacacacaagaattctttgatggaaattttccagtggattcctggataccaatttttgtgaattgcttttatcctgtaagtcagattaccttcagaagctgacgatggaaatgctacatgtggta

SEQ ID NO: 213790 - DNA, 552 bp, Glycine max
  unsure (1)..(552): unsure at all n locations
aaacacactcattgcacatagtaatgcgctttatttaagtgaataaaatattacatactagttcacaaatgcaaaaggacactcatcaaccagatatttgagactcttacagttctcaagaagtcgcgtcagcatagggttagtggcgttagaactcagaatttcattcttaacgccaaaaagaacagccagtaaagctactggaaaaggatcaactctagtaagaaaaacaattttcttacctctcccaagtgctgtgcgaatccttttgttgatatctgaggagcgattgttaactgcagaactaatccaagcagtggtgggtaaaccaccacgtccactaccacatgtaacatttacaacgacagcttctgaaggtaattgacttacaggataaagacaattcacaaaaattggtaaccaagaatccactggaaaatttccatcaaagaattcttgtgtgttagccaacacaagcttatcatcaaaaacaatcttgtttggaaaagctttacctgcttcttgtaaacccaacanatcaatgctcaacag

SEQ ID NO: 213791 - DNA, 368 bp, Glycine max
gtttggaatttctgaagcgtaccgtattttattgtgatatcatttgtgtcactggatggactgccactccaatgcatgatgttcaggttacaattgattggtttattttctctcacgaatgtgttcccaggacttattgtgtttaaatccacaaaatccttttgagttgaataggtggatggggaaactgactttcccccagggcactttccgaagagttaagagaatgcctctttctatagggggaggagctggtgcaaagaatgctattctcatgaatatgccaaatgctgctctttcaatgtggagatattttgttggagatctcgtctttgaagtttctaagatgacttctccctacattaaat

SEQ ID NO: 213792 - DNA, 505 bp, Glycine max
aaaataacacacacttcacacatcattacgacaattaaaagaggtgtggaaattttcaaatagacagagcatactcaacaagagggtcatgtctaatttcctttattgaattaaacaaacgaacaaacgaaagaaaacacaaattccagatcatgcagaggattccgcattttcagaagatctggcagtagcctgtggaacagaaaaagctggcataagagtattaccagcaatttcaaaatcttgagaaattcccaagagaatatcaaaaactgtagactgtttgggattgtcaataaggaaactcaagtgccatgaagtttgatttgcccactcagaactccacatttcaaaaccattattaggaccacatacctctattgggaagatcaattcccaggaatgtggttccgattttgtccacttacatgcatcgaaatgctctgtactgttgctgtttgttaaaaacacttgtaccaatgaggcccaatcactccttttgact

SEQ ID NO: 213793 - DNA, 605 bp, Glycine max
  unsure (1)..(605): unsure at all n locations
gtttggaatttctgaagcgtaccggatttcattgtgatatcatttgtgtcactggatggactgccactccaatgcaggatgttcaggttacaattgattggtttatttcctctcaggaatgtgttcccaggacttattgtgttttaaatccacaaaatccttttgtgttgaataggtggatggggaaactgactttcccccagggcacttcccgaagtgttaagagaatgcctctttctatagggggaggagctggtgcaaagaatgctattctcatgaatatgccaaatgctgttctttcaatgtggagatattttgttggagatctcgtctttgaagtttctaagatgacttctccctacattaaatgtacagtctctttcttcatagcatttggaaatttggctgatgacaccatcaattttgaggcttttccccacaagctggtgcagtttggagagattcaggaaaaagttgtattgaaattttcacaagaggaatntcttacagcttggtcaactcaggtgcgtnctgcaacaactctgttggctgatgggtgttcatatttgtatgctatggtgcatgatagttcagtgtctacaata

SEQ ID NO: 213794 - DNA, 404 bp, Glycine max
aaaataacacacacttcacacatcattacgacaattaaaagaggtgtggaaattttcaaatagacagagcatactcaacaagagggtcatgtctaatttcctttattgaattaaacaaacgaacaaacgaaagaaaacacaaattccagatcatgcagaggattccgcattttcagaagatctggcagtagcctgtggaacagaaaaagctggcataagagtattaccagcaatttcaaaatcttgagaaattcccaagagaatatcaaaaactgtagactgtttgggattgtcaataaggaaactcaagtgccatgaagtttgatttgcccactcagaactccacatttcaaaaccattattaggaccacatacctctattgggaagatcaattcccaggaat

SEQ ID NO: 213795 - DNA, 578 bp, Glycine max
  unsure (1)..(578): unsure at all n locations
tggtaatggcagcgtcactacaagcagcagctactttcatgcaacccaccaagttgagcaggagcaacactttgcagcaaaagtctactcagtccatttccaaggcttttggtttggaacctgttggagctaaaaaggtcacatgctcccttcaggctgatcttaaggacttggctcacaagtgtgttgatgctaccaaaattgcaggattcgcccttgccacctctgccctcgttgtctctggggcaagtgctgaaggtgttccaaagaggctaaccttcgacgaaatccagagcaagacctacttggaagtgaaggggacaggaacagcaaaccagtgcccaacaattgatggtggattggactcatttgccttcaagccggggaaatacaatgccaagaagttgtgccttgagccaacttcattcacagtgaaggccgagggtgtggccaagaatgctccccttgagttccaaaacacanagctcatgacacgtttgacctacactctggatgagattgagggaccctttgaggtgtcttctgatggcactgtcaagtttgaggagaaggatggc

SEQ ID NO: 213796 - DNA, 463 bp, Glycine max
aaaaaattgagctcgaaaactcacacacaccatcaatttaaaccttgaattttaaacattgtaattggaggtcgatataatatacaaccatgacagtactctcagtagtgctaggaaagttgggtcaagggataatgcagcaacaccatgcatgaagttactaacaaaatctgagccaacaaacaaaacagaaaacaaaacactctatgactcaagctgagcataccagatgccctggatcttgacatcctttggagcctttgctcccaaatcagtgtcagatggttgaacactctcgaacacaccgataacctcacccgtctcaggcttggtcttggtgacactcaaggtgattttgcccttggatgatgaggcacttttattggtttccttggcaagttctatctcatctactcttccaccagcaggcaaagcaactgcattgtcataacctgtggaagca

SEQ ID NO: 213797 - DNA, 520 bp, Glycine max
acacctccaccaaagcataacaatgctcaattcctctttcctctccctttctgaacacaccttttcccacacaccccatcatttcccaacaaggtctgcttctcaaaaccccaaccttcatccaaagtttcaatctttagcctttggaaaccgtggagggagtgaatttccatctgggtcttgctccaatacccccagaagaaaaggggtgttggttgtgcggtcaaagtcaacgctgggagtagaagaagtggtggtaaagggaggaggagtgaagggtaaggctgaagagtttgatgcaattgtgatagggtctgggattggagggctggttgcagggacacagctggcagcgaagggtgcccgagttctggttttggagaagtatgtgatttctggcggaagctctgggttctaccagagagatggctatacttttgatgcggggtcttatgacatgtttggtttcactgataaggacaatctcaatttgataactcaagcgtttgaagcaaatggt

SEQ ID NO: 213798 - DNA, 599 bp, Glycine max
ggctcgagggcaaacaaagatggttcactccaacatgcctccaaagtcccccaaactctctctcccggataataacattccaatcccccttcgccagaacgacatcaccgcagcgtcgtctccaatctgcgctgcctacgacaactacctccgcctccctgagctcagagccctctgggcctccaacgacttccctaattgggccaacgagcccatcttaaagcccaccttacacgccctcgaaatcaccttccgcttactcgcaaccgttttatccgacccgaggccgtacataaacaagcgcgagtggacccggcgggtggagtctctcgccacggcccaaattcagatcatagctatgctgtgtgaagatgaagaagaaaaccccgagacacgtggcacgacgccaccggtgagtgacattaacggcttcatcgctcaaagcagaagctacagcgaggagagcctgctcccgcgcctcgccacgtggcacaaatccaaggacgtggcgcggagaaatctcgattcgtagagtaccagatgatgaggtgcacgtacaccttaggtttaggagagggcgatctcgcgggtaagaagat

SEQ ID NO: 213799 - DNA, 463 bp, Glycine max
catgatccaaaagaatagtcaaataaatattattttacagacaaagatttgtttacaccaacctattacaaaaatttagtccttttttttttctctttgttttcccgtttgtgtgagtaagtatatatgactaggaattaattgattaattttttaattaactagcagggaaccccattttgattattattttcccaataataagcgagaaaggtcttggcagcatctaagctagggaaataagtgggttcaaggaatatctgagtgaacccattatcggcctcggagctccccatcataaccgccacaacctgcttataggcgtagaagaacctcttcatcgccacctcaatcgcctgcatcccctgcaaaacatgaaccttctcgaacccgttccttttctgtttctgcgagtaaaccttcatcgccgtctacatcattccgggcccacccgtggggtcca

SEQ ID NO: 213800 - DNA, 571 bp, Glycine max
ggagattggagagggatttctagaaacttcgtgaaaactcgcacgcctactcaggtcgctagtcacgctcagaagtactttctccgccgccacaaccagaatcgccgccgccggagatctagcctcttcgacatcaccaccgatacggtgatggaatcttctactataatggaagaagaacaagttccgccagagacggtggcggcgcctctccccgccgcatatccgccgtcgcattacggggcttttgccggcgcgggttttccgatagctccggtggtgttgccggtgagtggcgagagactaaccaagccgatcaggccgacgccgattttgccagtgcctccgtcttcgaagatggctaatttgaacttgaaagagaaagcttctccgacaaatctcattgagcctttgccgttgtcgttgaatctgccatcgccgacgccgcggtctcaggatcagtcgtcggcgagtagtgggcactcgtcaccgtcgtcgtcgtcatcggcggcagcttttcaggctatgtctgcagcgaagttcggcagcggcggggatagtatcatcagcg

SEQ ID NO: 213801 - DNA, 531 bp, Glycine max
  unsure (1)..(531): unsure at all n locations
acgtgctcactagtcggcggccgccctttttttttttttttaaataataatttgtcatttcacacatacaaggtatatatacatatatgtagttatgatctaatagctacattcaatgattttattacctttgtccgcatttatatatacttaattcactactccaatattacaaatcaagttatacaacacatattcctacatataccgtaccataagggataaatttcataattgaccacccatgtctttggaagaatgtgatgcaaggccttttttcacctgcttcattttccatgataccatcccaaaaggccttgtccattgtctgcttttattttcccctcagtgtccttggagtcaaaattcatgggggtagccacatggaaaacaccagtgcaacctttaatggcttcatcaaagcttncctctgagcangatcagcctttcacagagacaatttggtcttggaatctggcggcttcaccaaatgcttcaccttcttcatgttagctttgagaatgctatgat

SEQ ID NO: 213802 - DNA, 453 bp, Glycine max
ctccaattcttcctccatttcacgccaacatgctccaagaagaaacttttccgttttcgccatgtccggcgatgatgcaaagcggagtgttccattgaaggattaccgcaacatcggcctcatggctcacatacatgctggaaagactactacaacggaacgcattttgtactatactggaaggaactacaaaattggagaggtgcatgagggaacagcaactatggactggatggaacaagaacaagagagggggattaccattacttctgctgcaaccactacattctggaacaagcaccggatcaacattattgatactcctggtcacgttgacttcaccttaaaagtggagcgtgctcttagggtgttggatggagctatatgcttgtttgacagtggtgctggtgtggagccacaatcagagactgtggggaggcaggctgataaata

SEQ ID NO: 213803 - DNA, 487 bp, Glycine max
cttcatccggttcaattccttccaggtagttctccatagcctggtcatcgaactcaactatggtttctatcatctgggctcggtattcctgagcctgctcttgaagatcttctggaacatctacaatatcaaacttggcacccagctcttctccagaccaaactatagccttattcctaacaaggtctataactcccttaaagttatcctctgaaccaattggtaactgaattacaagtggtttagcacccaaattcgttactatcatgtctcttgttcgataaaagtttgctccaagacggtccattttattgacaaaacaaattcgcgggacaccgtatttatcagcctgcctccacacagtttctgattgtggctccacaccagcaacactgtcaaacaagcatatagctccatcccacaccctaagagcacgctccacttctaagggtgagtcaacgtgaccaggagtatcaataatgttgat

SEQ ID NO: 213804 - DNA, 600 bp, Glycine max
aagacgtcgatgaggatggctaagacagcatttcctgggcttggttcgccgattactagtgttgatgttacttatgatggcaagtgggtgcttggcactacggatacctacttggtgctcatttgtaccttgtttacggataaagatgggaggacgaagaccggatttagtggtagaatggggaacaggatacctgctccgaggctcttgaagttgactcctcttgattcgcatttggctggcgcgaacaataagtttcacggtggccatttctcgtgggtcactgagaatggtaaacaagaacgccaccttgttgcaactgtgggcaagtttagtgtgatatgggattttcagcaggtgaagaacagtgctcatgaatgttacaggaatcaagaagggctgaagagctgttactgttacaagataatattgaaggatgagtccattgtagaatcgcgatttatgcacgacaaatttgctgttagtgactctccagaagctccgttggtggtggcaactcctatgaaagtcagctcaatcagcatgtctggaaagcgacatggttaaacctctgttacattttttttttaaggttcaaat

SEQ ID NO: 213805 - DNA, 558 bp, Glycine max
cgaaaacagaaaatcttgagaactattctaaactcagaagaattacgggaaggggccattgaacagctggaaaaagcccaagcccgcttaaggaaagtcgaaacggaagcagatcgttttcgggtgaatggctattctgagatcgaacgagaaaaattgaatttaattaattcaatttatacgactttggaacaattagaaaattacaaaaacgaagccattcattttgaacaacaaagagtgattaatcaagtccgacaacgggttttacaacaagccttacagggagctctaggaactctaaagagttgcttgaacaacgagttacatttacgtactgtcagtgctaatattggcatgtttgggacgatgaaagaaaaaataactgattagtctttctattataaaatagagtataggcattatttttttcttctaaaaaaataaaattaagaaattttcatggtaaccattcgtgcagatgaaattagtaaaattatccgtgaacgcattgagcaatataatacggaagtaaaaattgtaaatacgggtaccgta

SEQ ID NO: 213806 - DNA, 460 bp, Glycine max
gctagagaacaatatcttaatattctaaacagcattataatggaaatttcagtgtcattatgaaaataggcagttcaaaaacgcgtactaatggaaggacaacctgaaattgcccagtacatccacacttcataacgaagaacatgaatgcccaaaatctcagtgacaccgagattagcattcaacaccttctccctttgaaaacattacacaagggaagttcaatcactaattagaagtatggtactggtaattttgttccccgtcacctttgggtgcggcttctttaatttcatctgcaccatcatcctgcatgtcagaggtccacagggtagggttatcacgaagaaattgcatgatcaaagtgctatccttggatgattcctcttccaacgtatccaattcagcaatagcctcatcaaaagcctgttttgcaaggctgctgcacgatcaggagagt

SEQ ID NO: 213807 - DNA, 584 bp, Glycine max
tgcgtcctttacgagtcaataagaagtacacttctccctacaacgactccagatgctgaacctgtacccacccgccacacacagtgcctggaacggccagccggtctcatacccacccggtacagactcgatcgtgaatgagatctttgaggccaccaagggcacgggcaccaaggagaaggagttgaacaaggcgctgggcggcaagacggccacgcagcgtggcttcattgccaagcgctaccaggagctgcacaaccaaagcctacgcgatctgatggacaacgagacgtcgggccactacgagttcctactcaagctgctggcatcgcccttgcccgaagcagaggctggtatcctacgtaaggccaccaaaggtttgggcacaaaagaggatctcatctaccccgtggtcgtaggccgcactaacgcagagatcaacatcctcaagaagatgtactacgaagcgtacggtgaggatctgggctccgtactggacagcgacctacacggcgacttccaaacggtgattctggcgtcgctgcaggctgcgctagtgccgtacgatgccaacattcacaacg

SEQ ID NO: 213808 - DNA, 405 bp, Glycine max
gacgtccttttttttttttttttttttttttttttttttttttttttttttttttttttagagcatgtataagaatttaccattttaccatcaagcagcagacgattatgagtaaggcaaacaatgcaactggcgactcattctcatcatcagtagcagcagggacaccctacgcgtatgacgggtcattaacagctgcagccaattagtcacgggcgtgaaacactgacagcagcagctcgccatagtcgccggtcacctcctcggcaatgcgctcgcgcaaatccttgccatacttcttcttggacacgggcttgatgtcgcgcagcacgatgtggtagcgcactacagccgagctcaaagcgttctcattcgggccaaaacccttcatgggctttttgaaca

SEQ ID NO: 213809 - DNA, 502 bp, Glycine max
atagcattgggttcttctctagtctctgttctaccacaaaaatggtcccaaaaccaatcttagtcacaacaccaccgccggcaacttctgcaccctctccactgctcaacgcagtttcacccctcaaaacagaagaaaaaccccaaacacaaaccctaaaaacccccaccaccaccactcaaaaagctataaccaaaccaagcccatcatcatccaccaccaaaacgacgccgcagcagcgcgtggagctaaagagaaaaacaaactcatgggtccccgcactaatgctaaacgcatttgacgacatcatcaacaacttcatagaccctccactcaaaccctccatagaccctcgccacgtgttgtcacaaaacttcgcccccgtccacgagcttcctccgacggagtgtgaagtcattgaaggctctctcccaccgtccctcgacggcgcctacatacgaaacggccccaaccaacagttcctgccgcgtgggccctacca

SEQ ID NO: 213810 - DNA, 442 bp, Glycine max
  unsure (1)..(442): unsure at all n locations
ctcacgcaggtcgcgttcttcactctaaccggcgccgttacggtgctcaagtcctgccggcacctcctcccctacgccgatgaaatcaacgttgtgaaacgctgcgtcgaggccgtcagcgccaaggcctgcagcgaggccaacttccccagccgctcgccaccgaactggtggacggaggagctcgccgtcctcgacatcgatttcttcggcaacgtcatcgtcgccatgaagcagcgaggcgcgaagcctctcaccgtcgccgctgcgatcatcacctacactgagcgcgctctacgtgatctcgtccgcgaccacaccggcaacggaatccggtacacagatcccggcgattccgattccagatccaaacaacggaagcttctggaagcaatcgtggatctatntccctcggagaaagccgcgtttccgatccactttc

SEQ ID NO: 213811 - DNA, 403 bp, Glycine max
ggtactagtcggcggccgcccttttttttttttttttttttttttttttttttttttttttttttttaaagaacaattataatatatgcaatgcaagttcggtattccaccaagtggacgaattatttaacgaggaaaaaaagatttaccgaagctatttattacagcttaagtgaatgccaacatactactactttaaggggaggcagtccctaacagattggtaatggttttcataaaccctttatgctttagatatacttatgaagtttggctaataccccgggatgacaatttgacaagaaacaaaatttattcacattatttttgggatgtaaaacctttgaacaaaagcacaccaacaggaccaaaggcctgagtcagaaccagggggatggcaacg

SEQ ID NO: 213812 - DNA, 543 bp, Glycine max
gtgagtatgtgaataagttcccgggtcgactagctcagtggccgcccttttttttttttttttttgttgtataacatatacggtgttataattggttaactaattagtagtaatagggttctttaaagaaaattacatatatgatacaacatatggcaaaaacaatgatgaaaagatcaatagtgatggcagaaactgcctgatcactaagcttcatattccttccaccaaggcggtcaaccatgtctggaacaggttcccagttcttgagttgttgctcgcgaggatcctctaatttcattttcatcttctctgcgtggcggcttgcaacctcttgagcaagggtccagtcatagaatttccgactctcttcattgctaagaacgttgtaaacctctcttaatttcatgaacttttctgaggcagtttggaaagggagggaagttgtgtcgggatgatactcctttgacagtttccgataagcaactttaatttcttctaaatccgcatctggtgatacgcctaagaattcgtaatgagaac

SEQ ID NO: 213813 - DNA, 366 bp, Glycine max
gcgtcgctccgcaccagtttcaccgcacgaatatcttgttgttaggagcgatccgagaaaaactctgtaaacatgttggtttaccaggacctccttacaggtgatgagcttctctctgactccttccgttacaaggaaattgagaatggaatgctgtgggaaagttgaggggaagtgggttgttaaaggagcagttgatgtaaacattggtgcaaacccttctgctgagggtggaggagaagatgagggagttgatgatgcagctgttaaggttgttgacattgaagacacattcagactttaagagcaacccgcattcgataagaaacagtttgttaccttcatgaagaggtttatcaagaattt

SEQ ID NO: 213814 - DNA, 501 bp, Glycine max
atgttgtgggaattattaccggctcactagctgcgtggcgggcggccgccctttttttttttttttaattaaattaccaagtcgtattcaaatacttatcaataaaaccatgaagccaaattaaaatatttttagtacacacccaaaaattcttcataagaaacttccgggaatctagcacgaccaaaatcatgcattgatgaaattctaacccatcgataattaaatttgatgggaattatgatgtagcagtagcacacgtctcaccattaaaatcaaaataccaggtcaaagtttcaagtaacttaggacagaacgtaaaaaaaagctagataaaatgagtagatagctcggcacattaagtcacttagcacttgacctgctttaaggcatatgcaaagtacaggaatgttggatcagcagcgccgtccttgtagtaggcaaagaccaagcaagcatcatcacccatgctctcaccaacaaaaaattggaaatctttaa

SEQ ID NO: 213815 - DNA, 422 bp, Glycine max
ccatgcaaaaactgcgattacttcctgaatttacattaaatgcatctaaacttaaatggggattcgtacattgaataatcaatctgtgcatgacaatagaaggaccattttacacgctttcaccaacataaaaactcccccctaaagacatttaagccttacaacttaattaaacaagcttcccaatgtttctccaaggcttgcaatcatagagttgtgccaacccttctcacttgggagtgaaagcagcacatatagtcccatgaccaggatctgcagggtgagcaaagaggttgccattaggaccactgcctgtgtaaatgtgctggaaccatgcccccatcacagcctacatgggcaacctcccattcttgatcggctttagtttcaactccttgatcttaccaagagaaccactttcc

SEQ ID NO: 213816 - DNA, 462 bp, Glycine max
tccttttttttggtcgtcctttgttttttttttttcatttgataaaatagtttattaacttcgtgataggaatacacacataaaaagtacacgagagtactttgtagatgtttaggcagtgctacttcatggcattattatcagcattgcagattacagtggctggatgctttatttatattggtagatattatttccagcagattatttaattactcatggcaccaaattgggaaatcaaccatcaactttcatgtctgtctctggaagccaggggaatggcagtgttggtttagttgcttccagaagaacctcaatggggaatctttggtgcagatggctttcaatggtgttatggcgtgattatacttttgagggtttgcacagtaatcctgatctgcatgcatctttagcacatattttttgaatatattaaaatttgatttttgcagtagatcatct

SEQ ID NO: 213817 - DNA, 540 bp, Glycine max
agtagatgggaattaattaccgggctgactagccgacggccgccctttttttttttttttttttggagatgtatttgttgtatattattgaagttggggtatacattctagtatatggtttttttttccctctcttggcttgtagttatttctatgttcatggataatgacacttagaaatagtgaccaaaacagaaatcatgatactttgagatgctccaaaattgctgaaatatcacagtcctcatagctcttctctgcataaataatgttggggctatcttgggagaacacatcttctcttttgtaactgtcttcactgcgaagaagcctttcactgccatattcaacagccccctttaaaacaagtgtcttctgtatgccagccactagttcttcataatccgtgtcacctttttctcccacaaatacaaccactttggatagatcaattccccacttgactgacagataccttagtgcttgttttcttgaagcaaataatggtatcacatttaatctcaatcctgcatgtgtata

SEQ ID NO: 213818 - DNA, 470 bp, Glycine max
tgctgattgcataattcccagctcgcctgagctgagtccgcccttgtcgtcctttttttttttttttcctaacttattctattacaattgtaaaaaaaagaagaactaaaagacgaaataaagaagaggagattaattacatattaattacatatatttaatacttaattggatctataatcttcttcacccctttccgtgtcaataactagattgacaaaaagggaatatcaatgcatctggaaaaaaacgattgatctctatcaagagacccgccaaagccccgaaccatagagtacttactactggtgccacggaaagatatgttcctagatctcgcatttcaaatcctcctttgtaagtctttcttctatctaaaattgattcgaatttaatattctgtttgattattctaaagaatattagttatatccctttagaatcttttttcctttctcatattctattct

SEQ ID NO: 213819 - DNA, 488 bp, Glycine max
aaaaaacctctcaaagatatatcagttgccacaggagttgctgaaggaaccattaggaactcatacaaggatctttatccccatgtttcaaaaataataccaagctggtatgcaaaagaagatgattgtgaagaaccctgggcatgccttaaaggcaaaacatagcgaccacatttaacaacttagatgccattggaacgttctgttctggatctactgaactgttttatacttttaattcaaaatgaaaatgcctcttctattagtattttcttcttctaactgcacattaattttggttaaccctcccaatttgagaattctaggggagaggcaccgctgatatatagaattagctcaacctttatgatatgaagctcattttgcacttgcggtgaaattgctggggtcatataggggtataggtatttgtagcatgaggaaatgctaaatgctctaatttttttttttgaatatatcttttatta

SEQ ID NO: 213820 - DNA, 323 bp, Glycine max
tccttagtcggcggccgccctttttttttttttttttttttttttttttttttttttttttttttttttattttgtattattttatcattaatttttttataaaaagagtttatggcaaaaaatacaaaagaaaaacaaataaaaaaaaaaaaaaaagaagggacacccaaagcgaaagaaggcagaaaaaaagaagaaaaaaaataaaaacaagggaaaaaaaaagaaagaggaaaataaaatgggggccgaaaacctccccaggaaagggggggggcaaatacagtgccacaataaaaggggcaacgaatttatgccccgc

SEQ ID NO: 213821 - DNA, 513 bp, Glycine max
  unsure (1)..(513): unsure at all n locations
gaaaaataaagggattgattcactcctaagaaccaagtattcaatgtagttttggttactggtgacctcttctgtacatgtacaaactcactcgtgtaaccaaaggagataaaacaaaataattgggaatgtataagattatgaatgttcttgtgtattttctgcctcgtcctattgctacctttgtaatccttgtttgcaaagagggcagcatgatataattcttagccattgatccacacattttaggtggaacaaatgggaacagggtaattgcctaacttcttctttgtctttgtatttggccaagcaaatgcaacattctggatcttggttgatcaatctttcactgctttgagagtcattggcaatgtccaagttggaatgaagccctttatatctccaacttgngagttgtgagatttgatcatcagatgcccctctagcagaggaccccatgctcatgttgtatccaaggagggtgctcattagtggcacatncacacacaaaag

SEQ ID NO: 213822 - DNA, 505 bp, Glycine max
ggataaatattctaaattaatgtaaaagaataaactgctacttataagaaataatattgttgcaagaataagcacctaacttcttctaaggagcaaaccaaactaataatagaacgatcgatgtggatttacactagctgaagaacactgcgccagcaaaactatcgtggccatctattaagcttatcatgttgcataaatcttgagcattgactccagcctgagttatttacatacacaggtcatttagaccgttacaacatgccatagcgtaactggtactttaacattgaagttcttgtatcttgtttggaagttcagtgccctgatgcagaaggaaaatacaaaggctaagatgactgtgaaagctaccaaaactgcagcaactggacccatgaagtcggatttaaacccgtagtggtcttcaatatatcctttgacagtgaaattctgagtagtactcccaggcacaaaaagatggtcctctatatctctatattgagag

SEQ ID NO: 213823 - DNA, 559 bp, Glycine max
  unsure (1)..(559): unsure at all n locations
ctgggatggaatctattgccgggctgactagccggcggccggccttttgttttttttttggataaatattctaaattaatgtaaaagaataaactgctacttataagaaataatattgttgcaagaataagcacctaacttcttctaagtagcaaaccagactaataatagaacgattgatgggggattacacttgctgaagaacactccgncagcaaaactatcgtggccatctattaagcttataatgttgcataaatcttgagcattgactccaggctcagttatttacatacacaggtcatttagaccgttacaacatgccatagcataacttgtgctttaacattgaagttctttcatcttgtttggaagttcagtgccctgatgcagaaggaaaatacaaaggcatagaagacagtgaaagctaccaaaactgcagcaactggacccatgaagtcggatttaaacccgtagtggtcttcaatatatcctttgacagtgaaattctgagtagtactcccaggcacaaaaagatggtcctctatatctctatatt

SEQ ID NO: 213824 - DNA, 431 bp, Glycine max
aaaataacacacactttacacatcattacgacaattaaaagaggtgtggaaattttcaaatagacagagcatactcaacaagagggtcatgtctaatttcctttattgaattaaacaaacgaacaaacgagagaaaacacaaattccagatcatgcagaggattccgcattttcagaagatctggcagtagcctgtggaacagaaaaagctggcataagagtattaccagcaatttcaaaatcttgagaaattcccaagagaatatcaaaaactgtagactgtttgggattgccaataaggaaactcaagtgccatgaagtttgatttgcccactcagaactccacatttcaaaaccattattaggaccacatacctctattgggaagatcaattcccaagaatgtggttccgattttgtccacttacatg

SEQ ID NO: 213825 - DNA, 492 bp, Glycine max
ccgaagttcacatctgtttggaataagcttcttttccatacaattgaatttttagaattatggctcagttattgtcaccagtatgcatggaggctctgaaaatccacaatccatcattgaatctttgttcaagaagctcatggcggatgctggtgaaaggtgcaagtccttgcacctttctgacacacagtggtagtaagcgaagagggtttggcaaagtaagagttactgctgaagactcagtttctccctctgagaccattgcagatgactattatgaagttctgggactgcttccagatgcgacaccagagcagatcaagaaggcatactacaatagcatgaaatcttgccacccggatttgagtggaaatgatcctgagaccacaaatttctgcatgttcatcaatgaagtctacacggagctgaacgatcccgtccaacgcatgatttatgatgaaagtcatggctactctttaacttcaatcaatc

SEQ ID NO: 213826 - DNA, 498 bp, Glycine max
  unsure (1)..(498): unsure at all n locations
gcaattgaagttaaaagccttagccttccctacaactccaaacacaaagacatcatcatccatggctgcctccgtctccactgtcggagctgtcaacagagctcttttgaacctgaatggttctggagctggagcttcagctcccagttcagccttctttgggaccagcttgaagaaggttattgcctcaagggtccccaacagcaaggtttccggtggaagcttcaagattgttgctgtagaagagaagaaagagattgaagagacccagcagaccgacaaggacagatggaagggtcttgcctatgatatctcagacgaccaacaagacatcacaagaggaaagggtttggttgactcccttttccaagctccacaggatgctggaactcactatgcagtcatgagctcctacgagtacctcagcactggacttcgncagtacttggacaacanaatggatggattctacattgctccagcttttatggacaagct

SEQ ID NO: 213827 - DNA, 469 bp, Glycine max
aatagagtaaattggaattgagaggtttgcttttaaggcatcaatcacttgggtacataaatggcatgaacaatgagtcgaagcaatggcagaagaataatattaacgccatcaccacttgtaacagtgcactcagtccctctgcagcagcatggaaatcagacatagcccttgctcttcagactctccactgcatccttgatgatttggtctacaggagtgaactctagacctaaatcaatcagctttgttgatgcatcctttgtacttgccctcaacaaccctggctgggtatcctttggcaacttgaccacatcgtattcagggtataactcagaaaccttggccacaagatcactaaagtgacgaatagattccacacacaagtgccttcctgctgctttcttgttctcaagtgccaaaatatgtgccaatgctatgtctttgaagtgagccattcccataaaga

SEQ ID NO: 213828 - DNA, 491 bp, Glycine max
tgcaatgcgactagctataggcccccgaattaattcccggtcggcggccgtcctttttttttggtcgccctttttttttttttttaatttgaaaaataaagggattgattcactcctaagaaccaagtattcaatgtagttttggttactggtgacctcttctgtacatgtacaaactcactcgtgtaaccaaaggagataaaacaaaataattgggaatgtataagattatgaatgttcttgtgtattttctgcctcgtcctattgctacctttgtaatccttgtttgcaaagagggcagcatgatataattcttagccattgatccacacattttaggtggaacaaatgggaacagggtaattgcctaacttcttctttgtctttgtatttggccaagcaaatgcaacattctggatcttggttgatcaatctttcactgctttgagagtcattggcaatgtccaagttggaatgaagccctttatatc

SEQ ID NO: 213829 - DNA, 399 bp, Glycine max
tagctgcgcggccgccctttctgttttttttttttttttttttttttttttttttttttttttttttttttttttttttttttttttttaaatgaacgatttccagtggggttttaaactaaacaattttgcaagttttgccaagaagggcaaccctaaaggcggtaattagagtctcccaaaagtctattaggacaaagttcactgaattggctggtaaaattaactagcattacttccttccccacaaggaacactcaatacttcgcccactttttggcccattttaggccccatacaaaaacatggccagatcacctagcacttaatacatggggctggcaggaatttaagcccgaaaattgctgcgattcccaactttttttccaattgggaaac

SEQ ID NO: 213830 - DNA, 494 bp, Glycine max
ccagtaatagtatttaatattataagcagagattcataattcagattagccgaactttatacagaagcgaccaattaccaaacattaaaaaaaaaaaaaggaagcaaccatgagcttaacacacgcatcacaagtccaaaacactagaacttgctgaaaggcaagacatgaccactgtattctaaggatgtttgtttaacgcaaaacaccggagtgcacgaaaaccatcacagacataatacataagtttttagctacacattaatagtttatcattattcctaattaagggctatctctgcttgaagcttgctctcccaacacctgacttgcaagtgcaggggttgcaggagcagtttggtccacatttgcagccatcgttctcagcgggcacacccatttcagcaccctcaaattgagccttaacaggtgccactcccatgaccaaggtctcgatggtggttgactcagtgtagctcaagactgggtacatc

SEQ ID NO: 213831 - DNA, 457 bp, Glycine max
ccagtaatagtatttaatattataagcagagattcataattcagattagccgaactttatacagaagcgaccaattaccaaacattaaaaaaaaaaaaaagaagcaaccatgagcttaacacacccatcacaagtccaaagcacttgaacttgctgaaaggcatgacatgaccactttattctaaggatgtttgtttaacacaaaacaccagagtgcacgaaaaccatcacagacataatacataagtttttagctacacattaatagtttatcattattcctaattaagggctatctctgcttgaagcttgctctcccaacacctcacttgcaagtgcaggggttgcaggagcagtttggtccacatttgcagccatcgttctcagcgggcacacccatttcagcaccctcaaattgagccttaacaggtgccactcccatgaccaaggtctcggt

SEQ ID NO: 213832 - DNA, 426 bp, Glycine max
gaatattacatatatgatacaacatatggcaaaaacaatgatgaaaagatcaatagggatggcagaaactgcctgatcactaagcttcatattccttccaccaaggcggtcaaccatgtctggaacaggttcccagttcttgagtagatgctcgcgaggatcctctaatttcattttcatcttctctgcgtggcggcttgcaacctcttgagcaagggtccagtcatagaatttccgactctcttcattgctaagaacgttgcaaacctctgttaatttcatgaacttttctgaggcagttttgagagggagggaagtcgtgtcgggatgatactcctttgacagtttccgataagcaactttaatctcttgtaaaagcgcatctggcgatacgcctgagaattcgtaatgagaacctaaagaagc

SEQ ID NO: 213833 - DNA, 382 bp, Glycine max
atcatcaaatagaggtttcaatttcaacaattcatcacaagtttcataacatccaaattagagaccattcatcttaacacaattccaacagaacattagacgatcaaaattcaattgaatcgccagatgtgataacaaacaaatagcacaattataaaagaaaaaaacttgggtgaatcaggaaaactgtctatatagcttccagagcttgcaggacatcagccttgaaatcctcaaaagcttcaactccaaagctgaagcgaaccaggttgtcataaatcttgtacttggccctttctgactgaggaagatcccagttagacgaaatagcaggttgatccacaatgctcttacaggcaccaaacgaggccgtaagatatgg

SEQ ID NO: 213834 - DNA, 498 bp, Glycine max
  unsure (1)..(498): unsure at all n locations
tagcgatagacagaggagagagaaagagagggagtaagtgggtaaaggaaagaaaactaaagaaacaaacctaacacaacacaaatccttgaaacgacgacggaaatggccgtttcgagctcgcacatgcgtttcacctttgagtgccgctccgatcccgatttctcgccccccccgccgtccttcgacaacctccgccgccgaaacttccgctcctccgcaggatccggcgcggcgtttcacggcatctcctccctcatcctccgcttccctcccaacttccagcgccagctaagcaccaaggcgcgccgcaactgcagcaacatcggcgtcgcgcaaatcgtcgccgcttcgtggtcgaacaacagcgacaactctccggccgncggggctccggcgccgcccgcggtcaccgccacggacgccgctacggtgcctctccncgtcgtcgtcgccgccaacgaggacgtcgttgtctccgccgcggcagacgagaac

SEQ ID NO: 213835 - DNA, 468 bp, Glycine max
cagtcacgccaaaatttattattggctgcagataatgttaaactttgaaaatctctcctcagacaccgtctgaacgaacaatttccttctttttcacatgatacgttaacacaaggcaaagagtaaaaatggtttgctgctggtaatggtaatcatcaaatcagaaaaaggcgctctcctctattcatatactttgcattcctcatcagcagggtttgtctcgcagaattcctccaatgggtctccactccctgctttagctgcccctggccacttgcttgctactaggtgtgccaaatccaccaccctttggctgtaaccccattcattgtcataccaagcaaccaccttaaccatgtcatctcccatgaccatagtcaaggaggagtcaatagtagaggaaacatcagagcagcggaagtcgatagacacaagtggaacatcacacacgtccaacacacctttcag

SEQ ID NO: 213836 - DNA, 528 bp, Glycine max
gaagtgaagacttgtgatgtttctaactctgctggaatccagatacttcaaaaaatgatttcacttgagcgaaatgaatctggtttgtctctggatggaagccttgtcagtgaaattgaaggtgaaagcgcagtcgacaggctaaaaagacaagttgaccatgacaggaaacttatgaatgctttgtataaagagctggaggaagaaagaaatgcttctgcagttgctgcaaatcaagcattagccatgatcacaaggctgcaggaagaaaaggcaacattacatatggaagccttgcagtacttaagaatgatggatgaggagtctgagtacgaaacagaagctttgcaaaaagctaatgaccttcttgttgagaaagagaaagagatagaagagttggaagctaagcttgagttctataggaagaagttccctgatgaatctgtgctggaaaacatggtggattcaaactctgaaatgaaggtgaaagatattggattggatcattgcattcgaaaagatgagagt

SEQ ID NO: 213837 - DNA, 523 bp, Glycine max
  unsure (1)..(523): unsure at all n locations
aatctcaaaccatttgagtatatattattttatgtacttaacacttaacacagtacacatgcatatatagagcaacacatttcaaggaaacattctccaaaccatactgatctcccaaaataaactggaagatgattaacttaaagacacacatatatatataagccaaaagcatatatatatataagacaagtcgaaggaatatgctcataattggttgcttatgcttcagccaaagagatggtggtgcttctttccatgagcttcctcatcttgctcctttgcttcctttttctcatgatgttcatggaaggcaaacccaccagatcccactgcagctgctgctgcaaccttctcttatatcttgtgcctgtgagcatgctctgggtctttctctgccttgtgcttctcatgcaaggcgtaagcagcagcagatgcagcacctaactcaccaaggtgctcaagatgctggnggngcttctcttccttcttatagtcaacctcatcatcatacccaccacca

SEQ ID NO: 213838 - DNA, 496 bp, Glycine max
gtatcagaaatctacactctcagtacattatacatagagaactctcaatttcgttggtcttctagccatccttggaggatgtagattttggagcagtggttgttaaccacagcaagctcctttgcactttctgaaacagcgactttgatcgtgtattacacaaagtgaaagcaattgcatccaaataccaatcacctcgccccttaaaacccacaacacagcctccatctatcgaaaaagtgaatagagtcccttcttcaactccatatggtccaaaggttctgtggatgctcttgaatgtcaatgaccgaatcacgggggtgcctccgcgaacaactggacagtagcggccggtcacactgaccaagagctcatctgggaattgcagcttaatctaggatacatgaaaaaaccgaacacttttttatatttgcttggaatttgacgaaatggtgaagcaaagagaagtttacctcagctgtaatgtacctcaact

SEQ ID NO: 213839 - DNA, 463 bp, Glycine max
gcctcaaaattccattctactaaattcataatgtataaatacttcatttagaagcaagcagtgttctttttcaaaacagagagacgaaaaggaaagactcaagatactctattgcctaacatacaaggttgaatcgtacaaatgaatgtgaagcgaagtgctcatatgtgcaaggtctaaaactcagccgagccaggtgttcgaggaaaaggaataacgtcccttatattgtccattcctgttgcaaattggacaagtctttcaaaccccaaaccaaagcctgcatgaggtactgaaccatatcgacgcacatcaagataccaccaatatgcatccttattcagctctaaatcatctaaacgagcttctagatactcaagcctttcttctattgggcttccaccaataagttcaccaatccctggaaccaacatgtccatggatgcaactgaccggccatcat

SEQ ID NO: 213840 - DNA, 463 bp, Glycine max
  unsure (1)..(463): unsure at all n locations
ggtataactcatctggtattccaactttatccgtgaatacaaacaactaataacacgcagaataatgataattttcaggacgaacgtaggggtagagttaaatccaaactaacacaaggagctcttgacactacattcgactatttttccattaaaatacacgatagtcaactgcagccatcataatattgcttgcgtgcaaatttgcattccatgaacgaggcctgatatcaatgttcggaaaggcaagaaggcatggctagttgactagttattatggtggctagcagacagatacgaaaaaatgatggaaaccatgatgaccagtacgataatcatggttgagccatatccactttcatccttcacaatgtaagatttccttttactcaagagaccagattctctgcaagttntctgtatagcttccagcctgctcaatgctttagatgcattgggatca

SEQ ID NO: 213841 - DNA, 471 bp, Glycine max
gacaaattatggctttcatccgggtgaactagacaatttcaaactactcagctctgtgtcaaacctgaaaagaatcagactagagcggatttctgttcctcacttaggggcattgaaaaatcttggaaagttatccctcttcatgtgtagtaccataagtcagggcttttgaaaatggtaccatcacagttttggattcatttccaaaactatcagatttgaacattgactattgcaaggatatggtgaaattgcctactgggatctgtgatattgtctcactaaagaagctcagtattactaattgtcacaagcttagttctctgccccaagaaattggacaggtgttgaatttggaactcctgaacataagtccctgtactgatttggaagagataccaaattctattggaaaactttctaagctaagactttttgacctctcaaaactgcataagcctttcaagttta

SEQ ID NO: 213842 - DNA, 481 bp, Glycine max
caaagcacaaagcatagctcatccttgagttaaaaaatggcagcagcttcttccatggctctctcatccccatccttggctggcaaggccgtgaagctgggcccatcagccccagaagtgggaagggtgagcctgagggaaaaccgtcaccaagcaggtctcctcaggaagcccatggtacggcccagaccgagtcaagtacttgggcccattctctggcgagcccccgtcctacctaaccggtgagttcccaggcgactacggctgggacactgctgggctttccgcagacccagaaaccttcgccaagaaccgtgaactcgaagtgatccactccaggtgggccatgctcggagccttgggctgcgtcttcccggagttgctgtcccgcacggggtgaagttcggaaaaccgtgtggttcaagggcgggcccagatcttcacgagggtgggctcgactacttgggcaacccaagcctga

SEQ ID NO: 213843 - DNA, 505 bp, Glycine max
gatgacaaatatatattttttatatttcctttgaatggaagaggcaccacaacctcactccaatgataaacatgccacactcttattctactcaaggtctcaatcaagggcacttgtgaaataaatactaagggcagccaggtccttatatgaagttatagccaaccataatgataataataatacaagacatcttaataacatggaattcaaatcttgcttattttcatagtttatatcccaaaacatagttttatccttgaagaaatacttaaacgtctccatcccaaagttcttccaaggtcttgcaagacccattttcagatagccatatgtcccctgtgtattgcctgcgttgtggaacctgactgatcctctctaaatcctcttcactcagcacaaaatcaaatatgtccaggttctgcttcatcctctcgctgttggtgcttttagccatggcacttgacccttgttggacacccattaagtgcacctgagctatggc

SEQ ID NO: 213844 - DNA, 550 bp, Glycine max
agccatatgatggaatcagggtcgacgagctgactagctcagctaggtcggctgtctttttttttttttatgtatctatataatacaattgaacttacgatatcatcaaatctatgtatcatacgttatttcttttagtgaagagggaaccgatgcgtgacataatatctataggtaagatatcatatcgtatgatagtgatcatatatagcagagtcgatatctctatgaacatgatctaaagagctatttgacccctacttgtcctgagatatggtggaatttattcgtaggaacttacccatgcctacttcaatgtggacgggtatccggacgaatcttgggggagggggccttgcgatttggagctcacacagatcgagcttcactgattgagagacttgtgactacccactagaaacactgatccaatccatactgacgccccgggaagcacaagaccgtggttattagaccaagctttaggagccgcgtttacaactgggacactattcaagacggtcactgagatagcccttaatgctaaaac

SEQ ID NO: 213845 - DNA, 516 bp, Glycine max
ctcactaggtcggcggtcggccttgagcctcaacgggaagatctcagaactataaacccacgtgatgggacccgcaccaatggagaacgtggccacgtaagccaacaccatggctatgctcaatgcaacggcccacattagtttcctctcggagtgaccaatgatcgtgaggctgatagcgagcgtgaggagagagagcaccatgcccccgacactagacaacaacaacggacgacgacccacgcggtccaacgtaaaagtagccgccaagatgaaaacggctttgacgaatccaacggccacggttgcaagaagtttatgcgtgtcgtctttgatcccagccttctcgaagatcctggggctgtacaaaacgacggagtctacgcccgacgcttgttggaagacgtgaatcccaagggcagcgattacgatgtgacgaattgggggcgttggatagaagaagagttctttccatacgccttcacctgtgcttcgtttggttacctgaacgacgtc

SEQ ID NO: 213846 - DNA, 298 bp, Glycine max
aaaagaacacacacttaacacataaatacgacaataaaaagaggagcggaaattttcaaattgacagatcatacttagcaagagggtcaagtgtaacacccttgattgaattaaacctacgaacactcgattgataccacaaatttcagataatgcagaggataccggattagcagagtatctggcaaatgcctgagggacagaaaaagctggcataagaggattaccagcaattacaaactcttgagaaattcctaagagactatgaaaaactgtggactgtctgggaatgtcaata

SEQ ID NO: 213847 - DNA, 454 bp, Glycine max
aaaacatctcaatgggttcttcttctattacaacatcgcccgcaaccatgaccatggctgcgatcgtgctcctgttcacggtctttgccgattcctccgccctagacatgtcgataatctcgtacgacagggccctcgccgtacaaggccgccacgttgcgcaccgaggaggagctgatgtccatgtacgagcagtggctcgtgaagcacgggaaggtgtacaacgcgctcggcgagaaggagaagcgcttacagatcttcaaggacaacctgcgattcatcagacgaccacaactacgcggaggaccgaacctactagctcggactgaaccggttcgctgatcttaccaacgaggaatacagggcctatgacttgggaaccaagatcgatcccaaccggaggctcggaaagaccccgagcaaccgctacgcgccacgtgtcggcgacaaattg

SEQ ID NO: 213848 - DNA, 306 bp, Glycine max
gtgaactgataatggaaacacttgtattaaaactgcaaactacagcattcaagattatacaatacgctacacttttaaaaagccttatatctatatctatccactgcaaagctgtggccagatttaaagacttctgcaggcatatgtttgatacacgttaagcatatgacattctcccgcaattggactttgacaccgctctatataatccctggattgcagcaccacgtggagcagcttccataggtgaaatgttgagaattgctacgcccttgccgttgttctgggcttcatcggctgcaatgt

SEQ ID NO: 213849 - DNA, 437 bp, Glycine max
atgccgagggacgagacgcgagctcgcctagctcacgtggcgcggcggccgccctttttttttttttttttttttttttttttttttttttttttttttttttttgtttttttgcgcttttttgtttttttttttttttttttttgtgtttcctttataaaaaaaacaggccgaagtagaaaaatgttttgcccgggaaaaaccctgccgtagcccggccaaatcgaaagggggtcgttcccctaaagccacctggggaaaaaccaagaggcccgcagggggcgcccccccaaaaaaacgggcaaccagagcggcttctgggaaacccccctggtcgggcgttttaaaccccgcggccgggggggtttctcgcagcgggacgggcacaaaagaaaggggcaaagcgcggggaacaaacaaatttttgccttccccct

SEQ ID NO: 213850 - DNA, 504 bp, Glycine max
atcagaattgcccacttcacaaaaacttcaattcagacctcacctgcccgcctttcccgcaacttctttacccgcccacccctcctcgcagcctacaacatgccgcaatccccgcaaatcctcaaaatcgaagacctccccgcgtccgaagcaaaatgggtttcatttcaaaaaatctcctggcaagaccaaacaggccgcgagcgcgtatgggaagccgctgcgcgcaaaacgcggggcacatctggtgttgacgccgtcgctatcaacgctattatccggcacccgtcgcgaccaccgtctactatcatcattctgcagtaccgcccgccagtgaacgcggtatgtgtggagttacctgcaggactagtcgatgagaaagagagtccgggagacgcgagcgtgcgggaacttcacgaggagacgggatataaagggaaattggcatttatttcaccgacgatggtgagtgatccgggactaagcacggcgaacatgcagctc

SEQ ID NO: 213851 - DNA, 379 bp, Glycine max
ggggctgaataagttcattcgcttgcattactacactatacacgctatcaagactatcttcaactaaacggcgaggtaggaacgttgccctgccgggagacgttatgtctactggaagcgcttttcagcggccttccagttgatgacgttccagatggccttgaagtactcggccttgcggttctggtagtcgaggtagtaggggggctcccaggcgtcaacacccaaaataggacggaattgaccgacgacggggtcctgggtggcatacgtcctgatctggatagctccagggtgcgtgtcctggaccaaccaagcccagatcgtgccctggacaccccgaagcgcaatggttgaacctttacttgaaggcatccag

SEQ ID NO: 213852 - DNA, 492 bp, Glycine max
  unsure (1)..(492): unsure at all n locations
ggtgaagatagagttcaagcagtttgttctgaagaaaatgggtggctattctgtgcaatatatgacggctttaatggaagagatgcagctgactttctggctggtaccctgtatgaaaccatcatatcttactttaataagttaatttgggaattggagccgggttccatcaaagcttatgataaaggatgcttgggtggatccctgcaatataagttggatgatagtcttatttatcacgagaatcaatctctgtcgagatttaagggaataaacaattctaatcatggttgttttgcaaagtgtaatccttctactaagtcagaagtatcatgtgattcattttcacatggggtacttgatatccttcaacgtgccattagtcaggctgagaatgatttcttgtacatggttgagcaggaaatggaggaacgtcctgatttaagttctatgggatcttgggtttacttgngcttcttacgggaatgattt

SEQ ID NO: 213853 - DNA, 522 bp, Glycine max
ggataaataacattttattacaaagtcctccatagcatacaataacaaagttacatggaaattcattaactaccactaacaataccgttatagccgggtcaaaatgctgaatttaaacaaaactaaagagatgaagcacatgtacatttatttttatttttatgaaacttagattgaaacaatacaacttaactatatgttgatgctttgccaagtgattctgcaatcttactggcaatacagtaagatgtagactgaatggttaccatggggttgacaccaactgcactaggcaaaacactcccatcacacacatacaagccttctgcttcccaagactcaccattctcattgagtgcaccttcttcttcagaggcacccattctacaacttgacatctgatgtgcagtggtaaacactgtccacacttcattccttgaccttggacccgcaactattgtcacagtgtcaagaaactcctgcaaatcttcctccttcatccccttacacttgctcgagccg

SEQ ID NO: 213854 - DNA, 525 bp, Glycine max
ctcgagccgaatcggctcgaggttgttgtaaagctagccttgttgcagccatggccacccacgcggctctagcttctacaaggatccccactaacaccaagttcccatccaaggcttcacactctttcccaacccaatgcgcctcaaagagacttgaggtgacagaattctctgggctaagatccacttcatgtgtgacatatgctaacgatgctagagaatcttccttttttgatcttgtagcttcccaactcactcccaagaccaatggatcatcaactcctgtgaggggagagacagtggccaagttgaaggtggcaatcaatggtttcggacgcattggtagaaacttccttcgctgctggcacggccgaaaagactcaccccttgaggtcgttgttgtcaacgacagtggtggtgtcaagaatgcttcgcacctgcttaaatatgattccatgctgggaacttttaaagcagatgtgaaaatactggacaatgaaaccatcactggtgatggtaagccca

SEQ ID NO: 213855 - DNA, 472 bp, Glycine max
tgcctgatgtgacctattcccggtcgacagctcactagctcgcgcctttcttttttttttttttttttttttttttttttttttttttttttttttttttttttttttttttttttttttaggacaaaaggaaaaggccccaaattcaatttaaggggaccctttaacccaaaattttttgggaaaaccggcccatttgaaaaattttgtaaaaaccttttaaacttgggattttctttttgcacctaaaacattgggaattctaaaaaggttaccccccaggcccattccaaattttaacccttggatcagcacaacctttaggaaccgaaatttttacttgccaagtttgctttgcccccaattcaaaattgggagaaaggtcccctgttaaaagcatccccgttagcatttccaagggcaaccttgttcaagtacttgtcaaccaattggacttttttgacattttctt

SEQ ID NO: 213856 - DNA, 512 bp, Glycine max
  unsure (1)..(512): unsure at all n locations
aggacaaaaggaaaaggcaccaaattcaatttaagtggacactttaactcaaaattatagaggaagacagtccaatatgaaaaatatagtaaaatcatctcaaacttggcatcttctctttgcacctaagacattgagaattctaagaatgttacacgcaagtcccatcacaacttctagcacttggatcagcacaaccttcaggaacagaaatatttacttgccaagtttgctttgcctccaattcaagattggaagaaagttcccctgttaatagcatcctcgttagcatttccaagtgcagcctcgttcaagtacttgtcagccaattggactctcttgacattctcttggtcttggacaagcatgttaccatacgtcaagagcttctccagagtcatcttgggctgctcaaaggttggaggtccatcttttgagttcacaagcttcttcccaatgccgtcaacaccaacaccagaaatccacttnctcacttcgtcatcatatactct

SEQ ID NO: 213857 - DNA, 527 bp, Glycine max
tgtcgtccttttttttttaatatcatatttctgtaactacttggatttaagaactggaacaagaatagagcttctccacagtcttgagaaacttggtcgacatgcaccgattgcaaaccatggtgcaataatccaactgttcagagaggctatgtcttatcctgtaaacaaaaccgctatgcaactgtctagatacttactaccaacatcagggttcaacaaaattattcccaataagcaaccatgattctaaacagtcacaagggaaagttcatagaagcctcggctacattaatgatcacaacttattgttgtgccaaaatacacctttgctctaggtactttgatctggctccacataaatacactctgttgtctatctccacattgccttgacaaatggactttcatcaaaccggtaatactcttccaaaatgggtcttatagactttgtagcctccattgcatgataatgtggcattgtggataacatggatgtgctacatgaatgtctgagatattatgga

SEQ ID NO: 213858 - DNA, 404 bp, Glycine max
gtatatgtaagatgcttgaatatattaagataacatttctcaggtataaatcaaccgtctacaaccataaaactaaagaaaacaattcaactcggtcccacaatcaaaacttgtaaaatacagaataagcggaggataaaaaaactaagaaacataacagttaaaatttggatcaagatcaagcatctgcaatggtcacctcaacctccacaccaggttcgatcgtgatagaggtaatctgcttaaccacatctggggaactgtaaaggtcaatcactctcttgtgcaccctaagttcaaatctgtcccatgtgttggtaccttcaccacagggtgatttcctggtagtgatgtgaaaaaccttagtgggcattctaacaggtcccttcaccctgagtctctta

SEQ ID NO: 213859 - DNA, 403 bp, Glycine max
atatgtaagattcttgaatatattaagataacatttctcaggtataaatcaaccgtctacaaccataaaactaaagaaaacaattcaactcggtcccacaatcaaaacttgtaaaatacagaataagcggaggaaaaaaaaactaagaaacataacagttaaaatttggatcaagatcaagcatctgcaatggtcacctcaacctccacaccaggttcgatcgtgatagaggtaatctgcttaaccacatctggggaactgtagaggtcaatcactctcttgtgcaccctaagttcaaatctgtcccatgtgttggtaccttcaccacagggtgatttcctggtagtgatgtgaagaaccttagtgggcatcctaacaggtcccttcaccctgagtctcttat

SEQ ID NO: 213860 - DNA, 357 bp, Glycine max
tgccgccctttttttttttttttttttctttttttttttttttttttttttttattctttttttttatttttttttttttttttttttatagggaacctcaaaagcgacttattccctttaagccacaggttaacaaacaaatgggacccattcaagggtttgaaaagcgaaaagcccccctgggcaatgccaccaaaatacccgttcccgtcggaaaaggaaaaccaaaaacggtgccccctttgaaggttcaaaacctaaattgaccccccctttcaaccccaacccaaatttctgcccaatgccagccccaacaagggagctatggagatgggacccacattccttgggggcca

SEQ ID NO: 213861 - DNA, 548 bp, Glycine max
  unsure (1)..(548): unsure at all n locations
gaggaagcatatccctacacaggaaaagatggtgtctgcaaattctcagctgaaaatgttgctgttcaagtccttgactctgtgaatatcaccttgggtgctgaagatgaactaaaacatgcagttgcatttgttcggccagttagtgtggcctttcaggtggtgaatgggttccatttctacgagaatggagttttcactagtgacacttgtggtagcacttcccaggatgtgaaccatgccgttcttgctgttggatatggagttgaaaatggtgtcccatattggctcataaaaaattcatggggagaaagctggggtgaaaatggctacttcaagatggaattggggaagaacatgtgtggtgttgcaacttgtgcatcttatccaattgtggcataaattgcataacaatatggtccctggtgactaccaccttgtcatgcttcagagttagaagcgtattgctgatgccagtattgatgaatgatgattaaagataagtgtnattgtatgatgaaaatgctcctagttgggttgcatgatgt

SEQ ID NO: 213862 - DNA, 510 bp, Glycine max
attttatccaattgaaattttaaaaatgactgggataaacttaagaattcaattattgaaattgaataagtaaacaatttaattggattggtcgaatggtatcaaaaaaatggagtactaactcccatttcttatttattattgaattaaccgatcaacttgctttgttatcgaacatttctttttgatttcaaaaattttccggaaaaaatttgaatctatttttatatgcgaatcaatcctactacttctggtcctgaggtttctgcgcttgaaaaaaaaaaatctgggacgtatcgcccaaataattggtccggtactagatgtagcttttcccccaggtaagatgcctaatatttacaacgctctgatagttaagggtcgagatactgttggtcaacaaattaatgtgacttgagaagtacagcaattattaggaaataatcgaattagagctgtagctatgagtgcgacagaaggtctaatgagaggaaatggagtgattgacac

SEQ ID NO: 213863 - DNA, 386 bp, Glycine max
aatctcaaaccatttgagtatatattattttatgtacttaacacttaacacagtacacatgcatatattgagcaacacatttcaaggaaacattctccaaaccatactgatctcccaaaataaactggaagatgattaacttaaagacacacatatatatataagccaaaagcatatatatatataagacaagtagaaggaatatgctcataattggttgcttatgcttcatccaaagagatggtggagcttgtttccatgagcttcctcatcttgctccttcgcttcctttctctcatgatgttcatggaaggcaaacccaccagatcccactgtagctgctgctgcaacctactcttctattttgtgcctgtgagcatgctctg

SEQ ID NO: 213864 - DNA, 578 bp, Glycine max
  unsure (1)..(578): unsure at all n locations
ggaagatccagagatggcttcaaattggtcaagagaagaagatgacagaagcttgtaaaacacttgatcaattcatacatgcacgcatagcatctaagagagaggagctaagcaagtacaacgaaaatgaaatgggtgaagctcatcatgttgacttgttaacagctttgatgagagaaggaaaagcacatgacgataaatttctaagggatgctgtgttcaatctatttgtggctggaagagataccataacttcagctctcacgtggttcttttggcttgttgctacaaacccctcagttgaagccaagattctcgaagagatgaaagagaagcttgggaccaaagaaaagtcgcttggggttttaagcgtggaggaagtgaaaaggctggtttatctgcatggtgctatatgtgaagcgttgcgtctctttcctcctataccctntgagcgcaagcaagcaataagctctgacatgcttnctagtgggcatcgtgttaattccgggacaatgatnnatatttctttgtatgcaatgggaagatttgagnaacatggnggaaagattgttttgagt

SEQ ID NO: 213865 - DNA, 426 bp, Glycine max
  unsure (1)..(426): unsure at all n locations
ggttgagtgtgattaattttttgtgtacaaattgatgctttgaagtggggacccaaggggatccagcttgttttagacaacactaccgacaggggcgcttgctcaacgagtgctgagaattaaactaactttgctccctatggacctaagtaaaaagacatttgcccaccttctttcctaatggaccccaaccggggggaagataagtaaccccgtccacccctggggaaaataacaacaaagagctgacctgcattgtctggtggctcccccaccctcattgatgatactgcaacagctcctgatggaattatcatcagaaaagcgtctttcaaggcaagcagcttagcagcttctatagacacggacttgtaacctgaataacttnatctaggagacttacatccagaactttgggaaagatac

SEQ ID NO: 213866 - DNA, 536 bp, Glycine max
tgtgaaaccaaggtgattcctggtgaatatggtttcgttgcccagcttaatgagggtcgtcacctcaagaagagaccaactgagttccgagttgacaaggtccttcaaccctttgatgaaaacaaaattccacctttaccaaaaggttgggcaagaagaggtcctcttccaatttgaagctagcgaggatggacaagtccagttctttccaaatgctccagttgatgttgacaattctcccagctttgttgccatcaatgtcagtcctattgagtatgggcatgttttgctgattccgcgcattttcgagtgtttgcctcaaaggattgaccgtgagagcttcctccttgcacttcacatggcagtggaagctgataatccatattttcgattgggttacaacagtttgggtgcttttgcaaccattaaccatcttcacttccaggcttattatttggctctgcccttcccaattgagaaggcccccactaagaaaatggcaagtttaaatggtgggggtgaagatatctgaactg

SEQ ID NO: 213867 - DNA, 495 bp, Glycine max
ctctctctctctctctctctcaatcgttcttcacgagagagagagacatggacgccgtcgttcaaaccagaggccttctctctctccccaccaaccccaaaaccagggtttcgcatcatctggattcattttaacggcctcaaacaccgttttctctctctaaaacccaaacccctctccgccccttttctctccgccgccggcgccaaatttcacccctttggcccaaagccccaaaatttattcatctgccgggccgaggccgctgctgccgcagatgggcctgcccagcccgccttcggggaagccgaggtcgccgaaaaacccaaacttttgggaatcgagatcaccaccttgaagaaaatcatccctctcggtttgatgttcttctgcatcctgttcaattacacgattctgagagacacaatggatgttctggttataactgccagagggagcagtgcggagattataccctttctaaaacgggggtga

SEQ ID NO: 213868 - DNA, 372 bp, Glycine max
gctcctcttaccgtggaagaacagataataactatttatactggaacgaatggttatcttgattcattagaaattggacaggtaaggaaatttcttgttgagttacgtgcttacttaaacacgaatatacctttaattaaaagaaatcatatcttctaccaagacattcactggggaagcagaagtccttttgaaggaagctattcaagaacagatggaactctttttactacaggaacaggtagaaaaaaattgattaatcatttaataactttataatttcactttcaaattcttataattagtatcttttaatatctttttatttcatttgaatataatattaatatataaataaaatgaattcgaatg

SEQ ID NO: 213869 - DNA, 522 bp, Glycine max
aatttctatagagctgaagaaattaatattaatcaatcaatcaaaatggggttgtgcaaggtttcatttcctgtattatgtgtgttggggttggtcatgattgtgagtcacgttgccaatgctcaaaactcaccagcagattacgtcaatgcacacatcgctgcaagatcagaggtgggtgttcaaaacttggcttgggatgacacggttgctgcttttgcacagaactatgctaatcaacgtaaaggtgattgtcaactgatccactctggtggtggtggccaatacggggagaatcttgctatgagcactggtgacctacgtggcacagatgcagtgaaattgtgggttgatgaaaagtctaactatgactacaattctaattcctgtggtgggggagagtgtctgcattacactcaagttgtttggagagactctgtgcgtcttggatgtgccaaagtagcatgtgataatggaggcactttcatcacttgcaactatgctcctcctggcaactatgtt

SEQ ID NO: 213870 - DNA, 641 bp, Glycine max
aagagattgaagagacccagcagaccgacaaggacagatggaagggtcttgcctatgatatctcagacgaccaacaagacatcacaagaggaaagggtttggttgactcccttttccaagctccacaggatgctggaactcactatgcagtcatgagctcctacgagtacctcagcactggacttcgccagtacttggacaacaaaatggatggattctacattgctccagcttttatggacaagcttgttgttcacatctccaagaacttcatgaccctgcccaacatcaaggttcctctcattcttggtatctggggaggcaagggacaaggaaaatctttccaatgtgagcttgtctttgccaagatgggaatcaaccccatcatgatgagtgctggagagttggaaagtggaaatgcaggagagccagcaaaactgatcaggcagagataccgtgaagctgcagacatgatcaagaagggaaagatgtgcgctctcttatcaacgatcttgatgcaggagctggtcgtcttggtggaaccacacaatacactgtgaacaaccagatggtgaatgccactctcatgaacatttgctgattacccaccaatgtgcagcttccaggtatgtacaacaagg

SEQ ID NO: 213871 - DNA, 617 bp, Glycine max
caagagagttatatactatgaaggtcctcataagttgtatgttggcaatctttccaggagtgcggggcctcaagacttgaaacaactttttggtagatttggtattgtagctagtgtaagggtgttgcaagatttgaggaaagggaatcgcagggtctatgcgtttgtctcttatcattcagagtcagaacgtgatgcagcaatgtcgctcaatggaacagaattttttggtcgtgtgctagtgattagagagggtgtagagagagaggactgagacctaactggatattcatattttccatagagattgttgcaattttgattgttttgggaggatgctctctgttctggcttttggggggcttataggctcctttgaccaaactaagcttgatgcaagaacattcctgagctagaaaatgtcagcaagcagagttgacctactttgaaaagtccattaaaattgcaatcagcaatgtctctgtatatttgaaatttgaaacatgcttttctgagtgacaaagtattcaacttaaggtcaagaacaagactgccagacctgataggaacttctcttcattgttttacatattataaatattaaattactgtgacag

SEQ ID NO: 213872 - DNA, 567 bp, Glycine max
tgtggttgcattttatggtgtggtacagcatgggccaggaggaacaatggccactgtggcagaatatatggtggatggttctcttaggcatgtattacttcgcaaggataggtatcttgatcgtcgcaagaggctgataattgcaatggatgcagcttttggaatggaatatttgcactcaaaaaacattgtgcattttgacttaaaatgtgacaatttgctagtaaacttgaaagatcctttacgtccaatatgcaaggttggtgattttggcttatcaaaaattaaacgcaataccttggttactggtggtgtgcgtgggactctaccttggatggcaccagagctgctgaatggaagcagcaacaaggtctctgaaaaggttgatgtgttctcctttggcatagtattatgggaaattctgacgggtgaggagccatatgctaatatgcactatggtgcaattataggtgggattgtaaataacacattaaggccaatcatcccaagcaactgtgatcatgaatggagagcactaatggaacaatgttgggcacccaatcctgc

SEQ ID NO: 213873 - DNA, 602 bp, Glycine max
gatagacatcacaactactgtcctgggcttcaaaatatccatgccaatcatgcttgccccaacagccatgcagaaaatggctcatcctgagggagaatatgcaacagcaagagctgcatctgctgctggaacaatcatgactttgtcttcatgggctacttcaagtgttgaagaggtagcttcaacaggacctggcattcgctttttccagctatatgtgtacaaggacaggaatgtggttgctcagcttgtgagaagagctgaaagggctggattcaaagccattgcccttactgttgataccccaagactaggacgcagagaagctgatatcaagaacagattcacactgccaccatttttgacattgaagaactttgaaggattggaccttggaaagatggacaaagctgatgactctggacttgcttcatatgttgccggtcaaattgatcgtactcttagctggaaggatgtgaagtggcttcaaacaatcaccaaactgccaattctggtgaagggtgtgctgactgctgaggacacaaggatagctgtacaaagtggtgcagctggtattatagtgtccaatcacggagctagac

SEQ ID NO: 213874 - DNA, 554 bp, Glycine max
tggaagaccactgcttattgtcgcaaggttgctctaaaagttatggcaatggccacaggagagggaccagctgaagctaccccaactgaggtgccagagattgtcaagatctcttcaagaaacttgggaccaaagttgatgattaagtatgcagtgagttcactcgccttggttggggtgattgcattgtggggctcatttggattgatctcagcaattgataggcttcctttgattcctgggattcttgagattgtaggcattggatacactgggtggtttgtatacaagaacatagttttcaaacccgacagggaagctttggttcggaaagtaaaagaaacatacaatgaaatactcgggagcaactgaaagtgttaggaaatgctgagatgctgttgacacgaaatagccattatcttgctgcttcctattgaagatgtcatcatgcttcattttgtcgccataagcttttgaccatactttatcccaagtaatgtaatatgttctgaaaaaattggatctttttatatatcttgatccacttttaagac

SEQ ID NO: 213875 - DNA, 468 bp, Glycine max
ggctcgagggaaaaatgatcgggtagccaaatcaccgttaacctaagaaagagaagtagtagcagtagcagtaggaagaggatgatcggcgtctgaaagatcaagcagtacagtaacgtcctcgacaagcccctcaccaagggcaagcaagaggttagtttgagcgcattcgcgttcttgttctcggagcttgttcagtacaaccaaacgcaggtcgacaatattggcgagcttgaacgaagactggaggatgctggatatgcggttggggctcgagttcttgagctgctttgccacagagataagggaaacagaagggagacacggctgttgggtattctttcttttgtacacagtacagtatggaaagtattatttggaaaggttgctgattcactggagaaaggaactgaacatgaagatgaatacatgatcagtgaaaaggagcttctcgtaaacaaattcatt

SEQ ID NO: 213876 - DNA, 485 bp, Glycine max
ctagtttcttacaaggctctactctactgcttcaccttctgctctagaaaattcagcggtgatacatggcttcggctactctctctgtagccaaaccagcccttcaggcaaatgggaaaggcttctctgaattcttctggcctccgcagctcatcaggcttccttcccttttctagaaaatcttcagaggatttccattctgtcattgccttccagacctatgcagttggaagcagtggaggatacaagaagggtgtgacagaagcaaaactgaaggttgccataaacggatttggaaggattggaaggaacttcttgaggtgctggcacggacgcaaagactcccctcttgatgtcattgccatcaacgacaccggtggcgtgaaacaagcctctcaccttctcaagtacgattcgatcctcggaaccttcgatgctgatgtcaagcctgtaggcagcgacatcatctctgtcgatggaaagga

SEQ ID NO: 213877 - DNA, 564 bp, Glycine max
  unsure (1)..(564): unsure at all n locations
ctagtttcttacaaggctctactctactgcttcaccttctgctctagaaaattcagtggtgatacatggcttcggctactctctctgtagccaaaccagcccttcaggcaaatgggaaaggcttctttgaattctctggcctccgcagctcatcaggcttccttcccttttctagaaaatcttcagaggatttccattctgtcattgccttccagacctatgcagttggaagcagtggaggatacaagaagggtgtgacagaagcaaaactgaaggttgccataaacggatttggaaggattggaaggaacttcttgaggtgctggcacggtcgcaaagactcccctcttgatgtcattgccatcaacgacaccggtggcgtgaaacaagcctctcaccttctcaagtacgattcgatcctcggaaccttcgatgctgatgtcaagcctgttggcagcgacatcatctctgtcgatggaaaggaaatcanagttgtctgtgaccggaaccctgccaaccttccttggaaggatttggggatagacttggtgattgaaggactgg

SEQ ID NO: 213878 - DNA, 535 bp, Glycine max
aaacttccgaaagattctatccaattgtaatcataaaaatgactgggataaacttaagagttcaattattgaaattgactaagtacacaatttaattggattggaccaatggtatcaaaaaaatggacaactaactcccatttcctatttatgattgaattaaccgaccaactcgctttgatatcgcacatttctttttgattccaaaaattttccagaaaaacatagaatctatttttatctgcgaatcagtcctactacttctggtcctgaggtttctgcgcttgaaaaaaaaaatctgcgacgtatcgcccaaataattggaccggtactagatgtaactcttcccccaggtcagatgcctaatatttacaacgctctgatagataaagctcgagatactgttggacaacaaattaatgcgactcgtgaacgccagcaattattatgaaatcatcgaattagagctgtaactatgagtgcgacagaatgtctaatgagaggaatgtgagtgattgacacatgagctgcccta

SEQ ID NO: 213879 - DNA, 593 bp, Glycine max
tcttccctgtagatcacgttacattgcaatacctcaaattaactggacgaagtgatgagactgtggcaatgatagaggcctatctcagggcaaacaaattgtttatcgactataatgagcctcaaccagacagagtttattcatcctatctcgaattgaaccttgacgaagttgaaccatgcatctctggacccaagagacctcatgatcgggtgcctttgaaagaaatgaaggctgattggcatgcttgtctcgacaacaatgtgggattcaaggggtttgctataccaaaagatgtacaaggcaaagttgcaaaatttgatttccatgggcagccagcagagctcaagcatggaagtgttgtgattgctgcaatcacaagctgtacaaatacatcaaacccaagtgttatgcttggggctggtctcgtggcaaagaaggctcacgagctatgtttgcaggttaagccatgggtaaaaacaagtcttgctcctggctctggagttgttacaaaatatctactcaagagtggcctgcaaaagtatctaaatgaacagggtttcaatattggtggatttggctgtaccacatgt

SEQ ID NO: 213880 - DNA, 572 bp, Glycine max
tcgaaaatgatgaatgaagcggctggtgaaccctaattagttgtcggtgtttgttggaagagcacatctctgttttcttcgtcatcttcccctcccctccccaaccagagatgcgccccgcaacacatatgtactaaagctttcaacttttcagcatcctttcagatgttagcgaaaacccataacaaaggggatggatctaagtccctggctaagatactggcaaaatggaaagaatataatgcccagattgattccagcagtgatgcggataagccagttcgcaaagttcctgccaagggatcgaagaaggggtgcatgaaaggtaaagggggccctgagaactcgcggtgtaactacagaggtgttaggcaaaggacttggggaaagtgggttgctgaaatccgagagccaaacagaggcaataggctttggctaggtactttccccactgccattggagctgcccttgcatatgatgaagcggccagggcaatgtacggttcctgtgcccgtctcaactttcccaatgtttcagtttccagtttctctgaagaatctttcaaagattc

SEQ ID NO: 213881 - DNA, 471 bp, Glycine max
ggctcgagtggtgggtttcctgggggcttcccaggggccgggggcatgccagggggcttcccaggggccgggggcatgcctgggggcttcccaggggctgggggcatgcctgggggattcccaggggctggtggcatgcctgggggattcccaggggctggtggcatgcctggaaacattgattttagcaaaatcttgagtgaccctgaactgatggcgtcatttggcgatccagagattatggctgctcttcaagatgttatgaagaaccctgctaattttgccaagcaccaatcaaatccaaaggtagctcctgtaattgcgaaaatgatgaccaaacttggaggtggtcccaagtgaatactgttagatgcttgtaagttatttgagacttcaactttccagccctctggcatcgggtatttaatgtgtattgcatttttaatcttaccgaaaatattaaacttttta

SEQ ID NO: 213882 - DNA, 631 bp, Glycine max
aaaaaatcttactttatgaatacatgccaaacaagagcttggactcatttatatttggtcagtatcacatattccatcatacaacttccctgaagtgctcttcaaccattacaatcataatttcactaaccttgttcttaatttgaaatgtgaaatgtatatcttgaaagacccgacacgaacttcactcctggattggccaatacgatttgagataatcgtaggcattgcgcgaggcatgttgtatcttcaccaagactccagattgagagtgattcatagagacctgaaaaccagcaacattcttctagatgaggagatgaatccaaagatatcagactttggtcttgccaaaatatttgggggaaaagaaactgaagcatgtacagggagagtaatgggaacctttggatacatggctccagagtatgccttggacggattcttttcaaccaaatccgacgttttcagctttggagtagtccttctagagattctcagtggaaaaaagaacactggattctatcagtccaagcaaatttctagccttttgggtcatgcatggaaagtatggacagagaaaagctactggatttatggacccaatcttttgtgaacatgcacgaaatga

SEQ ID NO: 213883 - DNA, 558 bp, Glycine max
ggttcccagagccagagatcattcactacaacttggtcatgttaaggatttggcaaaagcttttatccaggttcttggtaatgagaaggccagcaaggaagtattcaacatctcgggagataagtatgtcacatttgatggattagcaagagcattggctaaagctggtgggttcccacagccagagatcaattcactacaaccctaaagaatttgattttgggaaaaagaaatcatttacattccgtgaccagcatttctttgcatcagttgagaaagcaaagagcgtgcttggattgcaacctgaatttggacttgtagagggtctagcagactcgtacaacctggactttggaagaggaacatatcggaaagaggctgatttctcaacagatgacataattcttggcaagagtcttgttagcgtataaactattctatttcaattttaagtatttcacttgtatttagaaagctgatcggatttgctacattatgaagtcgtgaaatattcatgagcttttcgttcagtattttcttcaacaaaaaataatggga

SEQ ID NO: 213884 - DNA, 618 bp, Glycine max
  unsure (1)..(618): unsure at all n locations
caacactctatgcacctctcatccgtgatgggcgtatggagaagttctactgggcaccaacaagggaagaccgcattggtgtttgcaccggaattttccgcactgatggtattcctgaacaggacattgtcaagctttgttgacacctttccctggccaatccattgatttctttggtgcactgagggccagagtatatgatgatgaagtgaggaagtggatttctggtgttggtgttgacagtgttgggaagaagcttgtgaactcaaaagatggacctccaacctttgagcagcccaagatgactctggagaagctcttgctgtatggtaacatgcttgtccaagaacaagagaatgtcaagagagtccaattggctgacaagtacttgaacgaggctgctcttggaaatgctaacgaggatgctattcagaggggaactttctttcagtcttgaattggaggcanagcaaacttggcaaagtaatatttctgttcgtgaaggttgttgtactaatccaagtgctagaagttgtgatggaacttgcgtgtaacattcttagcattctcaatgtcttangtgcaaagagaagatgctaagtttgagatgatcttact

SEQ ID NO: 213885 - DNA, 610 bp, Glycine max
ccgccacctccgcctctgtcgctactccccacgccctctccgatcgtgtggcgcagttcggcgagggcgtggggaggttcttccgcgagctgcgggagatggcgcggtcggatccgcggaaggtggtgtttgcgggcgaaggcggagctgtcgctggcgctggtgtcgctgttcatttacatcaaggaggagcagctcagcaagtactccatctgggccattctcaccgtcgttgtcgtcttcgaattcagcgtaggtgcaactttgaacaaagggttcaatcgttctttgggcacaatttccgctggagggcttgcgctgggaattgctgagttggccgttttgtctggaaagttcgaggaacttatcattgtactatgcatatttatcgcaggattctgtgcaagctatgtgaagctactgcctgcaatgaagacatatgaatatggttttcgtgtgtttttgttgacattttgcattgtattggtatctggaagaactagcagggaatgtttctccacagccttttatagattaattcttattgcaattggtgctggcatatgtttgtttgtaaatattttcatataccccatctggtctggggagg

SEQ ID NO: 213886 - DNA, 630 bp, Glycine max
ccgccacctccgcctctgtcgctactccccacgccctctccgatcgtgtggcgcagttcggcgagggcgtggggaggttcttccgcgagctgcgggagatggcgcggtcggatccgcggaaggtggtgtttgcggtaaagcggggctgtcgctggcgctggtgtcgctgttcatttacatcaaggaggagcagctcagcaagtactccatctgggccattctcaccgtcgttgtcgtcttcgaattcagcgtaggtgcaactttgaacaaagggttcaatcgttctttgggcacaatttccgctggagggcttgcgctgggaattgctgagttggccgttttgtctggaaagttcgaggaacttatcattggactatgcatatttatcgcaggattttgtgcaagctatgtgaagctactgcctgcaatgaagacatatgaatatggttttcgtgtgtttttgttgacattttgtattgtattggtatctggaagaactagcaaggaatttttctcccagccttttatagattaattcttattgcaattggtgctggcatatgtttggttgtaaatatttcatataccccatctggtctggggaggatctgcataaattggtggtgaaaa

SEQ ID NO: 213887 - DNA, 466 bp, Glycine max
ctaaaacgctctcaaagagccgaattacctgaaagcttcatggggtttcctgaatttggctgtcaaaaaacccagggtgtgctcttggaatggttgtagtgctatggagtttgtttgtgttgttgcttggattggatagccatttgagtgaggtgtctggattacttcctcttggcttgtttttataatcttggtaaagatggttctgcatagctggatttccagctctcatattcttgttaatttcttgctgctgcttggttgtggcataacctacgggactgacactgatatcttctgcttgaaaagtatcaaagaatcccttgaagacccctataattatttgaagttctcttgggatttcaacaacaaaactgaagggtatatctgcaggtttaatggggttgagtgttggcaccctgacgagaacagggtcttgaatctcaaactgtcgaatatgggactc

SEQ ID NO: 213888 - DNA, 577 bp, Glycine max
  unsure (1)..(577): unsure at all n locations
taacatcacacagcattagtatgtatcagcaacaagggtcagatccaacaaagcaatcaccggcaaccggttttccggtgagctatagcaattcaacaacgtattcgaccaacgaggcttcctacgctccagtccccacctccccagcccaaacctcttgtcgattggtccaccggcctctgtgactgcttctccgaatgtggaaactgttgcatgacgtgttggtgtccatgtgttacctttggccgagttgcagaaattgttgacaagggatccacatcatgtggtgctagtggggctctgtatacgctgatttgctgtgtcattggctgtggctgcctatactcttgcttctaccgccccaagatgagacgacagtatggtctaaagggaaatggttgttcggattgcttgactcattgcttctgcgagccctgcgccctctgtcaagaatatcgtgagcttcaacaccgtggatttgacatgattattgngtggcatggaaatgtcgagcaacgaagtcggngagtagccatgactgctacaacagcttcatcagtcgaaatggcatgagccg

SEQ ID NO: 213889 - DNA, 569 bp, Glycine max
atttctttcttctgatacccccaattgatttgttgcaaagctcaatatggcttcagtcaagctcaacaccccgcagacgggcgagtatgagcagcccaccggccttttcatcaacaatgagttcgtgaaggctgtcgacggcaagacttttgaggtcatcaacccctccacagaagaggtcatcacctccgtgcaggaggcgaccgagaaggatgtcgacattgctgtcgccgctgcccgcaaggccttcaacggcccatggaggaaagaaactccagagaaccgcggacgtcttctcgtcaagctcgccgaccttttcgagaagaatgctgatctccttgccgctgttgaggctctcgacaacggaaaggcgttcggtatggcccgaagcgtcgatgttcctgccgctgctggttgcctgagatactacggaggttgggccgacaagattgagggcaaggtcgttgataccactcccgacacattcaactacatcaggaaggagcccatcggtgtttgcggacaaattaatccatgggaacttttccctgctcatgtgggcatggaag

SEQ ID NO: 213890 - DNA, 502 bp, Glycine max
ctcgagccgaatcggctcgagctcagtgaaagagaatccgaggcgaagagaagagaaaaattaagatggaggggaaggagcaggatgtgtcgctgggagcgaacaagttcccggagagacagccgattgggacggcggcgcagagccaagacgacggcaaggactaccaggagccggcgccggcgccactggttgacccgacggagtttacgtcatggtccttttacagagcagggatagcagagtttgtggccacttttctgtttctatacatcactgtcttaaccgtcatgggagtcgccggggctaagtctaagtgcagtaccgttgggattcaaggaatcgcttgggccttcggtggcatgatctttcgcctcgtttactgcaccgctggcatctcagggggacacataaacccggcggtgacatttgggctgtttttggcgaggaaagtgtcgttgcccagggcgattttctacattgtaatgcaatgcttgggtgc

SEQ ID NO: 213891 - DNA, 551 bp, Glycine max
tctgtctctcctctgtcctataactttacctttctatcctcaggaaccatgaagtagtagtgaagaactaatcagccacaaatccaaacgacccctttggcctaaagctccctccttttctccaatggcaacatgggttttatcagaatgtgggttaaggtctcttccaccagtgtttcccaggccaacaagacccatttcgtgccaaaagccttcaaagtttagatttttaagcataaacaagggggtggcagatctgaatctccaaccaagagggttcacatgttataactctagggagagaaagtgggaatcgggagtgagtgctccactgaaggttgccaccactgagggagaggaagaagagggaatcaatggggctaatggggttgttgaggaagtaccagaatttgaccctagtgcaccaccacccttcaaattggcagatattagagcttccattcctaaacactgttgggtgaaggacccttggaagtcatgagttatgtttgtagagatgtcattgtggtttttgggttggctgctgctgc

SEQ ID NO: 213892 - DNA, 282 bp, Glycine max
cgacacacacaaactatgatggacataggatacttcacaactctgaccatatatttgtgaggaacagcggcttatgccagagagatactctaggacaatactatggccttggatctgaaacacgaggaacagcttcggatgttcctgatccttttgggatagttgtaggtgatcctgcagaatttcagagggatatgaagagaagtggatgggtaatattcacgcccttgatacgcgccgcgtggtggataggatggggtgcactgagtgtaggtgtgacct

SEQ ID NO: 213893 - DNA, 603 bp, Glycine max
gcttttgcttgtgctgtgctggcctccatgacttccatcttgcttggctacgatattggtgtgatgagtggagcagccttgtacataaaaagggacctgaaagtgtcggatgtgcaaatcgagatcctgcttcggaatcatcaacctctactctctgataggctcatgcctcgccggcagaacctccgactggataggtcggcgttacacgattgttttcgccggcgccatcttctttgtcggagcacttctcatgggtttctcccccaactattcctttctcatgttcggccgtttcgttgccggcatcggcatcggctacgccctcatgatagcccccgtctacaccgccgaggtctccccggcctcctctcgtggcttcctcacatccttccccgaggtttttattaatggagggatattacttggatacatatcaaactatggattttcgaagctgacactgaaggtggtatggcgaatgatgcttggagtgggtgcaattccttcggtagtcctaacggtgggagtgttagcgatgcctgagtccccagggtgctagtgatgaggggtcgtttgggagaggcaagaaaagtgcttaac

SEQ ID NO: 213894 - DNA, 345 bp, Glycine max
ctccaaccaattacaatctttctcaattctctatagacataaaaggtggaggaaatagagaggggatatctgtagacaggatcacacacatacaaaaaacttcatttagatgctttgaaaagagttgccacttgggaataacgcttatgtattaggttaacattgtgatgtctggaaatgcatctgtcacaacagtagatcgggcctcatagcaacaagacgtttttaacaaaccagcatctttccagaacgtttcgtcgcatgtaattgttctatatctgttccacttccctagtgaatagatctttccaatagatgtctcgtggacctaataattgtttcgaa

SEQ ID NO: 213895 - DNA, 517 bp, Glycine max
ccgccacctccgcctctgtcgctactccccacgccctctccgatcgtgtggcgcagttcggcgagggcgtggggaggttcttccgcgagctgcgggagatggcgcggtcggatccgcggaaggtggtgtttgccgcgaatgcggagctgtcgctggcgctggtgtcgctgttcatttacatcaaggaggagcagctcagcaagtactccatctgggccattctcaccgtcgttgtcgtcttcgaattcagcgtaggtgcaactttgaacaaagggttcaatcgttctttgggcacaatttccgctggagggcttgcgctgggaattgctgagttggccgttttgtctggaaagttcgaggaacttatcattgtactatgcatatttatcgcaggattttgtgcaagctatgtgaagctactgcctgcaatgaagacatatgaatatggttttcgtgtgtttttgttgacattttgtattgtattggtatctggaagaactagcagggaatttttctc

SEQ ID NO: 213896 - DNA, 589 bp, Glycine max
attttatatttaggttacgaggaaattatcatgaatccaattatttctgctgcttctgttattgctgctgggttggccgtagggcttgcttctattggacctggggttggtcaaggcactgctgcagggcaagctgtagaagggattgcacgacaaccggaggcagagggaaaaatacgaggtactttattgcttagtttggcttttatggaagctttaacaatttatggactggttgtagcattagcacttttatttgctaatccttttgtttaatcctaaaaaaatagaaatacatatccttttttccgtggacttgctttaccggtcttgctttttcgaattctatttatattaatatttcactcctataattctttatccgttcggacaagaacacaggggaaggactaattgaaaggtgaagaattcacatactgattcgccctctttcttctcttttttagtccaatgaccccccctttttttttaagataatttttctcaagtgttaaaacttgagagattttgcaatggatataagaactggtatctaattcgaataagtatcattcttttagggaatctt

SEQ ID NO: 213897 - DNA, 622 bp, Glycine max
  unsure (1)..(622): unsure at all n locations
gtggtgccttatcgctgtggttttcatcgtcttccttctcttatatttctttttttttttgtcttcgccgcacgccgaaacaatggccggaaaaggagagggtcctgctatcggaatcgatctcggaaccacctactcttgtgttcgtgtgtggcaacatgaccgagttgaaatcatcgccaacgaccaagggaacagaacgacgccgtcttacgtcggcttcactgataccgagcgtctcatcggtgatgcggctaagaaccaagtcgccatgaaccccatcaacaccgtcttcgatgccaagaggttgattggtcgtagattcagtgactcctctgttcagagtgatatcaaattgtggccttttaagggtcattgctggtgctgctgacaagccaatgatcgtggttaactacaagggtgaagagaagcaatttgctgcagaagaaatctcttctatggtgctcatcaagatgcgtgagattgctgaggcttaccttggctttcacgtgaagaatgctngtgtcactgtccctgcttacttcaatgattctcagcgtcaagctaccaaggatgctggagtcattgctggtcttaatgtgatgcgaaatatcaatgagcc

SEQ ID NO: 213898 - DNA, 584 bp, Glycine max
acactttccaatacaataatcactaactgaatattcgatcggagatgtctgccgccgccgaagaagctaacgctcccgccgtcgaaaagccggttgaggaggtgaaggcgccgaaccccgcgaaggagaagaaatcctaatgctccgaaggaaaagaagccaaaacaggccaaaacagcttcacatcctccatattttcagatgattaaggaggctttgatcgctttgaacgagaaaggaggatcgagtccttatgcgatagcgaagtacatggaggagaagcacaaggcggtgctccctgcgaatttcaagaagattctaggtctgcaactaaagaaccaagctgcgagagggaaactcgtgaagatcaaggcttcgtacaagttaaccgaagccgcgaagaaggagaacaccgccaaagtgacgaaggccaacgctgagaaaaaggaatcgcgtccaaaacgaagcataaccgcaaccgccgctgctccgaagaaaaccgaggcggttaaaagggcagcgaagaaggtatggccgaagaagacgaaaaagtgtcgacgcctgcgaagcccaagcagcccaag

SEQ ID NO: 213899 - DNA, 425 bp, Glycine max
atgcaccaacaatgtcatggcctgtgcctggcacactcatgattgagcctactgagagtgaaagcaaggccgagttagacaggttctgtgatgctcttatttccattagacaagaaattgctgagaatgaaaaaggaaaggttgacattaacaacaatgtacttaagggcgcccctcatccaccatcactgctcatggctgatgcatggacaaaaccatactccagggaatatgcagccttcccagctccttggctccgtactgcaaagttctggcctaccacaggacgtgttgataatgtgtacggtgaccgcaacctcatttgcacccttcttccagcatcacaggctgttgaaaaacaagcagctgccacagcataatgtgttcaaatgacaactattttcatttcccggtggacataaact

SEQ ID NO: 213900 - DNA, 509 bp, Glycine max
cttgatcaaaaatcaaattctgagagagattatttttttatgaaatctctttaaataattttttctttcttgttttccctccactccttttcatattaaaagctatgcaatttactctttttcatcggcaattttcaatattccttcttacaaatgtataaactacattaaccaatttgtgaatgaatgttatatcataaaaaatgctttatagataatataactcaatataggtgaagaagagtgtgttggtgaacatatatatctttgaataatattattcttactcatttttcccacatccctattttacaatttttttttcttttttactttcatcacattggttatcttattctacactcctctatctgtctctctcacacacacacattcagttgtaaaatgtgtattataaagttgtcctatgaacaacatttttctagcaagtaggtatagacgtatagttaatgtataaaactatgggatgagaggtctttgcttctgac

SEQ ID NO: 213901 - DNA, 493 bp, Glycine max
cggctcgagcggctcgagaaaaactttgaccggcaagaccatcacccttgaggtggaatcctccgacaccattgacaacgtaaaagctaagattcaagacaaggaagggatcccacctgaccagcagagacttatctttgcgggtaaacaacttgaggatggtcgcacccttgccgattacaacatccaaaaggaatcaacccttcatctcgtgcttcgcctcaggggtggcatgcaaatctttgtcaagactttgaccgggaagaccatcacccttgaggtggaatcctcggacaccattgataatgttaaggccaagatccaggacaaagagggcatccccccagatcagcagaggctgatttttgccggtaaacaacttgaggatggaagaacccttgctgattacaacattcagaaggaatccacccttcacttggtgcttcgtttgagaagtggtatgcaaattttcgttaaaactttgaccggaaag

SEQ ID NO: 213902 - DNA, 627 bp, Glycine max
  unsure (1)..(627): unsure at all n locations
cgcgcgctgaagtttgctaggttcatgagcaggttcgggaagagttaccgaagcgaggaagagatgagggagaggtacgagatattctcgcaaaacctcaggttcatccgctcccacaacaagaaccgcttgccctacactctctctgttaatcattttgctgattggacttgggaggagttcaaaagacacagactaggcgctgcccaaaattgctctgccactcttaacggcaaccacaagctcactgatgctgttcttcctcccacgaaagactggaggaaagaaggaatagtgagtgatgttaaagatcaaggcagctgcggatcatgctggacattcagcacaactggggctttagaagcagcctatgcacaagcatttgggaagagtatctctctttctgagcagcagctagtggattgtgctggccgtttcaacaactttggctgtaatggtgggttgccatcacaagcctttgagtacatcaaatacaatggaggacttgagacagaggaagcatacccctacactggaaaagatggtgtatgcanattctcagctgaaaatgttgcccgtcaagtcattgactcggtcaatatcaccttgggtgctgagaatgaatta

SEQ ID NO: 213903 - DNA, 547 bp, Glycine max
gtggaaatgatcctgagaccacaaatttctgcatgttcatcaatgaagtctacacggtgctcagcgatcccgtccaacgcatgatttatgatgaaattcatggctactctttaacttcaatcaatcctttcttggatgattcaagcccaagggatcatgcctttgttgatgaattcagctgcataggctgcaaaaattgtgccaatgtagcccctggtgtgtttgcaattgaggaagactttggaagagccagagcatacaaccaatgtggggaccctgaattagttcaacaggcgattgacagttgccctgttagctgcattcattggacatcttctgcacagctatcattactggaagatgagatgcgccgtgtagaaagagtcaatgttgccctaatggtatcaggaatgggaacagcatcaattgatgttttcagaatggcaagttccagatgggaaaagaggcagtcaaaagtcttggcaaaagcaaaattgagaatgatgagggaagaaggttctgataagaaaaattcgtactgggacaa

SEQ ID NO: 213904 - DNA, 568 bp, Glycine max
agatggggttagaagggaaggaaacgccgtcgtttatgagggattttctcgataagtgtggtggctgcgccgttattgacggtggttttgccactgaacttgaaaggcatggggcggacctcaatgacgaactctggagtgccaaatgccttattagctccccacatcttgtccgaagggttcacctagattacctcgatgcaggagcaaacataatattaacagcatcttatcaggccactattcaaggttttgaggccaaagggttctctagagaagaaggtgaaactatgcttagaagaagtgtggagattgcacgtgaggcacgagaaatttattatgataggtgcaccaaagattcttctgactttatgagagatgaaagatataggaaacgtcccattttaattgcagcttctgtgggaagctatggagcgtatttggctgatggctctgaatatgttggggactatggtgatgcagttactgtccagacactgaaagattttcacagggaaagagtaaagattcttgttgaggctggtgctgacttaatagcctttgaaac

SEQ ID NO: 213905 - DNA, 620 bp, Glycine max
atataatctagagggtgcagagtagattaaaaaagataaagatgatcgatatgaaattgatgatgatgttgctgatgtggggctctgaatcccaaggccgattactgtctatcccaacaaaacctaacccagatgatgctcctgcctctgctcgttggctcgtctccctcaatttctggggagtcttgaatactatctcatctgatttgggtggagctccctttgggaatgtggtatcatatagtgatggactacctaacgaaagcactggaatcccatacttttacttgacaactctagacccgacagcaagaaatgcactgcaagatgataaagcttcattcacggtcagtgaataccctcttgggacctgtggcaggagagacccaatgaaccctacttgttccaaaatttctctaactggaaagctgaaattggttgatgaaaagtccaaggaagccgaatttgctcgaaatgccttgttttccaagcatccagagatgaaagactggcctgaggatcacaactttcaagtcttcaaattagaaaatgaaaatatatttctaattaattggttgggtggccccaaaccactcacagtggaacagtacttacatccc

SEQ ID NO: 213906 - DNA, 587 bp, Glycine max
ctcgagccggctcgagagagaatacctcattgtttattctggacaaatttgatgggaactctgaactggttgcagagttggttaccgttaatgggtttaaagcagcttatgcgattaaggatggtgcagaaagaccgcgaggatggaagagtagtggtcttccttggatagaaccacggaaaacattgagttttgacaatctgacagatgctatatctgaagcaataggagataccactgatggcgtggcagttactcttggggttgctgcagctgctgctggacttagtctattagctttttctgagatagaatcaatcctccaggttgttggatcagctgcgctcattcagtttgcaagcaagaagcttttgtttgctgaggaccgagagcaaactgtgaaacaacttggtgagttcttgaacaccaaggttgcccccaaagaacttgttgatgaaataaaggatattggaaaggctcttctaccatcctctaccgataataaggctcttcctgctccggcagagaaaagttcagagcttgctacagctgatagcactgtacagagagcagtagctactcccgag

SEQ ID NO: 213907 - DNA, 573 bp, Glycine max
attattttcaattcggaattcttattaattactttaaaccgaataaatcttgataattgaaaaattaagtcataatttattggttgattatatcattaactatttctttattttatatttaggttacgaggaaattattcatgaatccaattatttctgctgcttctgttattgctgctgggttggccgtagggcttgcttctattggacctggggttggtcaaggcactgctgcagggcaagctgtagaagggattgcacgacaaccggaggcagagggaaaaatacgaggtactttattgcttagtttggcttttatggaagctttaacaatttatggactggttgtagcattagcacttttatttgctaatccttttgtttaatcctaaaaaaatagaaatacatatcctttgttccgtggacttgctttaccggtcttgctttttcgattctatttatattaatatttcactcctataattcttaatccgttcggacaagaacacaggggaaggactaattgaaaggtgaaagattcacatactgattcgccctctttcttcttttttt

SEQ ID NO: 213908 - DNA, 473 bp, Glycine max
caaaggttgctgtaggagataagattgcagtagtgctaagtgctaacacctgcagtgaacaatggcctctgcatcagcatctctgctcaagtcttcacttgttcttgacaagtctgagtgggtgaagggacaaacccttcgccaaccttctgcatcagttgtgagatgcaaccccaccaccccatcaggcctcaccatcagagctggttcctatgctgatgagctcgttaagaccgcgaaaacagtggcttcaccagggaggggtattttggccatggatgagtccaatgctacctgtgggaagcgtttggcttcaattgggctagagaacactgaagctaaccgccaggcataccgtaccctcctcgtgacagttccaggccttggtcagtacatctctggtgccattctctttgaggaaacactctaccaatccacaactgatggcaggaagattgttgacgtgctgcttg

SEQ ID NO: 213909 - DNA, 569 bp, Glycine max
  unsure (1)..(569): unsure at all n locations
cggctcgagcggctcgagaaaaactttgaccggcaagaccatcacccttgaggtggaatcctccgacaccattgacaacgtaaaagctaagattcaagacaaggaagggatcccacctgaccagcagagacttatctttgcgggtaaacaacttgaggatggtcgcacccttgccgattacaacatccaaaaggaatcaaccctccatctcgtgcttcgcctcaggggtggcatgcaaatctttgtcaagactttgaccgggaagaccatcacccttgaggtggaatcctcggacaccattgataatgttaaggccaagatccaggacaaagagggcatccccccagatcagcagaggctgatttttgccggtaaacaacttgaggatggaagaacccttgctgattacaacattcagaaggaatccacccttcacttggtgcttcgtttgagaggtggtatgcanattttcgttaaaactttgaccggaaagccataaccttggagggggagagttcagataccatagacaatgtgaaagctaagattcaggacagggaggtatccca

SEQ ID NO: 213910 - DNA, 493 bp, Glycine max
cagtacgagactttactgcgaagccacacatgattgtcattcgatccttcgacgtcaacaagcctggtgctgaaatcgatgagctcaagggtggtgttgctggtggcagtatcctgactggtgtactaaagctgggagacgagattgagatcaggcccggtattgtctcaaaggacagcgccggaaagattcagtgcaagcccattttctcaagagtagtgtctctattcgctgagcacaacgatttgaagttcgctgttccaggaggactgattggtgtcggtacacgcgttgaccctaccttgtgtcgtgcggatcgtctcgtcggtttcgttcttggtctccgtggacatcttcctaacatctacactgagctcgaagtcaactacttccttctccgaagattgcttggtgtcaagactgcagactgcaagcatgccaaggtagccaagcttgcaagaatgaagttttgatggtcaacatcggatcaact

SEQ ID NO: 213911 - DNA, 537 bp, Glycine max
cagtacgagactttactgcgaagccacacatgattgtcattcgatccttcgacgtcaacaagcctggtgctgaaatcgatgagctcaagggtggtgttgctggtggcagtatcctgactggtgtactaaagctgggagacgagattgagatcaggcccggtattgtctcaaaggacagcgccggaaagattcagtgcaagcccattttctcaagagtagtgtctctattcgctgagcacaacgatttgaagttcgctgttccaggaggactgattggtgtcggtacacgcgttgaccctaccttgtgtcgtgcggatcgtctcgtcggtttcgttcttggtctccgtggacatcttcctaacatctacactgagctcgaagtcaactacttccttctccgaagattgcttggtgtcaagactgcagacggcaagcatgccaaggtagccaagcttgcaaagaatgaagttttgatggtcaacatcggatcaactgctaccggtgccaaggttgtggctgtcaaggctgacgctgctc

SEQ ID NO: 213912 - DNA, 619 bp, Glycine max
  unsure (1)..(619): unsure at all n locations
atgtggctagtgtagtcaactacttccaatttctccaaagagccagggcactatgtaatcttctgggaaataagtggtgaagcaagtgaagaagtgcttggtggatgctgcaactgtttggacaagtcttttgttgatgctggctacacaagctcacgcaaagtcaactgcataggtgccctcgaactccgagttgttcggagaggaacattccagaagatacttgagcattcccttgcactaggagctgctgtgagccagttcaagacatcaagatgtgtaggccctacaaacaccaaagtgttgcaaatattgaatgaaaatgttgtcaagaactatctcagtactgccttcaattgagttgtaagaatagctatatctatctatctatctatatatagatatatttatatagttccctttctcaattgaataaaaactttgccttgtttttctacttttcatttccatgcttaattctttctgttctgcctgacacagtccaagcacacctctgttggtaccttcattatcatcacctcctcttgcacccttttacaatataataagcgatgggtgaccataatggataggaaatcacatgttcgttnggaactga

SEQ ID NO: 213913 - DNA, 512 bp, Glycine max
tttctctctcaccattctcttcttcttctccctttcttagattctcccttttttctctttaccctccgccatggctgaggataaggagatgtcttcctctgtcaccaatggcgatgattctctcactggccacatcatatctacaactattggaggcaaaaatggggaacccaaacagactattagttacatggctgaacgggttgtaggaactggatcatttggaattgttttccaggcaaaatgtttggaaactggggaagcagtggccattaaaaaggttttacaagacagaagatacaagaatcgtgaactacagttaatgcgtgttttggatcatccaaatgtcatctctctgaagcattgtttcttttcaactacaagtacagatgagctttttcttaatttggtgatggaatatgttccagagtccatgtatagagtcattaagcactataccaatgctaatcaaagaatgccaatcatctatgtaaaactttacatgtaccaga

SEQ ID NO: 213914 - DNA, 527 bp, Glycine max
tttctctctcaccattctcttcttcttctccctttcttagattctcccttttttctctttaccctccgccatggctgaggataaggagatgtcttcctctgtcaccaatggcgatgattctctcactggccacatcatatctacaactattggaggcaaaaatggggaacccaaacagactattagttacatggctgaacgggttgtaggaactggatcatttggaattgttttccaggcaaaatgtttggaaactggggaagcagtggccattaaaaaggttttacaagacagaagatacaagaatcgtgaactacagttaatgcgtgttttggatcatccaaatgtcatctctctgaagcattgtttcttttcaactacaagtacagatgagctttttcttaatttggtgatggaatatgttccagagtccatgtatagagtcattaagcactataccaatgctaatcaaagaatgccaatcatctatgtaaaactttacatgtaccagattttcaggggattgg

SEQ ID NO: 213915 - DNA, 141 bp, Glycine max
acaccacttgctgaacggatgagctttattacagatcacgacgtcttttacactgatgcgaccgttggaggacttatgaatgctacatgtgggaatgtttctgagctcataatagcaaaatttgcccttagcaggaacaaa

SEQ ID NO: 213916 - DNA, 461 bp, Glycine max
  unsure (1)..(461): unsure at all n locations
attgatatgattgagaagatccttaataatgggtatgcctacattgttgatggggatgtgtactttaatgtagaaaaatttccagaatatgggaaactatctagtcgagatctagaagataatcgagctggtgagagggttgcagttgattctagaaagaaaaatcctgctgattttgctctttggaagtctgcaaagccaggggagccatttttggaaagtccctggggtcctggaagacctgggtggcatattgaatgcagtgccatgagtgcagcttatcttggttactcttttgatattcatggtggaagaatcgaccttgtgttttctcaccatgagaatggaattgctcanagntgtgctgcatgtaagaaaagtgatataagtatatggatgcacaatggttttgtcaccattgactttgggaaaatgtcaaaatttttggggaattttttcac

SEQ ID NO: 213917 - DNA, 578 bp, Glycine max
  unsure (1)..(578): unsure at all n locations
gcaagttcatggctaaacaacgttgcagtcaggaaagccatccatgctgaatcggaaaaagtggcgggtccgtgggaattatgttcgagtaggatagagtaccatcacaatgctggaagcatgattccttaccacaagaacctaaccaggcttggctatagggcacttattttcagtggcgaccatgatatgtgtgtaccgtttactggaagtgaggcttggacacgatctttgggttacaagattgtggatgaatggaggccatggaactcaaataaccaagttgctgggtacttgcaagcgtacgagaacaacctcaccttcctcacaatcaagggagctgggcacaccgtgccggaatataagccgcgggaggcgttggatttttacagccgttggttggaaagggaagctaatataaggaaatgcatcatgtggcgtaaaataaaacatacatgatcgattattaatgaatagaaagtacagcagtgtattttagctttttcgttagtgatttatcctttacattaaatcatatatgcattgggatttcgcanaagggaaaccaaaaagaaatc

SEQ ID NO: 213918 - DNA, 575 bp, Glycine max
agagggtgcaactttggaccctgttacaccaagccaatagccaagttattgcttgctatcagaactcagaagaggttgaatcatggagatgaaagtaaaggagaggattggtacagtattctgtaaactgtagttgattgaataatatgatagtacctatttataaaacaagagtgatagtcttctaattgctcacctaactaacatctaagttctaactaactcttctaaaagaatgacagctgcatgagttgagtatgttctctgatactatatataactataaattgcctaattacatgtataatttccacttatttatcaatgaaacggcatgcagaaaaaataaaagaccacagtaatgcagatgtaacggtagacgaatatcatcggtataaggaggatattggaatcatgaagtacatgaatttggatgcttatagattctccattgcttggtctagggtactaccaaaaggaaagcttagtgcaggtgtaaacaaagaaggaataaactactacaacaacctcatcaatgagctactggctaatggtctgcaaccatatgtgaccct

SEQ ID NO: 213919 - DNA, 587 bp, Glycine max
  unsure (1)..(587): unsure at all n locations
actccttcaattcccacctcaaccaattccatccaatgctttatttcacttttagaaacaaagtttcagtttaccctgaatcagttggattttccaaactttcaccaactgggtacacttgaaaacagttcaggggctcctgattcagcataaagttttaatttttcgttcatttattatatgtgtcttcaattcaacttggatttgtatacaagttccctctttgttcatttatttgggtacagtaagaaatagtctcttttaagctttcagtatatataaattttaagaatgatacatacagttgattctgttgattattacttgatcaatccctagtggcataagttctagtttttttttttatccgtgggaatcgaagacattgtcagaggatatgggttctagtttttggtttgttttaaatgttatttatttacatgaaattatgaactgttattttgctatgtaagatttgtgaatatgcttaaaacataggcattgatgtcatttatatgaactattattttttttgtaagatttgtgaatatggttaaaacatangtattgatgtcctttatatgaac

SEQ ID NO: 213920 - DNA, 624 bp, Glycine max
  unsure (1)..(624): unsure at all n locations
caatcccatggcccaaacaatggctggggcaaatgcgtccaattcgtcatctcttgaatgccctaatggtgattctgaatccaatgaagagggccagtctttgtccaatagcgggatgaatgaggaagatgatgatgccactaaggattcgaagcctgctgctcctaatgaaacaggaaattatgagcaagaacagcaagggatgcagcatactgcatcatctccaccatccatgcgtgaagaatgccttactcagacaccacagctggaacttgttggtcattcaattgcatgttctacaaatccttaccaggatccgtattatgggggcatgatggcagcttatggtcaccaacagttgggatatgctccttttataggaatgcctcatgccagaatgcctttgccccttgagatggctcaagaacctgtgtatgtgaatgccaaacagtaccaaggaattctgaggcgaagacaggctcgtgctaaagctgagcttgaaagggagctcataaaatctagaaagggcataacatgctcacaaacattggacagaatttggttctactattactagtgtncttcttaacgttttgggatcctctattgggctatatgctgaca

SEQ ID NO: 213921 - DNA, 576 bp, Glycine max
  unsure (1)..(576): unsure at all n locations
tgtcactctcattctcgatggcggcgaagatttcattggcaattggtttgagaactctcttcactgttttgggacttcttatgcttgctatcgttctttacactgtcttcaccgatggtcttccgtttcgcaaagaacttctcacaccgtggatggcagcaactttgattgatttttatatcaacgttgtagctttggcggtctggattgcttacaaggaatcaaacttaatcagctcaattctgtggattgttttgcttgtctgccttggaagcatcactacatctgcctatattgttgtgcaatttctgaagctgtcatctcaagaatcttcacaggatcctatgtattatgttctattgcggaatccaaataagaacggcacagcacctcaaagaaagcattcatctatcgtgactctaagaataattttcagcattntgggtgttgtcatgcttggaactttggtgtacactcttatcaccgatggttctcctttccgtatagagcttataactncgtggttggcagcaacattagttgacttctacttcaacgttgtggctctagcagtct

SEQ ID NO: 213922 - DNA, 562 bp, Glycine max
actcaatattctcaacaacacactactttccttcttccaataatgtcttcttcattctctgttcgttttcttgctcctccatcatcatgcttccccagctctcggcccaagacatggctctgcgccgccaccaccccaacggtggctccggcaactgcctcctcggaggtggaggcttcaaggttggagcctagagtggaggagagagatgggttctgggttttgaaggaagagtacaggggaggcatcagccctcaggaaaaagtgaagcttgagaaagaccccatgaagctctttatggaaggtgggattgaggacttggctaagatgtcccttgaggaaattgagagctccaagcacaccaaggatgatattgatgttagactcaagtggcttggcctttttcataggagaaagcagcattatggtagatttatgatgaggctgaagcttccagatggggtgacaacaagtgcccaaacacgatatttggctagtgtgatcaggaagtacggaaaagatgggtgtgctgatgtaacaacgaggcagaattggcaaattc

SEQ ID NO: 213923 - DNA, 504 bp, Glycine max
gagaaatatatagcatacatctttgaagaaataaagtgtaacttagggactagcaaagaatgtacatgtcttatccaaaagtgtacatgcatatgatataatgcatgtctcatgatcatccctttctcttttatgtagaggacactgatacttttgttcagggacaatggtagatttagtaaagaaactaaaattgccaatggccataaagtttaatcttccccttcctctctattcctttggacagcaccaaaatgctttactagtatgtctaccacaataggcaccaagttcttgcaaggcacacccttcttatacacctcagctagatgtgaatcactttcaattctcccttccaggaaaatattcacaccttagtggtcttaccatttttatccctagccatgcaccccatgaaaccaatggtcagaactggcacctggtcacaatgtgttggggcaaccagtccaatgctttttcacagcctagacacaacacttgcct

SEQ ID NO: 213924 - DNA, 417 bp, Glycine max
gtggcttatcacatgacaatctgagcattggctctcgttcttagaattctttgattgcggaggatgttacacacacagggctatagcaattggcatctcacgcacatgagccatgggtataggagactggcagaccgaggttgttgaccgaggaaaagtggcatctctcgacacgctacagcatgtactccacgtatgggctcgagacgtgtagcctagctcttgcctacatgctttcatgtggcacactcagacgcctgctgttaaaattgcaagatgtgattgtaggggccagagctttacatactcatacgtgccatggcagctgccatcatagccgagtgctgttgctttagcagacctaggcttcttatatagagctgacgaggacttacaccacttgctgaacgagtgagc

SEQ ID NO: 213925 - DNA, 216 bp, Glycine max
gccgccctttttttttttttttaaacaagcattaatagaatttttatttctcacacaataaatacaagagattctgcaaactgaaaaagggatttcttactaaagcaaactcaaacaagaacaacttccactcatttgtcatctaccgtagtagaacaggatcaaaagtagctttttgatataacacacttttgtattattttgaacattttgcac

SEQ ID NO: 213926 - DNA, 513 bp, Glycine max
aaggcttatcacatcacaatttgtgcattgcctcgtgtcctttttcttctttgcttgccaaaaatcttacacacacaggtatctagcaaatgggttctcaccagcaagaaccatggctattggagaatgggaaaccgagggtgttgaccaaagagaataggcatggccgttctgcacacagcatgtcctccacgtctttgcgcaagaagtctagccgaactcttgtctccaagcttccatgtgccacactcagaagcatccttttaaatttgcaagaggttattcttggtaccaagctttccattctcatccctgccattccagctgccatcattgccgagtgctatggctttggaagaccttggatttttatattgagcttacttggacttacaccacttgctgaacgtgtgagcttcatcacagaacaagttgccttttacactggtcccacagtcggaggacttctgaatgctacatgtgggaatgttactgagctcataataacatatt

SEQ ID NO: 213927 - DNA, 548 bp, Glycine max
  unsure (1)..(548): unsure at all n locations
ttccattcaacccatggttgggaactagtgattggtttcgtctataaagattttggatttgctcaaaatgatcaaattatatctggtcttgtttccacttttccagtcattttagatacaattttaaaatattggatttttcgttatttaaatcgcgtatctccatcacttgtagtgatttatcattcaatgaatgattgactgacaaaatgattcacttatcaaattttaatttaaagttttttagcttaaaagaaaataactttgctttttcccttctttttaacccccttaaatgaaaaaaggggttccccgacttggatagggaactatgcgagtgacctacctaatcttattgtagaaattttcaggatcaatgattagaccatgcaaactagaaatgctttttcttgtataaagggaagggatactcgatccatttccatatcgatcatgatatatataataattcgagcacccatttcagacgcatatncaattttgcacagcagggttatgaaaatccccgagaagcaaccggtcgtatt

SEQ ID NO: 213928 - DNA, 321 bp, Glycine max
ttccattcaacccatggttgggaactagtgattggtttcgtctataaagattttggatttgctcaaaatgatcaaattatatctggtcttgtttccacttttccagtcattttagatacaattttaaaatattggatttttcgttatttaaatcgcgtatctccatcacttgtagtgatttatcattcaatgaatgattgactgacaaaatgattcacttatcaaattttaatttaaagttttttagctaaaaagaaaattactttggtttttcccttctttttaacccccttaaatgaaaaaagggggtcccccactttg

SEQ ID NO: 213929 - DNA, 525 bp, Glycine max
cagcgagtgagcgagcgagcgaggtagggttttcgttgttcccccgtctttgaattcagttcgcgacgatggggtccatccccgatccaggcgagttgagcgagttgactcagccgagcttcgacgagttccagcgccaaacttccctcatgaccagctgcaccctcctctggaaggagctctccgaccacttctcctccctcgagcaagacctcaaccacaaatccgaagccctcaaacgcaagattcgcaccctcgacaacactacttccgactccctccgcctcctcgatcgccgcgaaacctccctcgacgccacgctccagatcgccctccgcacgctcgacacgcgccgcaccgctgccctctccgccctcctcaccgacgccgacgacatcatcaacagctcccccgacggtgaggtcgacgacaccaccggcctcatcctcaaactcaagtccttctgcctccgcatggacgcattcgggttcttcgccttcgtcagcgccaagaagaggagctcga

SEQ ID NO: 213930 - DNA, 544 bp, Glycine max
gcgactggaattgatcgaggattgctgaagcatgataagacgggcaagattgtgctggttcctcagccatcggattcaccgaacgatccgtacaattggccaagatggaagaaggagatgttcacggttgtgatcgcctatggatgcggttgcgttggagccattggtcctcttccgggttcagcattcgtgcctctcgctgagcaattcggcgttccgctgcagcgattcgtactgggttgcaacggctcatgtatcgctgctatcgccgtgggctcactcacctggaattctcttgctgtaaaattcggcaagcggccggtatatatcgtgaccacgcttggtttggccgtgtcatgcttctgggccgccgaagccaaaagctttggatctttggcagcagcgagaacgatccaaggactctgcatggctccatttgaagcgcttatccctgcttctgttgcggatatttggcacgtccatgaacgtgggtttaggatggccatgttcaatcttggtgtgcttggtggaattaatctggctg

SEQ ID NO: 213931 - DNA, 462 bp, Glycine max
gaagcaacatgcaaagagcacccagatactgtcggtggtgcaatgatgagtggactacgagaggctgatcgcatgattgacatattgagcagagggaatgattatattgcagacgtggaggcattggcagctgctcggtgacagttagacactgaacgggatgaagttagggatataataaagagacttgatgcattagagctctctaacataatgtacaagaactctttagaaggtgctcacattttaacccgggaagctttgctgagggaaatgatctttaatacgaaaaccactgctgggcgcttacatgtggacaaacaaatgctaactcttgctgaaggatactttgaagtcttttgctggaaagaaagaggggctagccattctcaattcatggatgctggactcaatggggaaggatggtacccaactcttgaggcactgtttgcgtcttgttgt

SEQ ID NO: 213932 - DNA, 577 bp, Glycine max
agagggtgcaactttggaccctgttacaccaagccaatagccaagttattgcttgctatcagaactcagaagaggttgaatcatggagatgaaagtaaaggagaggattggtacagtattctgtaaactgtagttgattgaataatatgatagtacctatttataaaacaagagtgatagtcttctaattgctcacctaactaacatctaagttctaactaactcttctaaaagaatgacagctgcatgagttgagtatgttctctgatactatatataactataaattgcctaattacatgtataatttccacttatttatcaatgaaacggcatgcagaaaaaataaaagaccacagtaatgcagatgtaacggtagacgaatatcatcggtataaggaggatattggaatcatgaagtacatgaatttggatgcttatagattctccattgcttggtctagggtactaccaaaaggaaagcttagtgcaggtgtaaacaaagaatgataaactactacaacaacctcatcaatgagctactggctaatggtctgcaaccatatgtgaccctttt

SEQ ID NO: 213933 - DNA, 570 bp, Glycine max
caatcccatggcccaaacaatggctggggcaaatgcgtccaattcgtcatctcttgaatgccctaatggtgattctgaatccaatgaagagggccagtctttgtccaatagcgggatgaatgaggaagatgatgatgccactaaggattcgaagcctgctgctcctaatgaaacaggaaattatgagcaagaacagcaagggatgcagcatactgcatcatctccaccatccatgcgtgaagaatgccttactcagacaccacagctggaacttgttggtcattcaattgcatgttctacaaatccttaccaggatccgtattatgggggcatgatggcagcttatggtcaccaacagttgggatatgctccttttataggaatgcctcatgccagaatgcctttgccccttgagatggctcaagaacctgtgtatgtgaatgccaaacagtaccaaagaattctgaggcgaagacaggctcgtgcttaagctgagcttgaagggagctcataaatctagaagggcatacatgctcacaaacatggacagaattggtttactatactagt

SEQ ID NO: 213934 - DNA, 624 bp, Glycine max
  unsure (1)..(624): unsure at all n locations
tgaagcatggcttcatgtagcgcacctccctccctgatgctggtccaccctcaagacctctctcgctctcagagaaccacattctctctctatcctctcctttttaagccctccaaatgcctccacatagagcccaaaatccaggacttgccatgccctcgtcgccgctttggctgcagaggtccaagtgcctctaactgtccacgacacggaggaggacgacggttctgatggctccaccgccacctccgccgccaccaccaccaccaccaccaccaagcctaagaaaggcaaggccgcgttgcctcttaagagggacaggacgagatctaagaggttcttggaaattcaacaattgagggagcgtaagaaagagtatgacttgaagacagcaatatctttggttaaagaaacagctaaaaccaagtttgtagaaacagtagaagcccatttccgcctcaacattgaccctaaatataacgatcaacaattaagagcaacagtaaatcttcctaagggaaccgggaaacccgttaagtggctgttcttactcaggcgaanaattcgatgaagcaaaaatggccgagctgatttggtgggtgggaggatctgatagacagataa

SEQ ID NO: 213935 - DNA, 367 bp, Glycine max
gtgttgagtgatatctattttttgcttaaaaattgaagcttgaagtgtcaatccaaatgttttttttcgtacacaagaccacactaccgacaggggtgcccgcttaacgagtactcagggagacccaacacaaacaaaaaatgcgccttagtcaaaagccataagaacagcttctggcctaacggattcaaactggggggaagataagtaacgccccccacagctggggaaaatcacaccattgggcggcccagaaagtgctggggggggcccacctttatcgctactgttgaagcaccccctgacgaaattcccaggaaaaaaccttctttcacggcgagcagaagagcagtttctatagccaccc

SEQ ID NO: 213936 - DNA, 418 bp, Glycine max
cgaagaattggcaaatcttaaatgcaagttgatgcctttgaagtcctctgattcatccctagcatgattacaattacggtcacggggtcatggtacttccttttccttccagctggaatattcatcaactgttccatgctcagaccggcaaaaaaagctgctttggctccaagctgttttatgagaaactttggtggatcaccaaaaggatggttcaagatttaagactccacaagctttactgcctcatgattgctggagaaggcaaataaaccatcactcgcctactataacaaattgatcggaatttgagattctgtggacattcaatgacgggttaatggatatgtatggtgggcttttaagaacgcgaactccaaggattcccatcaaaggctgattcagacttttgtttttc

SEQ ID NO: 213937 - DNA, 495 bp, Glycine max
aaacttagcaccactaaaattatccgatgttgcaaagcacttgaaacataaatgtcaataacaagaaatactagccaaaaaatactcatccaacaaaactgtagaacgatgaaaaattctgtccaacctatcatgacaatatattaagtgcaatcagaaattcactgaattttaagaaccactactcaaaagacacggtacgatttccccatggtactcttcagatataggcagcgaacgttctgccaattctttttcagcaaagagacaaggaagttaacactcagttgtacattttggaagatttgcttttcctccatgctaacattccccacagctactcccatgcagagaaccttcttaagctggaacttgaccatggccttggtctcattaacctttgactcgagagattcttggtgagtcacaagtgtagggaacttccctgccttgttgagaccaggtcccaagagacgaggaatctgcttgatgact

SEQ ID NO: 213938 - DNA, 404 bp, Glycine max
ttgttttttttttttttttttttttttttttttttttttttttttggggccatgacgcaacacatgccccacctaagaatcataattttacatcttgtacatacaaaatgcaaagacttttaattaaaatttaaaaaaaaaggataaaccgatcatcttggtgaaatgaaaccgaaacccagaaacattgtgttgaatttttgtggcgcccccaacttgattaatcatgaacggtttgattgaatcacttggactttaagggaatggccctgattacaaactgggggaaaagtgctgaaagtgcaccacccatgaagggggccacccagaaaaaccaggggtcttcccaaccaagggccttgttgaatattattgcaggaccaaaactacgagctggggtgata

SEQ ID NO: 213939 - DNA, 409 bp, Glycine max
agtacaaaaggctgatattttagtatctttctgagattattaagcagttccactgatgtcaaatccgttatcatcagcaattacggatgacaccaaaaatttagagtgctattcttaagaagaagaaaaaaatctatgaacaaagagaagcattacacatggtccttatatataagagacaaaaactagtttttccttatcacatttattttctgatgaactctacacccttctggatgcttcctgctaactctctctttgccttttccaatccaatcctttcatactcattcaggggacccagttgataaacctcttctgctccagcacgacctagacgtaccttggttgcaaagaagggaagttccgtaacctgagaatcaacaaaagcacactccactaccccagc

SEQ ID NO: 213940 - DNA, 446 bp, Glycine max
agtacaaaaggctgatattttagtatctttctgagattattaagcagttccactgatgtcaaatccgttatcatcagcaattacggatgacaccaaaaatttagagtactattcttaagaagaagaaaaaaatctatgaacaaagagaagcattacacatggtccttatatataagagacaaaaactagtttttccttatgacatttattttctgatgaactctacacccttctggatgcttcctgctgactatctctttgcctttgccaatccaatcctttaatactcattcaggggacccaggtgataaacctcttctgctccagcacgagctatacgtaccttggttgcaaagaatggaagttccgtaacctgagaataacaaaagcacacttcactaccccagcttcttcttttaagccacggaggcatgcaccagcaaact

SEQ ID NO: 213941 - DNA, 307 bp, Glycine max
ccgaaattggggcccataaacttgttatgaaaaacccttggaaaggcatacttggggaccaattctgataaaagcaaaaattgcgccaaatgattgacttttggactcccccttatttaaaagaccttcgggtatttatagagaataccgggcttttgggggagcaaagagacgacccttttccgcacaatttactaaaagggggggcttattttggtgtgttttatcaaagcggcccattaaagcctttgttaaacattggtctttaaagaaacattttctcaaaaccactgtttctacgggtggg

SEQ ID NO: 213942 - DNA, 521 bp, Glycine max
cgggttatgtctcttctcttgcccatctatggcatgtccctagcagtgactgacttgctgcatatcatctcatattcaatcttcctcctattgcttggaaatgtaaatatcctctaagtcttctttctcttttacaagcgacagccgtgctccgtttcatccttgctaacacatatgcacccttcaaccccccaaacccccgccatctcaaagcttcatcgtcttcgcagcatgccaccccgccgcccaatgccacaaccttgcatacaccggcttcccctccctatcatacttgaccagtctctcatacaactcattcagcgggaccaccaccctctcaataaactctccatcatccagcgcctgctccggctcttcatctccctcctttaaattcacttccaccgtcgcgagctgcatgttcgccgcgcttagtcccggatcactcactatcgacggtgaaatacatgccaatttccctttatatcccgtctcctcgtgaagttcccgcacgctcgcgt

SEQ ID NO: 213943 - DNA, 298 bp, Glycine max
ttcgtctttttttttttttttttttttttttttttttttttttttttttttttaaaggaaaaggccccaaattcaatttaagggggcactggaactcaaaatttttgaggaagacggcccaatatgaaaaatattgtaagatcctctcaaacttagcatcttctttttgcacctaaaacattgaaaatgctaaaaatgttaccccccagtaccatcaccacttttagcccttggattaggacaacaaccttgacgaacagaaaaatttacttgcccggtttgtttttccttcaaacca

SEQ ID NO: 213944 - DNA, 516 bp, Glycine max
cagtcacgccaaaatttattattggctgcagataatgttaaactttgaaaatctctcctcagacaccgtctgaacgaacaatttccttctttttcacatgatacgttaacacaaggcaaagagtaaaaatggtttgctgctggtaatggtaatcatcaaatcagaaaaaggcgctctcctctattcatatactttgcattcctcatcagcagggtttgtctcgcagaattcctccaatgggtctccactccctgctttagctgcccctggccacttgcttgctactaggtgtgccaaatccaccaccctttggctgtaaccccattcattgtcataccaagcaaccaccttaaccatgtgatctcccatgaccatagtcaaggaggagtcaatagtagaggaaacatcagagcagcggaagtcgatagacacaagtggaacatcacacacgtccaacacacctttcagtggaccctcagctgcctttctgaatgctgcattcacatcttcagcagt

SEQ ID NO: 213945 - DNA, 407 bp, Glycine max
agtacaaaaggctgatattttagtatctttctgagattattaagcagttccactgatgtcaaatccgttatcatcagcatttacggatgacaccaaaaatttagagtactattcttaagaagaagaaaaaaatctgtgaacaaagagaagcattacacatggtccttatatataagagacaaaaactagtttttccttatcacatttattttctgatgaactctacacccttctggatgcttcctgataactctctgttcgccttttccaatccaatgctttcatactcattcaggggagccagctgataaacctgttctgctccagcacagacctatacgtaccttggatgaaacgaaggaagttccgtaacctgcgaatgcacaagagcacactgcactacccca

SEQ ID NO: 213946 - DNA, 452 bp, Glycine max
agtccctaaataaatcagtaaattatcattgcatccagtttgacacaatttacactatattcaaaagttggggtttgtctataagggaaattaatctcaaactaccatgtcagcttctttcaaagttgatgggatccccacatacagccgcatggccgatttatactgttctggtaaggcagcaccagcctgaatgcacatttccacttctacatgcgcctggccataagaattcctaagctctcgttctagcagcgcatttacatcaggaacatgccatacaaatcttggagggatcaaatcatccagaactgcagactgccaaccatgctgcccattgcgttgttggtgtttatgggcttcacagtttttagctttgagaccctgggcaccaacatgaatttcaaggcaatatccacacaccctcacattgtacatcctcattagtctct

SEQ ID NO: 213947 - DNA, 465 bp, Glycine max
atcatcaaatagaggtttcaatttcaacaattcatcacaagtttcataacatccaaattagagaccattcatcttaacacaattccaacagaacattagacgatcaaaattcaattgaatcgccagatgtgataacaaacaaatagcacagttataaaagaaaaaaacttgggggaatcaggaaaactgtctatatagcttccagagcttgcaggacatcagccttcaaatcctcaaaatcttcaactccaaagctgaagcgaaccaggttgtcataaatcttgtacttggccctttctgactgaggaagatcccagtaagacaaaatagcagggtgatccacaatgctctcacagccaccaaacgaggccgcaatatatgggattttcaatgaatcaataaattttattgtggtatgtagatctccatcaatctcaaaactgacaacaccaccgaaaccagtca

SEQ ID NO: 213948 - DNA, 439 bp, Glycine max
gaagcgggagcatcaatacaatacaatatgtaactatgaactatcaatatatgatcgttattatgtctgggatacacacaattaaggccataatatacttatgtgatttacaacaacttctagcttattttatacatcatgccaacccaactaggagcaattttcatcatacaattacacttatctttaatcatcattcatcaatactggcatgagcaatacgctctaaactctgaagcatgacaaggtggtagtcaccagggaccatattgttatgcaatttatgccacaattggataagatgcacaagttgcaacaccacacatgttcttccccaattccatcttgaagtagccattttcaccccagctttctccccatgaattttttatgagccaatatgggacaccattttcaactccatatccaacagcaagaa

SEQ ID NO: 213949 - DNA, 495 bp, Glycine max
gtaaaaagcaagtaacattaagttggattcggatacacaagataattcacattatctgaagtacttcaccaaacacaaatctaaaaactctcaaaagtcatttcgctctttgacgctcactttccggggacgaagttggtggcataggcccacgcgttgttgttgacagggtcagcaaggtgatcggcgaggttctccaatggaccctttccggggacaatggcctgaacaaagaacccaaacatagagaacatggccaatcggccgttcttgagttccttcaccttaagctcagcaaaagcctctgggtcatcaggaaggcccaatgggtcgaacctgccacctgggtagattgggtcagtgacctcaccgagggggccaccagcaatacggtaaccttcaacggcacccattatgataacttgtgtggcccagatggcgaggatgctctgggcgtggatcacgcttgggttgcccaagtattcgagcccaccc

SEQ ID NO: 213950 - DNA, 487 bp, Glycine max
gcataaaaattaaactattttgatttgattccatttggatgagtgaaaacaacttttgcataaaaattgaagcttgaagtgtcaatccaaatgttattcaacttattttagaccacactaccgacagtagtgcttgcttaacgagtactcagtgcgtactaacctaagctatttatgcaccttagtcaaatgtcatttgttcagcttctttcctaatggattcaaacagtggtgaagataagtaacgttctccaaaactggggaaaatcacaacaatgagctttcctgcattttctggtctcttccccacctttattgctgctgctgcagcagctcctgatgaaattcccatcagcaaaccttctttcaaggcaagcagtttagcagtttctatagcctcttcacttgaaacctgaataacttcatctaggagatttacatccagaactttgggaatgataccagcaccaattccctggatcagatg

SEQ ID NO: 213951 - DNA, 434 bp, Glycine max
  unsure (1)..(434): unsure at all n locations
cattcgaattcattttatttatatattaatattatattcaaatgaaataaaaagatattaaaagatactaattataagaatttgaaagtgaaattataaagttattaaatgattaatcaatttttttctacctgttcctgtagtaaaaagagttccatctgttcttgaatagcttccttcaaaaggacttctgcttccccagtgaatgtcttggtagaagatatgatttctttgaattgaggtttattcgtgtttaagtaagcacgtaactcaacaagaaatttccttacctgtccaatttctaatgaatcaagataaccattcgttccagtataaatagttattatctgttcttccacggtaagaggagctgattgggattgtttaagcaactcgcgcaatcgttgacctcttgctaattgattntgagtagc

SEQ ID NO: 213952 - DNA, 354 bp, Glycine max
actcatgtatcttcaaaatcattgtataaaattcagaccctttacttatttataaacataagcctgatattgaccaccaaagttaactcgtttgatgtgtgcatcttgacaaaagagagcttccttctttgataagaacagacacactgccaccatcggcccttgagatacgcaattcttggtcgaggtatgcggtgagttaccaggactgaacattgctgctggaaattgggatcttcaagggaggcctacttgaaattggagacactaccgatgtggctgtgtcttggacagaggtatgggtgccctagcaaagtgctaggctaatattgtgacccaaaaagaccacatttt

SEQ ID NO: 213953 - DNA, 486 bp, Glycine max
gaaactaaaatcaatcatccaattgccataataaaaattcccaagtaactcaattaacttgaaacatagtatacgaaacaaaaggtgctgttcaagcttcaaaagcagctcataacaaatataaaggaaaatgatcgacaaaactgacataatctaggaatgtaggtcatcagataactagcttcaagggcaatttaagatgaagcaccacttcgaagagcacccttcttcttgcttgttgccaattgggtctcagcctctttcttcacaggctcttccttctcagacaatatcagctcaatgtggcatggagatgacatgtaagggttgattcttccatgagctctgtaggtacgacgcctttgcttctgtgcttgattaacctggacatgggaaatgtacagagcatcgacatccaaaccttttacctcagcattacttctagcgttcttcagcaaatctaggatgaacttagctgatttgacg

SEQ ID NO: 213954 - DNA, 511 bp, Glycine max
gtgaaagagaatccgaggcgaagagaagagaaaaattaagatggaggggaaggagcaggatgtgtcgctgggagcgaacaagttcccggagagacagccgattgggacggcggcgcagagccaagacgacggctaggactaccaggagccggcgccggcgccactggttgacccgacggagtttacgtcatggtccttttacagagcagggatagcagagtttgtggccacttttctgtttctatacatcactgtcttaaccgtcatgggagtcgccggggctaagtctaagtgcagtaccgttgggattcaaggaatcgcttgggccttcggtggcatgatcttcgccctcggttactgcaccgctggcatctcatggggacacataaacccggcggtgacatttgggctgtttttggcgaggaagttgtcgttgcccagggcgattttctacattgtaatgcaatgcttgggtgctatttgtggcgctggcgtggtgaagggtttcgag

SEQ ID NO: 213955 - DNA, 559 bp, Glycine max
  unsure (1)..(559): unsure at all n locations
gtagagttaacaagaccagagagagagacgaagccgaacgaaacataaataaaaccttgctcttttttcacgccctagctcattttcttctccgttctcttctctctgttcctcactcactcgcatttattcaccatgactaagcaacaagctaattggtctccatacgataacaacggaggatcatgtgttgcaattgctggagcagattactgcgtcatcgccgcggatacgaggatgtccaccggttacaatatcctcactcgcgattactccaaaatctcccaactggcggagaagtgtgttatggcttcttctggttttcaagctgatgtcaaagctttgcagaaggttttgtctgctaggcatttgatttatcagcatcaacacaacaaacaaatgagctgccctgcgatggctcagttgctctcaaacactctntattacaaacgcttctttccttattatgctntcaatgttttgggtggccttgacaatgaaggaaagggatgtgtcttcacatatgatgctngtggttctatgagagggttgatatagc

SEQ ID NO: 213956 - DNA, 618 bp, Glycine max
  unsure (1)..(618): unsure at all n locations
tgaaattcgaacaatgattttttcattttctttttaatacttttttggtttagactccctaagaatctgtcgatatttccaattaaatcttcttgttcctgtgaaggtcctataaaaaaaagggctatgccctttctttactcagaagggccttattccaagttccaccaaacaagtttttattcatttgaaacatctttttttccgaatacaagaaaaaattcatttcaatttcaattatttctataagataaaatcgatatagatagattttatcttatagaaataattgaaaaatacattcaattatgtcttcgcgtatcaaatattttcttttcatatcgatgcgtacgatatttttccagcaattaatgtatgtgagacagaaactttcacttacagttttttctttttaatattgtatttcattttttttaataattaataaaataataataataatgaataaaaaaatcaaataataattaataaaaagaanaaagtgtaaatcaaatagaaatttataaaatctatgatcctagagtagttccctagacaaaatagaagtaagttcacatacaagattcaataagattctctgatgaaaggagagaaata

SEQ ID NO: 213957 - DNA, 519 bp, Glycine max
cgtcgatctggaacggattccaatagaggaagtgtttgagcagctgaaatgttcaagagcaggtctaacatcagaggaagggggcaatcggcttcaagtctttggaccaaacaaattggaagagaaaaaagagagcaagtttttgaagttcttgggatttatgtggaaccccttgtctcgggttatggaagctgctgctataatggccattgctttggcaaatggaggaggaaggccaccagattggcatgactttgtcggaattatcgcgctgctagtgatcaactccacaatgagttttattgaggaaaacaatgctggcaatgctgctgctgctcttatggctggtttggctcccaagactaaggtactaagggataaccgatggagtgaacaagatgctgcaattttagtaccaggagacataatcagcatcaagttaggagatatcattcctgccgacgctcgtcttcatgagggtgatcctttgagtgttgatcagtctgctctgactggaga

SEQ ID NO: 213958 - DNA, 535 bp, Glycine max
aattcattttaatcctaattctgcacttcttgatcattcgatttttctcctcaaggttcgtctctgtttcatctcttttcatcatcgcagcctaattagccttagtttattgatttagctttggtctttcaccatggttacatttttacgtttctatctttcgatttgtgattttttacgttaatatgtgtataccggttttgtcgttgttgaatccgaaactttccattcgactttctgattccgtatctcgtttgtcacatgcaaaatctttcccgatttttaatctggctatctgatttgatttgattttgaggaattagggttcgcggtttgatttgattctgtgattcgcttgttatatgtaaaatattcccggttcctaattttagggtctgcgatttattttcttttatcacttttgaggaatcagggatcgtggtctgacttattgcgcattatttagttggatgcgtgcaaatctttccttatcttctaatagggtttagggtttgcgattgtcattctgggaata

SEQ ID NO: 213959 - DNA, 585 bp, Glycine max
ggcgaaacgagctcaatacatcatattaaaacataaaaagcagcacctaaaccagaacagcaaacaagttcaagggagaaattgaacataacagacatgacatacaagaacacttgaaaaaagacacgcttaaaacaagaacacttgaaaaaaaacacgcttaaaaaccaccgcgaaggcgaaggacgagatgcaaggtggattccttctgaatattgtaatctgccaaggtacgaccatcttccagttgcttcccagcaaaaataagcctctgctgatcaggtggaatgccctccttgtcctgaatctttgccttcacattatcaatggtatcagaactttcaacctccaaagttatggtttttccagtcaaagtcttaacaaagatttgcatgccaccacgaagccgcaacaccaagtgcagggtagattccttctggatgttatagtcagcaagggttcttccatcttcaagctgtttcccggcaaagataagcctctggtggtctggtgggataccttccttgtcctgaatcttagctttcacatgggctatggaatctgaactcttcaccttcaagggta

SEQ ID NO: 213960 - DNA, 584 bp, Glycine max
gtccttctatgattgcacaagtcaagcatagcttaagacgatcacttcgaaagggattgcctaggctggaggccacatattatatgtctttctacgaagaagattcttcacatgatgaaaaattgctaacatttgcaaaactagattttaatatgttgcaggagttacatcagaaagaagttaacaatgtgaccaggtggtggattaagaatttaaatgtctcaacgaaattgccatttgtacgagataggattgcagaatgttacttttggattttgggaatatactttgagccacaatattctcttgctagaaggataacaacgaaagtaattgctctatgttctgtcattgatgacatgtatgatgcctatggaaccattgacgaacttgagcttttcaccaatgcaattgagaggtgggatatttggtgcttggatgatctcccagaatacatgaaagtatgttatatagaaattttgaatgtttatgaagaaatagaggaagagatgagaaaacaaggaaaagtatattgcatcaagtatggctagaaagagatgaaaagattaatcaaggctcacatg

SEQ ID NO: 213961 - DNA, 452 bp, Glycine max
aagctaaagaaaaattaccatgttattttacataaattaaagaaacagatcaataataaaataactaagcttttagcttatacgggcagacattttattaactaataaagttttgagggaatccttcattaaccctccgggatttggataattatcttcatttttgtaaagcccgtaaatcatgcccccaagggtgacaacccgcaaaagaaaattcattggcacttcagtgggattaagggatgcctcattgatggcctttcaagcacttttaaccatttcaagtggtttattaagggcattttgccttgagggggtatggtgcttcatatagctttcaatgcttgatgcaacgggttttcttttctgctcaaactcatttccaacaatggcatccataagcctaccaataattgaagcagccccaataattattggatcacttgttgccc

SEQ ID NO: 213962 - DNA, 627 bp, Glycine max
  unsure (1)..(627): unsure at all n locations
gaggacttttgagacacattgtggatccttgtctcaatacgggatgaaacacatgaggtcctttgcaaacatctgcaatgtagggataaagaatgaacaaatggctgaggcttcagcacaagcttgtgtcagtattccttccaatccctggagttctctgcaaaggggtttcagtgcataataactccctgtaatgtgcactagtaaagaccaaagtatgattattgttacattatgttacatggttgtacttgtatatacatatcttgtcccacctttgtaaatacaattgggacactactaggattgggaagaagggtctttacatttatagtttggcaaatagatattgcaactacctttgtataattctatttctgaagaagcaattacaatttacaagggatggtgccatttacggcataaggattaaggagggataaaggaaccaattgctttggaatatccactcattacaatgcatgtatgacaacacatagtaatatgatgtgtgtttttattcagtgggcaactggcagatcgggttttcctggtcactttngataatattcccgaagaattatgatgcaaaattatgggtaatataatgacacttgattnatttgt

SEQ ID NO: 213963 - DNA, 517 bp, Glycine max
acaaaaataaatacaagttgtcattaatattaaacaataattttggcatcataaattcttccggaataattatacaaaagtgaccagggaaaacccgatctgccagttgcccactgaataaaaacacacatcatattactatgtgttgtcatacatgcattgtaatgagtggatattccaaagcaattggttcctttatccctccttaatccttatgccgtaaatggcaccatcccttgtaaattgtaattgcttcttcagaaatagaattatacaaaggtagttgcaatatctatttgccaaactataaatgtaaagacccttcttcccaatcctagtagtgtcccaattgtatttacaaaggtgggacaagatatgtatatacaagtacaaccatgtaacataatgtaacaataatcatactttggtctttactagtgcacattacagggagttattatgcactgaaacccctttgcagagaactccagggattggaaggaatactgacacaagc

SEQ ID NO: 213964 - DNA, 539 bp, Glycine max
  unsure (1)..(539): unsure at all n locations
ggtattccaactttatccgtgaatacaaacaactaataacacgcagaataatgataattttcaggacgaacgtaggggtagagttaaatccaaactaacacaaggagctcttgacactacattcgactatttttccattaaaatacacgatagtcaactgcagccatcataatattgcttgcgtgcaaatttgcattccatgaacgaggcatgatatcaatgttcggaaaggcaagaaggcatggctagttgactagttattttggtggctagcagacagataagaaaaaatgatggaaaccatgatgaccagtacgataatcatggttgagccatatccactttcatccttcacaatgtaagatttccttttactcaagagaccagattctctgcaagttttctgtatagcttccagcctgctcaatgctttagttgcattgggatcatttttgtcaaccttggactccaacatagaagcanaatcaaagaaagcaccatagacatcagcccatagtcgtagttcgtcaatcactttt

SEQ ID NO: 213965 - DNA, 275 bp, Glycine max
cattaaaaacacatacaaaatcaaaaaaagacgggaccaaaaagaaggaacaaagaaacaaaaggaaaaaaaagacaaaaaaggagacaaaaaaaaaaaaaaaacagaaggaaacagacaaaaaaaagaaaagaaaagaaaagggggagggggccaggaaaaaaaaaggaaccaagacaggcggaaaaaaccagaggaagaacaagaagggaaggagcaaaacccaggaaagaaaaaaaggaaccaccaaacgaaccaccggggacaaaaccagg

SEQ ID NO: 213966 - DNA, 608 bp, Glycine max
  unsure (1)..(608): unsure at all n locations
ttgttgctgtagaagagaagaaagagattgaagagacccagcagaccgacaaggacagatggaagggtcttgcctatgatatctcagacgaccaacaagacatcacaagaggaaagggtttggttgactcccttttccaagctccacaggatgctggaactcactatgcagtcatgagctcctacgagtacctcagcactggacttcgccagtacttggacaacaaaatggatggattctacattgctccagcttttatggacaagcttgttgttcacatctccaagaacttcatgaccctgcccaacatcaaggttcctctcattcttggtatctggggaggcaagggacaaggaaaatctttccaatgtgagcttgtctttgccaagatgggaatcaaccccatcatgatgagtgctggagagttggaaagtggaaatgcatgagagccagcaaaactgatcaggcagagataccgtgaagctgcagacatgatcaagaagggaaagatgtgcgctctcttcatcaacgatcttgatgcangagctggtcgtcttggtggaccacactatcactgtgaccaccagatggtgatgccacttatgaca

SEQ ID NO: 213967 - DNA, 587 bp, Glycine max
attccgcaacagagagtagaaaagatggcgcggttgatcacagtggtgtggtgcgcggtggcggtgctactgtgcgccgcggcgggcgcgtcgtgggtggaggaggcggcgaacccgatacgaatggtggcggtggtggaggcggaggtggttcgggtgatagggcagtgccggcgcgcgctgaagtttgctaggttcatgagcaggttcgggaagagttaccgaagcgaggaagagatgagggagaggtacgagatattctcgcaaaacctcatgttcatccgctcccacaacatgaaccgcttgccctacactctctctgttaatcattttgctgattggacttgggaggagttcaaaagacacagactaggcgctgcccaaaattgctctgccactcttaacggcaaccacaagctcactgatgctgttcttgctgccacgaaagactggaggaaagaaggaatagtgagtgatgttaaagatcaaggcagctgcggatcatgctggacattcagcacaactggggctttagaagcagcctatgcacaagcattatgggaagagtatctctctttctgagcagc

SEQ ID NO: 213968 - DNA, 479 bp, Glycine max
ctaccttagattccttctccaacaatggctctcgccgtttccactacttcttcctcttcagcagctgctgcagcttctagctccttcttctctcgtctcggatcttcctccgacgcaaaagctcctcaaatcggttcgtttcggtttccggagaggtcgcttgtttcgtctgttgttgtcaatgtaactcaacgacgctccttggtgaggccactcaacgccgaaccgcaacggaacgattctattgttcctcttgcagcaactatcgttgctcctggtacgttttccgcgttatgttatgaacacattaccttgttttcagggaattttctgaaataaagctcccccccattctatttcgcgcctcttaaacggaggcagatacagcgttgttttgatgcgttggcgtgtgattgcagagggtgagaaggaagacgaagattttgagcaaattgcggatgaccttgaaatgcagctcc

SEQ ID NO: 213969 - DNA, 595 bp, Glycine max
gaaatgattgagagtggtgtcattaagcttggtgataagcagagtgaaagcaaatgtgctcttgtgtatggtcaaatgaatgagccccctggtgctcgtgcccgtgttggtcttactgggcttactgtggctgaacacttccgtgatgctgaagggcaagatgtgcttctttttgtagacaacattttccgttttacccaagctaactcagaggtgtctgctttgcttggtcgtatcccatctgctgttggttaccaaccaaccttgtctactgatcttggagctcttcaagagcgtattacaacaaccaagaagggctcaattacctctgtccaagctatctatgtgcctgctgatgacttgacagatcctgctcctgctaccacttttgctcacttggatgccacaacagtgttatcacgacagatctccgagcttggtatctatcctgctgatgaccccttggattctacatctcgtatgctttccccccttattttgggtgcggatcactatgaaactgctcgtggtgtacagaaagtacttcagaactacatgaatcttcaagatatcattgctattttgggaatggatg

SEQ ID NO: 213970 - DNA, 499 bp, Glycine max
agcgaaacccaagacaagaatcacagcgcacagtgacacatacatagaaaaaaacgaaacacaaacagaaacagagttattggaaaacacgaaacactaattgatttgaattcgattcgattgaggattgctgtttgggtgtcttgatggtgtcggtgaacccaaacctcgctcaaggcttgtacttcttcgatccctccaacatgaccctttccggagtcaacaatcttacaccgccgtcgacgccggctccggctgctcctgccgccgtcgaggattcgaataagaagatccggaaaccctacacgattaccaagtccagggagagctggaccgagcaggagcacgacaagtttgtagaagctctccaattatgtgatcgggactggaaaaagattgaagcatttgttggatcaaaaacagttatccagatacgaagtcatgcacagaagtaatttcttaaagttgagaagaatggaacacgtgaacatgtacctgc

SEQ ID NO: 213971 - DNA, 593 bp, Glycine max
ctcgagccgaatcggctcgagccaacacaaagatttcctctggaagcttcaagattgttgctgtagaagagaagaaagagattgaagagacccagcagaccgacaaggacagatggaagggtcttgcctatgatatctcagacgaccaacaggacatcacaagaggaaagggtttggttgactcccttttccaagctccacaggatgctggaactcactatgctgtcatgagctcctacgagtaccttagcactggacttcgccagtacttggacaacaacatggatggattttacattgctccagcttttatggacaaacttgttgttcacattaccaagaacttcatgaccctgcccaacatcaaggttcctctcattcttggtatctggggaggcaagggacaaggaaaatctttccaatgtgagcttgtctttgccaagatgggaatcaaccccatcatgatgagtgctggagagttggaaagtggaaatgcaggagagccagcaaaactgatcaggcagagataccgtgaagccgcagacttgatcaagaaagggaaagtgtgtgctctcttcatcacgatcttgatg

SEQ ID NO: 213972 - DNA, 544 bp, Glycine max
aggacaaaaggaaaaggcaccaaattcaatttaagtggacactttaactcaaaattatagaggaagacagtccaatatgaaaaatatagtaaaatcatctcaaacttggcatcttctctttgcacctaagacattgagaattctaagaatgttacacgcaagtcccatcacaacttctagcacttggatcagcacaaccttcaggaacagaaatatttacttgccaagtttgctttgcctccaattcaagattggaagaaagttcccctgttaatagcatcctcgttagcatttccaagtgcagcctcgttcaagtacttgtcagccaattggactctcttgacattctcttgttcttggacaagcatgttaccatacgtcaagagcttctccagagtcatcttgggctgctcaaaggttggaggtccatcttttgagttcacaagcttcttcccaatgccgtcaacaccaacaccagaaatccacttcctcacttcgtcatcatatactctggccctcagtgcaccaaagaaatcaatggatt

SEQ ID NO: 213973 - DNA, 535 bp, Glycine max
  unsure (1)..(535): unsure at all n locations
ctatgtatctatataatcgaattgaaattacgattctatcaaatctttttatttactttttttttttttaagaaaaaagaaagttctaattattaataaattatatctatatatatatatatacagatagatattctatatcttttatcttaattaatatttgacccctccttataatgtgttatagttttctttatttttaggaacttatccattccttttttaatgtgcccgacaatccgaaagaattctgggggaggggtcatttcgtttttgatctagaataaatagagcttcaagaaatgagagaattaagaatacccacgagaaacactaatccaatccataatgatgtaccggaaaatacaacatttttgttattcgaccaaccttcaggagaagcaaatacaacaggtacactaatcaataaaataaatgaaatagcaattaatgcaaaaacagctaattggaaagcaatagtcatgtttctaatcctccaatntaccaacaaaagaactttaccattgatccccca

SEQ ID NO: 213974 - DNA, 315 bp, Glycine max
aacgttattattggaatctgtcttaacatggacaagttttctagaaccactttgaaaaatagaggacggccaaatatctactataacaatcaataacgacaagtacattagcaaatatataaaaatccaaaaactccatcctcctccacaagaggcaaagtccaaaatagagctaatgctcctaacaaggtaaatccactggttccagaaaccgatttattcagacctctcattttttgcacgagcaagacactaaatcgcaactagacaagcacataatgtgtagacaagcaactttgcacgacaccaccttaa

SEQ ID NO: 213975 - DNA, 530 bp, Glycine max
  unsure (1)..(530): unsure at all n locations
gacaaatcgcatccaaaatggtggaactgaagttgttgaggcaaaagctgggacaggttctgcaacactatcaatggcatatgcagctgccaagtttgctggtgcatgcctccgtggcttaaaaggagaagctggggtagtggagtgtgcttttgttgattctcaggttacggaacttcccttctttgcaaccaaggtacgtctaggtcgtgctggagcagaagaggtttatcaactgggtcccctgaatgagtatgaaaggattggattggaaaaggcaaagagagagttagcaggaagcatccagaagggtgtagagttcatcagaaaataaatgtgataaggaaaaactagtttttgtctcttatatataaggaccatgtgtaatgcttctctatgctcatagattttcttcttcttcttaagaatagtactctaaatntgtggtgtcatccgtagttgctgatgataacggatttgacatcagtggaactgcttaataatctcagaaagatactaagatatcagcc

SEQ ID NO: 213976 - DNA, 579 bp, Glycine max
cttttgagttgcattgttgcatcaccgcaagtccacaacatggctgccactgccgctgcaggcatagcttccttgttttcttcttctattaacagtgtcaaatgtcttcgttcctccaagaactgctccattatagacccccttataaccacagtgccctcaaaccgtggcatgtttgtgtcacacttggtggaacctttgtccattgggggtgccattaattcgcacaagttgtgggggcctagaatttctgctgctgttgcacaagaagaggctgctgttgtggctgatgatgaggtagatgatggtgctggtttagttgaagaagagaaagtggaggagaatgaaggagaagtagttgcagaacaagactctgattcctctgccaccaagctttattttgggaatttgccttatagtgttgatagtgccaaacttgcacggctaattcaggaatatggtagcgcagaactcattgagcttcagcattatcattattttattgataactaacatcttatagtgattcaaatctgagagcggcttcaactttcttagatagccttcccaatttctggc

SEQ ID NO: 213977 - DNA, 511 bp, Glycine max
cgcgcagcagcgtcggagtttcgaccaaatctgtcggaaggccgaggatggtcgccgatttcgcgaggccggtggtgcgtgtccgagcggtgacgagcgacgacgagtggggcccggagaaggaggaggaggcatacagcggacgagtggccgtggaggagaaaccgacggagacggaaacggagaagctgaagaaggctttggtggattcgttgtatggcacggatcttggactgaaagcaacgagtgaaacgagagcagagatcgttgaactcatgactcagctagaggccaagaaccctaaccctgctcccactgacgccttgactctgctcaacggagaatggattctcgcgtatacgtactttgcaggtttattcccattgttgtcaagtggaacactaccattggtcaaggtagaggaaatatctcagactattgacacgctgaattttaccgtccaaaactctgttcagttcgctggtcctttggccaccacctcaattagtac

SEQ ID NO: 213978 - DNA, 547 bp, Glycine max
gaagaactcaagagatggagagtggcggtaatgggaagagagcacatgaagaagcggggccttcatctgggattgatggaaggaaacttgaaatgactgaaaaagcgagtgatgatgataaagaagaggaggaggaggaggaggaggaggaagaaggagccattgaagatagcaaaaatggtttttttgttcctgggcctcttctttctctcaaggaacagatcgaacgggacaaggaggacgaaagcctaaggagatggaaagagaagctgttgggttgcttggaaagtgatatagatgggcaattggatcctgaagtgaaatttcactccataggaattctctctgaggattttggtgaaattgtcactcctctacctgtggatgaaaatcgcaatggctgtactctatttactctcaaggaggggtctcgctatcagcttaagctaaaatttagtggtctgcacaacattgtgtctggcttgacatactccaacactgtgtggaaaggaaggcttcagttgatcagagcaaaggaatgttgggt

SEQ ID NO: 213979 - DNA, 526 bp, Glycine max
ctagttctagatcgcgatctagaacgattgtttgttgttgtaactcgttcttcttcttttgttgttctgtgtttgtgtttgttttttctctcacctgaaaatgtcttgctgcggtggtaactgtggttgcggaagctcctgcaagtgcggcaacggctgcggaggctgcaagatgtacccagacttgagctacactgagtcaaccaccaccgagaccttggtcatgggagtggcacctgttaaggctcaatttgagggtgctgaaatgggtgtgcccgctgagaacgatggctgcaaatgtggaccaaactgctcctgcaacccctgcacttgcaagtgaggtgttgggagagcaagcttcaagcagagatagcccttaattaggaataatgataaactattaatgtgtagctaaaaacttatgtattatgtctgtgatggttttcgtgcactctggtgttctgtgttaaacaaacatccttagaataaagtggtcatgtcttgcctttcagcaagttcaagtgtt

SEQ ID NO: 213980 - DNA, 474 bp, Glycine max
tgtcgtcctttttttttttttttttttttttttttgagatctcaaaggaaagcgtgttaaatcagaactaaacagagttcaaaacattggccacaaagcacagatccaaaactcaaaaacagcaatttccgaaggggctattcactggccatggacaaaattattaatttcaacggaaagttagggttaacggcggtagtttttttgaagagcccaacctacggcttggaggaggcaccatctgccgaaaattcatgggcatcgggctgagcggccaatactttgcagctacctccggttacagaaccttcctagatgattcttacagaggcaccagcttcgggacttacattggcatgaaccgatttcctccaatcagcatggacctattgagcctgagcaagaggagcaaccttagctggaacaatggcccaaactgcttaggaggcccaaccaccatggttccagtttgac

SEQ ID NO: 213981 - DNA, 506 bp, Glycine max
atgattaacgaaataattttgatatgtagattaaataaacacacgaagtacaaataaacattggtctctctaatcacaaaggagattaagtccattgtggtgtgccttcatgactgaattataccaaagtactacccttaacatactcagtaaaagccagagcaatcaaacccaacatagcaaatctcccattccacagttctgcatctgaggacatgaaccctttggacttagactccacgctgacaccttggaagagtggaatcaaggaagcaagggtaaggaccacacttgtccccaagaaccatgggatgccaccattggatatttgttctaacacaccttgccctttggctacttccactgccattgcagccacaaacccaatcatggccaaccttccattgatcctctcaggtgctggcccactgaatgccaacacatcagaaaacttagtgctcacctttggtgaaggagcagagactggctgtggcttgggttctact

SEQ ID NO: 213982 - DNA, 576 bp, Glycine max
caacgaaccactctgaagccgctcacgttatccacaacactctcaaccctccttaaaccctaaccaatccaaccatggcttcttcttccaccttcactgcaatgtccgcctgcaagctctcctcctccgccgccatctcctccttcccctcccgccgccgctccaacgccgtcgttctgtcgaggcgcagccgcgccgccagggtctccgccatggccaaggagttgcacttcaacaaagacggcaccgcaattaagaagctccagagcggtgtgaacaagctcgcggatctggttggggtcacgcttggtcccaagggaagaaatgttgttctcgagagcaagtatggctcgccgaaaatcgttaacgacggtgtcactgtcgctaaagaggttgagttggaggatcccgttgagaatattggtgccaagttggtgagacaagcggctgccaagacaaacgacttggctggtgatggaaccacgacctcggttgttcttgctcagggtcttatagccgaaggtgtcaagggttgtgcagctggggccaaccctgtgctcatcacacgtggcattg

SEQ ID NO: 213983 - DNA, 556 bp, Glycine max
cacacactcactctctctctctctctctctctctctctctctgctcccattaatttcacgatggcaacactcttcgactctctcgccgtcgtgcgtctccccaccgccgcccgccggacctccgttatgctcccgcactgcgctggcctcaggctcagacccgccgccgcttcgcgcctagttgcgtcccccgctcgcaggatcgcttctcgcgcagcgcgcgtcgcctgcgaggctcaggacaccgccgtggaagtggctcctattactgatgcaaactggcaatcccttgtccttgaatccgaatctgctgttttggttgaattctgggcgccatggtgtggtccctgccgaatgattcaccctataattgatgaacttgcaaagcaatatgctgggaagctcaagtgttacaaactcaacactgatgagagcccttcaaccgctactcggtatggaattcgaagcatcccaactgttatgatcttcaagagtggtgagaagaaagatacagttattggtgctgtgcccaagtcaacattgaccacgagcatag

SEQ ID NO: 213984 - DNA, 520 bp, Glycine max
gctcggaattcggctcgagctcaggtaagatcggttcaggatcatgggatccttttctatcagataggaagggctgcttcacaaaatgtacttctaagtaattgctccatagatcctatatctatctatatgaagaagaaatcatgtgacgggggggattcttatttgtacaaatggtacttcgaacttggaacgagtatgaagaaattaacgatacttctttaccttttgagttgttctgccggatcggtcgctcaagacctttggtctctacccggacctgatgaaaaaaatgggatcacatcttatggactcgttgagaataattctgatctagttcatggtctattagaagtagaaggcgctctggtgggatcctcacgtacagaaaaagattgcagtcagtttgataaggatcgagtgacattgcttcattcgtccgaaccaatgaatgccttaaatatgattcatgatggatcttaatctatcagtgatcagagatttctctatgagaaatgtg

SEQ ID NO: 213985 - DNA, 411 bp, Glycine max
ctcgagccgagaagaggtcctcttccaatttgaagctagcgaggatggacaagtccagctctttccaaatgctccagttgatgttgacaattctcccagctttgctgccatcaatgtcagccctattgagtatgggcatgttctgctgattacgcgcattttctagtgtgtgcctcataggatcgaccgtgagagctaacttcttgcacttcacatgagagtggaagctgataatccatattttcgattgggttacaacagttggggtgcttttgcaaccattaaccatcttcacttccaggcttattattcggctatgcccttcccaattgagaaggccctcactaagaaaatagcaagtttaaatggtgcggcgacgatatctgcactgttgaagcatccagctagagg

SEQ ID NO: 213986 - DNA, 559 bp, Glycine max
cttctctcggagccgctattatccccagacgccaccgccgcagcaccagaagaagaagaagagtgatggctgagtacgacctaactccgcggatggcgccgaatctcgacaggcaccttgtgttccctctcctggagttcctgcaggagcggcagctctacgacgacgaccacatcctgaaggcgaagatcgaccttctcaacaacaccaacatggttgactacgctatggacatccacaagagcctctaccacaccgaggacgtcccgaacgatatggtcgaccgccgcgccgaggtcgttgcccgccttaagtcgctcgaggaggccgtcgcccccctcgtcgccttcctccagaacgaggctgctgtgcaggagctccgagcggacaagcagtacaatctccagatgctcaacgaccgatatcagattggtcctgcacagatagaagcgttgtaccaatatgccaaattccagtttgagtgtggaaactactctggtgctgctgactatctttatcagtacagagcttttgtgcacaatagtgaaaggagttgagt

SEQ ID NO: 213987 - DNA, 479 bp, Glycine max
gagaggaagcttatggcgaacattttaagcaaaatcgttatcaatactacttgtttggatccacaagtaacacaggagaacccctactactccaagaggtatacaggccataaatttgaatgtaattctaaatccaaaataaacagccaaaaacaatttgatgcatccggatagataaaacaaatactctcattggtctacctacacaatcatcgggttgtttgagcttgtgcatgttccaaaagttgactaaccaacttgtaagtgcgtccgttaagggccttggtatgggctatcagttggtcatacacatttagatgattaggttccatgataactgctccagtttcggagtcaattttggcattaagctttgagctccggatgagagtaacaatccatctctcagcctcctcataattgaaatttaacttttcagcaagcactcccatgtcaatgcgttggtgaattctacagta

SEQ ID NO: 213988 - DNA, 422 bp, Glycine max
ccgagaaaaaaatagaaggttttttgatggtaaactaatatttctagtatcagagttctaaagaaggaaagaagaatgggaggttcatcggatacgaagcttatgcaagacctgttgttgtacgctgatagccgcggcgcttagttgcttggtgttgtttgtctgactgagacacctgaaccctaattgctactggttcaagatcgttcttgatcataagagatactatgatgtgcaccgggtacaatatcctatttagactatcctttacaaggttgtaactggcggagaagtgagatatggcttctactgggtttcaagctgatgtcaaagtctttgcacaggttacgtccgctatggctttgatttatcagcatctacacaccatacaaatgagctacttgtttatgcactgtaagctt

SEQ ID NO: 213989 - DNA, 390 bp, Glycine max
accttgttagtgatccgttagtgatcaacgactcttgcactacgaatgtatcctatataccaattgggacctctactacaattaccaagacctactcggagacagtagctagagaccgtgtacgactttaccaataccgaatttagatagctcaaactttgaaggaattcgcgacgaataaatggaacctcgagatgggaacaagcaccgtctcggacacaaaattggtagcggatctttccgagagatcaatctaggaactaatatccagactaatgaagaggtagcggatgagcaagaaagtgtcaaaaccaaccatactgaatggctgaatgaatccaagctggataaaatactgcagggaggaaaacgggatgtccaaaatgtcaa

SEQ ID NO: 213990 - DNA, 497 bp, Glycine max
acaaataataaatacaatgtcgccattaatattaaacaataactttgacatcataaattcttccaaaataattatacaaaagtgacaagggaaaacccgatctgccagttgcctactgaataaaaacacacatcattactatgtgttggcatacacgcatgaccttgtgccttgtcatgagtgaatattccaaagcaattggtcctttatgcctccttaatccttatgccacaaaatgctatcatcccttgaaagttgtaattgcttcttcagaaatagatttatacaaaggtagttgcaatatctatttgccaaactaaaaatgtaaagacccttcttcccaatcctagtagtgtcccaattgtatttacaaaggcgggacaaaatatgtatatacaagtacaatcatatagcataatgtaacaataatcatactttggtctttactggtgcacattacaggaattattatgcactgaaacccctttgcagagaac

SEQ ID NO: 213991 - DNA, 599 bp, Glycine max
  unsure (1)..(599): unsure at all n locations
ctgcatcagcatttccccttcaaagaacaatttcagggcaatggtgccaagagaaccagcattacctactcgatcggtgggtggaggctttatgaaccaaaatataggaaaagctggggaggacatagagatgggcaggaaaacagtgtgggacatgggtgctggaatggatgataacggagctccaataaacgatgatcgtgtgactataaaggatggcgaattgtctcctgaaattaggacaacagtagatgactcggaccgtgctggaatgcatcctaggcgatctagctggggaagaaaaagtgggagctgggaaatgtcccctgaagttctggctttggcggccagggtgggggaaccaaaccgtgtcggtggaggcagcagtagtttgatgcacgagaacagtcatgtgtaagccattatgcttcaagtagtgtgaccaaaggacttgaaatttgatttcacggttataatgaaaaaaatatattacactgttcatgtggtgattctacagcataattatgtgcaatatggngttgtaggcatttgcaaggtgttgcaagtgttttttaggcatttgttctaagaagaaattg

SEQ ID NO: 213992 - DNA, 484 bp, Glycine max
taacagtgcaagtggttcggcgtggttgttagtgagttggttaagcgacggcgtttggttggggttagtattatgcagagaatggcgtacacgttttcgtttccggaggaggtgctggagcacgtgttctcgttcatatggaacgagagggacaggaacgcgatctcgctggtgtgtaagtcatggtacgagatcgagaggtggtgcaggaggaaggtgttcgtggggaactgctacgcggtgagccctctgatggtggtcaagcggttcccggaggtgagatccattgcgctcaaagggaagccgcactttgcggacttcaatttggtccccgatggctggggaggttacgtctgcccctggatcgccgtcatggctcgcgccttcccctgcctcgaagaaatcaggctcaagaggatggtcatcaccgacgagagcttggaactcatcgctaagtccttcaagaacttcaaggtcttggttc

SEQ ID NO: 213993 - DNA, 532 bp, Glycine max
aaagcacaaagcaaagctcatccttgagttaaaaaatggcagcagcttcttccatggctctctcatccccatccttggctggcaaggccgtgaagctgggcccatcagccccagaagtgggaagggtgagcatgaggaagaccgtcaccaagcaggtctcctcaggaagcccatggtacggcccagaccgagtcaagtacttgggcccattctctggcgagcccccgtcctacctaaccggtgagttcccaggcgactacggctgggacactgctgggctttccgcagacccagaaaccttcgccaagaaccgtgaactcgaagtgatccactccaggtgggccatgctcggagccttgggctgcgtcttcccggagttgctgtcccgcaacggggtgaagttcggagaagccgtgtggttcaaggccgggtcccagatcttcagcgagggtgggctcgactacttgggcaacccaagcctgatccacgcccagagcatcctcgccatctgggccacacaagttatcctaat

SEQ ID NO: 213994 - DNA, 416 bp, Glycine max
ccgagaacaaaaaaaaaaaaaaaaaaaatccgggattcgctcttctcttggaaaagtgaaaaccagaagtacgaacgaaagagaagagcgatttagaagtgagagaagatggggttgtcgttcacgaagctgttcagcaggttgtttgcgaagaaggatatgaggattctgatggtaggtctcgatgctgctggtaagacaaccatcttgtacaagctcaagcttggagaaatcgtcaccactatcccgaccatcggatttaatgttgagactgtggagtacaagaacatcagcttcactgagtggaatgttggtggtaaggacaggatccgtccactgtggaggctttatttccagaccactcagggtttcattttggtggttgatagcaatgtatgaaatcgagtggttgaggc

SEQ ID NO: 213995 - DNA, 635 bp, Glycine max
  unsure (1)..(635): unsure at all n locations
cgagaaatggcgatggcaatggcgcttcgcaggctttcatcttcaattgacaagcctctgcgccctctcttcaatgccggttccctctactacaagtcgtctttgcctgatgaagctgtttacgacaaggagcgacccggagttacatggccgaagcagttgaatgctccacttgaggtcgtggatcctgagattgctgatattattgagcttgagaaagctaggcaatggaaggggctagaattgataccgtcagagaatttcacctctgtgtctgtgatgcaagcggttggatcggttatgaccaacaaatacagtgaggggtaccctggtgcaagatattatggtggaaatgagtatattgacatggctgaaacactgtgccaaaagcgtgccctagaagcttttagattggatcccgctaaatggggagtgaacgtgcagcctctgtcagggtctcctgcaaatttccacgtttacactgcattgcttaaacctcatgaaagaatcatggcacttgatcttcctcatggtggccatctttctcacggatatcagactgataccaanaagatatctgcagtctcgatttttttgagacaatgcatatcgattgatgaagtcaggatcatcgc

SEQ ID NO: 213996 - DNA, 394 bp, Glycine max
atatcaaccactttactgaatgattgaaacccaagataaggggataggatgaacagacacatgcacaaaaaaataggaataagaagccataattacataggcataaaaacatttaaacattacgaacgaaaaaaagagaaaaacacatcatataggtgaaaggaaaccaaaaaacacaaacatgggcttgataccaggggacgtgaaagccgcaactggaaaaaggctgaaccgtttgaccgaagcacttgcacttggagggaatggccctgaaacgacctggtggaagagtgctgcaagagctgcaccgatgaatggtcccacccagaagatccagtgttcatcccaaccaaggtccttgttgaagaagatagcagcaccaagactacgagca

SEQ ID NO: 213997 - DNA, 564 bp, Glycine max
  unsure (1)..(564): unsure at all n locations
caaactgaaggtatgaagggcaatattaatgctctgtctgggttaattcatcaatatggcaaggaacgaaaatctgtacattggggtgataagggtggcaaaacagggttttcaataggggctgcaaggaaggtaaatgctttgtcgttagtgatcggacctggtgctggatataacctgaaatctaatccattacctgaagaggatagtccaacccgtaatagtgtggagtcaaagaagcatagcatatttcaagaacaaatccgggctgaacgagaatctttcaaagctgtttttgataggagacggcacaggattggtgggcttgatgtggaggaggactgaaagaaaccgacccaatgcagaaggctttcacaaaacagagtatggggagggaagatctatcatgcattcagctctatccctccctgcattggagaagttgttaccaggatttgaatccgtcacaagacagatttagagactgattccgaaatttggtaatgtcatcaaaatagacgggttacttgaactcattcttgatacttncatgcattagaggag

SEQ ID NO: 213998 - DNA, 533 bp, Glycine max
taataatataaataagaataaaaaaataaaaaaaaaaaaagaatctatataaatataaaaataatatatataaggtacaaatagtaaatcgaggtacccattttatgataaactttccttccatttttgttcctctagtaggcctagtatttccggcaattgcaatggcttctttatttctttatgttcaaaaaaacaagattttttagatacagaaaacaaagtaaaattctggggttttttattccccaattataatactaaattcaaaaaaaggagagtaatgagtataatctttcgctcagacgatgtactgatatattctatggcggaggttcgaagaacaagcaatttattttgggccgttttcactttgttaggttcattggggttattgttcgttgcaatttccagttatcttggtatggatttgttctttatttctgagaaaattagtgatttttcttttattccggactttatttattttccatttattcccacaggggccacgatggctttttatggaatcg

SEQ ID NO: 213999 - DNA, 539 bp, Glycine max
caaaaggtacacaaaataaataggacaattctgaagctttttgtgcaatttaatttctaattaagttcaattctcatcagtaaaaaagtggtacacccaaaaatacagataattcgccagctttatgtgcaatttgtgtcccattcaaattatcttcaatacgagtcaagggaataaacccctgttctatggtttccagataaacgatactctcaaaagtactggtacgagtaaaaataccctcttctttaacttctgttattattctgatggagtgaagctcgttcataggtatttcgagaataatacgacgattttttccaggaaatccccaacgaacaaaacgtacctttttcccttttttattgaagatatcaaaaccaccacctatatcccaaaaaataatcgacccaaaataaaaactactaaagagacccgcgattccataaaaagccatcgtggccccttgtggaataaatggaaaataaataaagtccggaataaaagaataatcactaattttctcagaaataaagaac

SEQ ID NO: 214000 - DNA, 522 bp, Glycine max
  unsure (1)..(522): unsure at all n locations
catcgaaaatttaacataggaaaagaaaaatttatttggatcaataaatacatagcaagcctatattacaatcattccttaccttttctatttcttatcttgcttcttctatattgatcaataaaaactgaagactggacctgtttcccacaattaggtggtaccattgaacaaagttcatgatgctcaagggtgagataggttttttcaaaacaaccaagggcaaaccagggcagaaaataatgcaccagtgaatggcctcattggaaaagattccggaaaccgttgaatatttttagggcccttaattcaccagccctcatgtccctcagttttcttcgcagtatgtattgagcacgaaataatatccttcgctcactagtacacaagtccacagctagctgtttcagaaagagccttcggttgagttgtttaggagaagtcacatccagatccagtgatccacttgcctgtaagaactngttgnattttgatatgctggattcacaactatctagtatg

SEQ ID NO: 214001 - DNA, 476 bp, Glycine max
aagaagaaacaagcattaatagaatttttatttctcacacaataaatacaagagattctgcaaactgaaaaagggatttcttactaaagcaaactcaaacaagaacaacttccactcatttggcatctaccgtagtagaacaggatcaaaagcagctctctgatagaacacacgtatgtattatattgaacatcttgcacagtggttcatttctcacagctattgcaacttaaaatacttgcaaagcttctgcaaattccaaactttctttttctcccttctttatggatatgacaaagtgatcagatcatgaaacaataatcaatccattgaatttgaatctgatttttggtttggatcgatgccaccattcttcatcttaggaagggacaacaaataggccaaagcctactaattaagcgcttaaaactgcattagtggttggtttaagtgtgaagttagtaacatcagcttga

SEQ ID NO: 214002 - DNA, 567 bp, Glycine max
tggaaatctgttacgagttttttggcactccgttgatgggatgccactttcaaaatggctgtttatctctgccagcatagttaccgagttctggagttaggtatttttctttccagtgttggcacccgatgtttttagcactgttttgtatcggttttgccaccatgtgtgtccttgtccttgtttctttgcagcagtacatgtatcgagtctttccagtggtgtttacccaatttttaacgtatttgagcttatgctctgtacgcgatttttgggtctaagttttagtcaaggggcatgttgaagttccagtttatgtggtgatgttgtcctggttactttggcagttcttcagagttttatgaagcctttgtcatcgggagctttggtcatggcagcaagctattatacaggtctgtcgtcacaatcttttccctttgggggatgggttgtttttttaactaccaaagcccttgtttattaggcttcaattttttttggaacttgacattgtaacctctatatcatgtaatgatacttactgaaatatgccccttgtactgtatg

SEQ ID NO: 214003 - DNA, 577 bp, Glycine max
cggaattcttattaattactttaaaccgaataaatcttgataattgaaaaattaagtcataatttattggttgattatatcattaactatttctttattttatatttaggttacgaggaaattatcatgaatccaattatttctgctgcttctgttattgctgctgggttggccgtagggcttgcttctattggacctggggttggtcaaggcactgctgcagggcaagctgtagaagggattgcacgacaaccggaggcagagggaaaaatacgaggtactttattgcttagtttggcttttatggaagctttaacaatttatggactggttgtagcattagcacttttatttgctaatccttttgtttaatcctaaaaaaatagaaatacatatccttttttccgtggacttgctttaccggtcttgctttttcgaattctatttatattaatatttcactcctataattctttatccgttcggacaagaacacaggggaaggactaattgaaagtgaagaatcacatactgattcgccccttttcttctctttttagtcccatgaccccccctt

SEQ ID NO: 214004 - DNA, 541 bp, Glycine max
  unsure (1)..(541): unsure at all n locations
atttccggcttattttacgacggcagatacaaattctggactaaacacgagaaaaatcttgctttgacagaagaggaaaagatggaggtgattagaaatagaggcattcctgctgatgttcttgcaaagcgagctcatgaatttgaaaaacatgttgctcatgaaagcctcaaggatcaaattcctgctgttgacaagttgtattctactaaggttaataagtttgcaaaaattatgaaccttagacaaagtgttgttggtgatcttaaacttcttactgatgggaagttatatgagggtaagcatattcctgtatctaatattagtgcaggggaaaatcatgtagttcaaatacccctaatggcacaggaggaaattctgtcttctagtgcaagtgatttcagaactgcaatggtgagtaaaaatagcaagcctcaagctactgcaatgcatgtgggagctatagaaattatcattgatagtttcgcaagtcctgactgcaacatagttggtgcaatgcntttggttgatacttatcata

SEQ ID NO: 214005 - DNA, 558 bp, Glycine max
  unsure (1)..(558): unsure at all n locations
tgcaattgaagttaaaagccttagccttccctacaactccaaacacaaagacatcatcatccatggctgcctccgtctccactgtcggagctgtcaacagagctcttttgaacctgaatggttctggagctggagcttcagctcccagttcagccttctttgggaccagcttgaagaaggttattgcctcaagggtccccaacagcaaggtttccggtggaagcttcaagattgttgctgtagaagagaagaaagagattgaagagacccagcagaccgacaaggacagatggaagggtcttgcctatgatatctcagacgaccaacaagacatcacaagaggaaagggtttggttgactcccttttccaagctccacaggatgctggaactcactatgcagtcatgagctcctacgagtacctcagcactggacttcgccagtacttggacaacaaaatggatggattctacattgctccagctnttatggacaagctnngtgttcacatctncaagaacttcatgaccctgcccaacataaggttcctctcattct

SEQ ID NO: 214006 - DNA, 575 bp, Glycine max
  unsure (1)..(575): unsure at all n locations
ggaaagaataggaaaggttatttctttatattttccccggatcccactactaagagagatgttcatttcttaaaatatcctatatacgtaggtgggaacaggggaaggggtcagatttatcttgacgggagcaagagtaataataatgtgtataatgctacagcagcgggtatggtaaaaaaaatcatacgaaaagaaaaagggggatacgaaataactatagtggatgcattggatgggcgtgaagtgattgatattatacctccaggaccagaacttcttgtttcagaaggtgaatctatcaaacttgatcagccattaacaagtaatccaaatgtgggtggatttggtcagggggatgcggaaatagtacttcaagatccgttacgtgtccaaggtctcttgttcttcttcgcatctattattntagcacanatctttttagttcttaagatgaaacaatttgagatggttcaattgtccgaaatgaatntctagtcccgcatatttatcaacatattaaactcataaaaataactcaacttttntggtgataaattatgtaattctattca

SEQ ID NO: 214007 - DNA, 515 bp, Glycine max
tgcagatcttcgtgaaaactttgaccggtaagaccatcacccttgaggtggagtcctccgacaccatcgataacgtgaaagctaagattcaagacaaggaagggatcccacctgaccagcagagacttatctttgcgggtaaacagcttgaggatggtcgaacccttgccgactacaacatccaaaaggaatccactctccacctcgtgcttcgcctcaggggtggcatgcaaatctttgtcaagactttgactggcaagaccatcaccctcgaggtcgaatcctcggacaccattgataatgtcaaggccaagatccaggacaaggagggtatccctccagatcagcagaggttgatatttgctggtaaacaacttgaggatggaagaacccttgctgattacaatattcagaaggagtctaccttacacttggttcttcgtttaagaggtggcatgcagattttcgtcaagactttgacgggaaagaccatcaccttggaggttgagagttca

SEQ ID NO: 214008 - DNA, 512 bp, Glycine max
cacgaggagatgcgggcggccccgccgccgaagccgaaggagaaggcggaggaccggtaccgcgacgacgaggacgacgatcccatggagagctttctgatggcgaagaaggatttagggttaactctcgcgtcggacgcgctgcacgctgggtatgattccgatgaggaggtttatgctgccgcgaaagctgtagacgctggtatgattgagtatgattccgatgataaccctattgttattgacaagaagaagattgaacccattcctgctcttgatcactcttccattgattacgagcccttcactaaggatttttatgaggagacaccttcaatatcaggtatgagtgagcaggatgtaagtgaatacaggaagagtttggctattcgtgtatcaggttttgatgttcccaagccaataaaggcatttgaggactgtgggttttcttcacagattatgaatgctattaaaaaacatggatatgagaagccgacaactatacaatgtca

SEQ ID NO: 214009 - DNA, 486 bp, Glycine max
gaatcgaacaaacctcaaacctttctacttcttggaagttaaaatcatataggtgattgaaaactggtgcattatttatacagacataatcaactcttgacttgacctaaatataggaacattgatacatttggcagtgggtgtcattcaatgtgacaactatctatcccaacctgatggtctccgcctttctttaggtttagaactgttcgtgctcttctgaccaggatttactccataaccttgactggtggaaattaccgctgatgtagcaggattgggtgaagcagtactctgataagtatttatgtcaccaccaattgatccaccggatacaaaaccagggagtgctgttctcttattagcagtcatgcttgtattgttaccaaagccttgattctgagagtttgatgaagcagcaacaaagttactcttgaattgtgacatcattcctgttcgcagagaatttacagcggcagatcgact

SEQ ID NO: 214010 - DNA, 403 bp, Glycine max
ggctattggctctacctggtgacaactactctagcgacttgactacatctgatgagagagtgcaaggcccagatcatgatggatgtgatcctaagattggggcgattgatggacatggcggttctatgatgcgactatatgaagctagtcgccgtaaacgagcacatgatttggaccgagtacgtgacgtacgtgttgatgaacgagagtgcttacaggcactggatgcatgagcatgtctccgtggaggatgagatgacgactatatggagagacatgctattgactgatctgaggcacatgatcatgggctagatcccatggatggcgactggagctgacgtcgatgtggagttcaccatagtgatcagatgacatgagattgctgaaccacatttgaaga

SEQ ID NO: 214011 - DNA, 495 bp, Glycine max
ggaaatcaatatatattattcctttcaaagaaacaatttacaaaaagaaaagggtgggtggaaaaaactgtatcttatatggcttgcaaaacaggataatcaatgttggattaactgattagaatgttgttgcaggcctaggccaccaacatggatggggtgggggaaataaaaaaataacttgcttaatttgttactaacccacataagcatgtactgtacttactctagagtctaaaatactcaatgcaaatgatttacaacctggaggttggatcaaatccattaccattagagacatgggctactttctcatccgcggcatcatcgataaacctcttccagaaccaatgctgcttccacactctctcggtcatctcttcgatggggacattcttagtctcgggcaacaggaaaagcacgaagacagacatgacgaggacccagccagagaagaacaagaagataccaaacttgaagtggcagagcatagag

SEQ ID NO: 214012 - DNA, 451 bp, Glycine max
gagatctcaaaggaaagcgtgtttattcagtactaaacagagttcaaaacattggccacaaagcacagatccaaaactcaaaaacagcaatttccgaagcagcttgaaaggcagcattatatcagttcctaactacgaatttcaattcttcttcacagtggcagcatttatgatgtccacgaactccggcttcagggaggcaccaccaaccaaaaatccatcaacatcgggctgtgcggccaattctttgcagtttcctccatttacagaacctccatagataattcttacagatgcagcaacttcggcactcacattgtcatgaacccatttcctcaaatcagcatggacctcttgagcctgagcaggagtagcaacctttcctgttccaatggcccaaactggctcgtaggccaaaacaacattggcccaatttgatattttagctgca

SEQ ID NO: 214013 - DNA, 532 bp, Glycine max
actgctaataggtagacattaaattttatatatggatatgatgcaattcatacttcagaagagtcttatgaaataattgaaaattaaaaatagaacacaagtgggctttttgaaacccagaaacaagaaatatccattcttaatcagaaacaaacttcaaaatgataaattaaaagaaaagtgattaaattggttgagatggtaatttcttatttgctaggaagtgtcgaaccaactgcagagcttgcttgggtgtgaaagtaggaacttgatgaccagcacctcttatggtaacaaaagtaagtccatcgtaagcaatggtccatcctcccacctgcttgctggtataccagggagtccaatcttcgacgatcccaagccccaactttctaagagtgtatcttgttgaagtcacgggaattcttccatcggtatctccactggtaacccaaatgcgaataccaccagcaataagcttcttgatgacaggaagcatggactgtggtgagtcattccaaaatgtgatattatc

SEQ ID NO: 214014 - DNA, 584 bp, Glycine max
gaaaagagaaaaagactgattaatgacattaatgaaaccggggtgaagcaacaaggcatgatagcccggttattgtcaaaatttctcagatgcagtgttaaacagacactccaacaggtccccgcccgcacattgtctatatcagctgatgaaacgaacacttcagaccagtcccacatacaaccatcccaagctgaagttctggttttaaatcttcaaactaagaagtactcctttccagagtacatggagaaaatgagcgaactaaaagttcttatcatgacaaattatggttttcatccctgtgaacttgaaaattgcaaactacccagctctgtatcaaacctgaaaagaatcagactagagcggatttctgttccccacgtaggggcattgaaaaatcttgaaaagttatccctctacatgtgtagtaacataagtcagatttttgaaaatggtaccatcccagtttcagattcatttccaaaactatcagatttgaacattgactattgcaaggatatggtggaattacctactgtgatctgtgatattaccccactaaagaagctcagtattactaa

SEQ ID NO: 214015 - DNA, 535 bp, Glycine max
agatgttgttaggctgtatcactcactcaatgaaggaaatactgacgaagctgaacagtttttcaaaacattatattcatttgtatatcttcaagggacatatcttaaaccacatgttgccattgtggatggaataacaatgggatgtggatctggaatttctctaccaggaatgttccgtgtggtaactgataaaactgtgatttctcacccagaagctcaaataggtttccacccagatgcaggagcttcttatgttttgtctcgtctacctggctacttaggggaatacttggcccttacaggagataagcttaatggtgtagaaatgattgcctgccgccttgctactcattattcactaaatgcaaggctctgtgtgctagaagaacgtcttggtaaactaatcacagacgaaccttctgttgtggagtcatccctcgcacagtatggtgatcttgtttatccagataggagcagtgtccttcacaggattgatactattgatagatgttacagtcacgaaactgtggag

SEQ ID NO: 214016 - DNA, 502 bp, Glycine max
  unsure (1)..(502): unsure at all n locations
atctctcaccaacttccgctacttcctactccaaccactttcttttttcccgcagtcatgggcaaggtcaagatcggaatcaacggatttggaagaattggccgtttggtggccagggtggctctgcagagagacgatgttgaactcgttgccgttaacgatcctttcattaccaccgattacatgacatacatgtttaaatacgacagtgttcacgggcactggaagcatcacgatgtcaccgttaaggatgagaagacccttctcttcggtgacaagccagtcactgtttttggacacaggaaccctgaagagatcccatggaagtcgactggagctgacatcattgatgagtccaccggagttttcaccgataaggataaggctgccgcacatttgaagggtggtgcaaagaaggttattatttctgcccccagtaaggatgcccgcatgtttgntggtggtgttaacgagcacgagtaccagccagagcttgacatta

SEQ ID NO: 214017 - DNA, 495 bp, Glycine max
aattaaaaggtccatgtaaccattagtttcgataaaccaccgaaacgtcattactggaatctgtcttaacatggacaagtatacgagaaccacgtggaaaaatagaggacggccaaatatctactataacaatcaataacgacaagtacattagcaaatatataaaaatccaaaaactccatcctcctccacaagaggcaaagtccaaaatagagctaatgctcctaacaaggtaaatccactggttccagaaaccgatttattcagacctctcattttttgcacgagcaagacactaaatcgcaactagacaagcacataatgtgtagacaagcaactttgcagtacaccaccttaaaaagacttcttggcaacgaatacaagcaggtcaatgacacgtgagctgtatccccactcgttgtcgtaccaagaaacaagcttcacaaagttcttattcaatgcaattccagcctttgcatcaaaaatacttgatct

SEQ ID NO: 214018 - DNA, 549 bp, Glycine max
  unsure (1)..(549): unsure at all n locations
ccgataagtacaccgcgctgggcgcgaagattccgaaagggtgtcttttggtgggcccaccgggaaccggaaagacccttctggcgagggctgtggcgggggaagctggggtgccgtttttctcgtgcgcggcttcggagttcgttgaactttttgtgggagttggtgcgtcgagggtgagagatttgtttgagaaggcgaaggggaaggcgccgtgcattgttttcattgatgagattgacgccgttgggaggcagagaggggcggtgctcggaggtgggaatgacgagagggaacagactattaaccagcttctgacggagatggatggcttttctggcaattctggtgttattgttttggctgccactaacagaccggatgttcttgattcggcgttgttgaggcctggccggttcgacaggcaagttactgtggatagacctgatgttgccggcagagttaaaattcttcaggtgcattctagaggaaaagcacttgcanaggatgttgacttttgaaaaattgcaggagaacccctggattcac

SEQ ID NO: 214019 - DNA, 477 bp, Glycine max
gaaagtgtaactcagccgtagaaccatattttttatttatttattgcgtaagctgctgtgctaattgttttttctccttgaatttgataaaataattattgattcttacagtgtacaagtcagagcgtattttatagtacaaacataattctgtgacttgcgtgtatgattatgcaacatataattcggcttttccatcaatgaatagactcatgaactcttcaccatccacagtttctttttctatgagaagttgagcaagcttgtgaaggatatcaatgtgagttgagataatatgtgttgccctagaatatgctctctctaccagttccctcacttccgcatccactacatccgcagttgccatggagtaatccttttgcgatgacatctgttgacccaagaatggatttccaccaggtccaccaatggcaacttgtccaatttttttgctgaatccaaatctctcaaccatct

SEQ ID NO: 214020 - DNA, 576 bp, Glycine max
  unsure (1)..(576): unsure at all n locations
cttaaacccaatcgaagaaaaataaaatgttgttccacaatccaccacataccgactgaaaaaaaaaaactcagtttgtgggtttattatactttgattgattaattaattattagttattagttagttggttaatcaatggaagagtgtcacacggtgttcggaaagtacgagatggggaggcttctcggcaaggggacgtttgccaaagtgtattacgggaagcaaataagcacgggcgagaacgtggcaatcaaagtgatcaacaaagagcaagtgagaaaagaaggaatgatggaacagatcaaacgtgaaatctccgtgatgcgtttggtgcgacacccaaacgtggtggaaatcaaggaagtgatggccacaaagacaaaaatcttcttcgtcatggaatacgtgcgtggcggngaactcttcgccaaaatctccaaaggcaaactcaaagaagatctcgcccgcaagtattttcagcagttaatcagtgccgttgattactgccacagcagaggagtatcccaccgtgatctcaaaccagagaatcttctcctcgacgaagacgaaaac

SEQ ID NO: 214021 - DNA, 523 bp, Glycine max
  unsure (1)..(523): unsure at all n locations
ccattccgaatgtagcagcagcacaatatatttaattgcagtttatgtacagcctcaccttcaaaaggtgcaaaaccctatctttccaaaaaatcaggcagggaataaagacgaaagcgacaaacccaaagcaaaagaaagaaaagtcgttagaacattaccgtttctagaaccctctccgtggactgtcacgctaattataattaattaatttatatagtactaacaacaacaacctgcttatgacactcctcaccgtgacaggcgggaacgttagcagcacacgtggcatccccttgccacgtccaaacaatgtccttcagcgcgggcctcacgtcctcctcacagaacttcgcgtattccaacgtgtcgccggcggacttcgaaaactcaacaacggcgacctccggcgccacctcgaacacctcagccgtgaccgccagcctccctttcctcccctccgncgcgccctgcagccggatcttgaagtccttaacctccgncacgcggaaactcagccccc

SEQ ID NO: 214022 - DNA, 484 bp, Glycine max
cactcaatacaaacagtaaattttgtatatctaaggacgacaagacatcattcctatgaccaaacaatgcttacatgaaaagaaaagaaaaggaaaaagagagaaaacaattaacttgccaagatatatgtggagaaaattacataaaaagagaaggctaggtattaaaatatttcactaggaccccaaaatgttgagaattggttggatcatgcacatatagatattctgttctgctgcaaaagggcatgtgaaactatgcagagcagcatccagactttttaacagctgagacatcatccctacttccaacattgatggtctgccccttaggcaaggctgcagggtcatctccgatctcaagagtcttcctgctaacaacgcgatatatctgagtgagcacttcggtgaaggcgttatcgacattcaaggactccagagcagatgtttccatgaagaacgtgttttctctctcgcaaacgcc

SEQ ID NO: 214023 - DNA, 477 bp, Glycine max
gccgagcttaaaccattttgttatatattgagacataatcaagtacacaactcatagcaaaaggtttattaagctgtaaaggtgcatttaaccataaacaaaaatagtctccaagactataaaaacattacattttagacaaattagtcttccacttcatcgtccgtcaacacctactgtaactgctggtgttgctgcctaacaagtatcatattcactgcaaacatcttagtaggagtagcttttgacgaacaactccttcttggcttcctcggattcaccctcaccagtgtacttcccaagctgagcgagtgagttggacttggcacggaatgcgagtgcatcttgtgctgccttcacgttctctgggcggcctccccatgtcttcaaggcagtgttttggagggctctggcatacgagaatgacacgtgccacgggtttggagattggttcatggcattcaaattgagggtagc

SEQ ID NO: 214024 - DNA, 612 bp, Glycine max
  unsure (1)..(612): unsure at all n locations
cagagacagcggctgccagataacagcaatgttgataaaataagggaatttataaggagtgtgtatgtggatggaagatatgctgggacgaagtcttcggaaaagcctccaagagatgcacagagtcctggaattcatgaagatgagattaggcgtgccagttcttatcattcatattctcaaagtcctccatatgattatcaatatgaggatcggcggtatggaaaacaagtagctgcactgaccaggaagcctggttcagataaagctcgctataaagggaagatgtctagtattatatacagtcctgaccgcttcagtgatcacgtgtatgatgacagatttgcaaatgagagatctggtccacgaatttccgacttttctgagtctagtggtggcgaacaattgaaatctgatgttcagtctcccaactttcataaggatatcaagattagcagtccatcctatcagcggcgttctggtacaagttcaagtgaagatgtgtggtcccaagcaaganatgcatctctggaaataatgccaatgccaagagagatgcagatggaattcgtcctccgcagagaactgcgttagcttaatcaacagacaaca

SEQ ID NO: 214025 - DNA, 559 bp, Glycine max
  unsure (1)..(559): unsure at all n locations
tcctcctctttttgttagccctactgcacacttgaacaacatggtgacccgccgtcagctctcagtgatagcctccattgtggctgttgccagcgcacaatgtcctgactatctcgactacgcggaagtaccgcatggcccttactcttcgggaagatacaatctttcgtatcaacgccctgaaccagcatgccggacattcaactcttccgttgtggaagacgcgattactcgcgtgaaaggagacatcgcagacccggatctgaggaggttgttcgagaacacataccccaacacccttgacacggccatcagatggaaaggcacagctgagggaagcgacgaggagttgacctttgtcatcacgggcgacatcaacgccatgtggctacgcgattccgcgaaccagatgcagtcttacctccctcttcttgaggcttcgtcttcctcggactccatcgcatcgctataccgcggtgtgatcaatcttcaggctcgctaccttctcacatctccatactgtaactcgttccagccgncagtggagtctggcattgag

SEQ ID NO: 214026 - DNA, 576 bp, Glycine max
  unsure (1)..(576): unsure at all n locations
cgatttctcgccccccccgccgtccttcgacaacctccgccgccgaaacttccgctcctccgcaggatccggcgcggcgtttcacggcatctcctccctcatcctccgcttccctcccaacttccagcgccagctaagcaccaaggcgcgccgcaactgcagcaacatcggcgtcgcgcaaatcgtcgccgcttcgtggtcgaacaacagcgacaactctccggccgccggggctccggcgccgcccgcggccaccgccacggacgccgctacggtgcctctccccgtcgtcgtcgccgccaacgaggacgtcgttgtctccgccgcggcagacgagaacggggctgtacagttaaacagtagttcttattcttcatttttgaaatccgatgcaagcaaaacgattcatgccgctgaaagactgggtaggggtattgagactgatggaattaccacccctgtggttaacacttctgcctactttnttaagaaaaccgctgatctcattgatttcaaggagaatccgcaagtgagttatgaatacgggcgctatggaaacccaacgacgtggttctg

SEQ ID NO: 214027 - DNA, 508 bp, Glycine max
ttccgcaacagagagtagaatagatggtctcaaaagtggcatagatgtgctaggcggtgatggtgatactgtgcgcggtggtggtcgcgtcgcgggtggaggaggcggcgaacccgatacgaatggtggcggtggtggaggcggaggtggttcgggtgatagggcagtgccggcgcgcgctgaagtttgctaggttcatgagcaggttcgggaagagttaccgaagcgaggaagagatgagggagaggtacgagatattctcgcaaaacctcaggttcatccgctcccacaacatgaaccgcttgccctacactctctctgttaatcattttgctgattggacttgcgaggagttcagaagacacagactaggcgcttgccaaaattgctctgccactcttaacggcaaccacaagctcactgatgctggtcttcctcccacgaaagactggaagaaagaaggaatagtgagtgatgttaaagatcaaggcagctgctgatcatgctg

SEQ ID NO: 214028 - DNA, 534 bp, Glycine max
acaatacaatacaatatgtaactatgaactatcaatatatgatcgttatttatgtctgtgatacacacaattcaggccatgatattcttacgtgatttacagcaacttctaacttatttaatacatcataccaacccaactaggagcaattttcattatacaatgacacttatctttaaactctgaagcatgacaaggtggtagtcaccagggaccatattcttatgcaatttatgccacaactggataagacgcacaagttgcaacaccacacatgttcttccccaattccattttgaagtagccattctcaccccaactttctccccatgaattttttatgagccaatatgggacgccattttcaactccataccccacagcaaggacggcatggttcacatcctgggaagtgctaccgcaaatgtcactagtgtaaactccattctcgtagaaatggaacccattcaccacctgaaaggccacactaaccggccgaacaaaatgcaactgcatgtttaatcattctcagca

SEQ ID NO: 214029 - DNA, 543 bp, Glycine max
  unsure (1)..(543): unsure at all n locations
aaggttgctgtaggagataagattgcagtagtgctaagtgctaacacctgcagtgaacaatggcctctgcatcagcatctctgctcaagtcttcacttgttcttgacaagtctgagtgggtgaagggacaaacccttcgccaaccttctgcatcagttgtgagatgcaaccccaccaccccatcaggcctcaccatcagagctggttcctatgctgatgagctcgttaagaccgcgaaaacagtggcttcaccagggaggggtattttggccatggatgagtccaatgctacctgtgggaagcgtttggcttcaattgggctagagaacactgaagctaaccgccaggcataccgtaccctcctcgtgacagttccaggccttggtcagtacatctctggtgccattctctttgaggaaacactctaccaatccacaactgatggcaggaagattgttgacgtgctgcttgagcaaaacattgntcctggtattaaagtcgacaagggtttggtgccccttgcaggttccaacgacgagtcat

SEQ ID NO: 214030 - DNA, 529 bp, Glycine max
gattgccgagcttaaaccattttgttatatattgagacataatcaagtacacaactcatagcaaaaggtttattaagctgtaaaggtgcatttaaccataaacaaaaatagtctccaagactataaaaacattacattttagacaaattagtcttccacttcatcgtccgtcaacacctactgtaactgctggtgttgctgcctaacaagtatcatattcactgcaaacatcttagtaggagtagcttttgacgaacaactccttcttggcttcctcggattcaccctcaccagtgtacttcccaagctgagcgagtgagttggacttggcacggaatgcgagtgcatcttgtgctgccttcacgttctctgggcggcctccccatgtcttcaaggcagtgttttggagggctctggcatacgagaatgacacgtgccacgggtttggagattggttcatggcattcaaattgagggtagcttcaacctcagactgtccaccagacaaaaacataattccagggacagc

SEQ ID NO: 214031 - DNA, 505 bp, Glycine max
aaaacataaatacttcagactccagtaactggaccataatataaggtactacacttattagaactgaaacgtaacatggcaagcaatatttagttcataatcactacgaatttgttcatagccttgttactggagaacaaggcattcatgtgaaccagccaccatggcatgctgtgcgtttgggctaacggcatcaacttcctcaagacgttgaggcttgacattcatctcaaccgatgatgtaatggcttgaaaaacaagagcagtgacttctagaagcctctcttcagagagggaaacctcagcaagaagcctccaagcattggcttcagatgcctcctcatagtccttcttcctcttcagcaccatgtgcccactaatttcccacacagcaggattcacttgggtctccagaagctcaggactcacttctccaagggcttgtttctctgcatagcactgtggtaagagaaatatttgccttccacaatctgaaataagtaca

SEQ ID NO: 214032 - DNA, 530 bp, Glycine max
atatgactctggtgttatttttgattttgcaaattaaattacacaatcacagccgtacatcacacatgagttgggcctcttccaacttaaaagcagaggataacattggcccatgacgcgacacatgcaccacctaataatcataattttacatctttacatacaaaatacaaagactttaaattttaaaaagaagaaaagagataaacagatcatcttaatgaaatgaaaccaaaacccacaaacattggcttgatttttgttgttgttgttgttcccaacttgattaagcatgaaccgtttgattgaatcacttggacttgaagggaatggccctgattacgacctggtggtagagtgctgcaagagctgcaccgatgaatggtcccacccagaagatccagtgttcatcccaaccaaggtccttggtgaagatgatagcagcaccaagactacgagcagggttgataccagttcccgtgatggggatggttgcaagtgaaccaagaacacagcgaacccaattggca

SEQ ID NO: 214033 - DNA, 511 bp, Glycine max
acgttctattatatatatatctatctatattctatatatagatatattgtttaggttatcaagtattaatctgaaataaataagaattgctgcttctaatacttataataattactacaaattctaataattactacaaaagggatatatgttagataaaatagattaattaatctatttcacaaaaaaataatgtatccatagcacagtttcgtcttataatacctcgggtgctaatgaaactattttagtgaaatttaactgtctcaattcccgggcgattgcacaaaagattcgagttccttttggatttccttcttgatcaatgacaactgcagcattatcatcatactgaattattataccgttgctacgtttgagttctttacaagtacgtacaattacagctctgatcacttctgatctttctaagttcgtatttggtactgcttgtttgattacagcaacaacaatgtcaccaatataagcatatcgtcgattactagctcct

SEQ ID NO: 214034 - DNA, 539 bp, Glycine max
  unsure (1)..(539): unsure at all n locations
ccgtatttcatatgcttgtgaggacaaaagttctttgaaaagtatgtatagtccagtgcttggttaccttgacaaagtgaaggataaattacgaaatcctgaggattaccaggaatttttgaagtgcctaaatatctacagcaaggaaataattgcccgacacgagttgcaatcattggtgggcaatttactgggaaaacatgcagatcttatggagggatttgatgaatttttggctcaatgtgagaagaatgaaggattccttgctggtctcctgaaaaaaagacacggaccaaaaccagtgaaggtagaggacagggatcaagatcgtgatagggatgacgggatgaaagaaagggatcgtgaatgccgagatagggacaaagcaactgctaacaaggatgtttcagttcctaagacgtttctatataccagcaaggataagtatgcagcgaaacctattagtgagctggatctttctaactgtgaacaatgcacttcccagtaccgncttctaccgaaaataacccataccacca

SEQ ID NO: 214035 - DNA, 504 bp, Glycine max
  unsure (1)..(504): unsure at all n locations
gaagaaggcacagttacaaactatactttccacaaatacaagtctggctacattcatcactgtcttattgaaggccttgagtatgagactaaatactactatagaattggaagtggtgattcttctcgagaattttggttcagaacacctcccaaagttgatccagattctccctacaaatttgggatcattggtgatttggggcaaacgtttaattctctttccacccttgagcattatatacaaagtggagcgcagactgtcttatttgttggagatctttcttatgctgataggtaccagtacaatgatgctggtttacggtgggatacatggggacgatttgttgaaaggagtacagcatatcatccatggctatggtctgctggaaatcacgaaatagactatatgccttacatgggagaaggttgatcctttcaacactatctttaccgatatactacttcctacttgggctncaatagctcagtcctctctggtatg

SEQ ID NO: 214036 - DNA, 479 bp, Glycine max
caaagattttgagaatgtctagctgtgggtgtggaagcagctgcaactgtggcagcaactgcagttgcaacaagtactcttttgactacgttgagaagatcacaaatgagactctagttttgggtgttgggccggtgaaggcccaattcgagggtgctgaaatgggtgttgcagctgagaacggtggctgcaactgtggatcaaactgcacttgcgacccatgcagctgcaagtgagatcaacatgcataaccttcaagcagagatagctgtgatacatgtatcaataaataataagtatgtgttgtgtttgaagttttagaataaagtggtcatggcccgcctttgcaaattcaaatgttctaggatttgttacgggtgttttaagctgtggttgctttgtgtttggttggtctcttataaatatgtaatttgaatcgtcaatctctgcttataaatggaatactattggtgttatgt

SEQ ID NO: 214037 - DNA, 563 bp, Glycine max
  unsure (1)..(563): unsure at all n locations
gctgctcaaggtacacgcacccacacccacacccacatctgcctctgctcaactgcaatggcgctgcagtgtaagtgtggcacccaccactctggcgtttcccaattcctactccatttctgcggaaagaggaagaagagaatggaattggagggtgaaatgcagcagcagcagtgcggagattgagaaaggggctgcgagttttgggcccgggagcccagtgagagcaaccaacattctggtggttggagcgactggaaccctgggaaggcagattgtgcgacgggcactcgacgaaggctacgacgttaggtgtctggtcaggcccaggcccgctcctgccgacttccttcgcgattggggagcaacagttgtgaatgctgacctcagtaaaccagaaaccattcctgctaccttggtcggcatacacactgtcattgactgtgccactggccgtcccgaggagcccatcnaaaccgttgactgggaaggtaaagtggctcttatacaatgntgccaggcaatgggaattcagaaatatgtcttctactccatccataact

SEQ ID NO: 214038 - DNA, 388 bp, Glycine max
gtcgccatgaaccccatcaacaccgtcttcgatgccaagaggttgattggtcgtagattcagtgattcctctgttcagagtgatatcaaattgtggcctttcaaggtcattcctggtgctgctgacaagccaatgatcgtgggtaactacaagggtgaagagaagcaatttgccgcagaagaaatctttttcatggtgctcatcaagatgcgtgagattgctgaggcttacctaggctccacagtgaagaatgctggtgacaccgtccctgcttacttcaatgattctcagcgtcaagctaccaaagacgctggtgtcattgctgctctaaatgtgatgcgaattatcaatgagcctactgcagctgccattgcttatggtctttgat

SEQ ID NO: 214039 - DNA, 335 bp, Glycine max
aggaaaaaacttacatcattaatctctgctgttttagtactaaaaacattttcggggaaaaaaggcatgattcagggatccaaaactgacgattttcctccaaattctcagaaaatgaagcaacattcgataactgcaacaaaatcaacggttgcgacaaagggagagggttttgtttctcttccagggtgccctgcgtgatggacgatttttgtgggagagatgtcctctgccacgtaaacccctattgcttttcccagcaaaagtgaggccccgcagttccctgtgtttatggactggattgcagagccaggtgattcttggatcatttctta

SEQ ID NO: 214040 - DNA, 469 bp, Glycine max
ggactggtttggccaatagattactgagtaagggcaacgatattctgtgttgcgattatgctagttttgatggtttgattaccaagcaagttatgagcaagatggcagaaatgataaacagtctttgtggtggtgatgaaaaattgatgcgtgaaaggacacacctgcttggcttgttgttcaagaatggcaatttgtaagaaagatgtttggagagttgaatgtggaatcccttctggatttccgctcacagttatttgtaatagcatttttaatgagatgctcattagatatagctatgaaaaattactgcgccaggctaaagctccaagtatgtttttacaatccttcaaaaattttgtttctctgtgtgtgtatggcgatgataacttaattagtgttcatgaatatgtcaagccttactttagtggttctaaaatgaaaagctttcttacttgtcataatatca

SEQ ID NO: 214041 - DNA, 449 bp, Glycine max
aaacacactcattgcacatagtaatgcgctttatttaagtgaataaaatattacatactagttcacaaatgcaaaaggacactcatcaaccagatatttgagactcttacagttctcaagaagtcgcgtcagcatagggttagtggcgttagaactcagaatttcattcttaacgccaaaaagaacagccagtaaagctactggaaaaggatcaactctagtaagaaaaacaattttcttacctctcccaagtgctgtgcgaatccttttgttgatatctgaggagcgattgttaactgcagaactaatccaagcagtggtgggtaaaccaccacgtccactaccacatgtaacatttacaacgacagcttctgaaggtaattgacttacaggataaagacaattcacaaaaattggtaaccaagaatccactggaaaatttccatcaa

SEQ ID NO: 214042 - DNA, 396 bp, Glycine max
ttgagaactaagaaggagaagcaaatggcttcctcaatgatctcttgcccagctgttaccactgtcaaccgtgccggtgccggcatggttgctccattcactggcctcaagtccatggctggcttccccaccaggaataccaacaatgacattacctccattgctagcaacggtggaagagtgcactgcatgcacgtgtggccaccagttggcaagaagaagcttgagactctttcctacctgccagaccttgatgatgcacaattggcaaaggaagtagaataccttcttacgaagggatggattccttgcttggaattcgagttggagcacggtttcgtgtaccgtgagcacaacaggtcaccaggatactacgatggacgctactggaccatg

SEQ ID NO: 214043 - DNA, 428 bp, Glycine max
attcattagttctcatccattaatttccattgaagtccgaaaacagaaaccaaaaatacaggatgatgaaatctcaaaaagcaaaaacaaatgggaatgtagtttaagtacaaacaaacaaagtgggggggcggctacaaatgctttgcaaatttttcacacttaaaagcctgggggcttgtaggcgatgaacctgatgcactgcacttggcgaacgttgtcgaatccgatgatacggatgaagccgttggggtatgcagtcttagcctcttgaagctccttcaacacctgagaagcattagtgcaaccaaacataggcagcttccacatggtccagaagcgtccatcgtagtatcctggtgacctgttgtgctcacggtacacgaaaccgggctccaacttgaattccaagcaaggaatccatccct

SEQ ID NO: 214044 - DNA, 503 bp, Glycine max
  unsure (1)..(503): unsure at all n locations
tgagaatacaggtatagcattggcctgtgctatgaatagttcttttagggggcgtgccagttctgatatttacaccatctgctctcaagactgtgaattatggaatcctgcttgcacaaaagcaatgactatgtcatttaatccaaacccgtgttctgatgcatggagtttggaatttctgaagcgtaccggatttcattgtgatatcatttgtgtcactggatggactgccactccaatgcaggatgttcaggttacaattgattggtttatttcctctcaggaatgtgttcccaggacttattgtgttttaaatccacaaaatccttttgtgttgaataggtggatggggaaactgactttcccccagggcacttcccgaagtgttaagagaatgcctctatctatagggggaggagctggtgcaaagaatgctattctcatgaatatgccaaatgctgntctttcaatgtggagatatcttgctggagatctcgtctttg

SEQ ID NO: 214045 - DNA, 434 bp, Glycine max
gtaaaagatgccttgtttgaaacttcattgaaaaacaaattaaaggaatggcttttggaacgaattatcttaggcagcaagagtactgaatatgatgcgcaagggcaagctgcaattcatttgtgtgcaatgctgggatataattgggcaatttccttatttacatggtcgggcttgtcgctggatttccgtgacaaatttggatggactgctcttcattgggcagcatattatggaatagagaaaatggttgcaactttgctatcttgtggggcaaggccaaacttggtcacagatccaactcctcaatatccaggtggatgtactgctgctgatcttgcttatgtgaaaggatgtgatggcttagctgcatacctttctgagaagtctctggttgagcagttcaatgacatgagcttggctgaaatatcagt

SEQ ID NO: 214046 - DNA, 572 bp, Glycine max
ggaaaaagttgtattgaaattttcacaagatgaatttcttacagcttggtcaacgcaggtgcgggctgcaacaactctgttggctgatgggtgtccatatttgtatgctatggtgcatgatagttcagtgtctacaataccaggtgattttgtcattggtgttaagttgacaaccataaacaatatgtgtgcatatgggctcaatcctggtatttcaggttctcgtcttttgggcaccattcctcagtctatttcacagcaaactgtttggaatcaaatggcaacagtgagaacaccattgaattttgattctagcaagcagagcttttgtcaattttctattgaccttctcggtggaggaattttagtggacaaaactggagattggatcacacttatacaaaattctccaattagtaacttgttgagagttgctgcttggagaaaggctgttaatggtaaaaatgtgatgctgggaatgcacagtcaaaggagtgattggcctcattgtacagtgtttttacaacagaacagtcaagcatttgtgctgtagtgacaaatcgacccattct

SEQ ID NO: 214047 - DNA, 339 bp, Glycine max
tggatttgagggtaataccgttatcattgtcattgcagctactaacagggttgacattcttgattctgcattgttaaggccgggacgatttgataggcaggtcacggttgatgttccagatatacgaggaaggactgaaattttaaaggttcatggtagcaataaaaagtttgaagctgatgtttcacttgaggtaattgctatgagaacacctggttttagtggagcagatctggcaaacctgctgaacgaagctgctatattagctggtcgtcgaggaaagacagcaatttcttccagagagattgacgattccattgataggattggggctggaat

SEQ ID NO: 214048 - DNA, 393 bp, Glycine max
cttctttttaacccccttaaatgaaaaaaggggttccccgacttggatagggaactatgcgagtgacctacctaatcttattgtagaaattttcaggatcaatgattagaccatgcaaactagaaatgctttttcttgtataaaggaagggattactcgatccatttccatatcgatcatgatatatataataattcgagcacccatttcaaacgcatatccaatttttgcacagcagggttatgaaaatccccgagaagcaaccggtcgtattgtctgtgccaattgccatttagctaataagcccgtggatattgaggttgcacaagcgggactttctgatactgtatttgaagcagatgttcgattccttatgatatgcaagtgaaacac

SEQ ID NO: 214049 - DNA, 499 bp, Glycine max
acaagttaattgaagaaattcaatttgtttaatcaaattccccaaccccctctctttttatttgttcactacgtattatatgcaataaaatattatatggcagaaatattctaagttggaaaaaatagaaactaagatataggatttttcaggaaggggttaaaaaagattattttattgatatttttagaatatttctatttcgacacaaacaagaaggaataggaatcggactctaggaaaagacaaaaaatcccccctagagtaccttttccatattttaattgattttgtttcaaattatctatctatatagatatctattttatgtttagtatcgaatccaattttattgtattttacaatcgaaatttctataatagaactctctattatagaaaaatgaaatctgaaaaaaacagtgtcataaccataatattcgaatttattggggggttgaaaaaacaaagtcaaatagtcttcctgacaatatccatac

SEQ ID NO: 214050 - DNA, 514 bp, Glycine max
aattcccggatctactgcatctttgcaatttataaagatagcagattgtgattggctcaagagaaactttaagcagatgtctaatgttttgtgggtggctcctgaggataaggcgagtttatggtcacaacttcattatgtctcgtgtaataatctggaaatgcaagaagcttatcttgtcaatctcgtaaatgtgttacgagaattgtatttgcacagtccagaggaagctcgccaattgagaaggaaagctctctctcgtattgaatggctgcaaaaagctgatgtgcctaccatagcacagattgtagagctccattcgatgcacaggatgatgaatgctcctgattcaaatgataatattgatctactgttgagcattgatttgttgggtttacaaggagcaggtaaagcttttccaaacaagattgtttttgatgataagcttgtgttggctaacacacaagaattctttgatggaaattctccagtggattcttgctaccaatttttg

SEQ ID NO: 214051 - DNA, 522 bp, Glycine max
cgatcacgcagaagacgaacttccatgtcgaagacctgaacctgttccctatcgacaatggccacaagaacaaggcgcataagctcaatgctggatatcatgagtgggacttcagcttcaagctgccgtccaacttggatcagagcgttgaggggctccccaccaattgggtcgtctacaacatcaaagcatctgtagatcgcggctacatgagcaaggcgctctctgcctcaacgcacattcgtgtgattcgtaccctgggacgcgatatgctggagtcaatgccgatggagcagatcaacgaagatatttgggcgaataaattggcctataagattactgttccccagaagaactacatcgtgggaacacacatcaaggccgacttcgtgctgataccactaagaaaaggtgtggagatcgcgacgatcaagatggaactcatcgagtcgcgccaactcttcgctgattatgcgggccggcgcatcagccaccagcaagacgtccatgttgctgtcaccg

SEQ ID NO: 214052 - DNA, 464 bp, Glycine max
ctcggccgagccactgcggctctgtgcatagaagggtgtgtttgcaccgctgcccaccatgctgtggtagccgcctggtgtcatgaagcccgaaggatcgatatcgttgtacaattcatcgagctgatgcagtccataggttggtggagcattctggttgacctcatcttgtaccgcttgctggttgagcatatgttggtcgataagaacactttggtcctctgcagggggcatatttggcgagatgaacaggtgaacgtggttcttgacgagaagttgactggtgtggccttcaggattcttcagattgacgtatagccttaatttatgcgacaagcgaatgttctctgtgtcaacggactggcggcagttcttgagagatttcggcagttcgagcgtcatggcaaagcgatgcgactcgtcgaaaagctcgtctccgttctcaacaccatcgggcacccgtt

SEQ ID NO: 214053 - DNA, 566 bp, Glycine max
  unsure (1)..(566): unsure at all n locations
agccacttcacactcactcactcttgttgccttcatggccaagccagtgtccattgaggtatggaacccaagtggcaaatacagagttgtcagcaccaaaccaatgcctggaactcgttggatcaatcttctcattcaaaatgatgttcgccttgaaatatgtaccgagaagaaaacgattttgtcagttgaagacatcattgctttgattggtgataagtgcgatggagttattggacagttgactgaagactggggagaagagttgttctctgctttgagcaaagcgggaggcaaagctttcagtaacatggctgttggttataacaacgtggatgttgatgctgcaaacaagtatggtgttgctgttggaaatactcctggagtgctcactgagacaacagcagagttggcagcttcactaactttggcagctgctagaaggatagttgaggcagatgagttcatgagagcaggattatatgatggatggctacctcatctatttngtggaaacttgctcaaggggcaaaacagtggtgtaattggagctggtcgaattgatc

SEQ ID NO: 214054 - DNA, 517 bp, Glycine max
ctccgcagcagccacacttcttcgccgtttcagctgaagagccatccgcaggtaagcaatggttaagcataataatgttatccccaatgggcacttccggaaacactggcaaaactatgtgaagacttggtttaatcaaccagcccgaaagaccagaagacggttggctcggcagaagaaggctgtcaagattttccccaggcctactgctggatctctcaggcctattgttcatggccagactctgaaatacaacatgaaagtcagagccgggagaggattttcactggaagaattgaaggctgcaggaattcccaagaaacttgctccaactattgggatttctgttgatcaccgcagaaagaatcgttctttggagagtctgcaggccaatgtgcagaggctcaaaacctacaaggctaagttggttgtgttcccaagaagggcacacatggtcaaggctggtgattctagccttgaagagctggcaaatgccactcaagtccagggtccattc

SEQ ID NO: 214055 - DNA, 558 bp, Glycine max
cgcattggtgtttgcaccggaattttccgcactgatggtattcctgaataggacattgtcaagcttgttgacaccttccctggccaatccattgatttctttggtgcactgagggccagagtatatgatgatgaagtgaggaagtggatttctggtgttggtgttgacagagtagggaagaagcttgtgaactcaaaaaatggacctccaacctttgagcagcccaagatgactctggagaagctcttgctgtatggtgacatgcttgtgcaagaacaagagaatgtcatgagagtccaattggctgacaagtacttgaacgaggctgctcttggaaatgctaacgaggatgctattcagaggggaactttcttccagtcttgaattggaggcaaagcaaacttggcaaggaaatatttctgttcgcgaaggttgtttgactaatccaagtgctataagttgagatggaacttgcgtagaacattcttagcattctcaatgtcttaggtgcaaagagaagatgctaagcttgagatgatctactatattttcatattg

SEQ ID NO: 214056 - DNA, 447 bp, Glycine max
gttactgttgaatcgaatggattgggattttgttgatctgaaatacgcatttgacatggctagcgcgattgtttatgactcttacttctaaggtgaccaactagccaatatgaccaccgacgacgtagtcagaccttatcgttgttctagcaactagattcttattctcacacgaagaggtgcagatgaccaatttaggaataggagttgtcactggcagaatgaatgtataatatgagaggattcatctcaatgagcagatgcgctacctcgatggcagacattggggagatattggtaatgaaccgaccagacagatgaagggaatgagtgttgtgctaaagacttatactcgacagacaatctttctacctggtgttgagcttgttgatcctgacatgataaaacccggcgatctagttggtggtaacaaggatagttacttaa

SEQ ID NO: 214057 - DNA, 474 bp, Glycine max
gtgagatgcaaccccaccaccccatcaggcctcaccatcagagctggttcctatgctgatgagctcgttaagaccgcgaaaacagtggcttcaccagggaggggtattttggccatggatgagtccaatgctacctgtgggaagcgtttggcttcaattgggctagagaacactgaagctaaccgccaggcataccgtaccctcctcgtgacagttccaggccttggtcagtacatctctggtgccattctctttgaggaaacactctaccaatccacaactgatggcaggaagattgttgacgtgctgcttgagcaaaacattgttcctggtattaaagtcgacaagggtttggtgccccttgcaggttccaacgacgagtcatggtgccaaggtttggatggtctagcctctcgctcagctgcatactacgagcaaggtgcccgtttcgccaatggcgtactgttgtgagca

SEQ ID NO: 214058 - DNA, 535 bp, Glycine max
cttcgccgccgtggccaccgccgcgatggcggtggccgcgtccgacgccgacgacatcctgatccgtcaggtggtgccagatgttggcgaagccgaagaggaggacaacctgctgaacgccgagcaccacttcgcgagcttcaaggccaagttcgccaagacctacgccaccaaggaggagcacgatcatcgcttcggcgtcttcaagtccaacctccgcagagccaggctgcacgccaagctcgacccctccgccgtccacggcgtcaccaaattctccgatctaactccggccgagttccgccgccagttcctcggcctcaagccgctccgctttccggcgcacgcccagaaggcgcccatcctccccaccaaggatctccccaaggatttcgattggcgagacaaaggagccgtcactaacgtcaaggaccaacgggcgtgtgggtcgtgttggtctttcagtacgacgggagcgttggaaggagctcattatctggccactggtgagctcgtgagccttagcgagcaacag

SEQ ID NO: 214059 - DNA, 343 bp, Glycine max
aaaaaaaaaaaaaaaaaaataaaaaaaaaaaaaaaaaaaaaaaaagaaaaaacggaatctttttaaatttaaaaatactacttttaggggacaaaaagtaaatcggggtccccattttatgaaaaactttccttccatttttggccctctagaaggcctagtttttccggaaatcgcaagggcttctttatttttttacggtaaaaaaaacaaaattttttgcatccgaaaaccaaatgcaaattctggggctttttattccccaattatatatcctaaattcaaaaaaaggagagtgaggtgtttattttttcgctcaaacaaggtcctgattttttttatg

SEQ ID NO: 214060 - DNA, 348 bp, Glycine max
tttagagagatagagagaggaagaaagaatggcagcttgcactgtctactcaacacaatctctgagcacaaattgctccatctcaaccccatcaaagacgcaactcagttttttccaccaaaagcaggtagttttctggaggaacagcaagaagggcagctgcagcagcagaagaagctatgtgataacatgtgctgcaggtgactcacagacagtggtgattggcctggctgcagactcagggtgtgggaagagcaccttcatgaggaggctgaccagggtgtttggaggagcagcatagccaccaaaggggtggcaaccgtgactgcaacactctcatcagagaca

SEQ ID NO: 214061 - DNA, 415 bp, Glycine max
agagaaagagaagccaattattggctcaatcttggatcaacataactgaatctcagcctcgctttttcttctcggataagtacatacatacatagggtttttttcattaattatcatgcagaacagcctaataacaattgacaaaataacatgaaatagagtggaattgtggaaaacatgaaagaagaaagaaaatgatgattttgatgatgagagaactcaatttggctgcgttgctcgatcgatatatgtatatatattatgggaggttcaattcctaagcttttgcagctactggagtctcagccttgctggctattagctgctcatatagatctcttatcttcaaaccaactatggtttggaaagagacctgttccattgttgctgccgggaaaatcagcatgcttcaaca

SEQ ID NO: 214062 - DNA, 509 bp, Glycine max
  unsure (1)..(509): unsure at all n locations
atttgttgatttttttttaggttaaatttcttgtgactgtattaaaaaatgatttcgtggaactggtgattttttgtagacgaagaataacttgaatttattattttacttgcattgttaattttatcaagggtggacatactctagttggaagtggtaaattactcgctaacagggaaggggagttgaacaagaaacagcagtgcctggcgaagaagagaaagaaaacaatcatgagcttcattctgtttccgattctctttgcatttacctttctgtcctcgcccgttctctctgcttcggatctggtcctcgccaaggttgaccgtcgcattgatctgacttcacagattgtgcgcatcactacttcactaaaggtgcagaatacgggatctgatgttgtgtctgagattttgctgtcctttcctgagaaccaggcangtaacttggcatacttgaaggcaacacttggtgatgggaagggaaaatcaaaaccatcttctggtgtg

SEQ ID NO: 214063 - DNA, 547 bp, Glycine max
gcagcacagaagagggaaaacggcaccgccgccgtagaagaaaacaaccatggtgcacgtctccttttacaggaactatgggaagacattcaagaagccgcgtcgtccgtacgagaaggagcgtctcgacgcggagttgaagctggttggtgagtacgggcttcggtgcaagagagagctgtggagggtgcagtacgcgctcagccgcatccgcaacaacgcgcggaacctcctcaccctcgacgagaagaacccgcgccggatcttcgagggagaggcgctgctccgaaggatgttccgttacggtctcctcgatgagacacagaacaagcttgattacgtcctcgccctcaccgtcgagaactttctcgagcgccgcctccagacccttgttttcaagtgcggcatggccaagtgcatccaccatgctagggttcttatcaagcagagacatatcatggttggtaggcaagtggtgaacatcccatctttcttgggtagggttgactcacagaagcacattgacttttcacttacagtccccttg

SEQ ID NO: 214064 - DNA, 506 bp, Glycine max
  unsure (1)..(506): unsure at all n locations
ctcggacaccattgataatgtcaaggccaagatccaggacaaggagggtatccctccagatcagcagaggttgatatttgctggtaaacaacttgaggatggaagaacccttgctgattacaatattcagaaggagtctaccttacacttggttcttcgtttaagaggtggcatgcagattttcgtcaagactttgacgggaaagaccatcaccttggaggtggagagttcagataccatagacaatgtgaaagccaagattcaagataaggagggtatccccccagaccagcagaggcttatctttgctggtaaacagcttgaagatggacgaacccttgcagattataacatccagaaggaatctaccctgcacttggttttgaggcttcgtggtggcatgcaaatctttgttaagactttgaccggaaaaacaataactntagaaagttgaagttctgataccatcgataacgtgaaggcaaagatacaggacaaagagggga

SEQ ID NO: 214065 - DNA, 500 bp, Glycine max
catcatcaccatttcacctatttttctctctctctctctctctctctcgcatcacaatttcatcaaaaccttttaagtcttcatagttttccttctttctttctttgtgaaaaaacaaaaagtccaaaccatggctcagaaaaccgagaaagaagaaaccgacttcaaggttcccgaaacgattacgctttgcgttaacaactgcggcgtcaccggaaaccctgctaccaataacatgtgtcagaagtgcttcaccgcctttaccacctctaccgacaccacgtacggcgccggaggtgccggaatagcttctccggctaccagatccggcatctgcgcgcgtgcactgaagagatcttttaccgaggagccctcgccgccggcggatcctgcgtcttcagaccagacgaccccgtcagaggcgaagcgcgtggtgaaccgctgctccggctgcaggaggaaggtccgactcaccggatttcggtgccgatgcggtgagc

SEQ ID NO: 214066 - DNA, 512 bp, Glycine max
  unsure (1)..(512): unsure at all n locations
ttcttccttctccttctcttctctgcttctcttttcatctccgaaaacaatgaagctcattagcagcattaaccccaaaaatctcaaactcagtcccaaacgcttctttcgcaaaaaggaacgatctttagtctcacgctccgacccaccttcattcggatccggatcttcctccgacgactccaccacaaatcacaagccttccgccggtaaccaaactccgaccagcgtcctcccgggcgtctacggagactggtccgacgtcgccgccgtcgacgtgcggtgggacctcgcccaggcctttcgcctcatcgaccgcgacaacgacggcgtcgtcacgcgccaggacctcgaggcccttctcacgtgcctcggcgcgtcgccgtgccccgacgacgtggcggtcatgctcggcgaggtcgacggcgacngcatcaccgtagaaaggctcatgagctacgtcgggtccggtctgaaaccccggtccgatccggacgagctcaaggaggcgt

SEQ ID NO: 214067 - DNA, 538 bp, Glycine max
  unsure (1)..(538): unsure at all n locations
acccattgaagaagacaaggttagggaaccctgttgggtacaaattggttccaggtgccacagcagctagcctgctggatccagaagatcctccacagaaaagagcagcttttacaaacaatcaaatatgggttactccttacaacaaaagtgagcaatgggctggtggtttatttgcttaccagagcaaaggggatgatactcttcaagtctggtccaacagggatcgtccaattgagaataaagacattgttttgtggtacacaatagggttccatcatataccctgtcaagaggactatcctgtcatgcctactgtatcatcaagttttgatttgaagcctgctaatttctttgagagaaatccaatccttggagtccctcccaatttcgaagatgatttacctgtttgcaaggctcgtgattcagcttgagatcccatcagttggtttttagtctaattagatacatgctttatttatgcatgtagcanatgatgatgcccaaactgaactntaaacctaacttaaagtaaaga

SEQ ID NO: 214068 - DNA, 459 bp, Glycine max
  unsure (1)..(459): unsure at all n locations
gtgcagagcatgtgttccttgtggctcatgactggggagccatcataggttggtacctctgcatgtttcgccctgacaaagtgaaggcctatgtctgtcttagtgctacttttatacgcataaaccctatcgtaagaaccgcatatgggattcgcgctatgtatggagaacactactatatcttcccatttcagaaaccagtggaaatggaggctcatatggctaaagttggcacaaaaaatagggagctgtcggcaccatggactggagtgcaaagccaagtggcagataaatacataacaggtgagttggacatggtgtacacctcgttaggcatgaaagagtatgtacacagtggaagcttcaaacaagatgtgcccaatttacaaggctgntgtgcagaaaggagtagctcactttaataatctagaagctgccgctggaatcagcagtcacata

SEQ ID NO: 214069 - DNA, 473 bp, Glycine max
caataccaaggtatggaaagggaaaggaagcaggaaacgaagtagactacattgtaggaatgagcacatgttatcctcaaccaggttctgtaaagataattgatggtgaaactataactctagagtctaactacagcagcagccgtggccacactggagtaatggggcttttctacctattggtggcagaacagcttccacaccaacacttcagatattgttgtcgttcttcattttttatgaatataaatagtataattcattgataggatagtcgtgagatgcaaatataagttgagtgtcatatcgatggtatcacagtatgtatcacggttaacagaaatacataaatacatatcgatggaacatatacttctcatattcggcagccataggacaacacacgcacgaaccggcaaagagcatattttcaagtttaaggattgttagaatgtgatgatcaattatttgta

SEQ ID NO: 214070 - DNA, 434 bp, Glycine max
ctaaagatatctatagataaatatatctatatatatctatagatatctttataacccattctagctcattgactaagttcggtgactagcattagctactgtaaaaaaaaaccaattcaaaaaatcgaataaaacacgactaattttattaatttaaatatttaatttcattaaatatttaattaaagaatttttttttttttttataaaagaaatgatttgaatttcattttaataagaattccattttgtaatatttagttataaattacgatttaaaaatttatgttaaaattaacgttaacgacgagatctattatcatttttcgcatgtcctcggaaatttagagtaggtgaaaattctcctaatttatggcctaccatacgatctggtatataaatagggaaatgctcttttccgttgtgatagcaat

SEQ ID NO: 214071 - DNA, 488 bp, Glycine max
  unsure (1)..(488): unsure at all n locations
aattagatctctggtgttagttacaaagtaatacaaggaaaatcctcagccggggtcaaagattatgtaatgtagcagtgtgcaaacatttggaacagagagatcccatcccctgtatgtaactttggtaacatctttgaataaatatttggcaagatctcacaatggcacccgggatagctgactgaggccaaacgaacatttacatgtgagggttctattctgatggaggtctgtaatcaagcatctccctgatatttaacctgattgaaggtcccatggctgagcatatgtgagcacttttccagtacacacctttagcacctgaaggtttgtttgcctctactgatttcactgcagcaagcaagtttacaagaagatcctcttctggaaagtcagcttttccaaaaggtaagtgcacgattccagttttgtctgccctgtattcaactnttccctgcttgaattctgctatagcctggggaata

SEQ ID NO: 214072 - DNA, 537 bp, Glycine max
atgaaactaatgccaaatctgctcaataataataaaaaaaaagcatgtgcttggtgggtggtggggtagtattactgaccaaaaattaaaatagaaaattacaccactaagtcacaaactaaactaccaatttaaatgtattttacagaaatagttgtttatatttatcaactttttgatagaattaaaaaaatttattttttagaagaataaaaaaaagtaaagatattttttgttagaattaaaaaaattaattttctaagttttgctaaacacgttcttgtgatattttttttaatgattcttttaatgattgacttttaaaataattatcttaaaatttaataattatatcatacaattgttatataaaacttttaaaattttagatgtataactcatttttttcatttctttttctcctattggttagaacagcaagtaaagatattttggtttgtgagtaaggcaattggcattatcacgagaaatttaatgccacaaaaatcaggtctggaagcaactagcaataataat

SEQ ID NO: 214073 - DNA, 545 bp, Glycine max
  unsure (1)..(545): unsure at all n locations
gtttgattgccaaatcaatatccatggcttcggaggacagaaacgaagaagagcttcacgttctattggtggcattctctgcccaaggtcacatcaaccctttgcttaggcttggcaaaaaactactaagcagaggcctncacgtcaccctcgccaccaccgaattagtttaccaccgcgtcttcaagtcctccgccgccacccccaccgacaccgtccccacttcaatcaccaccaacggaatccaagtgctattcttctccgacggcttcggaaccggcctagacaacaagaccatcacccccgaccaatacatggaactcataggaaaatttggtcccatcagcctctccaacatcatcaaagaccacttcctcaacggttcccaaaaactcgtttgcatcatcaacaacccctttgtcccatgggttgcagatgtagctgccaacttcaacatcccatgcgcatgtctctggatccaaccctgtgctctctacgccatatactaccgnttctacaacaaccttaacacgttccccactctg

SEQ ID NO: 214074 - DNA, 540 bp, Glycine max
  unsure (1)..(540): unsure at all n locations
caagacatcatcatccatggctgcctccgtctccactgtcggagctgtcaacagagctcttttgaacctgaatgggtctggacctggggtttcagctcccagttcatccttctttgggagcagcttgaagaaggttattggctcaagggtccccaacacaaagatttcctctggaagcttcaagattgttgctgtagaagagaagaaagagattgaagagacccagcagaccgacaaggacagatggaagggtcttgcctatgatatctcagacgaccaacaggacatcacaagaggaaagggtttggttgactcccttttccaagctccacaggatgctggaactcactatgctgtcatgagctcctacgagtaccttagcactggacttcgccagtacttggacaacaacatggatggattttacattgctccagctnttatggacaaacttgttgttcacattaccaagaacttcatgaccctgcccaacatcaaggttcctctcattctttgtatctggggaggcaagggacaagg

SEQ ID NO: 214075 - DNA, 498 bp, Glycine max
  unsure (1)..(498): unsure at all n locations
gcaagccccactcaaccaccacacctctcctcgttcacgctacccctttctgctcttcttctacctttcaagttttaaaagtataaagatggcagagacattcctatttacctcagagtcggtgaacgagggacaccctgacaagctctgcgaccaaatctccgatgctgtcctcgacgcttgcctcgagcaggacccagacagcaaagttgcctgcgaaacatgcaccaaaaccaacttggtcatggtcttcggagaaatcacgaccaaggccaacgttgactacgagaagatagtgcgtgacacctgcaggaacatcggcttcgtctcaaatgatgtgggactggatgccgacaactgcaaggtcctcgtcaacattgagcagcagagccctgatattgctcagggtgtacacggccaccttaccaaaaaacctgaagaaattggtgctggtgaccagngtcacatgtttggctatgccactgatgaaacccctga

SEQ ID NO: 214076 - DNA, 545 bp, Glycine max
tcttcggcagataactgaagcttcgcgtggagcaattacttcctttgtgcagaggactactaataagaagggtcaagtgttgacgtagctgataaacttacctcaatccttggatttggcataaatgaaccatgggtcgagtacttgtcaaacaccaaattttaccgagctgatagggaaaaactcagaaccttgttcgatttcttgggagaatgtttgaagttggttgtagccgataatgaattgggaagtttgaaacaagccttggagggtaagtatgtggagccaggacctggtggcgatccaattagaaatcctaaagttttaccgacagggaagaatattcacgccctggacccacaagctattcctactacagcagcaatgcaaagtgccaaaatagtggtggatagattgattgagaggcagaaagctgaaaatgggggaaagtatcctgagactgttgcacttgtattgtggggaacagataatattaagacatatggtgagtcccttgctcaagtcttgtggatgattggtgtgaa

SEQ ID NO: 214077 - DNA, 501 bp, Glycine max
  unsure (1)..(501): unsure at all n locations
gacgcatgtttgccccgaccaagatctggcgccgctggcacaggaaaatcaatgtgaaccagaagcgctacgccgttgtctccgccatcgctgcctccgccatcccctccctcgtcctcgcccgcggccaccgcatcgagtccgtcccggagctcccactcgtcgttagcgactccgccgagagcgtcgagaaaacaaaagaagcaatcaaagtcctcaagcagatcggagcattccctgacgcagagaaagcaaaagacagtcgcagcattcgtcctggaaaggggaaaatgcgtaactgtcgctacatctcacgccgtggaccactcatcgtgtacggaacggaaggagccaaagccgttaaggccttccgtaacgtccccggcgtggaagtcgctaacgtcgagaggcttaaccttctgaaacttgctccaggaggacacctcgggaggtttgtggtttggacaaaaagcgctnntgagaagctggattcgattatgg

SEQ ID NO: 214078 - DNA, 493 bp, Glycine max
aaagaaaagaaaactggttcttcttttcgcgttgcgttttcttggtgtctctgtcgattcttcttctgaattttaatacttaggaagtttagttttctctcttggcttctccggttggagtttccggcgaccttgtcggagattttgttgtttatttttcacaccacttgtgaaacttctcaagaaaaagaaaaaggatgtctcttgctgattggttctatggaattttggcgacccttggcctgtggcaaaaggaggcgaagattttgctcctagggttagataattctgggaagaccactttgcttcacatgctcaaagacgagagacttgttcagcatcaacctactcaatatcccacttcggaggagttgagtattgggaagataaagtttaaggctttcgacttgggtggtcaccagattgctcgtagggtctggaacgacttacgctcaggtggatgctgtagtgtacctcggtgatgcatttgaca

SEQ ID NO: 214079 - DNA, 447 bp, Glycine max
catttattcacatccatatccactcactattccctcctccttcctttgcctctttcgcttttgctttctaggttttttttttttcttcttgctctttctctgtgtccatggcgggaaaaggagggaaggggcttgtggccggaaaaaccactgcagcgaacaaggacaaacacaaggataacaaaaggcctgtctctcgttcatcccgtgctgggatccagattcctgtgggtcgtatccataggcagctgaagcaaaggctgcacgcaaatggacgtgtgggggcaactgctgctgtgtacttggcctccattctggaatatctcactgctcaggctctgtagctggcggggaatgctagcaaaaatctgaaggtgaagaggatcacaccaaggcacttgcaactcgctatcaggggagacgaagagctcgacaccctcatcaaag

SEQ ID NO: 214080 - DNA, 467 bp, Glycine max
aaaacaaaaaacttttaaaatccagcagcattacaatcccaggggtttcacaacagggaagttaaaagccaatagaatgaccttttacccaataacattaacatttgttcataaacaggaaagaagggctactacactaacttcttcataaacataaaggaacacttttttggggaaacaaagggggatttgattttcattttttggcaactttgttgatcaagggcttgggaatgggagggataacaccccccccaggaaggggccctttgatgaggggggaaagcttttcgtctcccctgatagcgagttgcaagggccttggggggatccttttcaccttaaaaattttggtaagattccccgccaggttcaggaccttagaagtgagattttccaaaatggaggccaagaacaccgcagcagtcgcccccacacgtccatttggttgcaccctttggttcaac

SEQ ID NO: 214081 - DNA, 474 bp, Glycine max
tgagttttttttccttggaatagctgaggctttcagctcagttgggcagcttgagtttttctacagttatattcccaaatccatgtctagttttgcaatggctattttcactcttgaactagctgctgctaatacagtggcaagtgtgttggtgagcattgtggacaaggtcactagtgtaggagggaacaagagctggctatcaactaacattaatagtggacatctgaattactattatgcactgctcagtttcttaagtataattaactacctctactttcttgctgtttgttgggcttatggtcctgctccggggccaaatcttgaagcttctgcaggcaaggaagaagagtcatttgattatagggacttacctactttgtagattagtttttagtcaacaacagatagatactataaacacttggagaaattagagcattgttagtgggtttgtttgaaaaactaata

SEQ ID NO: 214082 - DNA, 557 bp, Glycine max
  unsure (1)..(557): unsure at all n locations
gatataaataagttcattatcatgtaaaagcttccactacaatagcagtaattagtgtgcgaaagctacattcatctcatgattcattccatttttgcatcattatactacctagagcataataaaactcttagcatagatatacttttcacctattagtttaacaaactaataacaacactataaaaacaactaacaatactataattttgaagtctcagataaatatgttaaaagtcccttgaaaaatgactgaattttattataagtcccaaataaatttttctttattttaaattctcgatatattaaaatctttgttttaaatctctatcatcagttaagtgatgacatattaccttacaaactaattttctaaatatcatcaatgattataatagtgtcacgtcatcacataactaacaagaaagactcaaaacaaaagttttaataaattaagaattcaacacaacccanaaatttattaagaatccaaaataaaaattcgatcatttatgaggactttaaacatattaaatcttacatcattatactac

SEQ ID NO: 214083 - DNA, 488 bp, Glycine max
tcgtgagatgtaacccttcctcagcatcagctctcaccatcaaagctgcttcctatgctgacgagctcgtcaaaaccgccaaaacagtggcctcaccggggcgtggtattttggcgatggatgagtcaaatgcaacctgcgggaagcgtttggcatctattgggttagagaacacagaagctaatcggcaggcataccgtaccctacttgtgacagtacctggtcttggtgaatacatctctggtgccattctctttgaggaaactctctaccaatccactgtcgatggaaggaagatcgtcgacgtacttgttgaccaaaacattgttcccggtatcaaggtcgacaagggtttggtgcccctagctggttcgaacgatgagtcatggtgccaaggtcttgatggtcttgcgtctcgctcagctgcatactaccagcaaggtgcccgtttcgccaaatggcgtactgctgtgagcattcgcaacggt

SEQ ID NO: 214084 - DNA, 485 bp, Glycine max
ggaagaacgaagcagaagaagcatctcagaacagaaccaccgaacccactcagaagcaaatccgaaaacccctcatataatagtactggtattcagctgttcatgacaaaagcctgaaccgatcatgtcagaaggtgcagaaattgatgagcgtgtggaccttgacgaggaaaattatatggaagagatggatgatgatgttgaagaacaaatagatgatgatggagtggatggaggtgaagatgaaaatgctgaaggtagtgttgaagaacatgaatatgaggactcagcagctgaggctggtgggaaagaccaattgcctgaagcagaaaaaagtgacattgctactgaatttggggatgatgagcaaaaattgtctttcattgatgaagatgagaaagagaagcatgatgaacttcttgcccttccacctcatggttctgaaagtcttattggtggactttctcgggatgtatgtgaagatg

SEQ ID NO: 214085 - DNA, 581 bp, Glycine max
tcatcttgtggagaagcttgcaaactttgacagggaacgtatcccagaacgtgtggtccatgccaggggagctagtgcaaagggtttctttgaggtcacacatgacatttctcacctgacatgtgcagatttccttcgagcccctggagttcagacgcctgtaattgttcgtttctcaactgtcattcatgagcgtggtagccctgaaaccttgagggaccctcgaggttttgccgtgaagttttacaccagagagggtaactttgaccttgttggaaacaaccttcccgtcttctttgtacgtgacggcatgaaatttccagatatggttcatgctcttaaacccaatcccaagaaccacattcaagagaattggaggatccttgacttcttctctcactgtccagagagccttcacatgttcacctttttatttgatgatttgggtgttccacaagattacaggcatatggatggttttggagttaacacatatacgctgatcaacaaggctgggaaagcagtgtatcgtgaaattcactggaagaccactagtggtataaagtgtctattggaggaag

SEQ ID NO: 214086 - DNA, 519 bp, Glycine max
agcgaggaagagatgagggagaggtacgagatattctcgcaaaacctcaggttcatccgctcccacaacaagaaccgcttgccctacactctctctgttaatcattttgctgattggacttgggaggagttcaaaagacacagactaggcgctgcccaaaattgctctgccactcttaacggcaaccacaagctcactgatgctgttcttcctcccacgaaagactggaggaaagaaggaatagtgagtgatgttaaagatcaaggcagctgcggatcatgctggacattcagcacaactggggctttagaagcagcctatgcacaagcatttgggaagagtatctctctttctgagcagcagctagtggattgtgctggccgtttcaacaactttggctgtaatggtgggttgccatcacaagcctttgagtacatcaaatacaatggaggacttgagacagaggaagcatacccctacactggaaaagatggtgtatgcaaattctcagctgaaaat

SEQ ID NO: 214087 - DNA, 569 bp, Glycine max
ctcccaattactttgttgcatttcacacaccaacttcccatagaagagagaagagagaagagactcttccttccatcctgcaactcaaatcatcatgcaagactccagctcaatgaagatctcccctctggatctcatgtccgccatcttcaagggcaagctcgacccctccaacgtctcctcctgcaccaacgccgccgccgccggcttcctcctcgagaaccgcgacttcctcatgctcctcaccacctccgtcgccgtcctcatcggctgcgtcgtcgtcttcatctggcgcagatcatcctcccccaaggccaagcctctcgagcctcctaaacgcgtcgtcgagaagcttcccgaaatcgaagtcgacgacggcaccaagaaggtcaccatcctcttcggcactcaaaccggcaccgccgaaggctttgccaaggccacagctgaagaggccaaagcgcgatacgagaaggccacgttcagagtcgtcgatatggatgattatgccgccgatgacgatgaatacgaggaaagttcaaaaaagagactcacgttcttttctttta

SEQ ID NO: 214088 - DNA, 518 bp, Glycine max
  unsure (1)..(518): unsure at all n locations
cgctaacctcaaagagagttcagtatttatacaaataaaagttttttctttttttatttctggttttcgttttggaatggctgggatttgctgtggagttgttggagaagccgccgagacttcttctcccatcgaacccacctcacgcccttccgcacgccggagtttggaccttttgcccttgaaatacatagctgctgacgtgtcagtcccgccgctggagaacagccggaagcgccagaggctggataggcgcgcttctccggcaagggagtgcgataacgcggttcatagttccaaatcgaaggtagttgaggttgttccgaattattcttcgaagagtccaacgttggactccacaagtccaacagttgtcgaggagtatccgaggtatggggtaacgtccgtttgtggaaggaggagggacatggaagacgccgtttcggtccatccatcgttttgccaagaaactttatctcatgataaanaaatagggtttcatttcttcgctgtttcga

SEQ ID NO: 214089 - DNA, 415 bp, Glycine max
cgaaccttgctcaaggtcattgttctcggcgatagcggggttggaaagacctcgttgatgaatcaatacgtgcacaagaagtttagtcagcaatatgaggctaccattggggctgattttgtcaccaaagagcttcagattgatgacagacttgtcactctacaaatatgggacactgctgggcaagagagatgccagagtctcggggatgcattttacagaagtgccgattgctgggttcttgcggatgacgtgaatgtgatgaaatcgtttgatacccttgagaactggcacgaggagtttcttaaacaggcaaacccttctgatccaatggcatgtacgtttattttactgggaaacaatatcgatcttgactgggggaataagcgactggtcactgacatgaaagcgaaga

SEQ ID NO: 214090 - DNA, 395 bp, Glycine max
cggatacagcattgaagacgtttgaccaaacggcggaatcaagaaattgagagctggtggttactctaactgttctcgcaaaccattctgatacacatacggatggatagatcgttgcatgcaaccatagtgatattaggatcttgtgttctttgttaccaattagggattattgttgctctccttcaaactgcatctttccaaatcctctatttgcgaatgagttttgatcagctttctactgagatagacactctactgctacatggacatggcggaatacgagatcggttgtgtgcgtttacagaaacggatggtaatatgctttttccagccaggactctatgctgaccctgaatgaaggggtcttatggctgttacgcaatcccagttgg

SEQ ID NO: 214091 - DNA, 501 bp, Glycine max
gcacgcaaacaaagtgatttattaatccattcgatgttcaaatggtaatagaaacaataaaggtctaaatgcccaaatggtctctaacagaagctaaaaaagacaacaaagaaaaacaataacgtatctggaaaaccagacttattttcacaaggacagaataataaagacacttaaggaaactactcttcctcatcttcctcattccagcactttagagttgatctaggtgaaccacagtcactagtcttcccgaatttttggtagacaacagaaccacccattccaagcccttcgtggctcctctcttcacgacagtatcccttaacatccagaaagcaggtctgctcaaacgacttgcttgcaccatccacatgaactgcaacagaaaactcagttgggaggaaacatgccaataccctctgaaccatttcgttcagattcaccgctttgaagtcataaccaacagtttcgaagcttgcataactgaaaccatcttct

SEQ ID NO: 214092 - DNA, 532 bp, Glycine max
ccgcgtccctctgtaccactactcctggttgaactcgagcagcctcgccaacgcttccggcgatcctaactacggatccaccgacttcattcccgagaacgccctgaacggctccgcccagcctgtgcacaaagccggcggcgctcccggcggcaaccccagcctctacgacgtgctcttgcgcgtctacgccactgtcaagaacaccggctccatcgtcggcgaggaagtgccccagctctacctctctcgcggtggtccctacgaccccgtcaaggagctcagaggcttcgagaggatctccatcgcgccgaacaccactgccagagtcagctttgatatcactcgcaaggatattgccagctggaacactgttgagcaggattgggttgtgcaaaacacgactaagaatgtttgggttggcagctcgagcaggaacttgcctcttagcggtgtgcttgcttgagattgttgatggggtggatgatttgatcttcatggctgatgatagaatattactacacgatagaca

SEQ ID NO: 214093 - DNA, 517 bp, Glycine max
  unsure (1)..(517): unsure at all n locations
atgattatgtacagtagtatattcatctatgtctatcgtgtagtaatattctatcatcagccatgaagatcaaatcatccaacccatcaacaatctcaagcaagcacaccgctaagaggcaagttcctgctcgagctgccaacccaaacattcttagtcgtgttctgcacaacccaatcctgctcaacagtgttccagctggcaatatccttgcgagtgatatcaaagctgactctggcagtggtgttcggcgcgatggagatcctctcgaagcctctgagctccttgacggggtcgtagggaccaccgcgagagaggtagagctggggcacttcctcgccgacgatggagccggtgttcttgacagtggcgtagacgcggaagagcacgtcgtanaggctggggttgccgccgggagcgccgccggctttgtgcacaggctgggcggagccgttcagggcgttctcgggaatgaagtcggtggatccgtatttaggatcgcccggaagcgtggcga

SEQ ID NO: 214094 - DNA, 559 bp, Glycine max
catactcttgataaaaaaaatggaaatatgacttcatattatacacgcttttcgaaatccaaagaatatgaaacaaaatcaatgttacataaaacaaggacaccatcctcagctgaaatttaaggatgattaatcaaatttttttatgcagatatatatatttctgtacatcatgatggaacatttactctgctgctatacaatttttcacttttctgttttcttttaccttccactttgtatatatggggcaatcttcatgtcgccagtttaccttcagagacttgagtatcatctgatgaatctggggaatgagatttggctttgctcgtagttctattatatccatatccaaaagaagttccatttgtttcggatagttcagtgagctcagaaagatggcgggatctgaattcatttatagtcgctgcaatctctgatgtaggaagtttagcctgagcaagcacggcagctgctagttgaagacttggttccaaggtctctgggacaacagcagtagctccagccttttctaaattaatcatgatcacatcatgag

SEQ ID NO: 214095 - DNA, 488 bp, Glycine max
cggctcgagtcatgccagaaaaaggaactccagaatacgatgaacttgtggcgaatcctgataaggcttatctgaaaacagttacttcacagtttctggctgttcttggcatttcacttgtagagatcttgtccaaacattctagtgatgaggtctaccttgggcagagagacactccagattggacatctgatgctgagccattgcaagcctttgagaagtttggcaaaaaacttgctgatattgaggaaaggatcttgagaatgaatagtgatgagaaattcagaaaccggtatggtccagttaagatgccatacaccttgctttatccttctagtaaaggtggactaactggcatgggggttcctaacagtatctcaatttaatttaaagggggctgtaaccagagtcttgtctttagttgtatcaaataataatggccttaaaggaccttggttattttgaattatgattttataatggccaat

SEQ ID NO: 214096 - DNA, 565 bp, Glycine max
  unsure (1)..(565): unsure at all n locations
atccgtttctgtttttccaattttgccctccgctttttccctatttcccaattttgccctcttcttcttctaccatgacctacttgaagtcgtagctcgagtccgtgttcgccttttccaattcccaatttcaatttcccaaacttcgtaggatttccgtcgaataatggaacctcgagttgggaacaagttccgtctcggtcggaaaattggtagcggatctttcggagagatctatctcggaactaatattcagactaatgaagaggttgcggttaagcttgaaagtgtcaaaaccaagcatcctcaattgttgtatgaatccaagctgtataaaatactgcagggaggaaatgggattccaaatgtgaaatggtatggtgttgaaggagagtacaatgtgctcgtgatggatttacttggccctagccttgaagatttattcaacttctgcagtcggaaattgtctctcaaaactgttcttatgcttgctgatcagatgctaaatcgagttgaaattgttcattccanatcatttttacatcgcgacatcaagccagacaac

SEQ ID NO: 214097 - DNA, 515 bp, Glycine max
gtattgacaaaactagtgcaactttgcaatttagaaagttagcagattgtgattttctcaagagaaactttaagcagatgtctaatgttttgtgggtggctcctgaggataaggcgagtttatggtcacaacttcattatgtttcgtgtaataatctggaaatgcaagaagcttatcttgtcaatctcgtaaatgtgttacgagaattgtatttgcacagtccagaggaagctcgccaattgagaaggaaagctctctctcgtattgaatggctgcaaaaagctgatgtgcctaccatagcacagattgaagagttccattcgatgcagaggatgatgaatgctcctgattcaaatgataatattgatctactgttgagcattgatttgttgggtttacaaggagcaggtaaagcttttccaaacaagattgtttttgatgataagcttgtgttggctaacacacaagaattctttgatggaaattttccagtggattcttggttaccaattttt

SEQ ID NO: 214098 - DNA, 486 bp, Glycine max
atccaagttcactttggtggcagttgaacgagtttgcaaccccacacacaaaaaccaaacccttaaaaatgtcatccccctcgccggtggccacggtggtctccgccgccgcgctgtacgaccgcgccaaagccgtgaaagaattcgacgaaaccaaggtcggagtcaaaggtttgatcgattcgggaatcagaaccatcccccctttcttcgtccacccgcccgaaaccctagcggacctcaagcgcggaaccaaacccgggtccgcgccggagatccccacggtggacctcgccgccgaggagagctcccgcgccgccgtggtggagcaggtccggcgggcggcgagcaccgtgggattcttccaggtggtcaaccacggcgtcccggaggagctgctattgcgaacgctggcggcggtgaaggcgttccacgagcagcccgcggaggagagggcgcgggtgtaccgtaaggagatggggaagg

SEQ ID NO: 214099 - DNA, 434 bp, Glycine max
catattcctatgtgccaccgttgacgagaaactatgcatgcgagcctacactccaacaagcagcgttcacgaagtgggatacttcgacctcgtcgttaaggtttacttcaaaggggtgcaccctaagttccccaacggtgggatcatgtctcaacacttggactctctccccattggttctgtcttggacgtgaaaggcccacttggccacattgaatacactggcagaggaaacttcctcgttcatgggaaaccaaggtttgccacgaggctagccatgttggctggtggcacaggaatcacacccatttaccaagtggttcaagccattctaaaggatccagaggactgcaccgagatgcatgtggtttacgcgaaccgaaccgaggatgatatattgctgaaggaagagcttgatgagtgggctacgaagt

SEQ ID NO: 214100 - DNA, 308 bp, Glycine max
  unsure (1)..(308): unsure at all n locations
aatagaatccattatttatatataacaataaactactatatacacatacaatgtattctagtttagtcccctaaaacacgagcaagttattctgggtgtcgtagcccaacttctccaaattcggctggactgcaaattgaatcataggtggtggtccacaagtcaatgccaaggtatcaggagatgcatttggaatatgctccgtcaggatactttcagtgatgaatcccacactgtatttccacccttctcttatgctntcttgtatcacgtaccacaccttcaacctatcatactttttagcccac

SEQ ID NO: 214101 - DNA, 334 bp, Glycine max
ggaagtcaccgccgctacttctccaccttctcgcgttctcctcatctccgccggtgccagccacaccggtgcccttctctctgggaatgttgtgtgctcgtggggtcgcggagaggatggacagttaggccatggtgacaccgatgatagactcttacccactcatctgagtgcattggatgctcaacaaattgattctattgcatgtggagctgatcatacccttgcgtattccgaatcacgcaatgaactctatagttggggatggggtgattttggaaggatgggtcatggcaattctagtgatttgctcattcctcatcctattatagca

SEQ ID NO: 214102 - DNA, 445 bp, Glycine max
taattggggagggtacgtggaactcatggaaatggcgaagaagcatggcctcaaggtgcaggctgttatgtcatttcaccaatgtggcggcaacgtcggagactcttgcactattcctttgcccaaatgggttgcggaggagattgataatgaccacgatcttgcatatactgatcaatggggaagaagaaactatgaatatatatcacttggatgtgatactttgccggtgctcaagggacgatccccagctcaatgttatgctgatttcatgcgagctttcagagacactttcaagcacctacttggtgataccattgtggaaatccaagttgggatgggaccagcttgtgagttgcgttacccttcgtacccagagcaaaatgggacatggaaactcccaggagttggtgctttccaatgctatgacaagtgtatgttgagt

SEQ ID NO: 214103 - DNA, 480 bp, Glycine max
aaagggtcacaaatagaagttttaggtgcatacaatacaaaacaatataatacaaaattttacatcttcaaagccacaaacctgggctgttggttcactaaaactttcacacagcctccttgtgacttattcctaagccctattaccacaaggatgttcaacaattctcagtgcatcagcactgcagcctcttgcacaagaggctgtgtaacatgcacaaaatgctcagcttccctctccacctcttcccaacacttgtgtgcactcttcccttctttcatcttcttcacaaaccccacaaacttcctccagttatttggttcaaacaaatgcggattcatcctcaggtatgtgaaggcacacatctctctatcaccagactcaccatcaacatccaattgtgatgcccttatgatctgctcatgtgcatactcgtcgtaccgtggcagcgcgtttttgcccgcaagtggaacctgtgcc

SEQ ID NO: 214104 - DNA, 567 bp, Glycine max
  unsure (1)..(567): unsure at all n locations
aaatttaccatcatcatccaccaattcctgggcatggccgtgctacctttctcatactcaagatctcccactttatctctaccatcatctcaacaaataaggcctaaaacaaaaccaaattccaagacaaacacatgctctctaatccactgctgccacagccaaacagaaccaatcgaactaaatggccaagccagatttcgagagaagaaccctgccactgcagttgcatcccccgtggttgttccaccaaggcctcgaaggataatccttgttaggcatggagagagtgaaggaaacgtggatgagagcgtgtacacaagaatacctgatccaaagatatccctcactgagaaaggaaaggtccaagcagaggaatgtggcaacaggataaagcaaatgatagaaaatgaccatgaccaacattggcaggtttacttctacgtctctccatatagaaggacacttcanacctngcagcacctcgctcgtccttttcaacgctctagaatcgctggcttcagagaagagcctcgcattcgagacaagattttgggaatttcaaac

SEQ ID NO: 214105 - DNA, 468 bp, Glycine max
aaaataaaaacataaacaacatactttcgctgaaacgagttcaatacatcattttaaaacataataaacagcagcacttaaaccagagatgcaaagcacaagttcaagggagacactgaacaaacagataagacatatgagaacacttcataaaagggattccccttagcaaccaccacgaaggcgaaggacaagatgcaaagtggattccttctgaatattgtaatctgccaaggtacgaccatcttccaattgcttcccagcaaaaatgagcctctgctgatctggagggataccttccttgtcctgaatcttagctttcacattgtcaatagtatcagagctttccacctccaaggtaatggtcttccctgtcagagtcttcacaaatatctgcatacctccacgaagcctcaacaccaaatgcagagtggactccttctggatattataatcagcaagagtacg

SEQ ID NO: 214106 - DNA, 531 bp, Glycine max
attttgaaaagtgttgtgctttgggttgagaattgtggcagggcctaatgggtaactgcctagattcttctgccaaggttgatgcagctcagagctccaaatccacttctgcatcaggaatctcaaaaactactccttccagtttatctattccatcatacagtgaaaaaagcaatgcctcaagtcttcccacaccaaggtctgagggtgaaatcttgtcttctcccaatcttaagcccttcacattcaatgagctaaagaatgccacccgaaattttcggcccgatagtcttctcggtgaagggggatttggatatgtctacaagggatggattgatgaacacacatttacggcttcaaaacccggatcaggaatggttgttgctgagaagaggctgacacctgaaggttttcaaggtcacaaggagtggttgactgacgttaactaccttggacaactgtaccatgctaatctggttaaattaatcgggtactgcttggagggagagaacccgctattggtgtatgagt

SEQ ID NO: 214107 - DNA, 519 bp, Glycine max
gtcaaacaaacaaacccaacattacaaccatggcaacggtgacacaaccgtgtgcttcgtggacgcgcggttccgttcctctctcgaagcgcgtcctcccacgacgtcgtttcaccacacgcctcaccacgtacccacaagctgctctggttcaagcaccgcctccaccaccaccttcttcgcccagagacagctctagctccattcagcttctgaccttgtcacgtgccaatgacctgcaagccgaggccagagccatggcacgtgccgccaatgccaccgtctacaacccgcaactcattgcgtccatgtacggttcccaacccatcaaggtggtgcggaggacccttcagattctgactgcgttgggttcgttcgggctgaaactgttgctggaccagaggaatggagcgcttgataagaacagaagagttcgtgctgttgagcttaaggacatattcacgaagctgggtcccacttttgtgaaatgggtcagggattggccaccaggcctgacat

SEQ ID NO: 214108 - DNA, 544 bp, Glycine max
  unsure (1)..(544): unsure at all n locations
tgccttcatctttctctatcttaaccttcaccttgcaaagtgtaccaaacctcagatggatcatcaaaacaaacacgtagcagtctttgctttcccctttggcagccaccttatgcctctattaaaccttgtcctcaaactagctcattcccttccaaattggtcattctcattcattggcacagacaaatccaatgcaatccttttcccaaaaccccacatcccaaataacatcaaggcctatagcataagcgatggaatcccagagggtcacgtcctatgcaaaaacccaactgaaaagttgaatctttttctccaaactggtcctgagaacttgcacaaaggtatagaacttgcggaagcagagacaaagaagagagtcacatgcatcgttgcagatgctcttgtaacctcttctctctttgtggctcagaccctcaatgctccttggattgcactttggcttcccaattcatgctgactctctctatatttctacactgaatngatacgtcagcactgtgcaaaccatgcttggaacaca

SEQ ID NO: 214109 - DNA, 523 bp, Glycine max
ctcgagccgaatcggctcgagcggatgtgtgagtttgcatggttggatagcaatggcagcaaagaaggtgtgtgtaacaggtgctggaggattcgtagcgtcttggcttgttaagcttcttctttccaaaggctacattgtccatggaactgtgagagaccctgaacctgctactcagaaatatgaacacttgctcaaactccacggagcttctgaaaacctcactctcttcaaggcagatctcttgaactacgaatctcttcgctcagcaatttctggatgcactgcagttttccatcttgcttgccctgtaccctcaatcagtgttcccaaccctcaggttgaaatgattgagcctgctgtgaaaggaacaactaatgtacttgaagctagccttgaagctaaagtgcaacgacttgtctttgtatcatctttagctgctatttccaatagccccaatttgcctaaagataaagtgattgatgagtcctattggtctgataagattactgcaaaacaactc

SEQ ID NO: 214110 - DNA, 392 bp, Glycine max
agaattcaaagagagagtttcttgttctgtattttttgatttgatcatttcaatcttcaatttttttttatatatccaccaatccgcaaagtgcaaatttctaatctttcacgtattgggttcttctcttttccctcttcgtctccgatcgatccaattctctttccatggctacgatcggacacaacaatctcaatgccaaattggttcttctcggggacatgggtgctgggaaatccagcctcgttttgcgctttgtcaagggtcaatttctcgaatttcaggaatcaacaataggggcagcgttcttttcacagacgctggcaataaatgatgcgacagtgaagcttgagatttgggacacagcaggacatgagaggtaccatagcttg

SEQ ID NO: 214111 - DNA, 407 bp, Glycine max
gtgagaaagagagagagagagagagaaactgagagaaattcgcaaaccctaatgtcggaaagatcggcgatggctgcctccaaggatcgcgagaacttcgtctacatcgccaagctcgccgaacaggccgagcgatacgaagagatggtggaatcaatgaagaacgttgcgaatctcgacgttgaactgactgtggaggagcggaatttactttctgttgggtacaagaatgtgattggtgctcggagagcatcgaggaggatcctgtcttccattgagcaaaaggaagaaacaaaagggaacgagttgaatgcgaatcggattgaggagtacaggcagatggttgaattggagctttcaaacatctgtaatgatgttatgacagtgattgatgagcaccttatccc

SEQ ID NO: 214112 - DNA, 279 bp, Glycine max
acaccataagcaattctcatcaatcaaatcccccagagactggaggaaaaggattgggaatgaaataggccatttccagacaccacacaaataaaaacataccataaatatagcacaaatggagtatctctttcccctatcgggaagtatggggcaatcaacaagaaacaaagagaaaacaatggaaccctatctctagctaatacacggataagtaacggccctcatgtttcattcccaaacgcatgcatcgaatcctaaggaagatcccatcaacaa

SEQ ID NO: 214113 - DNA, 436 bp, Glycine max
tggaaaggctacaaatttaagaggacaagtgtctttaccaaccttgggagctggcgaagatgcatacgatgttcattttgaatgggacagacgacttctgaattcccggggcattttacattcataacttgatgcctggtgagtcatatctcaagtctgtaactctcggagacatctcaaaccacggaaccattcactgggtgtgcgactgctgggtttacaactcaatatcctaccattctgatcgcatcttgtttggcaacaatacatatcttacaacgcgagacaccggctacacttgtcaagttcagagaagaagacctgcagaatgtaagatgggatggctctggcgagcgcaatgaatgggataggatctatgattatgacgtctacaatgacttgtgcgatgcatatgagggtgaaaggtatgcacgcc

SEQ ID NO: 214114 - DNA, 263 bp, Glycine max
acacgggcaatgaaattttaaggacaacccttgctgtaatggaaatcgtttacataagatgatgatttattctagtttgcactttgccatgccagctatcattgttgaaacatgcgcgagaacacttaacagcaatttatacaaacagaatttcttcattaacacttaacagcaaacacgagaacattcaatcaccccaaatacataacttaaccatacataggtagatgaaggaatcatattccttctattcacttttattg

SEQ ID NO: 214115 - DNA, 498 bp, Glycine max
agtcgaaagtcatgcatattctatttacatacaaatatgtggcagcttacaaaactctaaatcttctagggtttacttaacaaaactaggaaaaatagttaaagcaaccagcaaaacattgggtactagttacacaaccatgccattgacctgtatgaatatataaaccaatgacacgagaaaagaaaatgggttttgtgatctttgcagccattaaaggtaggggatttaaaatagtcacaataagatacctacctacaaccgaagaatggttcgaagggtgtcagatagattttgaatagtccgctgctcctgggtcgcttgcagctcctgcagcggcatatcttcgtaacacattttatggtaagctaaagcctgcgccaaattcattagagtagaacttgatgtcaatctttggtaaatgcttggaggaagaggcatctgctcatttagtcctctccggccctttttggactgtccgtcaccactaaaaagctc

SEQ ID NO: 214116 - DNA, 291 bp, Glycine max
ttttcttctaaaaaaataaaattaagaaattttcatggtaaccattcgtgcagatgaaattagtaaaattatccgtgaacgcattgagcaatataatacggaagtaaaaattgtaaatacgggtaccgtacttcaagtaggcgacggtattgctcgtatttatggtcttgatgaagtaatggcgggtgaattagtggaatttgaagagggtactataggcattgctttgaatttggaatccaaaaatgtgggggttgtataaaggggggatggttggaagatacaagaggg

SEQ ID NO: 214117 - DNA, 353 bp, Glycine max
cattcgaattcattttatttatatattaatattatattcaaatgaaataaaaagatattaaaagatactaattataagaatttgaaagtgaaattataaagttattaaatgattaatcaatttttttctacctgttcctgtagtaaaaagagttccatctgttcttgaatagcttccttcaaaaggacttctgcttccccagtgaatgtcttggtagaagatatgatttctttgaattgaggtttattcgtgtttaagtaagcacgtaactcaacaagaaatttccttacctgtccaatttctaatgaatcaagataaccattcgttccagtataaaatagtattatctggtc

SEQ ID NO: 214118 - DNA, 490 bp, Glycine max
gtcaattcctctttctctttccacaaggcaacaacaacaacagggttgatgcaatttttgttcccataataatgtctgggagaaggaggaggaagttgaaattgttgagtgatacaattactgacagcagaagagctgcagtggaggtggaaaatgaaaatttggagctgcaaacttggtctgatctccctactgaactcttagaattaattctgtcccgtttaagtctagatgataatgttcgggcttcggttgtttgcaagagatggcattctgttgccacttctgtatgtgtggtaaaccaatcaccgtggttaatgtattttccgaaatttggtgactggtatgaattctatgaccctgtgcaccgcaaaacatattccattgagttgccagagttgagtggatctagagtttgttacaccaaagatggttggtttcttctataccgtcccagaactcaccgcgtggtcttcttcaatccctttac

SEQ ID NO: 214119 - DNA, 503 bp, Glycine max
gtcacccgcgaacaacccacaagatggcaactaaatacccgcttgacgaaaaagtagatagctcagcagatcatattgatgatgttgagactcagcaagagcgtgtcctcagcacgcaagagaatgaagcacatcaggagcatgtattcgatccgaaggagacgaaacgcattctccgaaaggtggactttcgcttgatccctgtactagcagtgttatatctgcttgcgttcctggaccgcagcaatattgcaaatgcacgcgttgcaggaatgaatgcagagctggagttgaccggaccgcagtataacatggcgttgactgttttcttcttcccatacgcaatattcgaagtgccttcaaacgtcgtgctcaaactcatgaaaccaagcgtgtggatctcgatcttgatggtaacttggggcatcgtcatgactttgcaaggcattgtcgagacttatgaacatctcattgtcaccagagtgcttctcgggctattcgaa

SEQ ID NO: 214120 - DNA, 432 bp, Glycine max
acagtaatgctgggatattaatattacatcatagtcaaaccagtggaaacatacaaacacccccagcttccgacggaatagttcattggtgccaaagttataccgaatacggcgctgattttcaccttccccacaaatcctttttcagtttttccctatatccccctggtaaccccgctaccctttttctgaatttgatttgctttataggcaaaaaacatgatgaggcctaccaggtattccattaaaaactttaggtacattgacaagtaaaacatactatgactatggtttaaacaaattaagtacatagtattagcaaattaaccgcattatacaggaagcgtttctggcaaggattcgggggctccgctgctaccattgagcacaatcacattaccatcagaatcaacatccactataacagagtcg

SEQ ID NO: 214121 - DNA, 460 bp, Glycine max
gcgtttcggaagcagacacagatggctcgtacgaagcaaaccgctcgtaagtccacaggaggaaaggctcctaggaagcagcttgcaaccaaggctgcacgtaagtctgcaccaactactggtggtgtgaagaagccccaccgttatcgtcctggtaccgatgctcttcgtgagattaggaaataccagaagagtaccgagcttttgatccggaagctccccttccagaggctggttcgtgaaattgctcatgacttcaagactgatctgcgtttccagagccacgccgtgcttgcattgcaagaagctgctgatgcataccttgatgggctctttgaggacactaacctgtgtgccattcacgccaagcgtgtaaccattatgcccaaggatattcacctggcaagaaggattcgtggcgagcgtgcttgagttggtggttggaaagatgaagatgatt

SEQ ID NO: 214122 - DNA, 472 bp, Glycine max
  unsure (1)..(472): unsure at all n locations
ctgagtcttgcaattgaagttgaagtcttgcccttctctcttcaactccaaacacaagacatcatcatccatggctgcctccgtctccactgtcggagctgtcaacagagctcttttgaacctgaatgggtctggacctggggtttcagctcccagttcatccttctttgggagcagcttgaagaaggttattggctcaagggtccccaacacaaagatttcctctggaagcttcaagattgttgctgtagaagagaagaaagagattgaagagacccagcagaccgacaaggacagatggaagggtcttgcctatgatatctcagacgaccaacaggacatcacaagaggaaagggtttggttgactcccttttccaagctccacaggatgctggaactcactatgctgtcatgagctcctacgagtaccttagcactggacttcgncagtacttggaccacaacatggat

SEQ ID NO: 214123 - DNA, 494 bp, Glycine max
attcaacaatatttacaatggcactggcatttttggtatccaagttacaacaggctcagattttgtatcaaaagccattgatatagctgctaatgagattcttggtgttgctactcctggacaagttgaccaggcacagcttaatcgagccaaacaggctaccaaatctgcaattttgatgaatttggaatcaagaatggttgtttcagaagatataggaagacaaattttgacatatggtgagaggaaacctgtggaggatttcttgaaggcagtggatgaagtaacctcaaaggatatcacttcaatttcgcaaaaactcatttcttcccctctcacaatggcatcatatggagatgttctctatgttccaagctatgaatcagtgagcctcaagttccgttcctaatgagattgtttccatccatcatattgagtcttctttgtatacaatcaagtcttgtacggctgaaaggtgtaaaattaagttaaac

SEQ ID NO: 214124 - DNA, 508 bp, Glycine max
atcaaactattgtcaatttccaattataaagtaatcagtttcatgcaatgggttcaaaatacgctggcaagcaaaggaaacttaaaaagacatccacgagttacttcatcaagcaccagtagcctcaaccatttcttgttccacggtgcttggggtaactgggtagtaatggtaatgaagttccccaacatcatcaccagacagtttcttccatccatttggtcccacatagtaaacgctagcaactccaccactggccccatcacgaaatgttgcatgataaattgctcgtcgagcaagttcagcagcttcctcaactgacaggtcataccggtacccgctatccaatacaccataagcatatggtgaaccagatccaaccgagaatctagtgcctttaagtcttcctccttcactatcaacataatatagaccagggcccgtctcatcccatccggcaatcatggtaccaacagataaacccattccacgataagagtataaaata

SEQ ID NO: 214125 - DNA, 495 bp, Glycine max
aatgctgaatagccattcaaattatctcaaagaactgaaaaaacagcagtgctctatcatacaattaacctaggtagcaaggatggggtttctcccttcatctatttcaatagttaggagatgttgaggatctgatccatttggtccctccgagtaaagtgtaggaaggtatgcatagtatgccggcaggtagcgtgaaacaaaatctctcacctcatcatctgtcattccaggcttgcctgcctccctcatggcaatctcagcctgtaagcgccattggaagacacagtttgggttcttaatcttgatgactatccaagactttatgtatttgtcccaagcatcatagtaagcttcaaggtttttatttacagtttctagctggggatcaacaacctttactgcgtcaactggaaggggcttgaaaccaagcattcaaccttcaaacaacacaaccgtcaggggcccttcaacttctgaccatgttgaaggatc

SEQ ID NO: 214126 - DNA, 497 bp, Glycine max
  unsure (1)..(497): unsure at all n locations
ctcgagccgaatcggctcgagcacaaagcacaaagcaaagctcatccttgagttaaaaaatggcagcagcttcttccatggctctctcatccccatccttggctggcaaggccgtgaagctgggcccatcagccccagaagtgggaagggtgagcatgaggaagaccgtcaccaagcaggtctcctcaggaagcccatggtacggcccagaccgagtcaagtacttgggcccattctctggcgagcccccgtcctacctaaccggtgagttcccaggcgactacggctgggacactgctgggctttccgcagacccagaaaccttcgccaagaaccgtgaactcgaagtgatccactccaggtgggccatgctcggagccttgggctgcgtcttcccggagttgctgtcccgcaacggngtgaagttcggagaagccgtgtggttcaaggcccggtcccagatcttcagcgagggtgggctcgactacttgggcaac

SEQ ID NO: 214127 - DNA, 511 bp, Glycine max
gtaaaaagcaagtaacattaagttggattcggatacacaagataattcacattatctgaagtacttcaccaaacacaaatctaaaaactctcaaaagtcatttcgttctttgacgctcactttccggggacgaagttggtggcataggcccaggcgttgttgttgacagggtcagcaaggtgatcggcgaggttctccaatggaccctttccggtgacaatggcctgaacaaagaagccaaacatagagaacatggccaatcgtccgttcttgagttccttcaccttaagctcagcaaaagcctctgggtcatcagcaaggcccaatgggtcgaagctgccacctgggtagattgggtcagtgacctcaccgagggggccaccagcaatacggtaaccttcaacggcacccattaggataacttgtgtggcccagatggcgaggatgctctgggcgtggatcaggcttgggttgcccaagtagtcgagcccaccctcgctgagatctggga

SEQ ID NO: 214128 - DNA, 377 bp, Glycine max
  unsure (1)..(377): unsure at all n locations
ctaaacttacgatagggatgaaaatatgtaatttagatctttaaaaaaaaaatccatatgttcggaatagacctaaaatggaatagatgtatctagggattagtcgtttcaaaaagaattctccctagatacacaatacacatggcattctattttttttttatttcaaaatggaatcaattttataagtttaaaaaagacctaaagttagggatttctcaataggtaatgttgctccaatacctaaccaaagggcaactacagtaccaatcaaaaagatggtggttgctactggacggcgaaatgggttttggaaattattaacattctccaaaaagggtactggtaataatcctganggtcccgaaccctttaaa

SEQ ID NO: 214129 - DNA, 520 bp, Glycine max
ggagtgcatcttcaaagatcatggatagttatgtccataacttcactctttcttcttccggtgttcatcttcacgaggccgattttgatgctcttaggccaagatgagaatatagcagaagtggcaggaaatatttctctttggtcaattcctatgatatttgcttttattgcctctttcacttgccagaatttcctgcaatctcaaagcaaaaataccatcatttctttcttggcagcattctcaatagttattcatttgttcctctcttggctattgacaattcaattcaagctcgagattcctggtgcaatgacttcaacaaatttggcattttggattcctaatattggtcaactaatatttataacatgtggttggtgctccgatacatgagaaaggttctcatttttggcattcaaagatctttggcctgttgtcaagctttccctttcatctggtatcatgttatgtctggagctctggtacaacacaatattggttcttttaacgggcaaca

SEQ ID NO: 214130 - DNA, 479 bp, Glycine max
  unsure (1)..(479): unsure at all n locations
aaaagattctaaagaaatataactaatattctttagaataatcaaaaagaatattaaattcaaataaattttagatagaaaaaagacttaaaaaggaggatttgaaatgcgagatctaaaaacatatctttccgtggcaccagtagtaagtactctatggttcggggctttggcgggtctcttgatagagatcaatcgtttttttccagatgcattgatattcccttttttttcattctagttattgacacggaaaggggtgaagaagattatagatccaattaagtattaaatatatgtaattaatatgtaattaatctcctcttctttatttcgtcttttatttcttcttttttttacaattgtaatagaataagttaggaaagagaaagaataagggttaatttggcctaattgaaattcggagtgaaactcgngatctcgtccaggcttccatggaattgaattaataattcaat

SEQ ID NO: 214131 - DNA, 443 bp, Glycine max
ttttttttttttttttttttttttttttttttttttttttttttttttttttttttttttttttttttttttttttttttttttttttttttttttttggggggccaaaaccaaccaatgggaaaaaaggactttggaccccaaaaaaaaaaccccctttttcgcccgggggaaaaaaaaaataaaaaaaaacccccccccccccaaaattccattttaaaaaaaggaaaaaaaaatttgaaggggggggaaaaaaaaaaaaaaggggttaccggggggaaaactttggggggggggggcccccttgggttttttaaaaccccccccatttttaaaccccggagggggggaatttttttttttttttccccgaaaaacccggaaattggggggggccccccccctaaggggggggcgaaaaaaattcccccaccgccccaggg

SEQ ID NO: 214132 - DNA, 477 bp, Glycine max
aataattatcaggaaaattaaaaaaaaataagcacaaaacattttctaacaataaaaaacgtttatgttcaatactttctcaaaagaatcatatatgcatcaaacagttacagccaatgcccgtcgtcgtaaccaccctttattcttctgcttcctttgtttggcacgtccaaaggacgtcctgcaacttacgctccaagaaggatgcgactgatttttctcattttcaggcaatgccacgtacttcttccaatcctcaagcaaaattttgagatcattgactttgttatctaaaccaacacaacaattggcatgcattgttgagaccttgttgaagtcctttgcatgctgacaaaaccctccaaaataactagtgctaaggaacctaatcttcagcttcatgttggaaatgaaggagttcttttttatcttgttgaggacatcctgggcatgcaactttgggtaggcatttctaga

SEQ ID NO: 214133 - DNA, 472 bp, Glycine max
aacttgagcaaatgcgatctgaccacatgaggaggcttaacccaactccatataaggttagtgttagtgcaaaattatacgacttcattcatttcctgtggctcaatgaggcaccagttggggagctacagtaaggcaaataaaatggtggcgtgccttcagaacccaatggttttatatttagttttgttatggaagcggaaaaattggctttattagtttcatagttaggtgttggttgtactaatgcccctcctcacatgggtagtgcttacaccaccatcgccgccgatgccattgctcgcttccaggggcttcttcaggtgtatggtggaaatctaggatggtgctttattgaagaggcctattacaagctcctactggaggccctacttagcaaacaacaaggttctgcagaatataaggtgggaatggaacttaccaaatagtttggtaatcttggaactgggcg

SEQ ID NO: 214134 - DNA, 489 bp, Glycine max
  unsure (1)..(489): unsure at all n locations
gaaaggagagggtccagtggtgttgttcctccacggcttccctgagctctggtactcatggcgccatcagattctctctctcagctccctcggctaccgcgccgtcgctcccgatctccgtggctacggtgacaccgaagcaccaccttcaatcagcagctacaactgcttccacatagtgggtgatctcgttgcgcttattgactctctgggtgtccaacaagtgttccttgtggctcatgactggggagccatcataggttggtatctatgcatgtttcgccctgacaaagttaaggcctatgtctgcctcagtgtccctctcctccgcagagacccanacatcagaacggtggatggcatgcgtgctttgtatggagacgactactatgtctgcagatttcaggtttattaatcaagtctctcattttgcttatctttatcccacccttggttttctttctctttctaattaactgtgcacgaaat

SEQ ID NO: 214135 - DNA, 382 bp, Glycine max
tgcctcaaagtggatcctgaaaaagtgagacgtctaagtttaagtgagcaacagcttgaaaaggctgctataaattatggacaacaaattgtcaggtttactcagcggaatatactgagggtgtatccaaaaggtactcgcattgactcatcaaattataacccattaattgggtggatgcatggagctcagatggttgcatttaatatgcaggggtatgggagatctctttggctgatgcatggaatggtcagagccaatggagggtgcggttatgctaaaaaaccaaattttctattggagactggtccagatgacgaggtcttcaatcctaaagctaagttacctgtgaagactactttgaaggtgactgtatatatgg

SEQ ID NO: 214136 - DNA, 481 bp, Glycine max
tttttttttttttttttttttttttttttttttttttttttttttttttttttttttttttttttttttttttttttttttttttttttttttttttttttttttaagggggaaaaggtatccaccccgggcaaaaaaaaacccgccaaaggaaacaaaccccccccctttctttggaaaaaccccaaaggggggaacccttttaaaaaaacttccccaaaacccttaaaaaaaatggggaagggggccaaccccgggccaaaagggggggggaaaaaccccccccaaagattccccccccccccccccctaaattgggggcccccctggaaaaaaaaccccacaggggggacaaaaagacgaaaattttttttatgtgtgcccaaaagctggccaaaaatttggggggggcccgggggggggtttaccccaccccaaaaaagaaagggtactggggggggggcgaaattggcccccgggg

SEQ ID NO: 214137 - DNA, 494 bp, Glycine max
ctctgagatagagctacagcaccattatcattcatctccattactttcctattcgatcctcgatccctctcccacatagaagattcatcaccccaaaacccaattttttttaataatacaactgcaattatttttattttctcagtaaaaaaaaaaaaaagagaaatgagttcgattcatttgttaaacactcttgctgttccgcttcgttctttttctcctccgtcgctctttccgcaatgccattctcctctccgttcttcttccgctgttccaaaacggcgtcgattctctaactgctctgggttccgtcttgcttcaagtcaaaccgtgaattcggttccgcgtgcgaatggaacttacaccggttccgatttcatgacaaagaagcaagatttgcatgttgtcaaaaccaccaccaccgttgatgatgctttggaggctcttggtaacaacagaatcagtggtctttcggtgatcgatgaggactggaa

SEQ ID NO: 214138 - DNA, 491 bp, Glycine max
cagaagaacaagttgttgagaactaagaaggagaagcaaatggcttcctcaatgatctcttccccagctgttaccactgtcaaccgtgccggtgccggcatggttgctccattcactggcctcaagtccatggctggcttccccaccaggaagaccaacaatgacattacctccattgctagcaacggtggaagagtgcaatgcatgcaggtgtggccaccagttggcaagaagaagtctgagactctttcctacctgccagaccttgatgatgcacaattggcaaaggaagtagaataccttcttaggaagggatggattccttgcttggaattcgagttggagcacggtttcgtgtaccgggagcacagcaggtcaccaggatactacgatggacgctactggaccatgtggaagctgcctatgtttggttgactgatgcttctcaagtgttgaaggagcttcaagaggctaagactgcataccccaac

SEQ ID NO: 214139 - DNA, 263 bp, Glycine max
attcattagttctcatccattaatttccattgaagtccgaaaacagaaaccaaaaatacaggatgatgaaatctcaaaaagcaaaaacaaatgggaatgtagtttaagtacaaacaaacaaagtggggtggcggctacaaatgctttgcaaatttttcacacttagaagcctgggggcttgtaggcgatgaagctgatgcactgcacttggcgaacgttgtcgaatccgatgatacggatgaaaccgttggggtatgcagtct

SEQ ID NO: 214140 - DNA, 491 bp, Glycine max
gaagaagcatggcctcaaggtgcaggctgttatgtcatttcaccaatgtggcggtaacgtcggagactcttgcactattcctttgcccaaatgggttgtggaggagattgataatgaccacgatcttgcatatactgatcaatggggaagaagaaactatgaatatatatcacttggatgtgatactttgccggtgctcaagggacgatccccagttcaatgttatgctgatttcatgcgtgctttcagagacactttcaagcacctccttggtgataccattgtggaaatccaagttgggatgggaccagcaggtgagttgcgttacccttcgtacccagagcaaaatgggacatggaaattcccaggaatgggggctctccaaggctatgacaagtatatgtggagtagcttaaaagctgttgctgaagctcacggaaagcctgaatggagaagcacaggccctactgatgctggccactataacaact

SEQ ID NO: 214141 - DNA, 641 bp, Glycine max
  unsure (1)..(641): unsure at all n locations
cttaaacaagaaacctccttagattacttatgtaatttgccacctcataggtgagtccgtttttctcctttacttaacataggttatcatgaggggattattatggcagataaatgacatctgcatatagaactactttgattacttaaacaagaagcatcctttgattacttatgcaatgattttgtaggagtaagataaattggtctcattatatgtttttggatcattattatgctttacattatattgacgttttcaattttttcatcaacttgcccttttagataatagtaccaccccttaaatcttgaagttaacatattattcgtttttatttgcagatttgtgactctttacgctaagacaattcctgagtccattgtcggtgagacatttttggagcaatatcaaaatcataatgatcctgtcactactattgatccgaagcgtacttacgggagtagagctcccacaatgcattccatatttgaaaatttccgagtcgtggntagtacttcattaaagaatttaaattgttattggatatgaataactgatgatttgctctaatggtgcatccttttnccaatattatgattagtctcagaaactgtgtggaattgtcctaagaaaatttt

SEQ ID NO: 214142 - DNA, 486 bp, Glycine max
gagaaagttcaactatttaataatttaaaagtaacagatgatatcttccaaatccatagtattctacaaattataatttgtttcccggctgtgtagaggggctaacacctgaatctgctggttcacagcttgctttttggaacactgacagatgcatttctggatctgttttctactgatcgagatacctgcttcacagcctcttttgctaaatggcgaggccgactcagccaaagtcctccgtcaacaatcataatgtcgccattaatgaattttcctgcatctgatactaggaaaagtgcagccatggcaatatcccacttctccccaagtttatacagcggcatgtaatctctggctttgctacttatttcatcaggagccagtttactcatgccaggggtgtcacttattggacctggtgcaatcccattgactctaatatcatagtctgttccccattctagtgccaagtttctcgtagtg

SEQ ID NO: 214143 - DNA, 293 bp, Glycine max
aggacaaaaggaaaaggccccaaattcaatttaaggggacactttaactcaaaattattgaggaagacagtccaatatgaaaaatatagtaaaatcatctcaaacttggcatcttctctttgcacctaagacattgagaattctaagaatgttacacgcaagtcccatcacaacttctagcacttggatcagcacaaccttcaggaacagaaatttttacttgccaagtttgttttgcctccaatttaagattggaagaaagttcccctgttaatagcatcctcgttagcatt

SEQ ID NO: 214144 - DNA, 526 bp, Glycine max
cagagaaaataaagagatgcatatatatgactctggtgttatttttgattttgcaaattaaattacacaatcacagccgtacatcacacatgagttgggcctcttccaacttaaaagcagaggataacattggcccatgacgcgacacatgcaccacctaataatcataattttacatctttacatacaaaatacaaagactttaaattttaaaaagaagaaaagagataaacagatcatcttaatgaaatgaaaccaaaacccacaaacattggcttgatttttgttgttgttgttgttcccaacttgattaagcatgaaccgtttgattgaatcacttggacttgaagggaatggccctgattacgacctggtggtagagtgctgcaagagctgcaccgatgaatggtcccacccagaagatccagtgttcatcccaaccaaggtccttgttgaagatgatagcagcaccaagactacgagcagggttgataccaattcccgtgatggggatggttgcaagtga

SEQ ID NO: 214145 - DNA, 472 bp, Glycine max
ggaaagcagccacaattgtattggaaatatgttcaattgcacttgtcccaaccttgtacatagcatctaggggtaaaatttgttgcgctgtagacattagtgataatgtcaaaaggtttaatgcaaatgcagttatgaatttcaacaatgatcttaggatgttggagagttttgcggatgagaagttccattgttctggcttggctgaattttactctggagctagttttaagagctgtatgatagaagcacgacaattaatgaatcttctgtcaagtagtcagcctgagaacttcatgaatcctgttataagggagaaaaactactatgcgttggattataagatggtaggctccatttgtgataaattcaaggattctccagatgggatatttggaaagtcttttaaataaaaacacaaagcaaagtgctaaaaagaaatcaatggacatgctccaaaagcgacttaagg

SEQ ID NO: 214146 - DNA, 472 bp, Glycine max
aaaatcgatctgatttttttcgtacttttcgctcaatgatgaaatgggtcagattctacaggaccaaaccttgtgggagttaaggaatgatggaagaaaagaaataaaaaaaagtaaataaaaatgcagtagaagagtcctgattccaaacgaaaaaattcaaacttgattgaaaaggatctttctgattattgaagaatgggacaaaaggattgatcgcgaaaaagatttcttgttcttattagaagatcgtgattggatccacatatgtttggtaaaaagaaagaaaaatattcttttttgagaataataaaaaaggaaagtgttcaattggaacatgaaaacgtgacagaattggtcctagttactcttcggaacggaatagaagaaggggagaggatctcgaaccgaactaagaaacggatccaatgacttcaaaagaattgacgaagagccatatgaagtgaaaatc

SEQ ID NO: 214147 - DNA, 448 bp, Glycine max
  unsure (1)..(448): unsure at all n locations
cgagagatatattcatcaatttcgattctttttcgatcgagatgtatggattcatgggtctatgtgtctatatagatcctgttcatggattaacgaaaatgtgcaaaagctctatttgcctctgccattctatgagtctcttcctttttgcgtatggcatcgccactacctttggcagcatccactaattcggaacttaatttgaaagccatatttcgacccggacgttttcgggatgcccccaataaccaacgaatggcaagtgcttttccttgtgtggatcctatttcaacgggaacttgatgagttgatccgcctacgcgtcttgcttttactgctatatcgggagttactccacgtattgcttgacgtanaacagatagtggatttgtttctgtcttttgtgaatctttntcatagctcgatagataatttgataagccaatga

SEQ ID NO: 214148 - DNA, 486 bp, Glycine max
caagtcaaataataaccggaagattaacattttcagtatgtccaaacatcaatacacaatgaaagttatgattcataaaaccaacattgtggatcaaaaggaaaatataaaaccaaaatttgttctaaacttaatctagcaaccaaataaaatacaagttgtgcattttggctcatcatttgctttccagctggtcaaatcgatcccacgacactgacagggacttattttgataacagtcaatatcaatgtgaatacaaggcttttctgccagattacacatttttcctctcttgctataagttagcaatagaaaatagaaaacctgttgatataggtaacagaacatatagctcgaattattcttaacctacttattgataccctgggtctatacaccatccatgtgaaatcttttctatcaaaatttgttgttgaccaaaaatgagaaacgagcctacaaaataaccaccaaattaatgggga

SEQ ID NO: 214149 - DNA, 436 bp, Glycine max
gtgatgggcgacgagtcggataagacgaaggagctcctgaagcgggagaaggtggagaatgtgcctcacttcagcttctacaagagcaaggagaagatacacgaggaggaagggattggtcccgacatgctggtaggggatgtgctatactacggggacaaccactctggtgtggtgcagctgcacaacgtggaggacgtgcagaagctcatagaggaccacaagctggatcacaagctcatcgtgctcgatgtgggtctcaaacattgtgggccctgcgttaaggtttatcctacagtggttaagctctcgaggcagatggactcggtggtgttcgctcggatgaacggggacgagaacgagagctgcatgcagttcttgaaagacatggaagtcatccaggtccctacctttctcttcataagagatggcaaca

SEQ ID NO: 214150 - DNA, 501 bp, Glycine max
ctacaatagtaaaaaatttattattgaaacaaaattatatatgaatttcttaccataataatatcacattacgagaatcacaacaagtaatttaaaacaacatacctaattcatatccccaaaagaagaaagtgtcatgtacatactgtttctgcaaccaataatagataatagatcattacatgacacaaattccttctctttcttcttgaggaattaacgaggcaatatcatttgctactaattgggcatccatgttagctccaaagaaaccccttcttgacagcccaacacaatacaaaccatttcgacctttccaatgatttgggaaactgttttttggaaagccatcctcatttagaagatcatcaccccccttaagccacttttgagttgatctcttgaagcctgtacagaaaacaattgagtcgaatgtgtacgatttgccatcctggaacaaaacttcattacctcttatactctttatttcagctggcaaca

SEQ ID NO: 214151 - DNA, 331 bp, Glycine max
ccactaccaatggtgattttgttcaaggaaaagatctcgcaatggttaaagttaatgtagcatgtgctgctgttggcttgacatcaagttacactccaactccattgttggaatctggtttgcaaaaagacagagggttaattgcggagtattttggaaggatgtcttacgttgctcacaacgttaatcagccccaagagaaagatttgttggagggaaatttttcctttgatattaaatctcgctctagattggaaaaagtttcctctacaaaagcacaatttgttagtggaaaaaccttcaaatatgatataatgggcgctggttcaca

SEQ ID NO: 214152 - DNA, 539 bp, Glycine max
tggacatattggtgaaagacatcaatggaaatccatacatggttccaaacacagcttttgatgttggaatgctagatctaacgcacccaaaaactgcaacttggttcaagcagattctacgagaaatggtggacgatggagttagaggatggatggctgattttggtgaaggccttcctgttgatgctgttctatattcaggtgaagatcctatttcagctcataacagatacccagaactatgggccaaaattaacagagagcttgtggaagaatggaaaagtagctccctggacaaggtgaaggaagatgaagacgagggcttggttttcttcatgagggctggttttagagatagccctaagtgggggatgctattttgggaaggagaccaaatggtcagttggcaaacaaatgatggaataaagagttctgttgttggcctactcagcagtggaatttctggctatgcctttaatcacagtgacattggaggatactggacagtaaacttacctatagttaaatatagaagaagt

SEQ ID NO: 214153 - DNA, 513 bp, Glycine max
ctttggaggagtatggtaccaatttgaccaagctagcggaagagggaaaattggatcctgttgtgggaaggcagccgcaaattgaacgtgtgactcaaattttaggtcgtcggactaaaaataatccttgtcttattggagaacctggtgttgggaagacagcaattgctgaaggtctcgctcagcggattgcaaatggtgatgtacctgaaaccatagagggaaaaaaggtcataaccctcgacatgggtctgcttgttgctggaactaaataccgtggtgagtttgaggagaggttgaagaaactgatggaagagatcaaacaaagtgacgagataatacttttcatcgatgaagtgcacactttgattggagcaggagcagcagaaggggcaattgatgctgctaacatactaaagccagctcttgcaagatgtgaactacagtgtattggagccacaacattagacgaatacaggaagcacatttgaaaaagatcctgctttggagaga

SEQ ID NO: 214154 - DNA, 559 bp, Glycine max
aaagtagtagttctagcggttgactcgcttttttcaaattgtttttcattattaagaaaaggtaacgaagataaaatacgagcttgttttatagcaattgttattaatcgttgttgttttaaggtcaatctatttacgcgtctggataatatttttccttgttcactaataaatcgactaattaaacccatgtttttataatcaattcggtcccccgattggatcgggggcaaacgcctacgaaaagatcgcttggatttcataaagagtcgcttagatttttccatggtttatttatccctattccaaaaatcacatttattacaagaaatactataaaggatttgtttttttattctgacttttttaatatatgttgttatttttttaatatatgttgttatatactgatatttgtatatattcaactgttaatgatagaatacagatagatctatctatatagataagaaaaatagatcattttacatgttaaagtctttggttcgaaggtaacacacaagcgatcaatttgatctatttctttttttctgcgtga

SEQ ID NO: 214155 - DNA, 554 bp, Glycine max
caataatggcatcttaaagattgcagattttggtctggcaaattttattgacccccatcacaaggttccattgaccagccgtgtagtaactctgtggtatagaccaccagaactcttacttggagcatctaattacggagttgctgtggatttgtggagcactggttgcatactgggggaactgtatcgtagcagacctatattacctggaaaaacagaggttgaacaattgcataggatttttaaactttgtggctcaccatctgaggactattggtgcaagctgcggacgccacattcaacagtattcaggcctcctcaccattataggcgttgtgttgctgaaacatttaaagaatatccatctgctgccacaaggcttatcgaaaccctactttctttagatcccacacttcgaggaacagcagctgcagcccttaagagtgaggtaagtgcttttatgtttacaacaagtggagtacttatgtaacctggatgagattggacttcatccttatacaaatgtactatactcattgtgtgagaattgagta

SEQ ID NO: 214156 - DNA, 509 bp, Glycine max
ggctcgagtgtgaatgtgccttgaccttctatcttcaattctaaacgggggacagggtcagacatggctggctacggctccactgacggagctgacaacagagctcttgtgaacctgaatgggtctggacctggggtttcagatcccagatcatgcttctttgggagcagctagaagaaggttattggttcaagggtccccagcacaaagatttcctctggaagcttcaagattgttgctgtacaagagaagacagagattgaagagacccagcacaccgacaaggacagatggaagggtcttgcctatgatatctcagacgaccaacaggacatcacaagatgaaagggtgtggatgactcccttttccaagctccacaggatgctggaactcactatgctggcatgagctcctacgagttccttagcactggacttcgccagtactcggacaaccacatggatcgattttacattgctccacttttatggacaaacttgttggtcac

SEQ ID NO: 214157 - DNA, 581 bp, Glycine max
gattcagtgcaacaaatctatgtatggcatttatacaaacatccaacactaccaaagagtgctaccaggaataactaattacaactaccaattaatcatcacaacaaactttaattacttatcatgcatctgtatgctctacaacatcattctgcccctctaacatgtgcatcatatacataattaatcatcgagcaggtactatagaactggaggcagtagcattagatgtagaggaactagttgaggcaaaaatatctctgtggggctttaatttagactcaataaagataggcattgaaggtctcatatgctcaagtgcattgctactgagtagcactactacttcagacatagctggtctcatcgcagccgatgcttgagtacacaacaaagcaatttctatgattttcttcacttcttctgcatcatagttatcattcaagggttcgtccaccaactccaagtgcatgcctctctcatacaacttccatgcttgtcgaagaagggactcttcctcaccatcatcatcaactctcacatcagtactcttttgaccacttatgatttctagcactaca

SEQ ID NO: 214158 - DNA, 459 bp, Glycine max
caatgtcagagaataaagtggaaatggcgaggggttcaaagcaagctgttaatggagcaagtttggtagaaagagatcctagcctggccttgacaaagacaaagaaatctacaacctctaaagaacttccaccactggaagagctaaaagttttgccctcagatgaaggattcagttgggccaatgaaaattacaattccttgcaaagatcaattgatgtttggtcttttgttatttctttacgtattcgagttctgttggacaatgcaaaatgggcatatttgggtgactttacagaagaaaaacagaaaagcagaaggcggaaaactgctgcatggctaagggagtgtgtattacagcttgggccaactttcattaaacttgacagttatcatcaacaaggtcggatctatttccccgtgaatttgtagaggagcttgcaaaattgcaggacagggt

SEQ ID NO: 214159 - DNA, 425 bp, Glycine max
tctttttttttttttttttttttttttttgtattgttttgttttttcaataaactatattggtcttatgcatatttttaagatcaatatacaatttgcctttagggcgtgtacttaatttaacttggaggattgaggaagccataatttagaatgaaaatgggaaaactaaaagttatttggctaacctattgtaccaaagggtgatgaaaaattcttttctccttacaaaacaatgatattcactttatcatgaaggaacagtttcttgcaaatacattaccctccaatcatgtttctgtacaactcgaacacgaatatcgtatgcttatgagaaaaatatgaatggaaaaagagatcaagaatctatctatatataaataaatatatatcatgcatatgcttgaagcccgaaggagttgaatt

SEQ ID NO: 214160 - DNA, 538 bp, Glycine max
  unsure (1)..(538): unsure at all n locations
gacatatactcctttgggatgtgcatgatagaaatttttacttctgagttcccgtacagcgagtgctctaaccctgctcagatatacaagaaagttacttcggggaagctaccagaagcctattacagaatccatgacttggaagcccaaagatttgtgggaaaatgtttggcaaatgtctcagagaggttgtcagcaaaggagctcttgttggacccatttttagccaaggaacaactagactctccacttcctagcccaacattacctaaaaaacaagcccccacactcaatttcactgcatcacttgccaaagagttatctcagccaaagagtaaccaaacaaaggactcacacatgacaatcaccggatcaataaatgaagaggatgacacggttttcctgaaagtacaaatttctaacaaagatgggcanaagagaaacattttctttccatttgacaccatatacgacactgccattgatgtggcaatggagatggttaaagaactggagattagtgacttggaaccattgg

SEQ ID NO: 214161 - DNA, 480 bp, Glycine max
aaatatattaaacacgtaatcttattatatttgagtttcaaattcatggacataaagaaatctagaagaattaatctctctcatacaagtgtgaatgaagatatatacgtttaaaactcctcctaaaagtgaattgagcgagggaacaagccttcaattctttattgaaaagaaaaaatgagggggataagaagatacatacttcattctatataatatgcgtttaggcagcggggcttgctaccttagcaagtaagattatcaccggtggcaacaccgcattgtctacagtagtcagtgtagctattaacgcgagcctgaactgtggaagggttggcaccatcacattcaagttgaccgtttatggctctgatgggcgcaccaaacccttgagtgatgacagggcgcacgtgttgcatccatgtccacagcgctgtcttgaaagacatcacaggatcattgcccactgtttcaggagcg

SEQ ID NO: 214162 - DNA, 523 bp, Glycine max
  unsure (1)..(523): unsure at all n locations
agatactggaggtccagcatctgaatcatcatcatatgtgcttccattgtctgttactatctttccaccacaatttatatgaagagaatataagcacatatgatgatgattcagatactggaggtccagcaagatttcaccgaagtggaacaaaaaattgggcatatatcaatactggtaactttatggataatgacgctggcgcctattatatcgtgcaaaataaaactttgctttctatggacaatgttgacctatacatggatgctcgagtttctcccatttctcttacttactatggattttgcctgggaaatggaaactacacggttaatctacattttgcggaaatcatgttcattgatgatcaaacatttaacagcttaggaagacgagtatttgacatctatattcagggagcgctagtgaagaaggactttgatattgtagaagaagcaggaggaattggtaaggcagtcatcacatcattcactgctgttgtgactagntataccttggagat

SEQ ID NO: 214163 - DNA, 524 bp, Glycine max
gcaactgtctagcctctcaattcaattatctacatgaaatgtttaatttacaagccaagagcaccaaggggggtcttcccttgtccagcctcaaagtagaaaatcagcatggccaacatagcaatcctggcatgcttaatctcagccaatttcaatctttccagcttctctgtatccggaatgtaaactccatccttgatagtgccagcaaagctcaaagggtcaaagaatttgcctcctgggtagccttgctcaccagtggcattggcaaagttctcagctgttcttgaccatggagtggcccattccactgactgtgagtctgggttgaagaaatccacccatctcttgctctcaacccaccccatgaggatcaactgggttcccagaagagtaccaaaggagaaaggagcaattgcatttgggtcagctccagcctcaaaccatggcactccactccatgcctgccccacaaagattcctagaactgcagccattgcccacctcccatgaatgagctcagc

SEQ ID NO: 214164 - DNA, 282 bp, Glycine max
gtcattttattggctggacttcagggagttgggaagacaactgtttgcgcaaagttggcaaattatctcaagaaacagggaaaaagttgcatgctagttgctggggatgtttacagacctggtgctattgaccagctcgctgttgtgggaaaacgggtgtatgtacgaaagatttcaggagagtcgaatgtggaatcccttctggatttccgatcacggttatacgtaatagcattcctaatgatatgctcattagatatagctatgaaagattactgcgcc

SEQ ID NO: 214165 - DNA, 365 bp, Glycine max
atattaaaacacactcattgcacatagtaatgcgctttatttaagggaataaaatattacatactagttcacaaatgccaaagggcactcatcaaccagatatttgagactcttacagttctcaagaagtcgcgtcagcatagggttaggggcgttagaactcaaaatttcattcttaacgccaaaaagaacagccagtaaagctactggaaaaggatcaactctagtaagaaaaacaattttcttacctctcccaagtgctgggcgaatccttttggtgatatctgaggagcgattggtaactgcaaaactaatccaagccggggtgggtaaaccaccacgttcactaccacatgtaacattta

SEQ ID NO: 214166 - DNA, 513 bp, Glycine max
gttcagtactactgaaattcaaggagaaaaccaattatgaacttgtctacaggattgatgagatagttggtgatgcagttgattcagctattcgggatatcaaaagatttgctcattctgtgattctccataagtcctctgtatatccccttaacgacttcttcctgactggctctacaaagattgtgccaaagttcaaatcttctaatatctctgtttacgttgaaacattcagcaatgagtttgtatcttctgcatgggatttcttgtcagattcaaccgtggagatcaacacatttgttcaagatgctgaaattgatggtgtcatcacagacttgccaaaaacagctaatagatacagaacgaacaaatgcttaaatttgggtgagaacacaccttcatacatgaaaccagctcaagtaggtggccttttcaaacaaatagccaaatattccttgccacctgctgtggctcctgacccttgcctgactgaagatgaagtgacagaacccc

SEQ ID NO: 214167 - DNA, 534 bp, Glycine max
  unsure (1)..(534): unsure at all n locations
gaaaaatcactctttgtctctcttcctcttctgggattgttcaatttgggaatgtggcgcatgaatcccaacccgggtctgaaattttcagatctcttacttttacaccccttgtcgcgaaccaagaccaaacacagacacacccttccatcaacgttaactccgtcaaaatcaacggcaaaaaggtttctttcgacacccccttgggtgggggtgctcagctgagcacggtggtgccttacaccactctccaaacctcgatctatgcaaacttcgaaagcgcttatttgaaagccgcttcgtctatgagcatgaaaagggtcgatccagtttccccctttgggctctgcttcgaatccaacggcgttggaagctcccaagtggggcccaacgtgccggtcattgatctggtcctgcagagcgagatggtgaagtggagcatacacggaagaaactncatggtgcangtgaacgacgatgttatgtgcttangggttgttgatggaagtgagaatccgaggaaccctattggga

SEQ ID NO: 214168 - DNA, 535 bp, Glycine max
gcctgtataacactagcaacagaaaatatattgccataaataaatccgtggctagattcattaattttgaatttaaaaaactaaatcaaagaaggaacatgaaactaatcatctgatgtaattgtttcatgatcagattccaccttggaccacttattaatacgattacgagctttagttacctgttcgtcccaatcagttttgtaagtgattacagtcagcactacggtttgaataaatgttccaaacaacattccaatccaaatacccttgacttgcaaattcaaaacgttaccaagcacaactcctacaggaatacctatgatgtaataacaccctatgttcacatatgctacaatactttgccaccctgctccaatagcaacccctgagagtacaggttgaacactgtttagtagaatagagattgccaacaaaggtgacaagtccccaacggcatcggccacgtctttatttgaggtaaatatgtaagcaagttttcccctttaaaattagaaaataagaagagaacaaa

SEQ ID NO: 214169 - DNA, 517 bp, Glycine max
  unsure (1)..(517): unsure at all n locations
ggttatccaactgatccagagctcatatatctcactgatggtgcaagcaaaggagtgatgcagatattaaatactatcatcaggggtcaagacgatgggattttggttccagtcccacaatacccactctactcagcaacaattgctctgcttggtggtacccttgttccatactaccttgaagagacagcaaattggggtcttgatgttaatgaacttcgtcaatcagttgaacaggctcgctttaaaggaataactgttaaagcaatggtgatcataaatcctggaaaccctactggtcaatgccttagtgaagctaatctaagagaggttttgcaattctgctatcaagaaaatttagccttgcttggagatgaggtttaccagacgaatatatatcaatgaacgacccttcatcagttctagaaaggttttgatggaattggggccacctataagncaggaagttcagcttatttcttttcactctgtgtcaaacgttattatggtgaatgtg

SEQ ID NO: 214170 - DNA, 462 bp, Glycine max
ctctcctccgtttcaacagtgacggcgctgcttcctctgttcactcttctgtttgctccgtcaactccgttaacagcagcagttaccgttccaccagcagcatccgcgagatcgatctgatcccctccgacgccgtctacgacctccgctgcatcgccgagcgcatgctctcctccggctacctccgcgagtgcatccaggtctacggcagcgttcgaaaatcctacgtcgacgcgagcttccgcaagctccacatcgaaaagctcagcatcggaaacgttcagcgcctcgagtgggagcagctcgagaacaaaatcagacgctggataaaagccgccaaggtctgcgtcagaactctgttcgcgagcgagaagaagctctgcgagcaaatcttcgacggcgtcggaacttccatcgacgacgcttgcttcatggagacggtgaaaggtcccgcgattcagc

SEQ ID NO: 214171 - DNA, 336 bp, Glycine max
cactatctcatttctttctattcatttcttcattccaccatcaccatggtcaaggagaagaagaacgtggtggtcaagaacaagaagccaaacaacaatgccgacgagcttcacttccgcggcgtccggaagcgaccatggggccgctactccgccgagatccgtgaccccggcaagaagacccgcgtctggctcggcaccttctacaccgccgaggactccagccgagcctatgacgccggcgcccgcagattccggggacccaaaggcaaaaccaacttccccgtgccacccgacgacagcaacaacaacgacgttaacgtgaaccaaaacaag

SEQ ID NO: 214172 - DNA, 542 bp, Glycine max
  unsure (1)..(542): unsure at all n locations
ggtggaaccactcaatacactgtgaacaaccagatggtgaatgccaccctcatgaacattgctgataaccccacaaatgttcagcttcctggcatgtacaacaagcaagagaacccccgtgtgccaatcatcgtcaccggtaacgatttctcaacactctatgctcctctcatccgtgatgggcgtatggagaagttctactgggcacctacaagggatgaccgagttggtgtctgcaagggaattttccgcactgacaatgttcctgaggatgaaattgtcaagcttgttgacaccttccctggccaatctattgatttctttggtgcactcagggctagagtatatgacgatgaagtgaggaagtggatttctggtgttggtgttgacttgattgggaagaagcttgtgaactccaaggaaggacctncaacctttgaccaaccgaagatgactttgagcaagctcttggagtatggtaacatgcttgtncaagaacangagaatgtgaagagagtacaactggcagacaagtacttgaa

SEQ ID NO: 214173 - DNA, 499 bp, Glycine max
gaaccacaatgaacaccaggaaatattaattgattatctcaagtgttttttttagtagtgagacaatgtaactcaaaattataaaggataacaatccaatatgaacaagataaattatttgattatatcaagtcatagcttctcttcaagtggagaatgcttaggttctcagggtgtgtataagcaggttccatcatcacttcttgcagttgggtcgaagtttgaggcatttggatcagtacaaccttcaggaacgggaatttttacttgctgggctgctttgccatagaaagttcctcttttgatggcatcctgattagcatcaccaagagcagcctcgttcaagtacttgtctgccagttgtactctcttcacattctcttgttcttggacaagcatgttaccatactccaagagcttgctcaaagtcatcttcggttggtcaaaggttggaggtccttccttggagttcacaagcttcttcccaatcaagtcaaca

SEQ ID NO: 214174 - DNA, 517 bp, Glycine max
atcttttctgaattcaatcaatgtgatggattactccttgcttgttggagtagattctcagaagcacgagcttgtctgcgggatcattgattatctcaggcagtatacttgggacaaacatcttgagacatggatgaagtcttcacttgttgtgccaaaaaatgtgttgccaactgtaatctctcctaaagaatacaaaaagaggttcagaaagtttatgtctacatattttttgagtgttccagatcactggtgttcccagaaatcctccaatccttgcaaactttgttgctcaggggaagatgacccttcccagcaaaagccctagcacaagattgccaagtggtttctctgtccaaatctttttgattcaatttctcaaaagagaaaaaaaatacatattgagaaattatgcaagtagttagcaagtactggatatagacagtcaatattgattataaatctagccctgctattctgcgatttttaacgaatttctagggatgctgtcattaca

SEQ ID NO: 214175 - DNA, 491 bp, Glycine max
  unsure (1)..(491): unsure at all n locations
ctcagattgcaattgcctcttctcttctcccagaatcggtgtaggttacaggtttaagggttttgttttcatttaggtcactaatccgatatcatgaagctcgatacgactagtctcgaatcgtttcccacactgattgcacctcaaaacgacgtcgccggagaactctccgccgctccgttctttgaccttccgaattccaatgacttcgatgggttcttgaaagacgctattcagatggtgaagcccgcgaagggtactacaactcttgcttttatatttaaagagggtgttatggtagctgctgattctcgagctagcatgggaggatatatatcgtcgcagtctgtgaagaaaattatcgaaatcaatccgtatatgcttgggacaatggctggtggtgctgctgattgccagttttggcacaggaatctcgggattaagtgtcgtttgcatgagttggcanataaaaggagaatntcagtgacagg

SEQ ID NO: 214176 - DNA, 498 bp, Glycine max
tttgcattcgccgacttctcacttctaaatctcccagaccaatttaagagctcctttgactttattgatgggcatgttaaaccagtggttggaaggaaaatcaattggttgaaagctggacttatagaatcatggtttgtgataactgttagcccaaactatgctaaagaactggtgtcaggtccagacaagggagtggaattggacaacatccttcgcaaaattgatgatgatggtcgtttggttggaattgtgaatggcatggatgttcaggagtggaatccaaccactgacaaatatatagctgtcaaatacgatgtttcaacagtattggaagcaaaggctcttttgaaagaagccctccaagcagaagttggattgccggtcgacagaaatattcctcttattggtttcattggtaggcttgaagagcaaaaaggttctgatattcttgcagaagctattccccaatttatcaaggagaatgttcagttggta

SEQ ID NO: 214177 - DNA, 525 bp, Glycine max
gagagaagcaacaagctttcttctgtctactccgatgattcggagccatctagcatgtttgatgaggtgctgctttgtaaggatggtaagagtccatccattttttatgctggccgtgaaccatcaccatcgcagattgctgactcaggaggatctaatgggaagaaaacacgatcaaagagaggttccaataaggggacaagggcaagcgtgacgacggtggatttatggactttgctaattcaatgtgcacaggctgtggctagctttgaccaaaggactgcaaatgaaacactgaagcagattaggcagcactcttcaccttttggcgatggacttcagcgtttggctcattacttcgccgatggcctcgagaaacggttagctgctgggacaccaaagttcatttcctttcagtcagcatctgccgcagatatgttgaaagcataccgagtgtatatctcggcatcaccatttctaaggatgtctaatttcttggcaaccgcactattctgaagctagcgc

SEQ ID NO: 214178 - DNA, 463 bp, Glycine max
ttccacttccaacgccatgcctctttttggaattttccagataccctcatttatggacataatcactgacctcgccatgttcattactccgctatggattgcggttatcgtcggcgtcgtcgtgggctgggcgtggaagcccaaatgggcctttcaccccaaagacgctcttctcaagtttcgctctcctcgccctcccaatccccaaaacgacaccgcttttacctactccgccaccagttcctccgcgcgtgagaaagacgcgagtgggagtcctgtggtgacggaagacgatttgctgcatctgtggaagttggttgaggaaaaagacggagggcgggcatggattcagatgatggaccgttctaccccgaccatgacctatcaagcgtggcgtaaggatcctgaggtacgccttacctttcattcttcccttttgcagtttggtagaattgagtgagtg

SEQ ID NO: 214179 - DNA, 417 bp, Glycine max
gactatataagcaaagcaagttcctttctcagaaagtttagtaaacatgtgtttgttgagctgaacttaatagaagtagaaataagtatgtgtagtaagaaaattaataagtgacacgaacaccttggtacctgagaatttccccaatgagctcccctttgccagaaccgacgtacctgccttcaatgttgccatctctgatgaagagaaaggtagggacctggatgacttccatgtccttcaagaactgcatgcagctctcgttctcgtccccgttcatccgagcgaacaccaccgagtccatctgcctcgagagcttaaccactgtaggataaaccttaacgcagggcccacaatgtttgagacccacatcgagcacgatgagcttgtgatccagcttgtggtcctctatgagct

SEQ ID NO: 214180 - DNA, 587 bp, Glycine max
ggattggtgaggtaaacttgaattgaagtgaagaaggagatggctgcaacctcttccttgtgctcatcgaccctccaatcccagatcaatggattcttccttcacaaaacctctctttcccatactccttccctcactttctccaggaggaaaatttcaaccacagtgaaggctacatctcgagtcgacaagttttcaaaaagcgatatcattgtctctccgtccattctttctgcaaacttttcaaaattgggagagcaggtgaaagcagtggaattggctggttgtgattggattcacgttgatgtaatggatggtcgctttgttccaaatattacaattggacctcttgtggttgatgcattgcgccctgtgacagatcttcctttggatgtacacctgatgattgtagagcctgaacaaagggtaccagattttattaaggcaggagctgatatagtcagtgttcattgtgaacaatcttccaccatccatttgcatcgtacagttaatcaagtgaaaagtctgggagcctaagctggagttgtcttaaaaccccgtacccccttaagtgccatagaatatat

SEQ ID NO: 214181 - DNA, 512 bp, Glycine max
ccaactaatttctttacactagctttgattgcaacgatacaagcgaattaattcaggggcaagaattgaaaaatcacttggatgctatgttatacatatctaaagttcatcctttgatgaatgctttattaaagaatgcctaaacttctcaggttattcaaaaaggtttctccaacctgggagccaaccttaacaaatacagcagggtatcctattggagcttctacccattcttcacgtccttgtttggaaaacacttttcctgtccagatatggatccaactgctactctctcccaatggaaaataagctttaacttttttctttcctttgtcaaggacaggcaccactaggaactcagaaccaaccaagaactgctgataactcaaacgatgcacacattcatcatcaggataatggagaaataggtggcgacatatgggcaatcctttctgtgcagcttcctttaccagttgaattcggtaaaatttccatgctttgtatacttttgc

SEQ ID NO: 214182 - DNA, 298 bp, Glycine max
aattcgaggacagccagtgaaccagaaggctggttgctgctcgacttagagagagacgaagtatttggggtcttagaagttcatgtgtctcagtggcatctaaaactagcttttcacattgctttcatatcaagattgttcgtcatgattcgttcctcttatcgttaagccgttgttaaaacttccattattttctatgtatttgattttaaaagaaaaaacatttgtacaaaattaggaatattggtgaatagcagtatttgccttgttctttgtccctcaaaaaaaaaaaacaaaa

SEQ ID NO: 214183 - DNA, 281 bp, Glycine max
gagggacaaagaacaaggcaaatactgctattcaccaatattcctaattttgtacaaatgttttttcttttaaaatcaaatacatagaaaataatggaagttttaacaacggcttaacgataagaggaacaaatcatgacgaacaatcttgatatgaaagcaatgtgaaaagctagttttagatgccactgagacacatgaacttctaagaccccaaatacttcgtctctctctaagtcgagcagcaaccagccttctggttcactggctgtcctcgaatt

SEQ ID NO: 214184 - DNA, 488 bp, Glycine max
aaaaacaagtagttgagaactaagaagaaggaaatggcttcctcaatgatctcctccccagctgttaccaccgtcaaccgtgccggtgccggcatggttgctccattcaccggcctcaaatccatggctggcttccccacgaggaagaccaacaatgacattacctccattgctagcaacggtggaagagtacaatgcatgcaggtgtggccaccaattggcaagaagaagttcgagactctttcctacttgccagacctcgatgatgcccaattggcaaaggaagtcgaataccttctaaggaaaggatggattccttgcttggaattcgagttggagcacggtttcgtgtaccgtgagcacaacaggtcacctggatactatgatggacgctactggaccatgtggaagctgcctatgtttggctgcactgatgcttctcaagtgttgaaggagctttaagaggctaagactgcataccccaatgg

SEQ ID NO: 214185 - DNA, 403 bp, Glycine max
agcttattcattagttctcatccattaatttccattggaggccgaaaacagaaaccaaaaattccgggtggtgaaatttcattaaggaaaaacaaaggggaatgtggtttaagtacaacaaacaaaggggggggggtaccgatgctttgcaaatttttcaatgacttaaaaacctgggggcttgtaggcgaaaaaactgatgcactggacttggggaacgttgtcaaatcccatgattcgggtgaagcccttgggggatgcagtcttagcctcttgaagctccttcaacacctgggaagcattagtgcagccaaacatagggggcttccacatgggccagtagcggccattataatatccaggggacctgttgtgctcacgggacacaaaaccgtgctccaac

SEQ ID NO: 214186 - DNA, 477 bp, Glycine max
  unsure (1)..(477): unsure at all n locations
aaagagttgaagacttgaagtgaagaaagaaagaattgagaaaggatagggtttagggttggcaaaggaaggaagggatggaagcagctgtggtggacgtcggctctaagcttctcaaagcggactttgcaattcctgaccagactcccgccatgataattcccactcagatgaagcaattgctcgatgatggatcagtcactgatagttcactggctgacaatgtcaccgttgatcccgtcgtgcgaggatttattagagattgggatgccattgaagatttgttgcaccatgttttgtatactggcctcggatgggaaattggcaatgaaggacaaatactatttactgatccactttgtacccctaaggcgaacaaagaacagttggtgcaactaatgtttgaaacattcaacatctcagggttttatgcctcagaacaagcagtgttatcactctatgctgngggacgtatct

SEQ ID NO: 214187 - DNA, 550 bp, Glycine max
agcatgtaccaaaccatacagtattattatcagttaattaatacaaacaagcataggaaggttgatggtatggaggttttctgcagttgatgaatcctgcccataaaaaagatctcgataccttaaatatcaaaacaaaagcgcaattataacaccctttcacttcagctgcgactttatatctggttgaattcgtttttggacaagatcagaacttgttgataaaatcgtatatgtaattatcgatttcctctgctgcttcttgattattgaagtgagccactcctttctgcacaatcacttgttctaaatttggcacatcttgcttgaaccctccgccgtggatatactccttcaagttcagcgagttgtataccatgtccaactcacctgttatgtattttacgggcaccttgatttgccctcctgtccatggtgccgtcaacttccaattttctgaaatacatacaataattaattaattaatggtcttttttattgggacccgtcatgttgacaaatattttcccagaaagaacattaacttaag

SEQ ID NO: 214188 - DNA, 460 bp, Glycine max
  unsure (1)..(460): unsure at all n locations
atatatatatatatatataagtagtatatattgacaagccttacaagaccaacaagtctcctcaagaaaacaaaatacacaacacattttgtttcttacatcatttaacggggcacataattcacgatatcatccagctactacatacaaactcttgctactaacacatcttaatgactgtacataataataataataataatggggagcagaaggatgcacattgcacagaatcaattattaataaactcaaagcgcatgagaagctttacagngttgtatttatctcccttttggctatgcagtggaattgctcgaatgccacttctaagctcccagataggtaggcatgtttgtccaccaaagtcatctttctcagacatgtcatactcgtgaacttttacgcgaagcaaggccaactccggaacagtgagagggaactcaaatgcctcattccatg

SEQ ID NO: 214189 - DNA, 493 bp, Glycine max
  unsure (1)..(493): unsure at all n locations
caggactccagaattgatgttttcttatgcctcatctgctcatgaacgaggcatacaagtcattattgctggtgctggtggtgcagctcacttgcctggtatggttgctgctcttactcccttgcctgttattggcgttcctgtgcgtgcttctaccttggatgggattgattcactcttgtcaattgtccagatgccgagaggtgtccccgttgccactgttgcagttaataatgcaactaatgctggattactggcggtgaggatgttgggtgttgccaatgatgatcttctgtcaaggatgagtcgatatcaagaggaccaaaaggaaagcgtattggacaaaggagataagttagaaaaacatggttggaaatcctacttaaacaatagttaattatccccattaatttggtggttattttgtaggctcgtttctcattnttggtcaactacaaattttgattagaaaagatttcacatggatggtgta

SEQ ID NO: 214190 - DNA, 533 bp, Glycine max
  unsure (1)..(533): unsure at all n locations
tgaagttgaagtcttgcccttctctcttcaactccaaacacaagacatcatcatccatggctgcctccgtctccactgtcggagctgtcaacagagctcttttgaacctgaatgggtctggacctggggtttcagctcccagttcatccttctttgggagcagcttgaagaaggttattggctcaagggtccccaacacaaagatttcctctggaagcttcaagattgttgctgtagaagagaagaaagagattgaagagacccagcagaccgacaaggacagatggaagggtcttgcctatgatatctcagacgaccaacaggacatcacaagaggaaagggtttggttgactcccttttccaagctccacaggatgctggaactcactatgctgtcatgagctcctacgagtaccttagcactggacttcgccagtacttggacaacaacatggatggattttacattgctccagcttttatggacaaacttgttgntcacattaccaagaacttcatgaccctgcccaac

SEQ ID NO: 214191 - DNA, 403 bp, Glycine max
acacgatgcaggaagcgacgaaggtgataataatcggtgccggaacttctggtatcgccaccgccggttgcttaacgaagcaatcaataccttacataatgctcgagagagaagactgtttcgcttcgctgtggcagaaatacacctacgatcgtctccaccttcatttgaggaagcaagtttgcgagttaccgcacttaccgtttcccaagtcttaccctcactacgtgcctcggaagcagttcatagactacttgggaaactacgttaaccactttgagatcaagcctctgtaccagcgtgcagtggagttggtggagtatgatggatggaaagggatttggagagtgaaggctcagaatagaagatctggtgagcttgaggattacgctggaaagtacct

SEQ ID NO: 214192 - DNA, 505 bp, Glycine max
  unsure (1)..(505): unsure at all n locations
gaagaagggttgaaggaagaaaaaaagaaaaacacagaaatggagggtgggaacaacagcagcagtaacaacaaccctgatgagttggcggtggggtgcttgctttcgatcaggacaacgttgggcgacgaattcgaaggccaggtcgtcaccttcgatcgcccctccaacattctcgtactccaggagccttccaaacctagccctcgtcgaaatcttaggttgctcaaagccaattacatcaaagacttcacctttctcggccatgcccaagaccctcttgatcccaacacctgcttccttgacctcaccgctctccaacaaagggaagatgttgctgttagacaagcggaggctgatgctgagaggattgnggttggtgttaccagcgaggcacagagcatctttgatgctttgtccaaaacgcttncagtccgctgggacangacagtcatagttgtgatgaatgaggtgcgtgtcagcagtccttatcactctgaaatct

SEQ ID NO: 214193 - DNA, 481 bp, Glycine max
taacagccaaagcatggcttctctctcttgctccgccaacgaccttgccccactcttcaacgacaccgccgccgccaactacctctgcgcccaattcgattccatttctagaaagctcaacgtaacaacctacgccgtcgacaacacctaccttctgttttcagcgtatcttgtcttcgccatgcagctcggcttcgccatgctctgcgccggctccgtcagagccaaaaacaccatgaacatcatgctcaccaacgtcctcgacgccgccgccggcggtctctcctactacctattcggctttgcattcgccttcggcggcccctacaacggcttcatcggccgccacttcttcggcctacgaaaattcccgaaggactcccctccctccggcgactacagcttcttcctctaccactgggccttcgccatcgccgccgcaggaatcaccagcggctccatcgtcgagagaacacagttc

SEQ ID NO: 214194 - DNA, 444 bp, Glycine max
aaaataacacacacttcacacattattacgacaattaaaagagggggggaaattttcaaatagacagagcatactcaacaagaggggcatgtctaatttcctttattgaattaaacaaaccaacaaacgaaagaaaacccaaattccagatcatgcagaggattccgcattttcaaaaaatctggcagtagcctgtggaacaaaaaaagctggcataagagttttaccagcaatttcaaaatcttgagaaattcccaagagaatatcaaaaactgtagactgtttgggattgtcaataaggaaactcaagtgccatgaagtttgatttgcccactcagaactccacatttcaaaaccattatttggaccacatacctttattgggaagatcaattcccaggaatggggttccgattttgtccacttacatgcatcgaaatgctc

SEQ ID NO: 214195 - DNA, 475 bp, Glycine max
  unsure (1)..(475): unsure at all n locations
cgccggccgccccacgccgccgctgacgacggagccatccaccacaagaagaggagggactcctccacttcctctcccaaggcctccgacgcgctccctctccctctttacctcaccaacgccatcttcttcacgctcttcttctccgtcgcctacttcctcctccaccgctggcgcgacaagatccgcagccacacccctctccacgttgtcactctgtccgagatcgccgccattttctccctcatcgcctccttcatctacctcctcggcttcttcggcatcgacttcgtccagtccttcatctcacgcgcctnccacgactcctgggacctagacgacgccgtaacagctccctcccccgcaattaccaaattgccctcacgggataccttaattattttctccgaggacgacganngagatgtgaactccgtcgtcgagggcgtcacgcccttctacgcgcttgagtccc

SEQ ID NO: 214196 - DNA, 488 bp, Glycine max
gatagatatgctaagcatattatataggggaaaagaattacaatacaacacgtcaaatgtcttggttgaggagaaaaaagagcgttaacacccactcaatggctcggcagaacaagcaacgaaaagtatacaggaaagaaaggaaggatccagaaggggacagggaacatgtggagtagaactcttctttcctctctccaaataattaaagatctacacagacagcaatgcaaagccaaacgtggatgacaacaatctaatctaatgtttctccattttccttcccaaatttcgcttaccctcaattttttatttattctggagtccacaattaatgactgcaaccacgtccttgacctcaagattatgatattttggttacatctttgcttgatctgttgtatttcatatggctgttcactagctgccctgctgcaatggcagacatcagagacagctctcctgctaaaacagatccagcaacaatg

SEQ ID NO: 214197 - DNA, 466 bp, Glycine max
gtgagcttcattacagaacaagttgccttttacactggtcccacagttggaggacttctgaatgctacatgtgggaatgttactgagctcataatagcaatatttgcccttagcagtaacaaaattgccgtggtcaagtattctctgttgggttctattctttcaaaccttcttctggttcttgggacctctctattatgtggtggcattgcaaacgttggagtggaacaaaaatatgatagaagacaagcagatgtgaactcacttatgctgttgttgggattgttgtgctacttgcttccaatgctgttcaaatacagtggtgcctcagctgctctcactgtagacccttcactacacttgtcaagagcttctagcattgtgatgttgattgcatatgttgtctacattgtctttcaactgtggacacacagggagttatttgaagaagaaaatgacggtaaag

SEQ ID NO: 214198 - DNA, 410 bp, Glycine max
tttttttttttttttttttttttttttttttttttttttttttttttttttttttgttttttttttttttttttttttttttatatatttatttaattaaaaaataaaattaaaaaaaaaaaaaaaaaaaaaaaaaaaaaaaaaaaaaaaaaaaaaacaaaaaaaaaaaaagaaaaaaagaaaataaacacaaaaaaaaaaaaaaaaaaaaaaaaaaaaaaaaaaaaaaaaaaaaaacaaaaaaaaaaaaaaggggtattcaaaaaaaaaaagcaaaaaaaaaaaaacccccacatttagggccaaaaccagggaaaaaaaaaaaaaaaaaaaggtctatgaaaaaaaaacaccggggaagaaaaaaacaatgagaaagaaggggggaattaaaaaaaaaggttctggag

SEQ ID NO: 214199 - DNA, 535 bp, Glycine max
aaagcaagttgttttttttttagagaagagaagcaataaatcaatcaatcaaatcattcttacattgttgttacgatggaatcaccgttcagaccagagattctgaagggaaaggttgctctaatcaccggtggagcctccggaatcggattcgaaatttccacccaattcggcaaacatggagcctcggtcgcgctcatgggccgccgcaagcaagttcttcagtccgctgtctccgttctccaatccctcgccattcccgcggttgggtttgagggggatgtgcggaagcaagaggatgcggtgagggtggtggaatcgactttcaagcattttggaaggattgatatacttgtgaatgctgcagctgggaactttctcgtttctgcagaggatttgtccccaaatggctttcggacagttctggacattgattctgttggcacattcacaatgtgccatgaagcactaaaatatctcacaaaggggggaagaggaaggagcaactcttctagtgggggatcaataataaaca

SEQ ID NO: 214200 - DNA, 498 bp, Glycine max
tcactcactcactcactcactcactcgcaagcaaaaagaaagaatcccaggcgaggaaaagatggaggggaaggagcaggatgtgtcgttgggagcgaacaagttccccgagagacagccgattgggacggcggcgcagagccaagacgacggcaaggactaccaggagccggcgccggcgccgctggttgacccgacggagtttacgtcatggtcgttttacagagcagggatagcagagtttgtggccacttttctgtttctctacatcaccgtcttaaccgttatgggagtcgccggggctaagtctaagtgtagtaccgttgggattcaaggaatcgcttgggccttcggtggcatgatcttcgccctcgtttactgcaccgctggcatctcagggggacacataaacccggcggtgacatttgggctgtttttggcgaggaagttgtcgttgcccagggcgattttctacatcgtgatgcaatgcttgggtgc

SEQ ID NO: 214201 - DNA, 401 bp, Glycine max
gaataaataaatttgttacttatggactatcaaaaaaagtacatgttttatcgcggggtgtgcatgcctatgaaataatgcatgtctaatgatcatccctttctcttttatgcagaggaaactgatacttttgttcagggacaatggaacactttgggaagaaactataattgccaaaggccataaagataaatcttccccttcctgtgtatacatttggaccgcaccaaaaagctttatttgtataggtaccacaaaaggcaccaagtaacttggagggcgcacccttcttatacacctcagctaggtgtgaagccctttcaattcttgatgaaaggaaagtttttgcaccttaagtgggattaggattctcatccatagctctgccccccctgaaacca

SEQ ID NO: 214202 - DNA, 492 bp, Glycine max
ccatcgtcctgctcatttggcacatgcttctccccctgaatactttgtccgcctggagaacacaacttacaaagacgatctatatttaaggaagaggacaaggatgcgtcggtggctttgttgtacttgtcaggtggaagagtcttacccatcaaatgaaaatgaacacctgaaaagcccaaggaattatggagatggcaaccaaaaaggctcaaaggtgtcagctcctgtcaaacctgaaacacaaaaggcacctccacctattgaagctccagccttgtctttagatgagctgaaggagaagactgacaactttggttcaaaggcattaataggtgaaggatcgtatggaagggtgtattatgcaaccttaaacaatgggaaagcagtggctgtgaaaaagcttgatgtttcatctgaacccgaatcaaataatgagtttttgacccaggtttccatggtctcaagattgaaggatgacaattttggtga

SEQ ID NO: 214203 - DNA, 558 bp, Glycine max
  unsure (1)..(558): unsure at all n locations
gcatgtatctatgaatgatggaaccaccacaaacgaggttgatgatcaacgttttcatagtgagtttcttagcactacttgtgaacttggtggtgggagtgctcggcgctgataactatagcagagatgattttcctcttgactttgttttcggttcaggaacctctgcttatcaggtggaaggagctgctaacaaagatggaagaactcctagcatctgggacacctttgcctacgctggatatgcccatggagaaaatggagatgtagcctgtgatgggtaccacaagtacaaggaagatgtgcagctaatgctggaaacagggcttgatgcctatagattttcgatttcatggtcaagattgttaccaaatggcagaggacccgtcaatcccaaaggattacagtactacaacaatctcatcaacgaacttatcagcaatggaatccaaccacatgccacgctacacaactntgatcttncacaggtacttgaagatgaatatggaggatggattagtcgtgacatcatangagacttcacatactacgcagaag

SEQ ID NO: 214204 - DNA, 479 bp, Glycine max
gcccaacatagcctgtgtcatatctaggctattaagaaacgctttaatttatgctaatcttgaagacatgcactcactacactgatttgaatagtgtaatttccgtgtccatgtacatttctataatatatttagaagaaaacaaaaattggaagaaggataaaacataatattaataagaagcaaggagctgggggaacttcatgagactaagattccctcacatctttgttctcattattatggggttgccacattttcctttgcctgtggagcaatttcttctccatcacttccaggttcactgccaggaactcccaggcttagcagcacttcctcccacttcttagcaggccccttccaggaaagatcttgagccatgcagttctttattatttctgtaaaagctggagttccatagactgcaagggcccttttgacagtctttgctatagcatccacatcagctggatccacag

SEQ ID NO: 214205 - DNA, 423 bp, Glycine max
cgcaaaatgataggaaagaaattcttatgcgttgttgtagcggtggcctttgttatgataacaaaggtgccccaaaatgtgagtgctcaaaactgtggttgtgctgaagggttatgttgcagccaacatgggtattgtggtaacggtgaggagtactgcggcacagggtgcaagcagggtccttgttattcgagcacaccaagtactaacaatgttaatgtggctgacattgtcacaccacaattcttcagtggcataattgatcaggctgactctggctgtgctggcagaacttttactcacgagatgcttttcttaatgctctcaattcctataatgactttggtagacttggttccaggatgactccaagcgcgagattgcagctgcttttgcccatttcacacatgaaactggacattt

SEQ ID NO: 214206 - DNA, 271 bp, Glycine max
tctgtgttgcgattatgctagttttgatggtttgattaccaagcaagttatgagcaagatggcagaaatgataaacagtctttgtggtggatgatgaaaaattgatgcgtgaaaggacacacctgctgttgacttgttgttcaagaatggcaatttgtacgatagatgtttggagagttgaatgtggaatcccttctggatttccgatcacagttatacgtactagcatttctaatgatatgctcattagatatagctatgaaagattact

SEQ ID NO: 214207 - DNA, 399 bp, Glycine max
aacagtttggaaccccccaaaaatgggtgcaacgacggccattgccgcactctctcttcactgcttctccaaatcccacacacacttttcaccctttcgcactctccctcgcctcacatgctccttctcttcctccatcaaattcaacatctccttcgctccccctaagcccaagcccaagcccgaacccgacgcctcaaacgagcccgacgggccgctcctcatcccgtggatcgtccggcgcgaggacggcaacctcaggcttcaatcagaacctcccccgagccttctcaatgccatcggcaccgtccaaacctgaaccaaaaaggacaataagcaaaccaaaaccaccgacgacaccgacagcaacaccactaaacctcaaaggctcgctacaca

SEQ ID NO: 214208 - DNA, 521 bp, Glycine max
gaacaggcgctctaggttaaacttgtatcattttacatacaggcacgtaatcaccgtttacaacaatttcaataaagataccagcaatccgccgggttggttcacgtccatcggaaaaagtcatatctcttctaagcagtagtttaaaatcttctcccagttcttctagactatacatatatgctgattgcaagagcatgatattggcttcacgttaaacactccggaaagtagtgtgcactgccagggtatcagaattcaatagctcaaatcaaacaagtgctgaacaacactttgaaaatagcttcagagctgttctaatatgaataagaatgaggaatgtttctagctccagtaatttaagaagcaactttattagctcttccaccccaatgcgttgagattcgttttatttaactcaatatactttcctaacccaaggtctggtggaagtctaaacccaccaatgcgtactcgctttaatgaatgaatctcaagtccagctctttttgcgagttcac

SEQ ID NO: 214209 - DNA, 251 bp, Glycine max
taagattgagacaaggcttttttgttggttggagatgcatgattgtggtgtgctttgttttcatttcatcatatgacagccttgtgggtttctttggtgtttcttgatgcatacttaatttactttattattgtgtatttatctcttccatttacaaaaaaaaaagtttgtgtaggtttccttctttgaagtaaaaagaaattaaatatgtactgaaaatggaataatagtgtgttttatttgtgttttat

SEQ ID NO: 214210 - DNA, 251 bp, Glycine max
ataaaacacaaataaaacacactattattccattttcagtacatatttaatttctttttacttcaaagaaggaaacctacacaaacttttttttttgtaaatggaagagataaatacacaataataaagtaaattaagtatgcatcaagaaacaccaaagaaacccacaaggctgtcatatgatgaaatgaaaacaaagcacaccacaatcatgcatctccaaccaacaaaaaagccttgtctcaatctta

SEQ ID NO: 214211 - DNA, 251 bp, Glycine max; identical to SEQ ID NO: 214209

SEQ ID NO: 214212 - DNA, 251 bp, Glycine max; identical to SEQ ID NO: 214210

SEQ ID NO: 214213 - DNA, 396 bp, Glycine max
  unsure (1)..(396): unsure at all n locations
gtacttaacatcaccaccaggaaatccccgtgtggtgaaggcaccaacacatgggacagatttgagctgcgtgtgcacaagagaattattgatctctacagttcccctgatgtggttaagcagattacttcaatcacaattgaaccgggtgttgaggtcgaggtcaccattgcagatgcttgatttttgccccattttttccccgcatgctagtttcttttgtaatttatcctttttgctaggtatgttgagtcccatatgttagggttaatgcatttccttttgccgttaaaatttttgatgttgattattgtggaaggggaattattgacttgatcgattatcttttgttttatgtttatcgnnncanaaaanacaaaaaaaaaaagaatataa

SEQ ID NO: 214214 - DNA, 584 bp, Glycine max
  unsure (1)..(584): unsure at all n locations
gtgagattgagaatccgatccttcgtttccgaaattctcgcgagatggacgagaacctgctcgacgatattatccggaggctcgtcgcggcgaagaacggtagaacgacgaagcaggtgcagcttacggaggcagaaattcgacaactctgtgtttcctccaaagagatctttctcagtcaacctaatcttctcgaactcgaggctcctattaagatttgtggagatgttcatggccaatactcagatcttttaaggttgttcgaatatgggggatacccacctgaagcaaattatttatttctcggagattatgttgatcgtggtaagcagagcatagagacaatatgtttactcctcgcctacaagatcaaatacaaggagaatttctttcttctcaggggcaaccatgagtgtgcatccatcaatcgtatatatggtttctatgatgagtgtaagaggaggtttaatgttcgcctctggaagacatttactgattgctttaattgccttcctgtcgctgctctgatagatgagaagatccttngcatgcatgggtggactatcgctgatcttaaacacttg

SEQ ID NO: 214215 - DNA, 406 bp, Glycine max
cgcgcgccacgactgatcaagaccggtaccacggtccgagacttaactgtcccagagtccgaccgaagcctcaccctagtccgagcggcccgccccctttttttatttattttcttgtttacttttattcttttgtattttgtaattttatttatgtatttactcacgctatttgtttaattctagatatgctttgatctcaacaatgaagaaagaacaaacaataaacatcaagaaaaaggccccaaacaaaaaataacagcaacccacaacaagagacaacaaaaaacaaaaaaaaaaaacaaaaaaaaagaaaacaaaaaacaaaaaacacaaaaaacaaaaaaaaaaaaaacacaaacaaaaaaaaaaaaaaaaaaaaaaacaggacacccaaaagaagatg

SEQ ID NO: 214216 - DNA, 519 bp, Glycine max
aacgaataagaagccttcacaccgcttcgttttgtggtgcttgcttctttttctcttccttttcgcttcttactagtattcctttcttcttcatttcgttttctccgccgttttcgtcactcagcatcagcagcaacagcaccaggtgtctactatctgactacacatgtgctgtttacattgtctttcaattgggtgaagtctgactgaagagcaatgcagaaggataccagtaccactgccccatcaaccacaagcggtcgggttaggcaccgaaaacgctcaaatgaggttattccggaggttagcaaagcaaatgggacccaattactggttaatgacaaaagcaaatacaaatccatgctaattcgagcatattcatccgtatggatgattggcggctttgtattgatcatctatatgggtcatctctacatcactgcaatggtggttgttatccaaatcttcatggcaagggagcttttcaatctactcaggagagctcatgaagataggcag

SEQ ID NO: 214217 - DNA, 552 bp, Glycine max
  unsure (1)..(552): unsure at all n locations
gtttgttgttgtaactcgttcttcttcttttgttgttctgtgtttgtgtttgttttttctctcacctgaaaatgtcttgctgcggtggtaactgtggttgcggaagctcctgcaagtgcggcaacggctgcggaggctgcaagatgtacccagacttgagctacactgagtcaaccaccaccgagaccttggtcatgggagtggcacctgttaaggctcaatttgagggtgctgaaatgggtgtgcccgctgagaacgatggctgcaaatgtggaccaaactgctcctgcaacccctgcacttgcaagtgaggtgttgggagagcaagcttcaagcagagatagcccttaattaggaataatgataaactattaatgtgtagctaaaaacttatgtattatgtctgtgatggttttcgtgcacttctggtgtttgtgttaaacaaacatccttagaataaagtggtcatgtcttgcctttcagcaagttcaagtgttttggacttgtgatgggtgtgttaagctcatggntgcttcttttctttttttttta

SEQ ID NO: 214218 - DNA, 425 bp, Glycine max
catagttcaaattagccgaactttatacagaagcgaccaattcccaaacattaaaaaaaaaaaaaaagaagccaccatgagcttaacacacccatcacaaggccaaaacacttgaacttgctgaagggcaaaacatgaccactttattctaaggatgttggtttaacacaaaacaccagagggcccgaaacccatcacagacttaatccataagtttttagctccccattaatggttaatcattattcctaattaagggctatctctgcttgaagctggctttcccaacacctaacttgcaagtgcaggggttgcaggagcagtttgggccacatttgcagccatcgttctaagggggcacacccatttcagccccctcaaattgagccttaacaggggccactcccatgaccaagggctcgggg

SEQ ID NO: 214219 - DNA, 509 bp, Glycine max
  unsure (1)..(509): unsure at all n locations
gttatatcctctctaatgttgggttacctaaatggagcagcacagaaattaggaatcaggagcctcataccaatggtcctgttctggatgatgttttgctagcagacccagagattgcctatgccattgaaaatgaaaaggtggttaataagaccataaaaatatacaacattgatcgtgctgcatgtggacgtatagctggtgtcattgcaaagaagtacggtgacactggttttgctggacagttgaatataacatttacaggaagtgctgggcagtcatttgcatgctttctgacacctggaatgaacattcgccttgttggagaggctaatgattatgttgggaagggcattgctggaggtgagttggttatcactccagttgacaagaccggttntgaacctgaggatgcagctattgtagggaacacttgcttgtatggtgcaactggtggacaggtcttcgttagagggagagcangggaaagatttgctgtgagaaactcg

SEQ ID NO: 214220 - DNA, 559 bp, Glycine max
caaggagaaaacaatattttttcattaatcagaggagagaaaagatgactaggcatatcaagccccaactaatttattttcaccgtccacaaaaatcccaatcagattcgaatcaactgcattttatatacagttttgctttcacatggctatacaaaagagaatgctaatgctttagatggatgtatacggggtgcatcgtactgctggcaaaaatgatcttgagaatcaatgcagcgaccatggtttcaagggatagtttaatccccatattttggctagcatttccaccttattgatagcttctccaattcctgtacaaatcagggatacaacaatggctccatagcctggcgtaatcaatgtaatgtaaccttgcatcgtcaccctaagcagactgataagtgacctgatctgccgtagttgtgtcgtacttggcatttgcctcaggggtatcctcttcactaggtggaaccagctgccaaaatagtgataaatacttctcccagtccttcagaatagccgcaccttttgtactaccgttttttcaacatgagct

SEQ ID NO: 214221 - DNA, 514 bp, Glycine max
ctgctcagaagataagggaagcaattgaagtggttacatatgagtatatatggtcacagatagatgtgattagaggtcaggagcaactggataatgcaagggctttgttctttggacaaaatgaaggaaaggatgccttgttttatgggaaccctaaccttcttattacaagttggatgagcatgccaatgcacgaagcagattttggctggggaaagcctgtgtatttaggtctaggaagtgtatctacacaagatagggcactgattattcaaagccctgatggtgacggctctattattctgtccatacactttcagatggaacatatgcagcttttcaagaaatatttttatgaagatatgtgaactatattcacatcgctactatcttgaacttcttgtatgggagcttaatttacgtgtgatctgcaatttctcatgtttaataaatttagttaaccatgtgggttaactataagcttgaatatgactgattagctataatcttggtc

SEQ ID NO: 214222 - DNA, 514 bp, Glycine max
gaacaaaattatagctaatcagtcatattcaagcttatagttaacccacatggttaactaaatttattaaacatgagaaattgcagatcacacgtaaattaagctcccatacaagaagttcaagatagtagcgatgtgaatatagttcacatatcttcataaaaatatttcttgaaaagctgcatatgttccatctgaaagtgtatggacagaataatagagccgtcaccatcagggctttgaataatcagtgccctatcttgtgtagatacacttcctagacctaaatacacaggctttccccagccaaaatctgcttcgtgcattggcatgctcatccaacttgtaataagaaggttagggttcccataaaacaaggcatcctttccttcattttgtccaaagaacaaagcccttgcattatccagttgctcctgacctctaatcacatctatctgtgaccatatatactcatatgtaaccacttcaattgcttcccttatcttctgagcag

SEQ ID NO: 214223 - DNA, 520 bp, Glycine max
  unsure (1)..(520): unsure at all n locations
gcaagactgatcaagtcgtcatcgtctttggagcgggtccggttgggctgttatgtatggccgttgccaaggctttgggagcgaggagggtcattgcggtggatatccagcaggagaggctggatttcgccaaggggtatgtggcgacggatatctttgtcccggaaccacgaggaaaggacgagacgcccgatgcgtactgctcgagaatgtctgaattgatcttgagctcgctcaacatccccgctcttggccctggcggtattgacttggctatcgaggcgaccggagcaccttcgtgtgtgcaaatgggtatccacgttctcaagccgaccggtacctacgttcaggtcggtatgggatccaacatgaccgtccccgtacctctctttgacgtcataaccaaacaactaaacgtaaccggttcattccgatacggcgctggggactaccccttggccatctctctcgtcgaaagaggatnggtagacctcaagccactcgtcacgcaacgatatga

SEQ ID NO: 214224 - DNA, 478 bp, Glycine max
gcgtggaggcgctatggtaaaaagaagctggaagagtctcttagggaagaggagaacaggctgcaagatgcattgtccaaagcaggtggtagttcaccaagtctaggtgccacaatatatgcttcaaggtttgcagctaatgcacttagacttttacgtagaaatggcacatggaaggccagggtgccagagagaatatcacccatgttgctgcagaagcctgctgagcctgattttacatctgaagaacaatagttgtggaaaaaattggtggttctgtaataagaaaagaagggatgagagtgaaggaaaattcacatcaaatgaccttttttgatagagggccaaaatggcatttcgtttatttattctattttttaagttagtgtaaagatgtctgtaaaatatacactatgaagctgtatatataaatatatgattgttgctgaagtatttcattcgtaaaaaacaaaaataa

SEQ ID NO: 214225 - DNA, 464 bp, Glycine max
acgaatgaaatacttcagcaacaatcatatatttatatatacaacttgatagtttatattttacagacatctttacactaacttaaaaaataaaataagataaacgaaatgccattttgggcctctatcaaaaaaggtcatttgatgtgaattttccttcactctcatcccttattttcttattacagaaccaccaattgtttccacaactattgatcttcagatgtaaaatcaggctcagcaggcttgtgcagcaacatgggtgatattctctctggcaccctggccttccttgtgccatttctacgtaaaagtctaagtgcattatctgcaaaccttgaagcatatattgtggcacctagacttggtgaactaccacctgctttggacaatgcatcttgcaacctggactcctcttgcctaagagactctttcagcttgtttttaccatagcgcctgcacgc

SEQ ID NO: 214226 - DNA, 318 bp, Glycine max
gttttcttttcgttcgcatcttctctctctctcagtgtgtgattccgcagaaagatgaaggtggtcgccgcgtatttgctcgccgtcctcggtggcaacaacagcccctccgccgatgtcatcaaggaaatccttggctccgttggagtagaagcagatgaagataggattgaatcgtttttgtctgaagttaagggtaaggatatagttgagcttattgctgccggtagggaaaagttggccacggttccttctggtggtggtggtgccgttgccgtcgacgcagctcctgtgggaggtgctgctgctgctgctcct

SEQ ID NO: 214227 - DNA, 593 bp, Glycine max
accaaaatgaaattccataacatcaaaacactaaaatatcaaaccaaattcatccaacttggttggtcattgatattaaaaaacacagtaaattactccttagaacaaaactttgacaaactcatgctctagtgttaattaagaatatgttctgaacaaaaaagctgaatagactacaccaattaatcgaagagactgaaacccatatcatcatcagattcctctttctcctccaccttttcctccttctttgcctaagcagcaggagcagcagcagcagcacctcccccaggagctgcggcgactgcaacggcaccaccaccaccagaaggaaccgtggccaacttttccctaccggcagcaataagctcaactatatccttacccttaacttcagacaaaaacgattcaatcctatcttcatctgcttctactccaacggagccaaggatttccttgatgacatcggcggaggggctgtcgttgccaccgaggacggtgagcaaatacgcggcgaccaccttcatctttctgcggaatcacacactgagagagagagaagatgcgaacgaaaagaaaacttgagccgaatt

SEQ ID NO: 214228 - DNA, 308 bp, Glycine max
tcagcttctttacccatcatcatcatggagctcctcgggtacctgaatcagggtcacccttctagaggaacaacacttgttattactctttcattggtgctttcgacacttgtgtccttctccactttcacacatgccttctgttcttctgcgtttccggaactgaatcctataaaacctaggcactcacgtattctcaggagtgccgtgcaacatgaaactcctacatgacagctttctgaaatatggtcacctctggaaagccaaggatggaaaccttatgttgaatcatacaagccatcattacc

SEQ ID NO: 214229 - DNA, 467 bp, Glycine max
ggagtggaaatagcttttttattttcactagatataatgttaaataataagacaccgaactataaaatacacaggctacatccgtgagcaataataataatttaagtatatactactactagtcactactaagcttggcacatgcaatcaggagctggatacgtatatattgattgatgtggcttcctcagccttagttccccttgtctattttggtgaccttcaaccactgcatcctgaaactctgaccactctatggttgtattcaggaaaagctgacccatcaatgccatatttggccttatagtctttaagttcaagtatgtccggtgtccaaccaatgcattgtgcatatttcctggggaagcagagatgaagatgtcactatgcaagccaacatagtagtcaagtgcagctaatagagaagcttttgcctttatctgagaacgctcttcagatgaagcaag

SEQ ID NO: 214230 - DNA, 539 bp, Glycine max
aaaattgccccgctactactgtaaatttcgatagggattaaaaaacaaagcctttccgtttcatctcgaattgtgaattgaatattcaatgactaaaaaaatggaataaaaaaacgaagaattcaaagaatgattccaaattgaaggtaggataagaacaaaggttctacatattcacaaaaaaaaactatgtatgtaggtagagacgaaaaaataaatctcgaagtaattcgtagagttcaataactattattattttcaattcggaattcttattaattactttaaaccgaataaatcttgataattgaaaaattaagtcataatttattggttgattatatcattaactatttctttattttatatttaggttacgaggaaattatcatgaatccaattatttctgctgcttctgttattgctgctgggttggccgtagggcttgcttctattggacctggggttggtcaaggcactgctgcagggcaagctgtagaagggattgcacgacaaccggaggcagagggaaaaatacg

SEQ ID NO: 214231 - DNA, 467 bp, Glycine max
cattcgaattcattttatttatatattaatattatattcaaatgaaataaaaagatattaaaagatactaattataagaatttgaaagtgaaattataaagttattaaatgattaatcaatttttttctacctgttcctgtagtaaaaagagttccatctgttcttgaatagcttccttcaaaaggacttctgcttccccagtgaatgtcttggtagaagatatgatttctttgaattgaggtttattcgtgtttaagtaagcacgtaactcaacaagaaatttccttacctgtccaatttctaatgaatcaagataaccattcgttccagtataaatagttattatctgttcttccacggtaagaggagctgattgggattgtttaagcaactcgcgcaatcgttgacctcttgctaattgattttgagtagctttatcgagatcagaagcgaattgggcaaaagc

SEQ ID NO: 214232 - DNA, 424 bp, Glycine max
aaatccaaaattaagttccattatcagttggagacttcactcaaattcaagtacactaatttaagtataatagactatgccacacaagggcaaacgaactcggaatagcaaattatctttgtgaaggaacatctaacgagacagacattgtgagacatgagtaaggagtgtctctcaatcatcagaagcctttggggaattttcaggggtcttgagaactgtggatgtctcacctttgtgttccatgacagtggctttaaactcctccactatggagccgtccttgaacttcaaggcaaatgttgaaagaccacctttcccttgggtggcactattgatgcaggcaaaagtaacacccttgttgaacatatgagtgagcttcatatgagggtagagacgtgcattcaaaatcaatctaaaattt

SEQ ID NO: 214233 - DNA, 389 bp, Glycine max
gtctctcaaatttgtttcattgcattgtattctagttaatacggcaggagttcacataagacttgtttgttagaaatatgcctgacatagtattcctattctacagctgcgaactgtaaattatacaatttagcacatgcaaaatgaaagtatgtgtactccatcttgtcgactgtgatcgaaaggtatgcaatgttggtgtcttggatattagaaacttctttgattgcgtctagtagaaaaaccagtgtcgtcttcatctttgatgaagggtttaaatctagcgaggccaccacttccactgtatgcttggcttctgtttgcagcttgatgatcggatggatctggattgccacaaatctcaagtttgattataaatgtagctgtgc

SEQ ID NO: 214234 - DNA, 539 bp, Glycine max
  unsure (1)..(539): unsure at all n locations
tcgcgatctagaaccctgtccactggccaggatcagacctcttgtgggaagatatgtgccgcctgaagttgttgctgttcgggtgccacttctaaatttgtccaattttcaaatcaacgattggcccgatatgtcagcaaaaagctatgcaatcatggttctcatcctccctactgatagtgttagaaaatggcgagaccatgagttggaacttgttgatgtggttgcagatcaggtagcagttgccctttcacatgctgctattttggaggagtctatgcgagcccgtgatcaactcttggagcagaatgtcgctttagatttagctcggcaagaggcagagatggcaattcatgcccgcaacgattttcttgccgtcatgaatcatgaaatgaggacgccaatgcatgcaattatagcattgtcatcccttctcttggagactgaactgacttcagagcagagggttatgatagagaccagtgngaagagtagtaatgttttggcgacactcattaatgatgttctagatctttctc

SEQ ID NO: 214235 - DNA, 489 bp, Glycine max
  unsure (1)..(489): unsure at all n locations
gaagctcttgacgaagtgaggaagtggatttctggtgttggtgttgacggcattgggaagaagcttgtgaactcaaaagatggacctccaacctttgagcagcccaagatgactctggagaagctcttgacgtatggtaacatgcttgtccaagaacaagagaatgtcaagagagtccaattggctgacaagtacttgaacgaggctgcacttggaaatgctaacgaggatgctattaacaggggaactttcttccaatcttgaattggaggcaaagcaaacttggcaagtaaatatttctgttcctgaaggttgtgctgatccaagtgctagaagttgtgatgggacttgcgtgtaacattcttagaattctcaatgtcttacgtgcaaagagaagatgccaagtttgagatgattntactatatttttcatattggactgtcttcctctataattntgagttaaagtgtccacttaaattgaatttg

SEQ ID NO: 214236 - DNA, 408 bp, Glycine max
aggacaaaaggaaaaggccccaaattcaatttaaggggaccctttaactcaaaatttttgaggaagacagtccaatttgaaaaattttgtaaaatcattttaaacttggcattttttttttgcacctaaaacattgggaattctaaaaatgttacacgcaagtcccattacaacttttaacacttggatcagcacaacctttaggaacagaaatatttacttgccaagtttgctttgcctccaatttaagattggaaaaaagttcccctgttaaaagcatcctcgttagcatttccaagggcagcctcgttcaagtacttgtcagccaattggactcttttgacattttcttggtcttggacaagcatgttaccctacgttaagagcttttccaaagacattttgggc

SEQ ID NO: 214237 - DNA, 504 bp, Glycine max
  unsure (1)..(504): unsure at all n locations
ctgctcagaagataagggaagcaattgaagtggttacatatgagtatatatggtcacagatagatgtgattagaggtcaggagcaactggataatgcaagggctttgttctttggacaaaatgaaggaaaggatgccttgttttatgggaaccctaaccttcttattacaagttggatgagcatgccaatgcacgaagcagattttggctggggaaagcctgtgtatttaggtctaggaagtgtatctacacaagatagggcactgattattcaaagccctgatggtgacggctctattattctgtccatacactttcagatggaacatatgcagcttttcaagaaatatttttatgaagatatgtgaactatattcacatcgctactatcttgaacttcttgtatgggagcttaatttacgtgtgatctgcaatttctcatgtttaataaatntagttaaccatgtgggttaactattagctngaatatgactgattagctat

SEQ ID NO: 214238 - DNA, 514 bp, Glycine max; identical to SEQ ID NO: 214222

SEQ ID NO: 214239 - DNA, 529 bp, Glycine max
ataaaaatacacagtgagctctcgcttctagccctagggcgctgctcccgattgtctctcttcggattgagtgaattgtgaaatgggttggaaagctgctgagaaactcattaggcactggaaagttgtcagaggggataatgttatgataataaggggcaaagataagggcgagactgggactattaagcgtgtcattcgctctcagaatcgtgtcattgttgagggtaaaaatctggtgaaaaagcacatcaagcaagggcaaggtcatgaagggggcatctttacagttgaagctccaatccatgcctccaatgtgcaagttcttgacccagtgacagggaagccttgcaagattggacacaaatatcttgaagatggtactaaagtcagagtatcaagaggaataggatcatctgggtccataatccctcggcctgagatcttaatgataagaactaccccacgacctactgtccttggtcccaaagatactccaatggatctggtcttggagaaagactacgat

SEQ ID NO: 214240 - DNA, 550 bp, Glycine max
  unsure (1)..(550): unsure at all n locations
caactgcaaggttcttgttgttgctaacccagcaaacaccaatgcattgatcttgaaagaatttgctccatctattcccgagaaaaacatttcttgtttgactagattggaccacaatagggcactgggccaaatttctgagagactgaacattcaggtttctgatgtaaagaatgtcattatctggggcaatcactcatcaacccaatatcctgatgttaaccatgcaactgttggggagaagcccgtccgcgagcttatagctgatgatgcctggttgaatggtgaattcattactactgttcaacaacgtggtgctgcaattatcaaagctagaaagctttcaagtgcactatcagctgctagtgctgcttgtgaccatattagagattgggttcttggaactcctcagggcacctgngtgtcaatgggagtatattctgatggttcctacaatgttccagctggactgatctattcattccctgtcacttgtgccaatggngaatggacaatagttcaaggactttcccattgtgagttctcaagg

SEQ ID NO: 214241 - DNA, 554 bp, Glycine max
gattgagctcctttacccatcatcatcatggagctcctcgggtacctgaatcagggtcacccttctagaggaacaacacttgttattactctttcattggtgctttcgacacttgtgtccttctccactttcacacatgccttctcttcttctgcgtttccggaactgaatcctataaaacctaggcactcacgtcttctcaggagtgccgtgcaacatgaaactcctacatcacagctttctgaaatatggtcacctctggaaagccaaggatggaaaccttatgttgaatcaaataagccaacattaccagagaagtccgagggatatatccaggtctttcttgatggaggtttgaaccaacaaaggatggggatatgtgatgcagttgctgtggcaaagatactgaatgctactctggtgattccataccttgaattaaatcctgtatggcgagattcaaggatgatatttctatagttaaagagctgcctaaagagttcagctggagcacaagagagtactatggcttggctattcgagaaacccgaatc

SEQ ID NO: 214242 - DNA, 452 bp, Glycine max
ggagtggaaatagcttttttattttcactagatataatgttaaataataagacaccgaactataaaatacacaggctacatccgtgagcaataataataatttaagtatatactactactagtcactactaagcttggcacatgcaatcaggagctggatacgtatatattgattgttttggcttcctcagccttagttccccttgtctattttggtgaccttcaaccactgcatcctgaaactctgaccactctatggttttattcaggaaaagctgacccatcaatgccatatttggccttatagactttaagttcaagtatgtccggagtccaaccaatgcattgtgcatatttcctggggaagcagagatgaagatgtcactatgcaagccaacataggagaccagtgcagctaatagagaaacttttgcctttatgtgagaacgctc

SEQ ID NO: 214243 - DNA, 453 bp, Glycine max
cgtcctttattttttgttttttgttttttatttttttttttgaatcatgtattatgtgttacagttttgctcgtctatgaataactttgacaggtagaaactgtaaaaccttacctgaccaatattggaaacaagctatgatatctaacataaactatgcatatagagccgaaaaaattctagcagcaaaacatgtttggatgtggtaagttatgctactccagctgtatccatatctggaaccccgtcaactcccttgaaaacaacacgtaattttctcaaacaggaaaacttttggtcgttcttgattgttgtaccattcacatgcacaacatccttgggcaatttacccatgagattaaaaagagattgatccaggtttgatcgagtcatttattgcaatacagggggagcttggatgtacagattctttcctcgatgtgtaatactagc

SEQ ID NO: 214244 - DNA, 563 bp, Glycine max
gaacaagtagttgagaactaagaaggagaagcaaatggcttcctcaatgatctcttccccagctgttaccactgtcaaccgtgccggtgccggcatggttgctccattcactggcctcaagtccatggctggcttccccaccaggaagaccaacaatgacattacctccattgctagcaacggtggaagagtgcaatgcatgcaggtgtggccaccagttggcaagaagaagtttgagactctttcctacctgccagaccttgatgatgcacaattggcaaaggaagtagaataccttcttaggaagggatggattccttgcttggaattcgagttggagcacggtttcgtgtaccgtgagcacaacaggtcaccaggatactacgatggacgctactggaccatgtggaagctgcctatgtttggctgcactgatgcttctcaggtgttgaaggagcttcaagaggctaagactgcataccccaacggcttcatccgtatcatcggattcgacaacgttcgccaagtgcagtgcatcagcttcatcgtctacaagcccccag

SEQ ID NO: 214245 - DNA, 452 bp, Glycine max
attcattagttctcatccattaatttccattgaagtccgaaaacagaaaccaaaaatacaggatgatgaaatgtcaaaaagcaaaaacaaatgggaatgtagtttaagtacaaacaaacaaagtggggtggcggctacaaatgctttgcaaatttttcacacttagaagcctgggggcttgtaggcgatgaagctgatgcactgcacttggcgaacgttgtcgaatccgatgatacggatgaagccgttggggtatgcagtcttagcctcttgaagctccttcaacacctgagaagcatcagtgcaaccaaacataggcagcttccacatggtccagtagcgtccatcgtagcatcctggtgacctgatgtgctcacggtacacgaaaccgtgctccaactcgaattccaagctaggagttcataccttactaagaaggtatactacttact

SEQ ID NO: 214246 - DNA, 560 bp, Glycine max
acataatatgcacatccacttctacattgcaaaaatatctttacattgttatcccattaccagagaaaaaaacatggccagggcttaccaaaactgattacagcacaacactactttaatttgactccaaacacatatacaagacagactaatcactaattatggcatgacatgtttggtaggggactaaaaatgaaagtgaaaaaaagtatcacttcagtttacccctacaccaaactggtcccaaaattgaatatttttctgtgggctaagactattagtgccatgaagtacattcagttttgtgaggcagaacatctcatccttgctggtgaaaacacagctgtgagtctagcatgatcagaaagagaataatcttctggccatagtcctttctccacttcacgcggatacagcattgcattcttcaccttaaaaccaatagcttcttgctcctgttctgtgttacaatcttccgtgcaaccattcagattttccaacacatgctctggacatgtagaattccatattttctgcttgaattcttcaagtctatgaca

SEQ ID NO: 214247 - DNA, 496 bp, Glycine max
cttgcaattgaagttgaagtcttgcccttctctcttcaactccaaacacaagacatcatcatccatggctgcctccgtctccactgtcggagctgtcaacagagctcttttgaacctgaatgggtctggacctggggtttcagctcccagttcatccttctttgggagcagcttgaagaaggttattggctcaagggtccccaacacaaagatttcctctggaagcttcaagattgttgctgtagaagagaagaaagagattgaagagacccagcagaccgacaaggacagatggaagggtcttgcctatgatatctcagacgaccaacaggacatcacaagaggaaagggtttggttgactcccttttccaagctccacaggatgctggaactcactatgctgtcatgagctcctacgagtaccttagcactggacttcgccagtacttggacaacaacatggatggattttacattgctccagcttttatggac

SEQ ID NO: 214248 - DNA, 543 bp, Glycine max; identical to SEQ ID NO: 211837

SEQ ID NO: 214249 - DNA, 537 bp, Glycine max
attgaagttgaagtcttgcccttctctcttcaactccaaacacaagacatcatcatccatggctgcctccgtctccactgtcggagctgtcaacagagctcttttgaacctgaatgggtctggacctggggtttcagctcccagttcatccttctttgggagcagcttgaagaaggttattggctcaagggtccccaacacaaagatttcctctggaagcttcaagattgctgctgtagaagagaagaaagagattgaagagacccagcagaccgacaaggacagatggaagggtcttgcctatgatatctcagacgaccaacaggacatcacaagaggaaagggtttggttgactcccttttccaagctccacaggatgctggaactcactatgctgtcatgagctcctacgagtaccttagcactggacttcgccagtacttggacaacaacatggatggattttacattgctccagctattatggacaaacttttgtgtcacattaccaagaacttcatgaccctgcccacatc

SEQ ID NO: 214250 - DNA, 538 bp, Glycine max
agaggaagacagtccaatatgaaaaatatagtaaaatcatctcaaacttggcatcttctctttgcacctaagacattgagaattctaagaatgttacacgcaagtcccatcacaacttctagcacttggatcagcacaaccttcaggaacagaaatatttacttgccaagtttgctttgcctccaattcaagattggaagaaagttcccctgttaatagcatcctcgttagcatttccaagtgcagcctcgttcaagtacttgtcagccaattggactctcttgacattctcttgttcttggacaagcatgttaccatacgtcaagagcttctccagagtcatcttgggctgctcaaaggttggaggtccatcttttgagttcacaagcttcttcccaatgccgtcaacaccaacaccagaaatccacttcctcacttcgtcatcatatactctggccctcagtgcaccaaagaaatcaatggattggccagggaaggtgtcaacaatcttgacaacgtcctgttcaggaattgaatc

SEQ ID NO: 214251 - DNA, 446 bp, Glycine max
ataaataggacaattatcacctactctaaatttccgacgacatgcgatatatgattatagatctcgtggttaacgttaatgctcacataaatgtttaaatcgtaatctataactaaatattacaaactggaattcttatccaaatggactgcaaatcattccttttatatgataccctacgattgtttacttaaatatttaatgacttgaactatttaacttaataaaattagtcgggtgctattctatttcacgaaatgggttttctttcacagtatctaatgctagtcaccgcacttaggcaatgagctagaatgggtcttgacgatatctatggatgtatctagacctacctatctatagatatctttagaatcaacagaagagcttagacgtactggacgtctactgtcatggatagctacggggaactatcggacagaaaa

SEQ ID NO: 214252 - DNA, 385 bp, Glycine max
gcatattcgtctgtaattcttcgattttttgaggcttaccctctattaaaaactttgggaatcccatatatattataacttgaataagatcaatgcttttttgaatctttatctgtccaattccctcaacaccagaggatattcttatatttctccgtatataatgtttgatacagtctcggattactggatcatcttgtatattctaggcatactttgatggtcgagctaaccattcgggtatataacaaataccacgttgtagatcgagtgccatggtgccaccctcctattcataaaatgatacgtctaaatcgacaattgcccttggccatatttacggacttttacaggcacccttgtctgaaggagcatgccataatct

SEQ ID NO: 214253 - DNA, 523 bp, Glycine max
  unsure (1)..(523): unsure at all n locations
gatagataagccttccacagcctcacaaaaatgaagaacactacctcgttcgctctctttctactttgtgccttcttcacctcatacctaccttcagccaccggtgcttttgtgcttgacagtgatggaaaccctcttgaaaatggtggcacatactatgtgccagcaccaaataactgcggtggaatagaatacactacatcaggaaacgaaacttgccctatcactgttgtgcaacatcacgacccaacctgtaaggggtttccgataacgatttcgtccccggcccgaatccgttacatctccgaaggccttaatgtgaacatagggttcactttcagaccccctccgtgtgccccctcttctttgtggactgttctcaaggatcaatctgaacacccagacccctacgaaggagtaatattgcctgttaaacttaataatgaggacaacagcaacaatacagttcccggttggtttaaaattcagaaacttccctaggactntattacaacctactaca

SEQ ID NO: 214254 - DNA, 421 bp, Glycine max
agccatagaataatttattacaaaatgaagcatttatttagccttacacaagatcactcactaggagaaagtacatgattcttgagggcaattaagtggtacttcttcatgcagaagaatgagttgatcttgatgcgtctgaaagtttctgaaactctatgacttggcgccgcgcaaactgagccaccagcaaacgcctgtttccgtattggtcgaaattagagccaacactccaacatgggctttggtcaagtggacagaacacaatgtagtaggttgatattaagtccaagggaagtttctgaattctaaaccaaccgggaactgcattgttgctgccgtgctcattattaaggttaacaggcgatattactccttcgtaagggtctgggtgttcagatcgatccttgtgaacagttca

SEQ ID NO: 214255 - DNA, 490 bp, Glycine max
  unsure (1)..(490): unsure at all n locations
caaagaagcgcaaaaggaacaagtatgcttttgcttgtgctgtgctggcctccatgacttccatcttgcttggctacgatattggtgtgatgagtggagcagccttgtacataaaaagggacctgaaagtgtcggatgtgcaaatcgagatcctgctcggaatcatcaacctctactctctgataggctcatgcctcgccggcagaacctccgactggataggtcggcgttacacgattgttttcgccggcgccatcttctttgtcggagcacttctcatgggtttctcccccaactattcctttctcatgttcggccgtttcgttgccggcatcggcatcggctacgccctcatgatagcccccgtctacaccgccgaggtctccccggccttctctcgtggcttcctcacatccttccccgaggttnttattaatggagggatattacttggatacatatcanactatggattntcgaagctgacact

SEQ ID NO: 214256 - DNA, 529 bp, Glycine max
  unsure (1)..(529): unsure at all n locations
accctgcgcccgcagcctcaacgggaagatctcagaactataaacccacgtgatgggacccgcaccaatggagaacgtggccacgtaagccaacaccatggctatgctcaatgcaacggcccacattagtttcctctcggagtgaccaatgatcgtgaggctgatagcgagcgtgaggagagagagcaccatgcccccgacactagacaacaacaacggacgacgacccacgcggtccaacgtaaaagtagccgccaagatgaaaacggttttgacgaatccaacggccacggttgcaagaagtttatgcgtgtcgtctttgatcccagccttctcgaagatcctggggctgtacaaaacgacggcgtctacgcccgacgcttgttggaagaagtgaatcccaagggcagcgattacgatgtgacgaattgngggcgttggatagaggaagagttctttccatacgccttcacctgtgcttcgtttggttacctgaacgacgtcgtcgatgcaactcttcgggatccct

SEQ ID NO: 214257 - DNA, 587 bp, Glycine max
  unsure (1)..(587): unsure at all n locations
ctcgagccgattcggctcgagaattaatcatttaaaaattataaaaataattataagttttaataaaaaaaattaaatctaatcataaaataataaaaaaataactacaaaaaagtaaagttttatacttttaccttttgtatcaggattatttaataataaaataaaaattacaatctcgaaaaataaagatttaagcataattatttttaatatttcacaattatataaaaattatatttagattttataaaaatacaatttattaatatctagttatctaagaaattaatttaattaaagttaacatatttaattaatttaaaattaaattttagtaaacaaaaatcttaaaagataagttataagataaaatataaaaaaattaaaactcaatactggtagtaataaaaatattcaacagttaagtttgtaaaaatttaagtgaaaaaaatttaaataaaatttattttaaaaatagattataaataaacacaaataagttaagtaaaatgaataaattaatatataagaattattntaaagcaagaactcggcaagtaattttcagctgttatcaaaacata

SEQ ID NO: 214258 - DNA, 567 bp, Glycine max
tggagcccctttacaaggggattggacagagtgctatttgggctgtcatgaccgtggttgttgtgttggaattcaccgcaggggcaactttatgcaaaggactcaacagaggattggggacattgttagcgggattattggcatttcttgttgggtatattgcaagtgcatctggccgagtctgtcaagctattatcatcggagctgcagttttttctataggagctcttgctacttatatgaggtttattccctatataaagaagaattatgactatggtctagttatatttctcttgactttcaacctgattgctgtgtcgagctaccgggctgaaaatgtcttgaaaattgcacatgatcgcgtatacaccattgccataggctgtgctgtttgccttctgatgagtctactggtatttccaaattggtcaggcgaagatctccataattccacggtttacaagctcgaaggccttgccaaatctatagaagcttgtgtgaatgagtacttttacggagaaattgaaggctctggggatatgaaattatctgaggatccaatat

SEQ ID NO: 214259 - DNA, 477 bp, Glycine max
aaacactgaatgcatccatgcactttataacctgaaagatcgtcatcctcctactactactaatagtagtaaaaaaatactgatgaaatatattaattatatttaatatccatgagcatgattgatgaaataacagataagagattatccatctttggtctcttaattagtcggctccatgagaaggtaaatggttctgtgacacgtcaattcgaggctcctgacaagtgacaacaaagtcatccccgggtatgaagtctttaaagcatgctagtctccccagttcctcaacttcctctatgacaaggtccagtttagccactgtttccacaagcaaagacgcaaaggcggcgaaaggaagcgcctcagagaactcaaggctagttattgcaattttactcagttgcggcctcaaagacttcctttctgattcctttggctgttcaactgaaaccctttttggtttccattccagca

SEQ ID NO: 214260 - DNA, 294 bp, Glycine max
  unsure (1)..(294): unsure at all n locations
gggtcacccatgagatccgcagtgtctggatatcatactggtctcaggctgaccgttctctaggccaaaagatagcttctcatctcagcacgaggccaaatatttaatgttgttgccaactccagaatgattgttagagttgcagacgtgcaaagagtacgataaggatgtgattttggattacctgaaagaactaatccttttcttgcaatattatgttgtgtgtacccataactccatgaatgcaactcgttgacctatctcaataaatgccgtttgtatttgttagtnttt

SEQ ID NO: 214261 - DNA, 279 bp, Glycine max
aaaggctaacaaatacaaacgggatttattgagataggtcaacgagttgcattcatggggttatggggacacccaacataattttgcaagaaaaggattagttctttcaggtgatccaaaatcacatgcttatcggactctttgcacgtttgcaactttaacaatcattctggaattggcaaccaccttaaatattgggcctcgtgctgaaatgaaaagctttcttttggcctaaagaacggtcactctgaaaccactttgatatccaaaccctgggga

SEQ ID NO: 214262 - DNA, 463 bp, Glycine max
cccaacccccacccgtagtttctaccaccttcagtcacggcgtaatacactaaccaacccaccatgtcgctgcctgcttgtcccgccgaacaactggcccaacttctcggcccaaacaccacagacgcctccgccgccgccttccttatctgcggccagttcgccgccgtggacagcaagttcgtcgacacggccttcgccgtcgacaacacctacctcctcttttccgcctacctcgttttttctatgcagctcggcttcgccatgctctgcgccggctccgtccgcgccaagaacaccatgaacatcatgctcaccaacgtcctggacgctgccgccggcggcctcttctactacctcttcggcttcgccttcgctttcggctccccctccaacggcttcatcggtaaacatttcttcggcctcaaggacattccttcatactgctacgactacagctact

SEQ ID NO: 214263 - DNA, 302 bp, Glycine max
ctcgagccgctcgagccgctttcgaaagattttatccaattgaaattttaaaaatgactgggataaacttaagaattcaattattgaaattgaataagtaaacaatttaattggattggtcgaatggtatcaaaaaaatggagtactaactcccatttcttatttattattgaattaaccgatcaacttgctttgttatcgaacatttctttttgatttcaaaaattttccggaaaaaatttgaatctatttttatatgcgaatcaatcctactacttctggtcctgaggtttctgcgcttg

SEQ ID NO: 214264 - DNA, 302 bp, Glycine max
caagcgcagaaacctcaggaccagaagtagtaggattgattcgcatataaaaatagattcaaattttttccggaaaatttttgaaatcaaaaagaaatgttcgataacaaagcaagttgatcggttaattcaataataaataagaaatgggagttagtactccatttttttgataccattcgaccaatccaattaaattgtttacttattcaatttcaataattgaattcttaagtttatcccagtcatttttaaaattccaattggataaaatctttcgaaagcggctcgagcggctcgag

SEQ ID NO: 214265 - DNA, 523 bp, Glycine max
  unsure (1)..(523): unsure at all n locations
attgaagttgaagtcttgcccttctctcttcaactccaaacacaagacatcatcatccatggctgcctccgtctccactgtcggagctgtcaacagagctcttttgaacctgaatgggtctggacctggggtttcagctcccagttcatccttctttgggagcagcttgaagaaggttattggctcaagggtccccaacacaaagatttcctctggaagcttcaagattgttgctgtagaagagaagaaagagattgaagagacccagcagaccgacaaggacagatggaagggtcttgcctatgatatctcagacgaccaacaggacatcacaagaggaaagggtttggttgactcccttttccaagctccacaggatgctggaactcactatgctgtcatgagctcctacgagtaccttagcactggacttcgccagtacttggacaacaacatggatggattntacattgctccagcttttatggacaaaactttgtgtcacattaccaagaacttcatg

SEQ ID NO: 214266 - DNA, 530 bp, Glycine max
agaggaagacagtccaatatgaaaaatatagtaaaatcatctcaaacttggcatcttctctttgcacctaagacattgagaattctaagaatgttacacgcaagtcccatcacaacttctagcacttggatcagcacaaccttcaggaacagaaatatttacttgccaagtttgctttgcctccaattcaagattggaagaaagttcccctgttaatagcatcctcgttagcatttccaagtgcagcctcgttcaagtacttgtcagccaattggactctcttgacattctcttgttcttggacaagcatgttaccatacgtcaagagcttctccagagtcatcttgggctgctcaaaggttggaggtccatcttttgagttcacaagcttcttcccaatgccgtcaacaccaacaccagaaatccacttcctcacttcgtcatcatatactctggccctcagtgcaccaaagaaatcaatggattggccactgaggtgtcaacaatcttgacaacgtcctgttcaggaa

SEQ ID NO: 214267 - DNA, 614 bp, Glycine max
  unsure (1)..(614): unsure at all n locations
agatggtccagattagtaccacaaaaatggagaaatagaataactgaatatcgtatagctcaaaataaagatttaaccaaatgcaattcatatgaaaaaagccaattaattctttacaaagaacaacaagtaaacgcattaaaaaaaaaaattagaaaacaatatagatacgatcttttatcctataattttatcaattatgcagataagaaagactcatatatttatggatatagatccctatttcaagtaaaaaaaaaccaagtgatttcttctaattacaacacgtataaaaaagaattattggatatcatagataatctctttatcaagaattatatatcggaagatgcgattctagatatggaaaaaaatatgtatagaaagtattttgattggatgggaatcaatagagaaatactaaatcgttccatatcgaatccagaattttggttcttttcaaaatttgtgatattttatgacgcatataggggtaactcgcaggttataccaatcaaattacttttntgttcttctaatgtaaatcaaaatgtagtgagaatactagaacatactagaaagaatagaatggatctcttgaatggagtagagac

SEQ ID NO: 214268 - DNA, 542 bp, Glycine max
  unsure (1)..(542): unsure at all n locations
gatctcttgttcttgtaatatatttataaaaatttttcttattaacatgaattttttctgggtatttgtgataaatttttcgtttattcttttgaattaatgaaagacctatggtttgatacataaaaaattgtttattgttttttctagacaggcgaactggttcgataacaaatatttcttttttcataaatttgttatttttctttttccttaagcctagaagaattaaattcttctgattttgaatcatcataatatctagacctagttctcctctttgaatagaggctattgtaatttctcttaaattttttaatctaatcaggagacaatatactttgacattgttaaatattctttgacctaagaaattattccaatttaaatgtaaaatcaaaaaatttcttagtaagaaattaagttctgcctccatcttgttcttgtctttctttttctttatacccttactattcttttcactggctgatcctacataatcgntntcaatatcttttttcttggtttgagatagatgattc

SEQ ID NO: 214269 - DNA, 533 bp, Glycine max
ataaataggagaattttcacctactctaaatttccgaggacatgcgaaaaatgataatagatctcgtcgttaacgttaattttaacataaatttttaaatcgtaatttataactaaatattacaaaatggaattcttattaaaatgaaattcaaatcatttcttttataaaaaaaaaaaaaattctttaattaaatatttaatgaaattaaatatttaaattaataaaattagtcgtgttttattcgattttttgaattggttttttttttacagtagctaatgctagtcaccgaacttagtcaatgagctagaatgggttataaagatatctatagatatatatagatatatttatctatagatatctttagaaaaaaaaaaagaaaataaacaaataagacgtatcattttatgtatagtagtggggaattatgggacaaaaaatgatacgtcttatttggttattttctttttggtttgctcaaccaacaaattattccgagatatacaagaagataaaaaaatacgaga

SEQ ID NO: 214270 - DNA, 423 bp, Glycine max
gcatattcgtctgtaattcttcgattttttgagacttaccctctattaaaaactttggaaatcccatatatattataacttgaataagatcaattcttttttgaatctttatctgtccaattccctcaacaccagaggatattcttatattttcttgtatataatttttgatacaatctcgtatttttctatcttcttgtatattctcggaataatttgatggtcgagcaaaccacatagaaaatatacaaatacgacgtatcattttttgtcccataattccccactactatacataaaatgatacgtcttatttgactatttgcttcttacggttctaaagaactctgtcgcataatacatctatatatatctatagatatcttaatcacccaatctagctcattgctcagatcggtgact

SEQ ID NO: 214271 - DNA, 555 bp, Glycine max
  unsure (1)..(555): unsure at all n locations
cccatccaatcgcaaccaggaaatggatgtggttccttatccagtaacacccccaaacctcatttctctgccacatgaaccctcccaaacacagaaaccatagcaaaaagaaacccagattattgattattaataatggaagccatattcgtcaccaaacccgcttcccattctctcctcttaactaaactctctccgaatcccaaacacttgttccctccacaccaacaatcctttcacaacatgcgccacaaacccacgcgctttcgccccgtcatcgctgttttccaaaaccaacatcaacaagatgcagctgcagcttccaaccacaccgaagatgagttctacggcgaagtcaaaggcatcattggaagcagagccttggaagccgtcaccggaatggagtacctcatcgagtggaacgacggccacgcgccgtactgggttcccgccgacttcatagccaaagacgtcgtcgccgagtacgaaactccctggtggactgccgccaagaaagccgacgagtccgcgttgaanaacttaatcgaatccgac

SEQ ID NO: 214272 - DNA, 474 bp, Glycine max
gaggaaaatatgtattggatttgattagctttttcatgtccacaacttgatttggtacaaaacaattattaattaatttgctcccgaaattttgcaacaaaatcccagtccaaacaaactatgaaaaatcacaggctagggctatcctgattggaaaagaccacagcgggcccattactactgggctgggcctggttgttacttccctcgaaagctttgacaagctctgggtccacattctcctcgggctcccatgtgggctcctccaaatcggcccatttaaccaaaaactccggcgtcccttcatccgctacccttttcgcgagcaccgcctcagcgacggcgtactcgaggccagcctcgtagtctttcaccaaatcctccgtcacaaacttggccttcacccactcgttggcaccaccgtccttccaccgcacaagatactccaaattctcacccttttctgtgcgttcc

SEQ ID NO: 214273 - DNA, 416 bp, Glycine max
cgttctttaaccgcggtaatctgagcattgcgcgcgacctgctcgacattctcgcggaggccaagcaggaggtccccgcctggctcgtcgacattagcaaggagcgctcgtttggcggcggtggcggctacggccgcgggcgtggcggtggtgggcgcggtggcggtcgcccgacgggcgggggacgcgatgtgcgcatgggcgggggtggtggtggtggtggcagcagtggtgggttcggtggcgcccgcagcggcggcggagggtggggcggcagcggtggtggattcggcggctcgggcggcgcgttctcgactaacggcggcggtgggggcggtgcgagctagtggtaagcgtcgttggcgaagccgatcagtgcggtgcgcgggcagtgaacgtcgcgttcacgctcgatc

SEQ ID NO: 214274 - DNA, 462 bp, Glycine max
  unsure (1)..(462): unsure at all n locations
gagaacaacaatggttcctccattgctggaaggagacttgagatcacagcacgaactgctgtggcttcaaagacaattgaggtggaggttgacaagccacttggcctcaccttaggccaaaagtctggtggtggtgttgtcatcactgctgttgatggtggtgggaatgcagcaagagcagggttaaaggcaggggaccaagtcctttacactagcagtttctttggggatgaattgtggcctgcggataagcttggatttactaaaaccgccatccaagcaaagccggactctgtctactttgttgtcagcaggggtgctgaagtagacgttaaaaagctcacaaagcgacctgctcctcctcgatttggaagaaaactgaccgagactcanaaggcgagagctactcacatttgccttgattgtggatacatatacaccttacagaaaccttttgatgag

SEQ ID NO: 214275 - DNA, 280 bp, Glycine max
gacatgatcattcaaggagatttataagagacacatgctccaatattggacaactttggaggacagaaaataaacaaaattaacatgttggggaattaataaaaggctactgaagaccataaacaagcaaagctgcaactgaccctacaccagccaggagtccaataataactccaattggaggcaagctacccaccaatagcttttccagtgttaacatcataacgggcaaacctcttctttggtgcttgacattgaagacacccgtatgtgtacggct

SEQ ID NO: 214276 - DNA, 572 bp, Glycine max
atcaacagcaacagcaacagcgccaccaccaccaccatcaacaacgacaaaaacaacaaaaccgacaggcaaaagatccgataccatcaatgcccccgaaagcgacccttcacagcaccttgcaatgaataacagacaaggcttctcggaaaaccaagcaaagaagtccaccgcatccaccaccaccaccaccatcgcctctgaggtggcgccacccgtgtctcagtgcttcgacgactcagacctgcccgcacacagattaatggcctctgatgacacgtgtcatttggtcacagcagattttgggaccgcatctgcaagtgctgacattggatccacactcattaggtttgggaccacacccggtgacgtgtcactcaccctagggcttcgccacgccgggaacatgcccgagaaatctcctttctctgttagagactttggagccatttaaacttcaatatatattatatagtactacttcacataataataatcaaaataataataaatattatataggaagaatgcttatcatattgatatgtatatcatatcatcaaaagaaaaca

SEQ ID NO: 214277 - DNA, 558 bp, Glycine max
  unsure (1)..(558): unsure at all n locations
gtagtttttgaagtatagagatggcagagacattcctatttacctcagagtcagtgaacgagggacaccctgacaagctctgtgaccaaatctctgatgctgtcctcgacgcttgcctcgaacaggacccagacagcaaggttgcctgcgaaacatgcaccaaaaccaacttggtcatggtcttcggagaaatcacgaccaaggccaatgttgactacgagaagatagtgcgtgacacctgcaggaacatcggctttgtctcaaacgatgtgggactggatgccgacaactgcaaggtcctcgtcaacattgagcagcagagccctgatattgctcagggtgtacacggccacctcaccaaaaaacctgaagaaattggtgctggtgaccagggtcacatgtttggctatgccactgatgaaacccctgaattgatgccattgagccatgttcttgcaacaaaactcggtgctcgtctcaccgaggttcgcaagaacggtacctgcccttggctgatgcctgatgggaagacccaagtgacncgtgagtattacaatg

SEQ ID NO: 214278 - DNA, 358 bp, Glycine max
aatgattacatttgatgccagaaaaaacaaaatagactggacaggaggaagagaaagtgagaagcacacacgaataaagtgaaatcaatgacacatactatacatacgattcgggcaaagttgaaagaactgccaggacacagcctagaagtgtgaatggccttaggcctcctcccacttgagcggcgagatcacttaccatgtgaagccaaggttctttcttgccaagtgtgcatatgcagcaatcttcaaatgccagaaagttccaccgctaatgagatcaaggttgacggagaccatgccaggcctgaaataaaagttgtccttcacaaggtctatgatcacattgtctgggatc

SEQ ID NO: 214279 - DNA, 557 bp, Glycine max
  unsure (1)..(557): unsure at all n locations
ctctttatttggagaatcgctaagagtggcctccaaatcaacaataaaggtttcaaagacaaagaatacttcactcgtgaccagatgtgaaattggtgacagtctcgaagaattcctcacaaaagcaacaccagataaggggttgatcaggttgttggtgtccatgggagaagcattgagaacaatttccttcaaagtgaagacggcttcatgtggtggaacacaatgtgttaatacttttggggatgagcatcttgcagtggatttgctagctaatcagcttctttttgaggccttagattactctgatgtctgcaagtatgcttgctctgaagaaaatcctgagctcttggacatgggaggtccagttgaaggtggatttagtgttgcatttgatccccttgatggctccagcattgtggacacaaatttcacagttggcaccatctttggtgtgtggcctggagataagtngacccgcatcaccggaagagatcaagttgctgcagccatggaggttcttggtcctagaacaacatatgtacttgctctaaaag

SEQ ID NO: 214280 - DNA, 391 bp, Glycine max
accaacataaatttactttgttattatagcgattaacagaaatatgtgactaaattgcaggtacttgtctgaagatatagcatatatctttctttctaaaagccgataaaatagacaatgaattgcaggtttaaccgattaagcagttgctccaacagctaccccatccttgggcctggatttaccatacggggttttttcaaaccggatgaactcattcttggacccataagcaacttgagttctctcatcaatgctagtgatgactttgtctatcacagactgatgaccatcactgctgaaacctccggctttttcaatcaagaaccccaacggagctacctcaaacaacagtttcagcttggctttggctgatgatgatgtcacattg

SEQ ID NO: 214281 - DNA, 335 bp, Glycine max
aggaaaaagccttaacctaaatatgcggattgaactattgaattacgtaaaaggacgggaccaacttggtttgcggatagacccagaaatgtatcactgacccaatcggacaacctctacaggattcactttaacgagaaacttaagagcttgcgttgtacatggacagagttaggaccttcctcaaaatgtatattgactctagacaatagaacatgggggaagacaacattagtttaagggccggcggaaccaaaagaaccctctagctcacattaatagagaggcgaggactagggatttacattgcatttgaccgtcagaggcaatttgaa

SEQ ID NO: 214282 - DNA, 248 bp, Glycine max
ccattccggaatatcaagttataaaccacgatttacaaacttatgttaaaattaacggtaacgacgagatctattatcaggtttcgcatgtccaccgaaattcatagtacgcgaaaaggtctcctaatttatggcctaccatacgatctggcatataactaggtcagtgctcttttccagtggggagcagcaacggtatggccaatcattgttggtataacggcaggggctatggaccaagctattat

SEQ ID NO: 214283 - DNA, 535 bp, Glycine max
  unsure (1)..(535): unsure at all n locations
cagaaccctcgctcctcgccagaaattgtattgcagaggaaagaccgagaaaaaagaagaaggaattttgatggtaaagtaatattctaatttccaaaattcgattttgttgccgaaggaagaaaagaaggaaatgggaggttcatcggatacgaagctcctgcaagacctgttgttgtacgcagcgagcgcagcgctgagttgcttggtactattcgcgggtttgagacacctggaccctaatcgcgaagcatcgaagaaggctctcgagcacaagaaagagattgcaaagcgtcttggtcgtccccttattcagactaacccttacgaggatgtaatagcctgtgacgttataaatcctgatcacatcaatgtggagttcaactctattgggggactggaaacaatcaagcaagctttgtttgagcttgttattctgcctctaaaaagaccagacttgttttcacatggcangcttcttggaccacaaaagggggtcctgttgtatggaccgnccggcactggaaaaacatgc

SEQ ID NO: 214284 - DNA, 523 bp, Glycine max
ataaccaatgtataatatatatatatatgttcctataactagtataactaaggatgtaatcactgttacaatctgaactaggctaaatgacagtagaagaatgctctaaagcaaacattttaaggatcctgggaatctgattggaggttaatcatgtgagaaaccacaagcttagagatttcatggattgcagcttgaaactgagaatcacctgactcaccaggcactgtccatcttgaaggtgactgaaggctgaatccaccgtattcactagcagcaacctttgtcttctttgaagtagcaagggccttctcaaaatctaactgggacaaaggtctaggggcatgagattgttttcctttcttctcttcatccagtagttctctaataggaaaataggcagctttcttgcaaagatcaaatagatctgaaccagtgtaaccctcacacaaaccagctatatgaccaaagtctatgttgtcttcaaccctctcaccctttaagacaaccttcaatatttcag

SEQ ID NO: 214285 - DNA, 568 bp, Glycine max
  unsure (1)..(568): unsure at all n locations
ctcgagccgaatcggctcgaggaagctaagagaatacaccaaaacccaacatgaaaacccttaacaaagcctcacttattttattccctctcttgttcctttccctattcaagcattcccatgctgcaggaatcgctatctactggggccaaaacggtggagaaggcaccttagcagaagcttgcaacactagaaactaccaatatgtgaacatagccttcttgtccacttttggcaacggccaaactccacaactcaaccttgcaggtcattgtgaccccaacaacaatggctgcactgggttgagcagtgacatcaaaacttgccaagaccttggcatcaaagtgttgctctcccttggtggtggtgctggaagctactccctcagttcagctgatgatgccactcaacttgcaaactacctctggcagaatttccttggaggtcaaaccggatcagggccattaggtaatgttatattggatggcattgactntgacattgtatctggtgggagtgaccattatgatgacctagccagggcattaaatagcttcagctcacaaag

SEQ ID NO: 214286 - DNA, 559 bp, Glycine max
tcgtcctttttttttttagaagaagcgcaaaaatttcagactatggtagggttgaaaatgacatatttcgcaatgaacttttaattattttggtaattataccatatgtaacttgtaggtgacatattacaataaacatatgtagcgttcaaagcacattgaatatatatatagtagaaaaaccaatcacgagcggtgattagtattatttaaataatggaattaatgacatagtttttctataagtctataacatgattaaacacttccaataatagcattactataaccattttggacatcattgaatctgttccagagcatgactccaccatactttgaagactgtttaatcacaggaagaacctgagaagtcaacacatcagagggcacaaagccaccacttggagcagctgcctcagatgcaggaagccccatgaagatttgagaagctggcactgtgatccattggttccatgaattgatcaaattggtggtgtttccactggagtattggcatgaaagggtgttgtagaattgaacccacacatagtcaaaa

SEQ ID NO: 214287 - DNA, 553 bp, Glycine max
  unsure (1)..(553): unsure at all n locations
atcgatcatgatatatataataattcgagcacccatttcaaacgcatatccaatttttgcacagcagggttatgaaaatccccgagaagcaaccggtcgtattgtctgtgccaattgccatttagctaataagcccgtggatattgaggttccacaagcggtacttcctgatactgtatttgaagcagttgttcgaattccttatgatatgcaagtgaaacaagttcttgctaatggtaaaaagggagctttgaatgtgggggctgttcttattttaccggaaggttttgaattggcaccccccgatcgtatttcgcctgagattaaagagaagataggcaatctgtcttttcaaaactatcgtcctacaaaaaaaaatattcttgtggtaggccctgttcctggtcaaaaatataaagaaataacctttcctattctttccccggatcccactactaagagagatgttcatttcttaaaatatcctatatacgtaggtgggaacagggngaggggtcagatttatcttgacgggagcaagagtaataataat

SEQ ID NO: 214288 - DNA, 549 bp, Glycine max
acaagttaattgaagaaattcaatttgtttaatcaaattccccaaccccctctctttttatttgttcactacgtattatatgcaataaaatattatatggcagaaatattctaagttggaaaaaatagaaactaagatataggatttttcaggaaggggttaaaaaagattattttattgatatttttagaatatttctatttcgacacaaacaagaaggaataggaatcggactctaggaaaagacaaaaaatcccccctagagtaccttttccatattttaattgattttgtttcaaattatctatctatatagatatctattttatgtttagtatcgaatccaattttattgtattttacaatcgaaatttctataatagaactctctattatagaaaaatgaaatctgaaaaaaacagtgtcataaccataatattcgaatttattggggggttgaaaaaacaaagtcaaatagtcttcctgacaatatccatactcgagtttatttgtattacgttacaagtaactctttaaatatagtataaa

SEQ ID NO: 214289 - DNA, 554 bp, Glycine max
gtagtttttgaagtatagagatggcagagacattcctatttacctcagagtcagtgaacgagggacaccctgacaagctctgtgaccaaatctctgatgctgtcctcgacgcttgcctcgaacaggacccagacagcaaggttgcctgcgaaacatgcaccaaaaccaacttggtcatggtcttcggagaaatcacgaccaaggccaatgttgactacgagaagatagtgcgtgacacctgcaggaacatcggctttgtctcaaacgatgtgggactggatgccgacaactgcaaggtcctcgtcaacattgagcagcagagccctgatattgctcagggtgtacacggccacctcaccaaaaaacctgaagaaattggtgctggtgaccagggtcacatgtttggctatgccactgatgaaacccctgaattgatgccattgagccatgttcttgcaacataactcggtgctcgtctcaccgaggttcgcaagaacggtacctgcccttggctgaggcctgatgggatgacccaagtgactcttgagtattac

SEQ ID NO: 214290 - DNA, 391 bp, Glycine max
gttcattgtataggatcacatttgaggataggaggaacggaatagaagggagaggaagaggaaaaggagagaaagacccaacaagcaaagagaagtggcggctccaaatgcagagaagattagggacactcagaaaaaagggggaatgacaacgagtgaggagggacagggcacaggccaaaagccagaagagcggctggatcagttgaaacgagaagggaaggaccactgttccaaagtggccatacgcaacacctgagaagaaccagtgtaaccacccctcgggagatcaacgtggacggagatcgtaccagggcggaaatcggagacctgctgcgcacagggaacgcgaaactgggcaggaacttgaacagcaagataggagtccata

SEQ ID NO: 214291 - DNA, 581 bp, Glycine max
  unsure (1)..(581): unsure at all n locations
gttatataacatttatacaataaaaaaaaagagttctggccatggctgcatcattatttatgccttcatccatagtggaggaagaagcgaggttcgaagccgaagtggcggaggtgcaagcatggtggaactctgagaggttcaggctaacaaaaaggccatacacagcaagagatgtagtgtccctccgaggcaacctcagacaaacctatgcctcgaacgagatggcgaaaaagctatggcgcctcctgaagaaccaccaagctaatggaacagcctcgaggacttttggtgcacttgatcctgttcaggtcacccaaatggccaagcacttggatacgatctatgtctcagggtggcagtgttcagccacacacaccacgagcaacgagcccggtcctgaccttgctgattacccttatgacactgtcccaaacaaggttgagcacctcttctttgctcagcagtaccatgacaggaagcaaaaagaggagaggatgagaatgagcagggaagagagggcacggacaccttatgtngattacttgaggccaatcatagctgatggtgacactggcttt

SEQ ID NO: 214292 - DNA, 557 bp, Glycine max
aaacacagaaacaagttttccttgttctccttgcccacatggctaaagagtctgaactagtaagaaatgtaacaaattatgcaggaaaaaatagcagaatgattcaatggcctgtttatattattgaggacatttattccaatccaacacagaaattggtgaattttccattaagttccactctcagcatgcagcatagttcggcagaagtagcactttcacattctggccttagcaaccacaatactgcctctatcaatgtttacagctcctgatctagtccatgattctttaaactgctcttcagttactccttttcccattgcagcagttgaagccacacctccctggacagtcttgaggtacctatcatagtaattagcaccagcccatttttggtgagctagtgtgtcaaccccattgttcctctcctctctctgaatcctctccacataagccagcattcccctattggcaaaatcccttgcaaatggtgaagttatgagtgcattggaatgaagaccttccacagtgatgaactgccacacataccccaa

SEQ ID NO: 214293 - DNA, 536 bp, Glycine max
aaattctctttagagagatagagagatagagagagagagaaagaaattaagaaaaaatggcagcctgcactgtctactcaacacaatctctgagcacaaattgctccatctcaaccccatcaaagacacagctgagtttcttccaccaaaagcaggtagttttctggaggaacagcaacaggggcaacagcagcagcagaagaagctatgtgataacatgtgcagcaggtgactcacagacagtggtgattggtcttgctgcagactcagggtgtgggaagagcaccttcatgaggaggctgacaagtgtgtttggaggagcagcagagccaccgaagggtggcaaccctgactcaaacacactcatcagtgacaccaccactgtcatatgcttggatgattaccactctttggatagaactggcagaaaggagaagggtgtcactgcccttgaccctagagccaatgattttgatctcatgtatgaacaagttaaagctcttaaggatgggaatgctgtttgaaaaccaatctac

SEQ ID NO: 214294 - DNA, 481 bp, Glycine max
gtctcaatcttgtatcaacataactgaatctcagcctcacttttttttctcggataagtacatacatacatacatatgtgtttttttcattaattatgatgcagaacagcctaataacaatagacaaaataacatgaaacacagtgaaattgtggaaaacatgaaagaagaaagaaaatgatgattttgatgagaactaatgcaatttgactgcgtcgctcggtcgatatgtatatatattattatggcaggttcaattcaattcctaagcttttgcagccactggagtctcagccttggtggctattagctgctcatataaatctcttatcttcaaaccaactatggtttggaagagacctgttccattgttgctgccggggaaatcagcatgcttcaacatctgttgagtaacctctccatagaactttgtagagaggttgcttaggtggctctcaacgtatattagttcatctagtct

SEQ ID NO: 214295 - DNA, 536 bp, Glycine max
gaacatcaagtcaaaataatttatacacttgagatggaacaaaatactaatagtattttgattgaggggaaaacaattccaaacaaaattacaagtaacttaatttaaaaacttgaacatgaatttctgaaactcttaaacttcaattaaatttcttttttggttatgtgggaaagcaagtaggtgccctctataagctgtgcttgttttttctggcacttttagtcatttctttggtgatggcatgactaagaaccccaatagggcaaaagaacaagcacagagaaactgaatgccgagtctctatctgattctctaatccatcaagaaaaacatgccttgcagcaaagagatccataaccaaaaggtgaatccaagctgatgctaaagtcatctcactggagaacattttccctatactagtcagctctggtagcaagtatttacttgcaaaaataagtccaactgtctcaggggtccaagagtggtacaacaaatatgcatatagaatgccaagcactacatatggtacacta

SEQ ID NO: 214296 - DNA, 560 bp, Glycine max
gaacatcaagtcaaaataatttatacacttgagatggaacaaaatactaatagtattttgattgaggggaaaacaattccaaacaaaattacaagtaacttaatttaaaaacttgaacatgaatttctgaaactcttaaacttcaattaaatttcttttttggttatgtgggaaagcaagtaggtgccctctataagctgtgcttgttttttctggcacttttagtcatttctttggtgatggcatgactaagaaccccaatagggcaaaagaacaagcacagagaaactgaatgccgagtctctatctgattctctaatccatcaagaaaaacatgccttgcagcaaagagatccataaccaaaaggtgaatccaagctgatgctaaagtcatctcactggagaacattttccctatactagtcagctctggtagcaagtatttacttgcaaaaataagtccaactgtctcaggggtccaagagtggtacaacaaatatgcatatagaatgccaagcactacatatggtacactactttccattagacttctagttagc

SEQ ID NO: 214297 - DNA, 475 bp, Glycine max
  unsure (1)..(475): unsure at all n locations
gtaaacagaaaatctgaggcgcgagtggctggtgaaggcagcgactgcgagggaagggaagcatctttagctccaaatccaatggcggatacctcaagccgatcaagagacctcgacaagctccttctccgccctggcaatctcgtcggtcctaggttcgaacctggccctgagttgcgagatgaccttcaggccttcgccaaagtgttggtggttggggctggtggcttgggttgcgaattgttgaaggatttagccctctctggtttccgaaaccttgaggtcattgacatggatcgcatagaagttaccaatctcaaccgccaattcttgttcagacttgaagatgttggcaaacccaaagccgaggtagctgccaagcgtgtcatggagagaattagtggtgtggaaatcgtgccgcacttttgcaggatcgaggacaaggaaattgaattntacaacaatnttaacatta

SEQ ID NO: 214298 - DNA, 557 bp, Glycine max
  unsure (1)..(557): unsure at all n locations
cgcctatancagcgcattgggtaccgtacctcccgggtcgacatgctcataggccgcccttttttttttttttttgagaaggtcacgaatcattaagtgaaacaggtatcaagtgttacagttttgctcgtctatgaataactttgacaggtagaaactgtaaaaccttacctgaccaatattggaaacaagctatgatatctaacataaactatgcatatagagccgaaaaaattctagcagcaaaacatgtttggatgtggtaagttatgctcctccagctgtatccatatctgtaaccccgtcaactcccttgaaaacaacacgtaattttctcaaacaggaaaacttttggtcgttcttgattgttgtaccattcacatgcacaacatccttgggcaatttacccatgagattaaaaagagatagattcaggtttgatcgagtcatttcttccaatacagggggagcttgcatgtacagattctttcctcgatgtgtaatactagcttttgataatcgcaacttaggatgttcttccagaagatccatgaact

SEQ ID NO: 214299 - DNA, 581 bp, Glycine max
gtaaacagaaaatctgaggcgcgagtggctggtgaaggcagcgactgcgagggaagggaagcatctttagctccaaatccaatggcggatacctcaagccgatcaagagacctcgacaagctccttctccgccctggcaatctcgtcggtcctaggttcgaacctggccctgagttgcgagatgaccttcaggccttcgccaaagtgttggtggttggggctggtggcttgggttgcgaattgttgaaggatttagccctctctggtttccgaaaccttgaggtcattgacatggatcgcatagaagttaccaatctcaaccgccaattcttgttcagacttgaagatgttggcaaacccaaagccgaggtagctgccaagcgtgtcatggagagaattagtggtgtggaaatcgtgccgcactgttgcaggatcgaggacaaggaaattgaattctacaacaattataacattattgcccttggtcttgattccattgaggcccgcagttatatcaatactggtgcctgcagttttctagagtacgattctgatgataatccacaagaagagaccatcaa

SEQ ID NO: 214300 - DNA, 508 bp, Glycine max
gagaaggtcacgaatcattaagtgaaacaggtatcaagtgttacagttttgctcgtctatgaataactttgacaggtagaaactgtaaaaccttacctgaccaatattggaaacaagctatgatatctaacataaactatgcatatagagccgaaaaaattctagcagcaaaacatgtttggatgtggtaagttatgctcctccagctgtatccatatctgtaaccccgtcaactcccttgaaaacaacacgtaattttctcaaacaggaaaacttttggtcgttcttgattgttgtaccattcacatgcacaacatccttgggcaatttacccatgagattaaaaagagatagattcaggtttgatcgagtcatttcttccaatacagggggagcttgcatgtacagattctttcctcgatgtgtaatactagcttttgataatcgcaacttaggatgttcttccagaagatccatgaacttttgcaatgtgattgaaggtctagtt

SEQ ID NO: 214301 - DNA, 546 bp, Glycine max
aagtaaaggctgaccaattgcagataaaacttataagtataaaactaacaatagtggaaagtaggtaaacgactttaccgaaaggcaaatctaaaaagaaaagaaaaagagaaaaaaaaaactataattaattcactgggggtctccatgatcagccacaactttccataaatgttgttataggaactaggacttaatttgtatgatcttgattaatgatgtttgcttcttcagaattagatgctgctgatgttttaatgttggagtccttggagagtcctcttccacgccaataaagaaaatagcgcagcatataggaatccactaatgaatcaggaattgcccttatgagaaacccctgcacagaatggaggaagtatggctcaaccagtttttcgtatccaatccatcttgtgcatgttttactatacatagccggcgttggaacaaaaattgatgtcttcattttggtcatctttgttgatacaaataatggaacctgacattggatgtcaattccttgatgcttgtattcaaactgatgca

SEQ ID NO: 214302 - DNA, 405 bp, Glycine max
caaacacagccttgaacttgaactatcgtgtcttcttggctttctctgttcaggatcaacatggatattgtatcacgagctttgctatttccgttggctatacttgtgctcatattaagcacaccttgctcaggtgcttttgggaagagtggaactaatgtgaaaacagctatttttctgtcccccaagtttgaacttggaccaggatcggtagccaataaatatgattatgacgctgatgtttcaagaggggatttagcacttagaagttaatgctgaagtagtttgattgaacagggaccctgtgcctcttatgaaacttatcttcaacactgggtggtgttagatactctatccacctatatatgtgacgacacacacaaactatgatggacataggatact

SEQ ID NO: 214303 - DNA, 508 bp, Glycine max
gaaagtgtaactcagccgtagaaccatattttttatttatttattgcgtaagctgctgtgctaattgttttttctccttgaatttgataaaataattattgattcttacagtgtacaagtcagagcgtattttatagtacaaacataattctgtgacttgcgtgtatgattatgcaacatataattcggcttttccatcaatgaatagactcatgaactcttcaccatccacagtttctttttctatgagaagttgagcaagcttgtgaaggatatcaatgtgagttgagataatatgtgttgccctagaatatgctctctctaccagttccctcacttccgcatccactacatccgcagttgccatggagtaatccttttgcgatgacatctgttgacccaagaatggatttccaccaggtccaccaatggcaacttgtccaatttttttgctgaatccaaatctctcaaccatctgccttgccactcgtgaaacttgcatgaagtc

SEQ ID NO: 214304 - DNA, 580 bp, Glycine max
  unsure (1)..(580): unsure at all n locations
caaagtgattgattccagttccaatggccttgggcaccagcgccttgatcggaaggaaggttcttgtctcacccccaacccccaaaacaaccaaatcatctactccgctacaattccttttcaagagaagcatcttaaatgctcacaattcacaagctgctctagctgcccttatcttttcctccgcgagcctctctgtgaccccacaagcccttgccgctgataacgtcacccctccccctgtaattgaagcccaacagagccaattaaacccctccaactcatcctcccctttctcacagaacctcctcctcacagctccaaagccacaagcctccttcgacctccccgaaggcaccaactggcgctacagcgagttcttgaacgccgtcaagaagggtaaagtcgagcgagtcaggttcagcaaagacggttccgccctccagctaaccgncattgacggccgtcgcgccttcgttattgtccccaatgacccggacctcatcgacatcctcgccatgaaccgcgtcgacatttgcgtcgacgagggcgaatcccccaacagcttgttcaacatcat

SEQ ID NO: 214305 - DNA, 461 bp, Glycine max
gaaagtgtaactcagccgtagaaccatattttttatttatttattgcgtaagctgctgtgctaattgttttttctccttgaatttgataaaataattattgattcttacagtgtacaagtcagagcgtattttatagtgcaaacataattctgtgacttgcgtgtatgattatgcaacatataattcggcttttccatcaatgaatagactcatgaactcttcaccatccacagtttctttttctatgagaagttgagcaagcttgtgaaggatatcaatgtgagttgagataatatgtgttgccctagaatatgctctctctaccagttccctcacttccgcatccactacatgcgcagttgccatggagtaatccttttgcgatgacatctgttgacccaagaatggatttccaccaggtccaccaatggcaacttgatcaatttttttgctgaatcca

SEQ ID NO: 214306 - DNA, 572 bp, Glycine max
  unsure (1)..(572): unsure at all n locations
aaattctctttagagagatagagagatagagagagagagaaagaaattaagaaaaaatggcagcctgcactgtctactcaacacaatctctgagcacaaattgctccatctcaaccccatcaaagacacagctgagtttcttccaccaaaagcaggtagttttctggaggaacagcaacaggggcaacagcagcagcagaagaagctatgtgataacatgtgcagcaggtgactcacagacagtggtgattggtcttgctgcagactcagggtgtgggaagagcaccttcatgaggaggctgacaagtgtgtttggaggagcagcagagccaccgaagggtggcaaccctgactcaaacacactcatcagtgacaccaccactgtcatatgcttggatgattaccactctttggatagaactggcagaaaggagaagggtgtcactgcccttgaccctagagccaatgattttgatctcatgtatgaacaagttaaagctcttaaggatggaatngctgttgaaaaaccaatctacaaccatgtcactggtctcctggatccccctgagctc

SEQ ID NO: 214307 - DNA, 435 bp, Glycine max
gtctcaatcttgtatcaacataactgaatctcagcctcacttttttttctcggataagtacatacatacatacatatgtgtttttttcattaattatgatgcagaacagcctaataacaatagacaaaataacatgaaacacagtgaaattgtggaaaacatgaaagaagaaagaaaatgatgattttgatgagaactaatgcaatttgactgcgtcgctcggtcgatatgtatatatattattatggcaggttcaattcaattcctaagcttttgcagccactggagtctcagccttggtggctattagctgctcatataaatctcttatcttcaaaccaactatggtttggaagagacctgttccattgttgctgccggggaaatcagcatgcttcaacatctggtgagtaacctctccatagaactttgtag

SEQ ID NO: 214308 - DNA, 512 bp, Glycine max
aggagatgaatacccactttttattgaataataatttgtttaaatagaaatttttataactaaaagaaatcataaaagcaataactaactttctaaacaatagccactaacataacggcgactaagtaacaaaaaaaataaaccgtcctaaagactcgatcaaacagctagcagaaaacaaattaataggcaattgctgatacacacatttaacaactaactaaaatttcgagtatataaaaaattccatttatctagatcgattgcagggctgttaacaccactttctgcattctctatatctacatcaacaaatgctctcgtccatattcacgtactattacaggcacgcttgtaggagggagcatgccataatctgtcacaataaccgagacataatctgaaggagtagcatcatacatcaaattcaaaagcctcaaattatcttcactggcccaattgctaagataactgacatccattcgtccaggaaccctggcaatagcatctgg

SEQ ID NO: 214309 - DNA, 574 bp, Glycine max
cagtcggataagggggaagcgagcaatactctcgaatgtcacagataagcattctgctacacataaccaacactgccttctcgtttgagcattatataaactcagtcggtgctcataacttttcctcacacgactctgctcactcatatttatattgaacaaacagagatcccaaatcaatggatattgaagcaggtaaagatattcctgtaagagacccagcgctactcgatgacgacggcagaatcaaaagaaccgggaacgtgttcactgctaccacgcacatagtaacggtggtggtgggtgcaggagtgctggctctggcatgggccatggctcagcttggatggatagctggcatagccgttatgatcctctttgcatgcatttctgtttacacttacaatcttgtagctgattgctacagatttcctgacccagtcagtggcaagagaaactacacttacatgcaggccgttgatgcctaccttggtggaaaaatgcacgtgttctgcggatccgtcctatatgggaagctcgccgggttacagtgggctacactataaactagtct

SEQ ID NO: 214310 - DNA, 546 bp, Glycine max
gatataactgagacagaaatattttgactagttgaaatagtgttgctcacactgtaagttggaataatgtagctgacaaataattttgcattcagataattttcactgccttgttttaattaacttgtctcccttctttttctgcctagctatagctattttcacatttctcaaatgtgagacactggaatgtgcaaccaaatgccctattgtttatactggaaaagtttgtatttttttatattcttgctaattccacgaaccgaaccaactgccgcggaaactgtaactaggaagcacgcgaagctcaatatttgaagacaacaccacttcaatgatagtctttttacccgtttctgtgcaatgtgcatttgtacagggaagaagacaatgagaggccaaaaccctattgctccaagcaaggcaagaaactcattgaaaaatggcatagccatggcaataactgtggccactgccacatacattgacctccaaattatcctaaacaaagtgatgttacatgttaaggagcccattttgatggga

SEQ ID NO: 214311 - DNA, 504 bp, Glycine max
gatggacattgcttgtgggggtcggcatagtgttgtgataacagatgctggggcgcttcttacattcggctggggactgtatggccagtgcggacaagggaataatgctgatcagctaagaccaactctagttccttctttattgggaactagagtggaaaaaattgctgctggactttggcatacattgtgtgtttctgtaaatggtcaaatttatgcatttggtgggaatcagtttggacaattgggtaccggtagtgaccagcctgagacttcacctagacagttggatgcttcccgttttgaaaataagcattctagtatagtttcttgtggggcccgtcacagtgctttgctaactggtacgcctccattaccatgtgcttttcaggggaacttttaaaaccaatcttagtatttgcatgctttgataatgtcatatggcttattcatattagagaattgaccaaaaggattcgtgccaataatcagtctttggtctat

SEQ ID NO: 214312 - DNA, 452 bp, Glycine max
atactatggtttgtttgaaaatgacatatttttgtaatgaacttttaattattttgtgaattataccatatgtaactttgaaggagacatattacaataaacatatgtagacgtcaaagcacattgaatatatatatagtagaaaaaccaatcacgagcggtgattagtattatttaaataatggaattaatgacaaagattgtgctaaagaccataacaagattaaacacttacaataatagcattactataaccaggggggacattattgaaactgatccagagcatgactaaaaaaaactttgaagacggtttaattaaaagaagaacctgagaagtcaacacatcagagggcacaaagccaccacttggagcagctgtctcagatgcaggaagccccatgaagatttgagaagaaggcactgggatccattggctccatgaaacgatc

SEQ ID NO: 214313 - DNA, 524 bp, Glycine max
  unsure (1)..(524): unsure at all n locations
caaacacagtcttgaacttgaactatcgtgtcttcttggctttctctgttcaggatcaacatggatattgtatcacgagctttgctatttccgttggctatacttgtgctcatattaagcacaccttgctcaggtgcttttgggaagagtggaactaatgtgaaaacagctatttttctgtcccccaagtttgaacttggaccaggatcggtagccaataaatatgattatgacgctgattttccaagaggtcatatagcacttaagagtttcaatgctgaagtagttgatgaagcagggaaccctgtgcctcttcatgaaacttatctccaccactgggttgttgtaagatactatcaacctaaatatgtgacgacacacacaaactatgatggacataggatacttcacaactctgaccatatatttgtgaggaacagcggcttatgccagagagatactctaggacaatactatggccttggatctgaaacacgaggaacagctacngatgttcctgatcc

SEQ ID NO: 214314 - DNA, 341 bp, Glycine max
aatgggtgccgttgaaggttaccgtattgctggtggccccctcggtgaggtcactgacccaatctacccaggtggcagcttcgacccattgggccttgctgatgacccagaggcttttgctgagcttaaggtgaaggaactcaagaacggacgattggccatgttctctatgtttggcttctttgttcaggccattgtcaccggaaagggtccattggagaacctcgccgatcaccttgctgaccctgtcaacaacaacgcctgggcctatgccaccaacttcgtccccggatagtgagcgttatagaacgaaatgacttttgagagtttttagatctgtg

SEQ ID NO: 214315 - DNA, 414 bp, Glycine max
gtaaaaagcaagtaacattaagttggattcggatacacaagataattcacattatctgaagtacttcaccaaacacaaatctaaaaactctcaaaagtcatttcgttctttgacgctcactttccggggacgaagttggtggcataggcccaggcgttgttgttgacagggtcagcaaggtgatcggcgaggttctccaatggaccctttccggtgacaatggcctgaacaaagaagccaaacatagagaacatggccaatcgtccgttcttgagttccttcaccttaagctcagcaaaagcctctgggtcatcagcaaggcccaatgggtcgaagctgccacctgggtagattgggtcagtgacctcaccgagggggccaccagcaatacggtaaccttcaacggcacccatt

SEQ ID NO: 214316 - DNA, 259 bp, Glycine max
agattgatgagaaacgaagaataaaaatggctctggatgtggctaggggcatgaattgcttacacaccagcacacctacaattgttcatcgagatctaaagtctccaaatgttttggttgataagaactggaatgttaaggtatgtgatttcgggttgtcacggttgaagcacaacacatttttgtcatgcaagtcaactgcttgaacaccggatagttaggcttctgaagttttgcgaactgaaccctgaaatgagaa

SEQ ID NO: 214317 - DNA, 457 bp, Glycine max
gcaaaagtataaatattcttgctttcaagaacagtaatttacacattaccgagttttggttcctcggacaagctatcatcacaaatacaaaatggctctgcagttgtttggttgcagcagttgatattttcctcaacacaaacattttccgttacaagctttgatatatttatttccccttttattgtgttcttgttacctttatagcttatacgcacataactatgcaaaatgcctaattattcacacttgaagcgagacatttcagggggttgaatttacagaaatctcctgcggcatatgtggagctacctggtcatgatgagatgggataaccagacgctgcagaggctttagagccactgtgagttgtgcaaacgagggccgcaaatttggatcctgttgccaacactcccagattattctagcaactataggatcgacttgctttggaata

SEQ ID NO: 214318 - DNA, 492 bp, Glycine max
gggtattgctatccttacgccaacatcagccatagacataattttgtcacggaaaatcgtccccctgctcaggttttccgtgacaaaattatgtctatggctgatgttggtgctggaggtgaagatgccattgttacatttgagggtattgctatccttacgccaagaggacgatacagtgttgagttacacatgtcattcttgcggcttcaaggacaggctaatgatttcaaaatccaatatagcagtgtggttcgcctatttttacttcctaagtctaatcaaccacatacctttgtcattattagtcttgatccccctattcgaaagggacaaactttgtaccctcatattgtgatgcagtttgaaactgattatgttgttgaaagtgaattggcaataaatgaagatctttataacacatagttcaaggacaagttggagctgtcttataagggtcttattcatgaagtgttcaccacagtattacgt

SEQ ID NO: 214319 - DNA, 427 bp, Glycine max
aaaaaaaagtaggcttgatccaatattttaaatcatattcgtgcaacagttgaagcaaaaaattgttacaaatcctacatcagttggccataaacttgtgtcaatttacgaagcatatgagtagatgccatcaccagtaagaaatatacggctcatggcttacattagcttgctgcataagtatttataaaactgcaagattttttttcacagccttaggcactgtcagattcatttcctgaatcaatattcatgggttgtggattcttgtagccactaatctcatccatgtaacgttttttatcttcacgcgccttggcctcgtatggttccttctcttccgcagacaactttttccatttctctccaagtactctttccacatccgtaaatgaaattccaggattagttttctttagattctctc

SEQ ID NO: 214320 - DNA, 489 bp, Glycine max
ggaagagtaaaataaacccaaaacaggccaataatattgatatatgttaatagatgcccttgtatattaaacatgagcaactacacgtgtcatattacattgcatacttgtaaagtgtaatggtaaaagaatgacacatatatcttctcattgggtgaaaatgatgaggacaccaacttattgcaacctcagttgttggtagttttttttttttcttgaattggttgttgagcattttgattttattacagtgcataatcatatttatttattttatgtgcttctcaatcgaccttttcagctcctccttcttcacccccaccactctatcagcaactttgcctttctgaacgagtacgaatgttggcaattggtggacctggagtgcttgagacacttccgttaactccttcacatcaatcttgatgaactcaacatctgtgtaattttcagcaaactctaggataacagggtccatgagtttgcaag

SEQ ID NO: 214321 - DNA, 510 bp, Glycine max
ctagtttcttacacggctctactctactgcttcaccttctgctctagaaaattcagtggttatacatggcttcggctactctctctgtagccaaaccagcccttcaggcaaatgggaaaggcttctctgaattctctggcctccgcagctcatcaggcttccttcccttttctagaaaatcttcagaggatttccattctgtcattgccttccagacctatgcagttggaagcagtggaggatacaagaagggtgtgacagaagcaaaactgaaggttgccataaacggatttggaaggattggaaggaacttcttgaggtgctggcacggtcgcaaagactcccctcttgatgtcattgccatcaacgacaccggtggcgtgaaacaagcctctcaccttctcaagtacgattcgatcctcggaaccttcgatgctgatgtcaagcctgttggcagcgacatcatctctgtcgatggaaaggaaatcaaagttgtctctgaccgcaacc

SEQ ID NO: 214322 - DNA, 442 bp, Glycine max
ttttttttttttttttttttttttttttttttttttttttttttttttttttttgggggggtttattttttttttttatttttgttccgtcttgtaggataataatcatgcaaaaaagagaaggggaaaaaaaaaaaagagggaggggacaagaaaaggccgagggacggaaaagggggggggggaaggaaacaccccgggggggggggaaaaaaaaaaaaggggggggggggaaagaacaaaggaaaaaagaaaaagaagaaacacaggggaggggggggggggggggggggaggggggaaaaaaaaaccaaaaggggggggggggaccaaaaaaaaagagagacacagggaaaaaaagggggggggggcggcccacccaggggggggggggggagggaaaaccacaaaccccggggggggggggaccccccaacggggag

SEQ ID NO: 214323 - DNA, 559 bp, Glycine max
  unsure (1)..(559): unsure at all n locations
agctaaaggaatgttatggtaaaacttcgtttgaaacgatgtggtaaaaagcaacgtgcgacttgaaagacatgattagattagctgtggattcttacatccgccattttttctagtatatagaaatgaacatgctcttgactcgacatcgtttgttctgttccactagaacttattgttttggggacgggaaagcagttgatgatgtaagttgatgatgtaaatagtacatgatggagctcgagtttattcatttatcaggggcaagtatctaaggttagtaaaaattaataagttagaaaaacttcgtaagtttatttttgatagaaaaatagaaaggatccaatttgagcaaggttcaaaaaaatggttggaattagtaaaactgttttgatcaaaagtgtagccgcaggaattaaccttctatttgtatgattctttcatagaaagaaaaaatggtatgttgctgccatttttgaaaagattgaagattcccgaagtaatgcctaaacctaatgattcaaagataagctaaaagatcatggaacangtaaatacc

SEQ ID NO: 214324 - DNA, 564 bp, Glycine max
cattaatggaatttcgtttgttgattcgagctaagttccataaaaacaccagccctttttaaaatgtcctgaacagttcctgtaggttgagcgcctcgttcaaggaaatatagaataacaggaatatttaaataggtttgattctttattggatcataaaaacccactttccgaagatctcttccctctcttcgagatcgaacatcgattgcaacgattcgataaacggctcattgggatagagatagataaataatgcaccccccccctagaaacgtataagaagttttatcctcgtacggctcgagaaaataaaaaattataatgtatgtagaaaattatgatgtcaaatagatcaataaaatcatcaaatcaattaaactatgacttaagtatttttctttcgtattttctttttgaaaaaaaactcctcatatttataactccataactcaaattggataattatcaaatgactaaaaggagaacaaagcctttagtagctatttcatttattgagtggtctctactcccctttcttgcccgtgtgacgttctttataat

SEQ ID NO: 214325 - DNA, 520 bp, Glycine max
tattgcccaagccctatacaaccaaaccctaacacacacccatttgattcagtttccatggctagcctcaaggttgcatttttggctgcagtgctctgcatggttgtggtgagtgcacccatggcacatgcagctatcacgtgcgggcaggtgacgaatagcctgatcaattgcatcggttacctccagaacggaggaacgccgacgtcgggatgctgcaacggagtgaagagcctcaatgccgccgccaagaccaccgacgaccgccagacggcgtgcaactgcctcaagtcggccgccagccaaatctccggcttcaaagccaacaacgccgactcgctccccggcaaatgcggagtctccatcccctacaagatcagcacctacaccaactgcgctaccatcaaggtttgaagagaaagtcatggacgcaggaaaccggaaactactcactagtatatgagtagcattattaatattaagaatcagatcgaaggtgatgaaggctccacttatatgc

SEQ ID NO: 214326 - DNA, 465 bp, Glycine max
gggagaacccaatattaaagtagatataactatgtgtaactcatacagagaaataacaacgcaacacaatttaaagctatccaatacaaatctctcatacaagaggagaggggcatataagtggagccctcatcaccctcgatcttattcttaatattaataatgctactcatatactagtgagtagtttccgggttcctgcgtccatgactttctcttcaaaccttgatggtagcgcagttggtggaggtgctgatcttgtaggggatggagactccgcatttgccggggagcgaggcggcgttgttggctttgaagccggagatttggctggcggccgacttgaggcagttgcacgccgactggcggtcggcggtggtcttggcggcggcattgaggctcttcactccgttgcagcattccgacggcggcgttcctacggtctggaggtcaccgatgcaattg

SEQ ID NO: 214327 - DNA, 595 bp, Glycine max
  unsure (1)..(595): unsure at all n locations
ggtgaattgaagtgtttgagtttggcatcttctgatggtgctttatttataattattgtcatcaagtttcagactcattctggatcactgagttgattctcttaatgtcaagataaaaaaaataaaaggtagatgatgcatggaagcttgagaaatgcaaataaaagtagaaaagcctctagcagagaaagaaaattggctttgcagcaagatgtggatacgttgaagaagaagctaaggcatgaagagaacattcatagagcattggagagggctttcaacagacctttgggagctttgcctcgtcttccgccttacctccctccctatataccagcccttctggctgaagtggcagttttggaagaagaaattgtaagacttgaagagcaggttgtgcatttcagacaggatttgtaccaggaagctgtctacatgtcatcttctatgaggaaattggaaaattcagtttccgctccttctaacangtcaaatccaacaatggatagtcccaagttggataaatggaagtctcttacccaatcaactggtaattcaacagcatcatctgcaactaagcctaccacaacacttc

SEQ ID NO: 214328 - DNA, 521 bp, Glycine max
  unsure (1)..(521): unsure at all n locations
gttatacaatgattcttttattcactttagttaaaagaaggaacctgaacatttctcccaaagggagtagagaaaagatgatcatgtacatttttatatgtatgatctactgctgtatacaaaattgcaatggccaaaagggagtgaaattatgtgcatatcaagtatctaaagctgaactcatatggcataatttgtacaaattgtgataagggctcggtttttctttcctcaaggaatttaagggcttctttccccaattcacttggtaactggagacagatccaatccagcaatgactccaagtcttttgcaaagttcagcaaataccaatccagtagctttgggatagcaaactttgaagttgaaaatccaattgctgcctgtaagtactctcttttggccacttccagttcattctcaacctgngatgctgtgtaaactctcacagcaggagaggaccaagttccagaagagagagcaaatgtcactaggggttctgacagttccattccatatat

SEQ ID NO: 214329 - DNA, 562 bp, Glycine max
caagatatgaagaagctttctctttacgcttgtttactcactttgagtctgctgatttttcttccccatatcaaagcaagtcaagctaataaacttgatgagttgatcctatctaggagctcacataatcctcctgtgaccctttcttgggcagaggaagatgcattgaaaatgcattctgctgcttatgttgcgccccaagagggactaaggcaagctgacaagattgtcacactgcctggccagccacatggggtgaactttgaccaatattcaggccatgtcacagttgatccaaagactggaagatcacttttctattattttgatgagtctccacataactcttcagctaaacctttagtattgtggctcaatggaagaccaggttgctcctcattggggtatggggcatttgaggagctgggaccctttagagtcaactctgatggcaaaacactatttcataacaaatatgcttggaatgaagtggcaaatgtgctgctcttggaatcccctgctggagtgggcttctactactcaaacactacctctgactatg

SEQ ID NO: 214330 - DNA, 461 bp, Glycine max
atataaaaagtttttatgcaaactgaaatttttattaagaaaatgttaagataagatacattcctttcataaaaaatacaaagtgtgataaatattcttcccctatgaaacttagcagtacatttagatgctacggaaccttattaataaaactgttattactatagtccaacaagtagctattgcacaaccttcatctcaaggcaataacttttaaatcaacttcatacttagaatccatcgtatggtgaagcaggaggcagggttccagagaggaatgatgagatcatggtcaaagatcgggctggttgccagcttggaacaaaatgtcctgctcctcttactgtaacaaacgtcactgctttgtatcccaccacatatcctccaacctcatttccagaataccatggatgccaatcaacctgaatagggagcctcagggtgttgattgaatatctgga

SEQ ID NO: 214331 - DNA, 639 bp, Glycine max
  unsure (1)..(639): unsure at all n locations
cagcaagtggaccccagtggtgaacatcgcgttccaggagacgacgtcgtatgaaacagccaacattaagattcttttcgcgagtaagaaccacggtgatccgtatccttttgatggtccaggtgggatattgggccatgcattcgctcccactgatgggaggtgccactttgacgccgacgaatattgggtggcgtctggcgatgtcaccaaatcgccggtgacaagtgcgtttgaccttgaatctgtggcagtgcacgagatcgggcacttgctcggattaggccactcgtcggacctaagagccatcatgtatccttctataccacctcgaactaggaaggtgaatctagcgcaagatgatatagacgggattcgaaagctctatggtatcaacccctaattattatagctaggtgttgtttgtactagaactagagttttatttcggtaatttgcattaaaggattctgaaagttatcgaggtgaaattattctaattcaagaacaacaaanatagcatgtaagatattgaatttagttttctctaattaagaataaccagctgatactggtgatgctatatgataatgaataatgtgcanattacccttaaaaaaaaaaaaaaaagggcggccg

SEQ ID NO: 214332 - DNA, 494 bp, Glycine max
aaggtaaatttgtcacatttattcattatcatatatgcatcacctagtatcagctggtttattcttaattaagagaaaactaaaatacaatatcttacatgctatttttgttgttcttgaattagaataatttcacctcgataactttcaaaatcctttaatgcaaattaccgaaataaaactctagttctagtacaaacaacacctagctataataattaggggttgataccatagagctttcgaatcccgtctatatcatcttgcgctagattcaccttcctagttcgaggtggtatagaaggatacatgatggctcttaggtccgacgagtggcctaatacgagcaagtgcccgatctcgtgcactgccacagattcaaggtcaaacgcacttgtcaccggcgatttggtgacatcgccagacgccacccaatattcgtcggcgtcaaagtggcacctcccatcagtgggagcgaatgcatggcccaatat

SEQ ID NO: 214333 - DNA, 513 bp, Glycine max
ccacttttccttgttccagggtgaaaagtgggttgtgcgtgtggccagatgtgagacaactttgctttagaaaaggcatgctatatggatttatgcggttgttttctacaccgttgaaaacgctccgtggagctagccgctcgctgagagtgactcaattttgcagtgttgccaatatgtcttcctcattgcagattgaattggtaccttgcctgaaggacaattatgcttatctgttacatgatgtggacacgggtacagttggtgttgttgatccttctgaagctgtgcctatcatagatgccttgagcaggaaaaatcgaaatttgacatacatactcaacactcaccatcatcatgatcacacgggtggaaatgtagaattgaaagcaagatatggggcaaaggtgattggttcaggaactgacaaggaaaggattcctggcattgatatccacttgaatgatggagataagtggatgtttgctggccatgaagtgcgtgtaatggaca

SEQ ID NO: 214334 - DNA, 361 bp, Glycine max
ttcgcagttcccaaattcattttaatcctaattctgcacttcttgatcattcgatttttctcctcaagatgcagatattcgtaaaaactttgaccggcaagaccatcacccttgaggtggaatcctccgacaccattgacaacgtaaaagctaagattcaagacaaggaagggatcccacctgaccagcagagacttatctttgcgggtaaacaacttgaggatggtcgcacccttgccgattacaacatccaaaaggaatcaaccctccatctcgtgcttcgcctcaggggtggcatgcaaatctttgtcaagactttgaccgggaagaccatcacccttgaggtggaatcctcggacac

SEQ ID NO: 214335 - DNA, 487 bp, Glycine max
aactatgatacgatattgatatttaattcttttggcgaaacgagctcaatacatcatattaaaacataaaaagcagcacctaaaccagaacagcaaacaagttcaagggagaaattgaacataacagacatgacatacaagaacacttgaaaaaagacacgcttaaaacaagaacacttgaaaaaaaacacgcttaaaaaccaccgcgaaggcgaaggacgagatgcaaggtggattccttctgaatattgtaatctgccaaggtacgaccatcttccagttgcttcccagcaaaaataagcctctgctgatcaggtggaatgccctccttgtcctgaatctttgccttcacattatcaatggtatcagaactttcaacctccaaagttatggtttttccagtcaaagtcttaacaaagatttgcatgccaccacgaagccgcaacaccaagtgcagggtagattccttctggatgttatagtcagc

SEQ ID NO: 214336 - DNA, 542 bp, Glycine max
  unsure (1)..(542): unsure at all n locations
cacaaagcacaaagcaaagctcatccttgagttaaaaaatggcagcagcttcttccatggctctctcatccccatccttggctggcaaggccgtgaagctgggcccatcagccccagaagtgggaagggtgagcatgaggaagaccgtcaccaagcaggtctcctcaggaagcccatggtacggcccagaccgagtcaagtacttgggcccattctctggcgagcccccgtcctacctaaccggtgagttcccaggcgactacggctgggacactgctgggctttccgcagacccagaaaccttcgccaagaaccgtgaactcgaagtgatccactccaggtgggccatgctcggagccttgggctgcgtcttcccggagttgctgtcccgcaacggggtgaagttcggagaagccgtgtggctcaaggccgggtcccagatcttcagcgagggtgggctcgactacttgggcaacccaagcctgatccacgcccagagcatactcgccatctgggccacacangttatcctaatgggtgcc

SEQ ID NO: 214337 - DNA, 449 bp, Glycine max
gtaaaaagcaagtaacattaagttggattcggatacacaagataattcacattatctgaagtacttcaccaaacacaaatctaaaaactctcaaaagtcatttcgttctttgacgctcactttccggggacgaagttggtggcataggcccaggcgttgttgttgacagggtcagcaaggtgatcggcgaggttctccaatggaccctttccggtgacaatggcctgaacaaagaagccaaacatagagaacatggccaatcgtccgttcttgagttccttcaccttaagctcagcaaaagcctctgggtcatcagcaaggcccaatgggtcgaagctgccacctgggtagattgggtcagtgacctcaccgagggggccaccagcaatacggtaaccttcaacggcacccattaggataacttgtgtggcccagatggcgaggatgct

SEQ ID NO: 214338 - DNA, 577 bp, Glycine max
cctttgcaaaaccacgtttcgcaaactccactcagatacaccaattcacagtccgatacaaacaccaaacagccaagatgcaccgaacatacagcatgcgctcgtctcgcgcgcccacggcgtcgcagattcagagcccgccccctccgtcgtcctcgacgaagagcggacgtttcttcggaaaggccaatatcggccacaccttccgccacaagtcggcaggcgcattcggccccgacctcgcgaagaagctttcacagcttgtcaagatggagaagaacgtgatgcgcagcatggagctggtttccagggagcgcatggaggtcgctcaacaactctccatttggggcgaggcttgcgacgacgacgtctctgacgtcaccgacaagctcggtgtgctcatctatgagattggtgagctcgaggaccagtatgtcgatcgctacgaccaatatcgcgtcaccatcaagagcatccgcaacattgaggcctcagtccagcccagccgcgatcgcaagcagaagatcaccgaccagatggcgcagctgaagtacaaggagcccaactcccccaagat

SEQ ID NO: 214339 - DNA, 494 bp, Glycine max
  unsure (1)..(494): unsure at all n locations
gagaaggtcacgaatcattaagtgaaacaggtatcaagtgttacagttttgctcgtctatgaataactttgacaggtagaaactgtaaaaccttacctgaccaatattggaaacaagctatgatatctaacataaactatgcatatagagccgaaaaaattctagcagcaaaacatgtttggatgtggtaagttatgctcctccagctgtatccatatctgtaaccccgtcaactcccttgaaaacaacacgtaattttctcaaacaggaaaacttttggtcgttcttgattgttgtaccattcacatgcacaacatccttgggcaatttacccatgagattaaaaagagatagattcaggtttgatcgagtcatttcttccaatacagggggagcttgcatgtacagattctttcctcgatgtgtaatactagcttttgataatcgcaacttaggatgttcttccagaagatccatgaanctttgcaatgtga

SEQ ID NO: 214340 - DNA, 586 bp, Glycine max
gttcaagtccttgactctgtgaatatcaccttgggtgctgaagatgaactaaaacatgcagttgcatttgttcggccagttagtgtggcctttcaggtggtgaatgggttccatttctacgagaatggagttttcactagtgacacttgtggtagcacttcccaggatgtgaaccatgccgttcttgctgttggatatggagttgaaaatggtgtcccatattggctcataaaaaattcatggggagaaagctggggtgaaaatggctacttcaagatggaattggggaagaacatgtgtggtgttgcaacttgtgcatcttatccaattgcggcataaattgcataacaatatggtccctggtgactaccaccttgtcatgcttcagagtttagagcgtattgctgatgccagtattgatgaatgatgattaaagactagtgtaattgtatgatgaaaattgctcctagttgggctggcatgatgtataaaataagctagatgttgctgtaaatcacataagtatattatggccttaattgtgtgcatcacagacataataacgatcatatattgataggtcata

SEQ ID NO: 214341 - DNA, 441 bp, Glycine max
tttttttttttttttttttttttttttttttttttttttttttttttttttttttggttttatttttttattttttttttttttatatattttaaaaaaaaaaataaaaaaaaatttaaaaattttaaaaaaaaaaacagaatttataaaaaacgaaaaaatgaaagggaggaaaaaaaaaaaaaaaaaaggaaacaaaaaaaaaaaaaaagaaggggggataaaagggggggaaaaaaaaaaaaaaggggaaaaaaaacttaaagggataaaaaaaaaatctggatttataaaaaaaaaaaggaccccaaaaagggggaaagatttgaaaaaaaaaaaagcgtgtagttagaaaaagataaagaaaagcgggcagaaacggagccttaaaaaaggaggaaaagaaaggggggggcaaaacgagggcaaaaattggaagag

SEQ ID NO: 214342 - DNA, 603 bp, Glycine max
  unsure (1)..(603): unsure at all n locations
cagcaagtggaccccagtggtgaacatcgcgttccaggagacgacgtcgtatgaaacagccaacattaagattcttttcgcgagtaagaaccacggtgatccgtatccttttgatggtccaggtgggatattgggccatgcattcgctcccactgatgggaggtgccactttgacgccgacgaatattgggtggcgtctggcgatgtcaccaaatcgccggtgacaagtgcgtttgaccttgaatctgtggcagtgcacgagatcgggcacttgctcggattaggccactcgtcggacctaagagccatcatgtatccttctataccacctcgaactaggaaggtgaatctagcgcaagatgatatagacgggattcgaaagctctatggtatcaacccctaattattatagctaggtgttgtttgtactagaactagagttttatttcggtaatttgcattaaaggattttgaaagttatcgaggtgaaattattctaattcaagaacaacananatagcatgtaagatattgcatttagttttctctaaattaagataaaccagctgatactaggtgatgcatatatgatcatgaataaat

SEQ ID NO: 214343 - DNA, 474 bp, Glycine max
  unsure (1)..(474): unsure at all n locations
aaggtaaatttgtcacatttattcattatcatatatgcatcacctagtatcagctggtttattcttaattaagagaaaactaaaatacaatatcttacatgctatttttgttgttcttgaattagaataatttcacctcgataactttcaaaatcctttaatgcaaattaccgaaataaaactctagttctagtacaaacaacacctagctataataattaggggttgataccatagagctttcgaatcccgtctatatcatcttgcgctagattcaccttcctagttcgaggtggtatagaaggatacatgatggctcttaggtccgacgagtggcctaatccgagcaagtgcccgatctcgtgcactgccacagattcaaggtcaaacgcacttgtcaccggcgatttggtgacatncgcagacgccacccaatattcgtcggcgtcaaagtggcaccttccatcagtggga

SEQ ID NO: 214344 - DNA, 578 bp, Glycine max
gaagatggagatgtatcagatctggagcaggagaatagcgttgggagcgttcgcgtttgttctgcttttcctatcggcctcagcagacgacgtcgttgtgctctctgaagataacttcgagaaggaagttggtcaggacagaggagctctcgttgagttctatgctccttggtgtggacactgcaaaaagcttgctccagaatatgaaaagcttggtagcagcttcaagaaagccaaatctgttttaatcggcaaggttgactgtgatgagcacaagagtttgtgcagcaaatatggagtctctgggtacccaacaattcagtggtttccaaaaggatctcttgaacccaaaaagtatgaagggccacgcactgctgattcacttgctgagtttgtaaatacggaaggaggaacaaatgtgaagattgctacagctccttccaatgttgcggtgcttacatctgaaaattttaatgaggttgtcttagatgaaaccaaagatgtcttggctgagttttatgcaccctggtgtggacattgcaaaagtctgctctactacgagaaagtgcccagcattt

SEQ ID NO: 214345 - DNA, 385 bp, Glycine max
ggggaaaaaaatcgtaagttcggaatttttaaccccaaaagcgccatgcaagataagggcaatagtcccgactcaaattaagcccttcaagtttccacgttgaatatttcccagcattttcgatttcaaagtcaaacaatcattaggagctgcgattggtcacgagcttccatgaaaaatgggtaatgatgccccaaaaagtcaagccgcatatgtcgacaagatatttttctttagaggtaactcgtcggccttggcaggactaatggacttgtcaagtatgccctgtaggcgctggatttcggtcttagcataatcagaacctttttccaagtaattcttggcagctttcaaggaaatcttcccgggccttgaggcaaaaccc

SEQ ID NO: 214346 - DNA, 565 bp, Glycine max
cagcttccaatgcagaagaaagtagttggggaacatattgccctggggagtatcctagtcctcccccagaatattcaacctgcttgggtgatctgtacagtgttgcttggatggaagacagtgacagacacaatttacgaacagaaactctgcatcaacaatataaattggttaaagagaggactatatctggagattcatactatggctctcacgtgatgcagtatggtgatgtacggcttagcagtgatgttctcttccattatttgggtacagatcctgctaatgataatttcacttttgtggacgaaaactccttatggtcaccttcaaaaccagtcaaccaacgtgatgctgatctcatccatttttgggataagttccgcaaagctcctgagggttctctcaggaaaaatgcagctcagaaacaagttttggaagcaatgtctcatagaatgcatgtagacaacagtgtaaaacttattgggaagcttttatttggtattgaaaagggtccagaagtactcaacgcttgtagaccggcaggatccgcacttgctgatga

SEQ ID NO: 214347 - DNA, 488 bp, Glycine max
gagtcccaatattttacaaataataaatacaatgtcgccattaatattaaacaataactttgacatcataaattcttccaaaataattatacaaaagtgacaagggaaaacccgatctgccagttgcctactgaataaaaacacacatcattactatgtgttggcatacacgcatgaccttgtgccttgtcatgagtgaatattccaaagcaattggtcctttatgcctccttaatccttatgccacaaaatgctatcatcccttgaaagttgtaattgcttcttcagaaatagatttatacaaaggtagttgcaatatctatttgccaaactaaaaatgtaaagacccttcttcccaatcctagtagtgtcccaattgtatttacaaaggcgggacaaaatatgtatatacaagtacaatcatatagcataatgtaacaataatcatactttggtctttactggtgcacattacaggaattattatg

SEQ ID NO: 214348 - DNA, 379 bp, Glycine max
  unsure (1)..(379): unsure at all n locations
cctctctacaggtccttaacaaaattcaattctggttgtggctggccagccttctatgaggggattcctggagccataaatcgcaatccggaccctgatgggatgaggacagaaataacgtgtgctgcttgtggnggacatctaggtcacgtctttaaaggagaaggatttccaacgcccactaacgaacgccattgtgtcaatagcatttcactgaaatttgcgccagccaattcttaataaaaattgagtctgctgttcggacgtgactgcttaagtacccaacattagtaaaaaaaaattatgcaatgtacttatattatgaatgaagttcatataatgatggctaaataccaattttaattaaagagttatgttg

SEQ ID NO: 214349 - DNA, 457 bp, Glycine max
cgccctattcgcaccgggcggtgtaccgggcccgggtcgacgagctcactcggcggccgcccttttttttttttttttcaacataactctttaattaaaattggtatttagccatcattatatgaacttcattcataatataagtacattgcataatttttttttactaatgttgggtacttaagcagtcacgtccgaacagcagactcaatttttattaagaattggctggcgcaaatttcagtgaaatgctattgacacaatggcgttcgttagtgggcgttggaaatccttctcctttaaagacgtgacctagatgtcccccacaagcagcacacgttatttctgtcctcatcccatcagggtccggattgcgatttatggctccaggaatcccctcatagaaggctggccagccacaaccagaattgaattttgttaaggacctgtagagagg

SEQ ID NO: 214350 - DNA, 573 bp, Glycine max
ataattaaataataatttgtcatttcacacatacaaggtatatatacatatatgtagttatgatctaatagctacattcaatgattttattacctttgtccgcatttatatatacttaattccctactccaatattacaaatcaagttatacaacacatattcctacatataccgtaccataagggataaatttcataattgaccacccatgtctttggaagaatgtgatgcaaggccttttttcacctgcttcattttccatgataccatcccaaaaggccttgtccattgtctgctttattttcccctcagtgtccttggagtcaaaatccatgggggttgccacatggaaaacaccagtgcaacctttaatggcttcatcaaagcttccctcttgagcaagatcagccttccacagagacaatttggtcttggaatctggcggctccaccaaatgcttcaccttcttcatgttagctgaagcatgcatataataataataataataataataataataataataataataataataataataataataataataataataataataatat

SEQ ID NO: 214351 - DNA, 533 bp, Glycine max
cccaacccccacccgtagtttctaccaccttcagtcacggcgtaatacactaaccaacccaccatgtcgctgcctgcttgtcccgccgaacaactggcccaacttctcggcccaaacaccacagacgcctacgccgccgcctcccttatctgcggccagttcgccgccgtggacagcaagttcgtcgacacggccttcgccgtcgacaacacctacctcctcttttccgcctacctcgttttttctatgcagctcggcttcgccatgctctgcgccggctccgtccgcgccaagaacaccatgaacatcatgctcaccaacgtcctggacgctgccgccggcggcctcttctactacctcttcggcttcgccttcgctttcggctccccctccaacggcttcatcggtaaacatttcttcggcctcaaggacatcccttcatcctcctacgactacagctacttcctctaccaatgggccttcgccatcgccgacgacggcatcaccagcggaagcatcgacgaacgcacaca

SEQ ID NO: 214352 - DNA, 554 bp, Glycine max
gttgagttaggggactctggttttgaaactcttaatccaggtgattcccatgcatcatcaatttatgctagtgctgatgttgatatgggtggtactgatgctgaaggaaatcaatcagagcaaccaactgtatctgaagacaggagggatgagatgttatcaactcagaacactgaggttgctccagatgcaactcaggccgaccaagttagtgcaaataatgaagcttccggtgctaatactatcgaccctacctttttggaggctctgcctgaagatcttcgggcagaagttctggcatcccaacaagctcagtctgttcaacctccagcttatgcaccaccttctgcagaagatattgatcccgagtttttagctgctcttcctccagatattcaagcagaagttttggcccaacatagagctcaaagggttgcccagcaggctgaaggacagccagttgacatggataatgcctctataattgctacttttcctgctgatttgcgtgaaaaggtcttttgacttcttcggaagcttgtctgtcagcacta

SEQ ID NO: 214353 - DNA, 542 bp, Glycine max
cttctatttttcaagtaacttaaggtttcaaacctaggaagttggaagtcatggcagcaacattgatggcagcaacaacaagttctggtactcttaaagcaactcctttccttggccaaggcaagggtgccaatgccaatgctcttagggatgttgtctccatgggaactgggaagtacaccatgggcaatgatttgtggtatggaccagacagagtgaaatacttgggacccttctcagctcagaccccttcatacttgaaaggagaattccctggggattatggatgggacactgctggcttatctgctgacccagaagcatttgccaagaacagggctcttgaggtgatccatgggcgatgggccatgcttggagcactaggatgcatcaccccagaggtgctagagaagtggttgagagtggacttcaaggagccagtgtggttcaaagctggagcccaaatattctccgaaggtgggctcgactatttgggacacccaaaccttgtccatgcacaaagcatcctggcagtgctgggc

SEQ ID NO: 214354 - DNA, 348 bp, Glycine max
aaacattgtattctgactttaacattgctatacctttctaattggttgcaagggacaaaactatattaacaaacaagagacaaacgagggtaaaattgaaccaaaggccttaagaagtacactgagccaacaaaaaaagggatcatataacctacacataaatcacaggggtaagaacgagggatgggaccatagggattcgggaagaaccaagtcatatgcggtctaagaccctggggaaaacttaggggggtagacccaagcgttgggggccacagggttgtctaggaaggccaaaaggttcttcaaaggaccttgggaaaagacaatagcttgaacccagaattc

SEQ ID NO: 214355 - DNA, 525 bp, Glycine max
gagtatcctagtcctcccccagaatatacaacctgtttgggtgacttgtacagtgttgcttggatggaagacagtgacagacacaatttgcgaacagaaactctgcaccaacaatataaattggttaaagagaggactatatctggagattcatactatggctctcacgtgatgcagtatggtgatgtagggcttagcagagatgttctcttccattatttgggtacagatcctgctaatgataatttcacttttgtggatgaaaactccttatggtcaccttcaaaaccagtcaaccaacgtgatgctgatctcatccatttttgggataagttccgcaaagctcctgagggttctctcaggaaaaatacagctcagaaacaagttttggaagcaatgtctcacagaatgcatgtagacaacagtgtaaaactgattgggaagcttttatttggcattgaaaagggtccagaagtactcaacgcttgtagaccggctggatcggcacttgatgatgactggcac

SEQ ID NO: 214356 - DNA, 422 bp, Glycine max
  unsure (1)..(422): unsure at all n locations
gcccactgaataaaaacacacatcatattactatgtgttgtcatacatgcattgtaatgagtggatattccaaagcaattggtccctttatccctccttaatccttatgccgtaaatggcaccatcccttgtaaattgtaattgcttcttcagaaatagaattatacaaaggtagttgcaatatctatttgccaaactataaatgtaaagacccttcttcccaatcctagtagtgtcccaattgtatttacaaaggtgggacaagatatgtatatacaagtacaaccatgtaacataatgtaacaataatcatactttggtctttactagtgcacattacagggagttattatgcactgaaacccctttgcagagaactccagggattggaaggaatactgacacaagctngtgctgaagcc

SEQ ID NO: 214357 - DNA, 549 bp, Glycine max
acttattctcctactcttgttcctgttcctacccaacacctgcttctctttctcatttcaaactccttcaagcaatgaattctcgaatcaaagttcttcctctctgaagcagcagattctggagctagctaatagtcccagcacggtgaaatggatgaagagaataaggagggaaatccacgagcacccagaacttgcatatgaagagttcagaacaagtgctgtcataaggcgtgagcttgacttgttgggtgttgaatacaagtggcctgtggctgggactggtgtggtggccaaaattggttatgggtctcctccttttgttgctcttagagcagacatggatgccttgccaattcaggaaatggttgattgggatcataagagcaaagtagatggaaaaatgcatgcttgtgcacacgatgcacatgttgccatgctacttggggctgcaaagatactgcaagaaatgaaagacatgttacagactactggtgttctaatatttcaaccagctgaggaaagaggcacaggtgcataagacatgat

SEQ ID NO: 214358 - DNA, 410 bp, Glycine max
ggggcaagccaattcaatttgcctttaaaaaaattttttccctgacaggttttttggccaaagaatttggtgaatccccacgggggggggggggtttacaaaggggctaaattttttgaaaaagaagggtttgaaaaagcaaatgctttatgccatgccccccccaggggaagccccttttccccaatgaaaaaagaagggccttgacccgggggggggggccccctcttctgggttggggggcccccaaaaacaaaagacccgggggccttttccaagtaaaaagccaaattttcccctcctgggaagaggggggccaattttatgtttacttccccaacaattttgcttgacactcccccggcttgggggtattttcacacaccatttgggggcggagggaatggggg

SEQ ID NO: 214359 - DNA, 557 bp, Glycine max
  unsure (1)..(557): unsure at all n locations
gaaaaagtacaaggcgttcaatccgctgaacctgccagacaggcaatggcccaacaagaccatcgagaaacccccgagatggctgtcaaccgatctgcgagacggcaaccaatctctggttgatcctatggacggcgagcaaaaatggatgtacttccagatgctcacaagacttggctacaaggagatcgaagtttccttcccctccgcatcgcaaaccgacttcgacttcacacagcgcctcgtccagacacccggcatagtgcccgacgatgtctggctgcaggtcctgtcgccgtgccgcaaagagctcatccgccgcactgtcgactccctgaagggcgcaaagaaggccatcctgcatctctaccttgcgaccagcccgtgcttccagcaaatcgtcttcaacatgaacgacgaggagacaattgccctggcggtcgagtgcacaaaatacgcgagatcaatcacaaaggacgaccccgagcaggcagggacacagtggcactacgagttntcgcccgagacgttctccgattcgaacctgaattcgcgct

SEQ ID NO: 214360 - DNA, 510 bp, Glycine max
agaatgagcaccactcaagcttcctccaacaacaagaagaccaaacgcaatcacaagaaatccctctccctccccgcccgtaacggaatcacccctccggatgatggcggagaaagaaccgttaaaaagcttcggttgtcgaaggcgctcaccatccccgacggaaccaccgtctctgaggcctgcaggcgcatggctgctcgccgcatcgacgccgttttgctaactgattccaacgccctgctttccggaattctcactgacaaggatgtggctactagagtcgtcgccgaggggctgaagccggaggagacgacggtgtcgaaagtaatgacgcggaatcccatctttgtcacgtcggatacgctcgccattgatgcgcttcagaaaatgattcagggtagatttagacacctccctgttgtggaaaatggtgaagtcattgccatgctggatatcaccaaatgtctttatgatgccatatctagaatggagagcgctactcaacag

SEQ ID NO: 214361 - DNA, 460 bp, Glycine max
ggagcatttaccaaacactctgaggcaggcattgatatataaggctctaggatttccaatgccttattttgcacatgtttctttgattttagctcctgatcggagtaaattatcaaaacgacatggggcaacatcagtgggtcagttccgggagatgggatacctaccggaagcaatggtgaattacctagcattattaggttggggcgatgggactgaaaatgagttttttacacttgatcaacttgttgaaaaattcactatcgaacgtgttaacaaaagtggtgctatttttgactcaacaaagttaaagtggatgaatggtcagcatttaagagcacgttcatcagaagagttgaccaaacttattgcagagtactggaagacatctggcttactcacagtatcagatgggccctttattgatgaagcagttcacctacttaaagatgggattgac

SEQ ID NO: 214362 - DNA, 560 bp, Glycine max
gagatctcgtctttgaagtttctaagatgacttctccctacattaaatgtacagtctctttcttcatagcatttggaaatttggctgatgacaccatcaattttgaggcttttccccacaagctggtgcagtttggagagattcaggaaaaagttgtattgaaattttcacaagaggaatttcttacagcttggtcaactcaggtgcgtcctgcaacaactctgttggctgatgggtgtccatatttgtatgctatggtgcatgatagttcagtgtctacaataccaggtgattttgtcattggtgttaagttgacaaccataaacaatatgtgtgcatatgggctcaatcctggtatttcaggttctcgtcttttgggcaccattcctcagtctatttcacagcaaactgtttggaatcaaatggcaacagtgagaacaccattgaattttgattctagcacgcagagcttttggtcattttctattgaccttctcggtggaggaatttagtggacaaaactggagattgatcacactatcaaaattctccattagtac

SEQ ID NO: 214363 - DNA, 438 bp, Glycine max
  unsure (1)..(438): unsure at all n locations
aaaataacacacacttcacacatcattacgacaattaaaagaggtgtggaaattttcaaatagacagagcatactcaacaagagggtcatgtctaatttcctttattgaattaaacaaacgaacaaacgaaagaaaacacaaattccagatcatgcagaggattccgcattttcagaagatctggcagtagcctgtggaacagaaaaagctggcataagagtattaccagcaatttcaaaatcttgagaaattcccaagagaatatcaaaaactgtagactgtttgggattgtcaataaggaaactcaagtgccatgaagtttgatttgcccactcagaactccacatttcaaaaccattattaggaccacatacctctattgggaagatcaattcccaggaatgtggttccgattntgtccacttacatgcatcgaa

SEQ ID NO: 214364 - DNA, 451 bp, Glycine max
agcagttgtcacccaactaattttcttcaaaggatccaggttttcaaaagaaagaggaatcactctaatgggagccatgatcataatatgcagcctgccaatatgcttaatctactttccccaatggggtggcatgttctctggtccttcatctaaaaaggtcacagaggaagattactacttggctgagtggaactcaaaggagaaggagaaaggctcccatcatgcaagcttgaaatttgctgataatagcagaagtgaaagaggcagaaagctgaatgcttcaaccgagcttaccgaggaaatcacacccccacatgtttgattgctcctcttgaacttgttaatgttaacccttgtaccttcacttaagcctgcccctgaagtttgtgatatcaaatcaatgtgtgttcatatgtttgctatataatgaagctttccttgggaagtg

SEQ ID NO: 214365 - DNA, 451 bp, Glycine max
cacttcccaaggaaagcttcattatatagcaaacatatgaacacacattgatttgatatcacaaacttcaggggcaggcttaagtgaaggtacaagggttaacattaacaagttcaagaggagcaatcaaacatgtgggggtgtgatttcctcggtaagctcggttgaagcattcagctttctgcctctttcacttctgctattatcagcaaatttcaagcttgcatgatgggagcctttctccttctcctttgagttccactcagccaagtagtaatcttcctctgtgacctttttagatgaaggaccagagaacatgccaccccattggggaaagtagattaagcatattggcaggctgcatattatgatcatggctcccattagagtgattcctctttcttttgaaaacctggatcctttgaagaaaattagttgggtgacaactgct

SEQ ID NO: 214366 - DNA, 563 bp, Glycine max
cgcaaagttgattctttctctctttatctttctttccccaatttgtgagtgttactgttgaatcgattggattggcattaggttgatctgaaatacgcaattgacatggcgagcgcgatggtagaggacgcgaacttcgaagatgaccaactagccaatatgaccaccgacgacatcgtcagagcttctcgtcttctcgacaacgagattcgcatcctcaaggaagagttgcagaggaccaatttggaattggaatcgtacaaggacaagatcaaggagaatcaggagaagattaagctcaataagcagttgccctacctcgttggcaacattgttgagatattggaaatgaacccggaagacgaagctgaagaagatggtgccaatattgatcttgactcacaaaggaagggaaagtgtgctgtgctaaagacttctactcgacagacaatctttctacctgctggtgggcttgatgaccctgacatgtaaaacccggtgatctggctggtgttaacaaggattagtacttaatcctggataccctgccctacgagtatgat

SEQ ID NO: 214367 - DNA, 495 bp, Glycine max
  unsure (1)..(495): unsure at all n locations
accacgaaattaatgatcagattgcatgtttttaaaagatacgatgattccagtatgctgtgggttatcataccattagattgccaaaaaaaagaaaagaaatagataacaaatgtcaaacatcgacttaggttttccattggcttgatatgtctcaatagatcttcgtaaactgaaaaatagcttgttccaaaatccagcctatgcataataattgaggcttgctttcttctttgcttggacttgaataataccttcattaaagtcctcatggttcacctcagttgcatcacggcgtagagccaacatgccagcctcaacacaaacagccttcagttgagctccattgaaatcatctgtggaccgagcaagttcttcaaagttgacatctgggtgaacattcatcttcctcgaatggatctgtagaattcgagctcttgcttcttcacttgggtgtggaaactcaattntacgatctaatcgaccagaacgcat

SEQ ID NO: 214368 - DNA, 419 bp, Glycine max
tttttttttttttttttttttttttttttttttttttttttttttttttttttttggtttttttttttttttttttttttttttttttttttttttttttttttttttttttttttttttaaaaaaaggggaaaatgggggggggttaaaaccccccaggaaaacccaaacccggggaaggaaaattttccggggggggccaaaaaaaaattttgggggggggggaacacaaaaaaaatccccaaaaaaacccccgggggaaaagggccctccccaaaaagggggcccccccctaaaaaaaaccccccccttttaaaaaaaatttgggccaacccaaaatttttaaaaaaccaaaaagggggggggaaaaaaaggcccaaaaatcccggccccgggaaaaaccccccacaagggggccc

SEQ ID NO: 214369 - DNA, 588 bp, Glycine max
  unsure (1)..(588): unsure at all n locations
atttgactcacgagaggagagtaatgtgtgggaagtagaagtagaagtagaaggagagaagcaccactacgtcagcgattcctttgcctttttcttctttcttagactcgaagacaagtttgatcctattttgagaatcgcattcagatggaaagcgcatcagagcttgtggaattcccgttgttgctgacaccaatcgattccaactacagagcttgcaccattccttacagattcccctccgataaccctcgcaagcccactcccaccgaaatctcttggattgatctcttcctcaactcaatcccctctttcaagaagcgtgcagagagtgatacttctgttcctgatgctgcagctaaagctgaaaaatttgctcaaagatatgctgatatacttgaagatttgaagaaagatcctgaaagtcatggtgggcctcctgattgcattcttctctgcagacttcgtgaacttgtgcttagagaattgggattcagagatatcnttcaaaaagtcaaggatgacgaaaatgcanaagccatctcacttgttgagaatgttgtcatcctaatgatgccattgaagatg

SEQ ID NO: 214370 - DNA, 548 bp, Glycine max
gtagaataacttcttattacaagtaagatgttttggttttatcacctttataatactaaaatgacattttaaagagtatccaaactacaggcatgtaatggtgtatcaagatgaaggattaacagtagaaaaattgcaggtctgcagcattagtaggaaaagaatataacttcatagctaacttgaaacttcattgtatttgaatacacagtcatacaaacgtccaccgagaaattgtgctacctcgggatgtttcaccattccaatcttaagagaatcacatttaaattgagcatagagatttgtttctattccacgacccatcccttctaagatgacaagatctgcatcgctggcaaggtaagcaagctcctgtgacactcttgtaagatcaatgacaggtaaatcattgccagagttcgcaattaagagatttgaagtactgacacccacaagctgtccatcttcatcctttaactttgatataatttcaactagctcagaacaagtcacatcattgatggatgggagtcattagcagccaatac

SEQ ID NO: 214371 - DNA, 636 bp, Glycine max
  unsure (1)..(636): unsure at all n locations
tggattcaaaatgggaccatcgaagagaacattatctttggtttaccaatgaacagacagaagtacaatgaagttgttagagtttgtagcttggagaaggacttggaaatgatggaacatggggaccagacagagattggagagcgcggaatcaacctaagtgggggtcagaagcagcgcatacagcttgccagggctgtgtatcaagactctgatatatatcttcttgatgatgtttttagtgctgttgatgcacacactggcactgaaatattcaaggaatgcgtgaggggggctctgaaaggcaagaccgttattcttgctacacaccaagtagacttcctacataatgtggatcttatagtggtgatgagggacggaatgatagtccaatcggggaagtacgatgatctacttgcgtctggaatggattttagtgctcttggtgcagcacatgacacctctatggaactagtggagcaaggtgcagtcatgactggngaaaatttgacatgccattgaatcaccaaagcagcttcgaatacagagagccaatgtgaaagcactctcttgccagtcaagtctggcaggaaggtctaactcatcaagaggagaagagagactgaaagtagctac

SEQ ID NO: 214372 - DNA, 530 bp, Glycine max
  unsure (1)..(530): unsure at all n locations
tggattcaaaatgggaccatcgaagagaacattatctttggtttaccaatgaacagacagaagtacaatgaagttgttagagtttgtagcttggagaaggacttggaaatgatggaacatggggaccagacagagattggagagcgcggaatcaacctaagtgggggtcagaagcagcgcatacagcttgccagggctgtgtatcaagactctgatatatatcttcttgatgatgtttttagtgctgttgatgcacacactggcactgaaatattcaaggaatgcgtgaggggggctctgaaaggcaagaccgttattcttgttacacaccaagtagacttcctacataatgtggatcttatagtggtgatgagggacggaatgatagtccaatcggggaagtacgatgatctacttgcgtctggaatggattttagtgctcttggtgcagcacatgacacctctatggaactagtggagcaaggtgcagtcatgactggngaaaatttgaacaagccattgaaatcacc

SEQ ID NO: 214373 - DNA, 507 bp, Glycine max
cggctcgagtgaccccctaagtgctctggatgcacatgtggctagacaggtttttgataaatgcatcaagggagatttgagagagaagacccgggttcttgtcacaaatcagctgcattttctttcacaggttgatagaatcattttggtccatgaaggtatggtgaaggaggagggaacttttgaggaactctctaaccacggactgctgtttcaaaagcttatggaaaatgcgggtaagatggaggagtatgaagaagaagaaaaggtagttactgaaaccaccgatcagaagccatcttcagaaccagtggccaatggatcagttaatgatcatgcaaagagtggaagtaaaccagaagaaggaaaatctgttcttattaaacaagaagaacgagaaacaggggttgtcagctggaatgttctactgaggtacaagactgcattatgaggcgcccgggtggattccgtaatctttgcatgctatgtctcaacggaaactttacg

SEQ ID NO: 214374 - DNA, 347 bp, Glycine max
ccgcgctggccgccctttttttttttttttaaagaaatcctttaggcaatcaaaaatcacaacactacatgacaagaagttctgctctcctaaacaaatgaaaaaacgttctattcaccataaaaataacaagttcttggtggatttgtcttaacaagattatacctaaatcacttttagcatcctctaaagcatcatgccgctagcgcactctaggagttatgcgcccaacacttatctgtaataacttggggttgttaccttaggacgttatcaatcctgttatggcagggcgcgcttgatgcaccttgctagtttcccgtacatataaactgagacaagatgga

SEQ ID NO: 214375 - DNA, 369 bp, Glycine max
caaagtttcttcctttctctgctctttgtcttctctgacacatttggggccttgttgagtgtgtttttgcaagagggtatggcgaaggacgttgaggttgctgagcgtggctccttctctgggaaggactaccaagaccctccaccagcaccactcattgatgctgaggagctcacaaagtggtccttttacagggctcttattgctgagttcattgccactttgctctttctctacattactgggctcacagttatagggtacaagcaccagacggatcatgctgatgcgtgtggtggggttggcattcttggcattgcatgggcctttggtggcatgatcttcatccctggctactgcactggtggg

SEQ ID NO: 214376 - DNA, 380 bp, Glycine max
aaaattaaaatttaaaatatttcccatgatttgtttgagtacagagatgacagaagagaataacttaaaaaagaaaaatgacacactaaagggaagaacaccacagaggaaagtgcaaacggctccccctgtcataaaagagactttaatctacacttatccacaatcttgaagacataatcgagagggtcaaagaaacgttgcaaatacaaagccaaaagcatttcccattattaaacttgccatatcaacctccatctctccaattatcttctttccactagagccatcatcatgaagagaaagacatctcaattatgggggttactcctgaatgatccaagggccttggctgcacctgctctcaagatgaactggtg

SEQ ID NO: 214377 - DNA, 507 bp, Glycine max
cagaaagcaagatgtcagcattgaatatgatgcatgtacaattccaaatgattgtggttcattggttgttgccaaagttggaaatcacaaacaaattgttggtttccatgttgctggaagcaaaggaagactgggatatgcttcattgataccatacgttgagccagttgtgcaagctcaaagtgctgaagtttactttgacttcttccctgtggaggttgatagtcaagagggagttgctcacattggtgaattgaaatctggtgtctatgttccactgcctacaaaaactaatttggtggaaactcccaaggaatggcaactggatctaccttgtgacaaaattcctagtgtcttgactacaactgatgagagattggtaggcacagaacatgagggatatgatccttttcttggtggaattcaaaaatatgccactcccatgatgcccctagatgaagaaattctttctaaagttgcacaagatatggttgaggaatggtttga

SEQ ID NO: 214378 - DNA, 526 bp, Glycine max
gccatcagcattctcaacacctcctccctcactcactcatcaatggcatcaacaatatcagcaatggccatgatcaacgccaaatgcgtcaacccaaagttccccaaccccaccaagctcgtaccatcaaaaccttcccttcaggtcaaccttccaaagggcctaatagcctcacccgaaaacaccaaactttccactgcgacagcaatcgcaggagcaatattcacaaccctcggaacctgcgacgccgctttcgccgttcaacaaatagccgacatagcagaaggcgacaaccgcggtctggcactgttgctgcccataattcctgcaatagggtgggttctgttcaacattctgcagccggcgctgaaccaactgaaccgcatgcgcagcaccaaaggcgtgatcattgggttggggcttggcggcttggctggcttggtggctgcgccgcatgcatcggcggcggcggcttctgaagtggcggcgatggctgaagctgcctcgaacgacaacaggggacagc

SEQ ID NO: 214379 - DNA, 507 bp, Glycine max
aataaaagaaaagcggatatagcattagatacaagttgcaggaagcaagttacatgaaaactattagtatgatcatatgatgataattgatatcccacagcatttaattaagccccttccctatttaaatttcacaaacattaaatcactgggatctcatcctgttgagctggttaagagcaggctgcaagatgttgtaaagaacccaagcaatagccggcgtaaccacaaacagcagaagctgtcccctgttgtcgttcgaggcagcttcagccatcgccgccacttcagaagccgccgccgccgatgcatgcggcgcagccaccaagccagccaagccgccaagccccaacccaatgatcacgcctttggtgctgcgcatgcggttcagttggttcagcgccggctgcagaatgttgaacagaacccaccctattgcaggaattatgggcagcaacagtgccagaccgcggttggtcgcttctgtatgtcggctattgttgaacg

SEQ ID NO: 214380 - DNA, 570 bp, Glycine max
cttgttcttcttccttctcttcattctgtctctacccttcaacgcaactttctttcttttctattgagcttccaatattctcacgccttgcaatcgtagttgcaccctccaaactccttcccttttctttcatctgttcaggtacttgcagtaagagaacatattgtaaaactaaaagggaaaaatggccttagatcactttgaggagactgtgcaccaaaaaggaaattggaaatcttccagtgaaatcattgcagattctgatagaaatgcctctggtgactttgactgcaacatctgcctggagtgtgtgcaagatccagtggtgacactttgtggtcatctttattgctggccctgcatatacaaatggcttcattttcaaagcacctctttggatgatgaagaacaacagaggccacaatgtcctgtatgcaaatcagaagtttctcaatcctcccttgctccattatacggccgtggccaaaccacattaccttctaaagggaagccacgtcaagtaggcactgtcataccacatagacctcatggtccaagaacacttaacac

SEQ ID NO: 214381 - DNA, 499 bp, Glycine max
  unsure (1)..(499): unsure at all n locations
gttctaaaaatggtatgagaatatcattattcacttcatatagctcgtagagagattggtaatttacacataactcagcatcaatttgcagcttctctaacatagaatacatctggatcaatgagtgaatgtattctatgtaaggatgcactataactaatgatgaaaatgaagtagcaatcagaataagagcagacacaaaactaggcagcaaaggaggaaacaacttattctgctgagtgatttatcaacttgcattaaatgtcttctcatccttgggttactggtccccgaaagattgtacgaattggcgtatgtatgaatgtttgacacgtggttaccaaagacccttgcatatatcatctcaccaaagattccaaatgtgttgtctattgaaccagttgttctaatcataggtgaggtgtaaccgcttggaatcgagttgaagtgttgttgaggatgataaggattactatagggatggtaactntgagaaata

SEQ ID NO: 214382 - DNA, 526 bp, Glycine max
cattacattagattggtggtaatggcagcgtcactacaagcagcagctactttcatgcaacccaccaagttgagcaggagcaacactttgcagcaaaagtctactcagtccatttccaaggcttttggtttggaacctgttggagctaaaaaggtcacatgctcccttcaggctgatcttaaggacttggctcacaagtgtgttgatgctaccaaaattgcaggattcgcccttgccacctctgccctcgttgtctctggggcaagtgctgaaggtgttccaaagaggctaaccttcgacgaaatccagagcaagacctacttggaagtgaaggggacaggaacagcaaaccagtgcccaacaattgatggtggattggactcatttgccttcaagccggggaaatacaatgccaagaagttgtgccttgagccaacttcattcacagtgaaagccgatggtgtggccaagaatgctcccctttgagttccaaacacatagctcatgacacgtttgacctacactc

SEQ ID NO: 214383 - DNA, 570 bp, Glycine max
acatgatgaaaaattgctaacatttgcaaaactagattttaatatgttgcaggagttacatcagaaagaagttaacaatgtgaccaggtggtggattaagaatttaaatgtctcaacgaaattgccatttgtacgagataggattgcagaatgttacttttggattttgggaatatactttgagccacaatattctcttgctagaaggataacaacgaaagtaattgctctatgttctgtcattgatgacatgtatgatgcctatggaaccattgacgaacttgagcttttcaccaatgcaattgagaggtgggatatttgatgcttggatgatctcccagaatacatgaaagtatgttatatagaaattttgaatgtttatgaagaaatcgacgaagagatgagaaaacaaggaaaagtatattgcatcaagtatgctaagaaagagatgaaaagattaatcaaggctcacatggctgatgcaagatggcttcatttcaatcatacaccgtcaatagaggagtacatgctagttagacatgtatcaagtggctacttctatggtgatca

SEQ ID NO: 214384 - DNA, 529 bp, Glycine max
ggttgtatattcgtttccctattttaatttattaattatataagaggcctaattttagaaaacacattaataaaattaaggtatacacaccaaattaagctaaagagaaattaccatgttatattacataaattaaagaaacagatcaataataaaataactaagcttctagcttatacgggcagacatcttattaactaataaagttttgatgtaatccttcattaaccctcctgcatttgtataattatcttcatctttgtaaagcacgtcaatcatgcgcacaaggttgacaacacgcaaaagaaaattcattggcacttcagtaggattaaggcatgcctcattgatgtccttccaagcactcttaaccatctcaagtagtttattaatggcatcttgccttgaggtgttatgttgcttcatatagctttcaatgcttgatgcaacgtgtcttctttcctgctcaaactcatttccaacaatgtcatccataagcctacaaataattgaagcagccccaataatt

SEQ ID NO: 214385 - DNA, 532 bp, Glycine max
gtcatcttgtcattcaccgttaaagtcgtactgattcctcttcatctttcgttaaggcgagtacttttcgttcttgatctgttggttacgatgtcgtattcaaggagatctaggtattctccttctccttctccttctccatacaagcgatacggtaggtctgtgtccaggtctctctcaatatcaagatccagaagccgttcaaggagtttatcaagagatgcagaaaatccaggaaacaatttgtatgtgacaggattgtctcctaggattaccaagagagaactggagaaacattttgctgctgaaggaaaagtgatagatgtccatctggtagttgatccttggacaagggaatcccgtgggtttggctttgtgacaatggagactcttgaggaggctgaacgatgtgtaaagtatctgaatcgctctgtacttgaagggcgtgtcatcacggtggagaaggctaaaagacgacgtggtcgaaccccaacgccagggaggtatctaggactgagaactattcgtgctc

SEQ ID NO: 214386 - DNA, 612 bp, Glycine max
gagagagagagcgtttttgtgtttttctctgtcacaacttattattattattgttgtttgggacacaactcagagagttcttgcgaatttgcaatctctctctctctctaacgttggtctttcctttcccctttctgccgacgattttggttgtctcctttggatcagttagggccctttgtgctggtttgtagcttttgctgaataccagcaataatgaagaaggttattggtcaaactgttagggaccttaaaagagaagtaaataagaaagtgctgaaagttcctgggattgaacagaaggttcttgatgctaccagcaatgaaccatggggtcctcatggatcacttcttgccgatattgctcaggcaaccagaaaccctcatgaataccagatgatcatgtcagtaatctggaagcgaattaatgacactggcaagaattggcgacatgtctacaaggctttgacagtactagagtacttggtggctcatgggtcagagagagtgatagatgagatcagagaacatgcttatcaaatatcaacattggccgattttaatatattgattccagcggaagagatcacggaacaatgtcaagaagaaatc

SEQ ID NO: 214387 - DNA, 587 bp, Glycine max
gcagtgcgcatgatccttgggctagaatcctttggccctacaccaaagaagccattaaatgaatgcttggatattgaaattgaggacgatgaaccaaaacgaaaaccatctttggaagagattgatgccttggaggaggtccggcttgcaatagagtacattgtgattcctggtggagaagctgtggaacttcttcctagacgttctgaaattattgcccggcagcttgaactcgttcaaagttatcagttggctgctgaaaagtcaggtaccgatcagaatcccaggttgcaaattcttccattgaggctaaatacaaaaaaagcctctaaatctactgttgcccgcaagaaaacaagtcctacctcaatgtctactggtgacagcggcaatggcaccagtgttaccaggcttcctattttgcctgaataattcaattctttccccaattctaacgattcacttcactggtttgtacatgtatgatgtatgtaacatgtacagtcatacatgtggtgtaaataatttattcatagcctaagagcttgtatctcaaatggggtgtgacatttatgacggaagttgat

SEQ ID NO: 214388 - DNA, 531 bp, Glycine max
  unsure (1)..(531): unsure at all n locations
aatacaaaagtccttcagcatcatgttacccaaaatgaatgtttacagtaaaaaggaaggggggagtaactcaaattatactacgtattcatagcatatatggacaaatgaggggcactgtttttcataatgtacaattataagattgcatcagctcatgttactccttccttgcaaatacacttgatcagcgtaccttaacgatgtacgtactgttctatatgcatatgcattttacttctgaaaatgcttatccaaagcataaacccgcatgctagtgcctgcaattctacctacacattggactctgcttacaagagaatcacaacgtttgagaagctatttcatcaaatctaagaagacgaagccattccaaagactatgcaacagcattgatggcagtaaattccttgaccgtgtatatatcacacccatcaccatcccaagaaatataaggggaagcatcctctgtatgttaaaatgtgcaagagcaaggcgattgncttaccagttttgacaccacactgcatg

SEQ ID NO: 214389 - DNA, 574 bp, Glycine max
agagccctttcttctcttcccccattttttcctctttcttcctcgcctagctagctccagaaaattaggatctgcttcagatctagtgtttccctgtcccaaatcacgagtccattgagtttgattttgtggatgaaaagcatagatagggcttttgcaaaactctccaatgtttcttgaaattatatgaccatgcgtcgaattcgtatgctgcactccttctccgtcgtgttcctctactggttctacgttttctcatgaactccctcttaaatccgtgattaattagatctatctccttagttaatccttgtcttttccaataattaattagatctgcgtctcctttttggattagtttcttttttggttctgttatcaaatcaaataaaaaatctccttctcggaaatggcatcaccgatccaacaacaacaacgctcgactactacaagttctggatctgaaggaggagatccgcatatcatcgatgagaggaagcggaagaggatgctgtcgaaccgcgagtctgcgcggcgatcgcggatgaggaagcagaaacagctggaggatctg

SEQ ID NO: 214390 - DNA, 519 bp, Glycine max
gaagatgagattacttttaattaaaataaaacagccaccataaaaaatgattacaagtcgcgcaaagggacacacactgccactaccagccatcaacaccctgtacctcacattcatctctctcaggaacccaatgcattgatgaccacacgatacttttgatgcagacagataacactaatagtaatataatacacataacagagaaagttactaccgcactgaataaccctaattaaagtaaaatcctcaggaatgatcaacgcagaaacatgtttgcggtggccataatcggttgtatcggatgaggaatctgccagggcttgaggagaggatctggaatctcgggaatctcaacggataacccttcgacctcttcagcgatctcaaggatggagttcaagaagcgcaatcgatcggccagttccattgtctgtgctctcagaatgctgttcgccgcttcggtctcgacgcacgcttcttccttggcctctatgttctccgcaagcttcttgttcg

SEQ ID NO: 214391 - DNA, 617 bp, Glycine max
  unsure (1)..(617): unsure at all n locations
tgcaccaccaataagctccataccttctaattctctactctctctcacttctctctatcacatttttcttacaagatggcagcatcatcagcatgccttgtagggaatggtttatctacacggggtaatagaataactcttaagaaggacttcaatggaagaagatatctctactcatcttggagattttcattattgaacaacaataaggcatcaaaagcattttccataaaggcatctttggagcaaaggcaagaagaagggagaagggggtttctgaaactgctgcttggaaatctgggagttggtttgcctgcactattgggaagtggcaaagcttatgctgatgaacaaggggtttcatcctccagaatgtcttactccaggtttctggagtatttggacaaggacagagttaaaaaagtggatctttatgacaatggaaacactgctgatgctgaagctgtttcgcccgagttggggaaccggtcacagtatgttagagttcaactccctggacttaaccaagagctccttcagaaattcanggaaaagaatatttgacttgcagctcataggtcccaagaagagcaggttctctttagctaacctgatgg

SEQ ID NO: 214392 - DNA, 540 bp, Glycine max
gacgtaaagaaactacaaatttttacactaaaaacagtttctcttttatacatactctctgttgtcatttgtcaacactacaaaaaatgaaaaagtaaggtagaatctttaatcattcacaaatatggagcaggctgcagagggcattctgtattctaagataatacatatgaaagatgttacatatataggctattcaaacagtggctggtactggagttgaaggagcaacacggttttcagctggaatttcaacaaactcagacaatatagcacggaattcatctccgctcagagtctccttctccagaaggacttccacaatcttgtcaatggcctcacggttgttccttatatgctccagtgcaatttcatatgcttcatctgagatcctcttgatggcagcatcaatgtcttctgcaagcctctctgacattgagttccttgccatcattctcatgatgacatccccaccttgtgctgatggttccataagtgaccaaggaccaatatcagacattccaaatgtggtcaccatct

SEQ ID NO: 214393 - DNA, 532 bp, Glycine max
  unsure (1)..(532): unsure at all n locations
tgcaattgaagttgaagtcttgcccttctctcttcaactccaaacacaagacatcatcatccatggctgcctccgtctccactgtcggagctgtcaacagagctcttttgaacctgaatgggtctggacctggggtttcagctcccagttcatccttctttgggagcagcttgaagaaggttattggctcaagggtccccaacacaaagatttcctctggaagcttcaagattgttgctgtagaagagaagaaagagattgaagagacccagcagaccgacaaggacagatggaagggtcttgcctatgatatctcagacgaccaacaggacatcacaagaggaaagggtttggttgactcccttttccaagctccacaggatgctggaactcactatgctgtcatgagctcctacgagtaccttagcactggacttcgccagtacttggacaacaacatggatggattttacattgctccagcttttatggacatactngctgctcacattaccaagaacttcatgaccct

SEQ ID NO: 214394 - DNA, 409 bp, Glycine max
aggacaaaaggaaaaggccccaaattcaatttaaggggacactttaactcaaaattatagaggaagacagtccaatttgaaaaatatagtaaaatcatttcaaacttggcattttctttttgcacctaagacattgagaattctaagaatgttacacgcaagtcccatcacaacttttagcacttggatcagcacaaccttcaggaacagaaatatttacttgccaagtttgctttgcctccaattcaagattggaagaaagttcccctgttaatagcatcctcggtagcatttacaagtgcaggctcgttcaagtacttgtcacccaattggactctttggacattctattgttcttggacaagcatgttaccattctgtaagagcttttccagagtcatcttgggct

SEQ ID NO: 214395 - DNA, 555 bp, Glycine max
gtgtttgtgaaactccctctcacacacaagtcacaaaaacaacttgtgttgttccaatggcatcagcaacaccccttttgaaagatgagctcgacatcgtgatccccacgatcaggaatctggatttcttggagatgtggaggccattctttgagccttaccatctcataattgtgcaagatggtgacccttcaaagaccatcaaggtccctgaaggctttgactatgagctctacaaccgcaatgacatcaacaggatccttggccccaaggccaattgcatctccttcaaggactctgcatgccgttgctttggctacatggtctccaaaaagaagtacatctacaccattgatgatgactgctttgttgccactgatccatctggacacaagattaatgcacttaaacagcatatagaaaacctcctctgtccatccacacccttttttttcaacaccctctatgaacctttccgagaaggtgcagattttgttcgtggctaccctatcagtctacgggaaggtgtaccaactggcagttctcatgggcttt

SEQ ID NO: 214396 - DNA, 523 bp, Glycine max
attattacacatgtaacgaaatgctgccatgtgaactctacccattaaacagtaataaaaagaaagtaacgccctacgggtgtacttgttctttctaagctcaaatcattaagttactaaatagaattacagctaacaatgctgcaaaattcaagccaagaataaaagttaagttgaaaataaatactaaggggaaaaaatacagtatataaatagttccacttcaagttctgtggctgttgttatgcacttaaccaaaactgattcatgctttgccattggccactgatgctccagctgggttaagctcatcccaagcttcaatccaagtgaccatggcatctgccaacttgtcaaagtaaggatctaccttggtaagcttttccttgacttgcttggcaagctcaatgtagcacttctgaacaatggtagcttcttttggaagaacaacactctggaagaatgggataatgtcttcttgccagaatatgcctttgtactctttcttcaagttcacaaatgg

SEQ ID NO: 214397 - DNA, 480 bp, Glycine max
gtgtttgtgaaactccctctcacacacaagtcacaaaaacaacttgtgttgttccaatggcatcagcaacaccccttttgaaagatgagctcgacatcgtgatccccacgatcaggaatctggatttcttggagatgtggaggccattctttgagccttaccatctcataattgtgcaagatggtgacccttcaaagaccatcaaggtccctgaaggctttgactatgagctctacaaccgcaatgacatcaacaggatccttggccccaaggccaattgcatctccttcaaggactctgcatgccgttgctttggctacatggtctccaaaaagaagtacatctacaccattgatgatgactgctttgttgccactgatccatctggacacaagattaatgcacttaaacagcatatagaataccttctctgtccatccacaccctattttttcaacaccctctatgaacctttccgag

SEQ ID NO: 214398 - DNA, 519 bp, Glycine max
cacatgtaacgaaatgctgccatgtgaactctacccattaaacagtaataaaaagaaagtaacgccctacgggtgtacttgttctttctaagctcaaatcattaagttactaaatagaattacagctaacaatgctgcaaaattcaagccaagaataaaagttaagttgaaaataaatactaaggggaaaaaatacagtatataaatagttccacttcaagttctgtggctgttgttatgcagttaaccaaaactgattcatgctttgccattggccactgatgctccagctgggttaagctcatcccaagcttcaatccaagtgaccatggcatctgccaacttgtcaaagtaaggatctaccttggtaagcttttccttgacttgcttggcaagctcaatgtagcacttctgaacagtggtagcttcttttggaagaacaacgctctggaagaatgggataatgtcttcttgccagaatatgcctttgtactctttcttcaagttcacaaatgggtt

SEQ ID NO: 214399 - DNA, 524 bp, Glycine max
  unsure (1)..(524): unsure at all n locations
cttgcaattgaagttgaagtcttgcccttctctcttcaactccaaacacaagacatcatcatccatggctgcctccgtctccactgtcggagctgtcaacagagctcttttgaacctgaatgggtctggacctggggtttcagctcccagttcatccttctttgggagcagcttgaagaaggttattggctcaagggtccccaacacaaagatttcctctggaagcttcaagattgttgctgtagaagagaagaaagagattgaagagacccagcagaccgacaaggacagatggaagggtcttgcctatgatatctcagacgaccaacaggacatcacaagaggaaagggtttggttgactcccttttccaagctccacaggatgctggaactcactatgctgtcatgagctcctacgagtaccttagcactggacttcgccagtactaggacaancacatggatggactttacattgctccaagctttatggacaaacttgactgtcacattaccaagaact

SEQ ID NO: 214400 - DNA, 508 bp, Glycine max
  unsure (1)..(508): unsure at all n locations
aaaaggaaaaggcaccaaattcaatttaaggggacactttaactcaaaattatagaggaagacagtccaatatgaaaaatatagtaaaatcatctcaaacttggcatcttctctttgcacctaagacattgagaattctaagaatgttacacgcaagtcccatcacaacttctagcacttggatcagcacaaccttcaggaacagaaatatttacttgccaagtttgctttgcctccaattcaagattggaagaaagttcccctgttaatagcatcctcgttagcatttccaagtgcagcctcgttcaagtacttgtcagccaattggactctcttgacattctcttgttcttggacaagcatgttaccatacgtcaagagcttctccagagtcatcttgggctgctcaaaggttggaggtccatcttttgagttcacaagcttcttcccaatgccgtcaacaccaacaccagaaatccacttcctcacttcgncatcatatactctg

SEQ ID NO: 214401 - DNA, 529 bp, Glycine max
tggggtctctgcctctgcaattcagcgggctcaagtgctccccactctcatcttcttctctcttctccaaaccttctctttggacccaacaatcccaaaagcgcgtttcaattaccattgcgaactcaatagcaatagccaatgcgcagaacaaagagagagcgaggcttaagaaactcttcgaagaagcctacgagagatgccgcaatgctccaatggaaggtgtttccttcaccatcgaagacttcactgctgctcttgacaagtacgacttcgattctgaagttggcggcaagattaaaggcactgtgttctacacagataacaatggagcagttgttgatatcactgcaaagtcttcggcatatttgccactgcaagaggcgtgcatccacagggttaagcatgttgaagaagcaggcttagttcctgtgttcaaagaggagtttttgatcattggtgagaactcaatagatgatagcttggtcttgagattaaggtctcttcagtttgaccttgcatgggaacg

SEQ ID NO: 214402 - DNA, 500 bp, Glycine max
aatatgaattagttctatttatttaactcacaataatacattggcatcaagacatcgttcggcaacaattgatagttagttacaaacaatattataaaaatgtaagcaaacagaaagaaaagagcacgcaattctgaatcatgattcttcagctggtggtacctcactcaaatccagtccctcttcaggcaagtctgaagtaaatggtcccaggatcccatcaccgctgatagtcaatccactctcaggctggaaccttagcatgtctgcacgagccatagcttctgcttgggctattctctgtctgaatgtctgagccatctcctccgccttctcaaagacaagctttggattgcgaatcatgtctccaggtgtgggctctaacttcttagtggaaagacttactcgacctctctctcggtcatggcttaagatcatcacctttaatatgtcaccaggtttgagcacagttgaaatatcagttacacggtcatgactga

SEQ ID NO: 214403 - DNA, 541 bp, Glycine max
ctctggtcggagttgaagtgaagcatgcggcggagggcgcaccggaggagaattgctccgccaagcccaccaagcagggcgagggcctccgccactactattctcacaacatccacgagcatcagctccttctccgtcaaaagacgcataacctcaaccgtcttgaggctcagagaaacgagctcaattccagggtgaggatgctgcgcgaagaattacagcttttgcaggaaccaggctcttatgttggtgaagttgtcaaagtcatgggcaagaacaaagtccttgtcaaggtccacccagaaggaaaatatgtcgttgatattgacaaaagtattgacattacaaagattactccatccactagagttgcacttcgcaacgacagttatgttcttcacttagttctgccaagtaaagttgatccattggtcaatctgatgaaagttgagaaggttcccgattctacttacgacatgattggtggtttagaccagcaaattaaagaaatataagaggtcattgagttaccaatcaaaca

SEQ ID NO: 214404 - DNA, 504 bp, Glycine max
aaaaatactctataaatgtagtgtgccgtccgaagacacagacaaggaaaaactcaaagaaagaatcatatgattcggtacataacttggtaaacttaagcaaaatgaaatccaatgccactgtaaattgaaataaccctaaggtgtgttcgctgcccatcttcgcaggataataatgtgcaccacaaacatgaaataaaaatcacttccacaacttccgcaatgacatgtttttttcagtctcctttttcatcaccttggccacagccatctcaaaatcctcctgagtcacgtgtaccctccgctccctcaatgcaaacattccagcttcggtgcaaacagccttaagttcagcaccagatgctccattcatcttctcggcaatcttcttcagatcaatgccacgcattaaattcattcttcttgaatggattttcaaaatatccagccgagactcttcattagggtttggaaattcaatcttccggtcaatccgtccaggtc

SEQ ID NO: 214405 - DNA, 467 bp, Glycine max
acaataataaatccatatttttataattaaaagtagtagattacagcgatgcacttgagaaacatattaagtggactaattctccctggtcaagcaagaaaaaaaccagctatgacccaaggtagagagagattatacacagaatactagtaattaactaagactggctctgcaattgccaaaaactccattgcagtagcagccacctgagaagacactaagacctagactagaccatacataatgaagattaatacccttacataacaacataggacactaagaaaacacggcttcacagagaatcccagtcgatctcataagaggggtacttctggagattaaaattatccgaatcaccttcccactgcggctcgctgacgtcagcgaaagtcagaaccgaaagcggcgaagaaccttcagaagaggaggaagcagcttcgaccttacaagagttgttgtcgttg

SEQ ID NO: 214406 - DNA, 426 bp, Glycine max
gacaggagaacatcaggtgaaaaatttaaataaaaaattattaacataattcagagttaatagaatacggcatgaatttggcttaggggtcaactatcctataaaccatggcaaattagttcgtcatgaatctatcagccttctctattctgattgctctcaaatggaactcgaacaaacaattgtccatgcaaggtcaccacagccgacgtctgctgagtatcaattcttgaaggcaagctgacaaccttcttgaaaggtgtcaccccccatggattgtcagaattctcgggctctccacttatgaccaagcgtccagctgggtctgattgaacacgcacctcttcccgcagaaggccaggaactaaagcatagacctcaaaacaatctttagtttttggcacattgacttttacccaatcagca

SEQ ID NO: 214407 - DNA, 512 bp, Glycine max
accttgaggatccaaaggctcaggaagaaattttacttccactttcaagattatgttgatttgattatctggaaggtgcaattcttggaccgacaccatttactaatcaagtttggtagtgtagatggaggggtgtcccgaaatgctgatcaccacccagcttttgttgctgtatataacatggatacaactgaaattgtatcattttatcagaattcaccagacgagctttatctgttgtttgagcagttctgtgaccacttccatgcaacatcaaggaattcaatgtatatgaatttcatatcttctcattcaaataatatccacgcactggaacagctccggagcattaaagataaggcaagcagctctgcacagtttgtgaagaagatgcttgcctctttgcccttcagctgtcagtcacagagtccttctccttacttcgaccaatctctgttccggtttgatgataagctgatttctgcaactgatcgacataggcaatcaactga

SEQ ID NO: 214408 - DNA, 435 bp, Glycine max
aattagaatgctgttgcaaataatacttttccaatattttttaaatgataaaaatttcggtaattagtttaaaattttaaaataaaataaaatgaccaaaatttagaagagcgtcgattgtcacagcaatcgttagaatctgattgacatacattttggcttgcaagtaccgactgaatatacatcctcttgattcagtaaagacggtaacagtggaagacaagtaaatgtaaatctactctcatttgtaatctataaatctacgctcatcttcgaaagtgaatatttacaactgaaggctgcaagaacaaagtctgttgaacagagagagcaaggggcaaaattggatgaaaaagaaacgacgagatcttttttgcacgaccatccatactaccagcttcaggacctggtttgatcttaaatttgagagaatac

SEQ ID NO: 214409 - DNA, 485 bp, Glycine max
cgccgatgacggttcaggcgggtcgggttcggaccctgaaagaaggttctcgcggagaatcgggtttgggtccggtcgtgtactggatgttcagagaccaacgtgtgacagacaattgggctctgatccacgctgttgctgaggccaacaaagccaacgttcccgttgccgttgttttcaatctcttccacacctttcttggcgccaaatcccgtcatttagggttcatgctcaggggcttgcgccaattgtgccaccgtatgcaacactctcttcaaatcccctttttcttgttccagggagaggcagaggagacagtgccaaagtttcttagagaatgtggagcttcacttttggtgacggatttctcacctttgcgggaagtacggaggtgtaaagaagagatatgcaagagggtaagcgattcggttgctgtgcatgaagtggatgctcacaacgttgtgcccctttgggttgcctctgat

SEQ ID NO: 214410 - DNA, 355 bp, Glycine max
aatacatggacggtttttacaggtccaagtttcattcaaaagacctttaccaaaatattaaagcatccgattagaacaacggcaagtttttatattccaaaaaaaatcccttatttggccccaggggggggccatttttatgggtcatgatcctaaagcatctctcatttttgggggccatttgtgaaacacagctttttcagaaagagggaacaatgccatatccaacttctgtaaaaagagggggggaaaacatttgatccactaaaaataaaacacttgttcttttggcaaaaggaccttttatccgggggctagtttttagataggccttccttgaggaaaacctgattgt

SEQ ID NO: 214411 - DNA, 312 bp, Glycine max
aaaaaaactagtgcatatataattggctttgattaaacataagttaccatgaaactatgagtggctatggattatgctttaaagaaacattaatacgtacacagctgttcacaatttgatatatagtgaaacgcatcagcctcaccgcataacgcgcatgctgtaaagttctcacttccacccagccaagcagtgcgaccgggtagtctcaagtcgggtcgcagtgatgaggatccgacccgttcgcgctgcgcctgagcgcatatcggagaaggtggaggagagcataatgaacgcgcatgaggcgtgcgc

SEQ ID NO: 214412 - DNA, 440 bp, Glycine max
gaaaaaaactagtgcatatataattggctttgattaaacagaaatgaccatgaaacttttagtggctatggatatatgctataaagaaacatcaatacgtccacagctgtatacactatgacatacagggaaacgcagtaaagtcactttccaacgaaccatgcatgctcagaactccaaaggggggatccatatggaacccgggaggatcattaaaggacactgaggccgacactagcatacacgtttgtgagacgtctatgcagggatgaccctctcgttctgacgaccgagctgatgctacgtagcaatagtggagtcgacattatgatcgaggtcgcaacggtcctgggagtcgttaccttggtgctctgcggcggggatacagaggccggactccctggtgacgagtggatggtcttggcccgagaggtcatggt

SEQ ID NO: 214413 - DNA, 388 bp, Glycine max
gcgcattatagcacaccacacaaaaaagcaaaacagagagaacaactgttactcacacacgccatgggtaaatgaatggtttttgagcaacagcagttaaaagagaaaagggattcagcgaagatgacatcggttggtgtggcaccaacttcgggtttgagagaagccagtgggcatggagcagcagctgcggatagattgccagaggagatgaacgatatgaaaattagggatgatagagaaatggaagccacagttgttgatggcaacggaacggagacaggacatatcattgtgactaccattgggggtagaaatggtcagcccaagcagactataagctacatggcagaagcgtgtgtagggcatggatcatttggagttgtct

SEQ ID NO: 214414 - DNA, 479 bp, Glycine max
agataattgcagacattttgtcctctattgtatgttacaatctgctgtgatacaggaaacagggtattctacataaccatcgggggttgggtgataatgagtagcatgtatctctaaatctgcttttacagggcaaccgaatacaataaagataccaacaaaaatatcatattaaatagaaaaggaaagcgcagcattctcatatggaaacaacacttcacgagcctagaaacgggcattgcttccttgcatgctctggaaccaatttcaccaaaatctcagatgggactcctttcagttcatgggatttgaaattaaatagtggtggaaggaatcggccatttggcaagcgagtatttggatcacgaagctcgtcgaagaaaggatgcgtcaaggcatcaaaagctgtgcaccgcaagttaggggagtattgtagtagtcttgataccaaatcaacagcctctggaggcatgcgctta

SEQ ID NO: 214415 - DNA, 606 bp, Glycine max
  unsure (1)..(606): unsure at all n locations
gcgcattatagcacaccacacttaaaagcaaaacagagagaacaactgttactcacacacgccatgggtaaatgaatggtttttgagcaacagcagttaaaagagaaaagggattcagcgaagatgacatcggttggtgtggcaccaacttcgggtttgagagaagccagtgggcatggagcagcagctgcggatagattgccagaggagatgaacgatatgaaaattagggatgatagagaaatggaagccacagttgttgatggcaacggaacggagacaggacatatcattgtgactaccattgggggtagaaatggtcagcccaagcagactataagctacatggcagagcgtgttgtagggcatggatcatttggagttgtcttccaggctaagtgcttggaaaccggtgaaactgtggctatcaaaaaggttcttcaagataagaggtacaagaaccgggagctgcaaacaatgcgccttcttgaccacccaaatgttgtcgctttgaagcactgtttcttttcaaccactgataaggatgaactatacctcaatntggtacttgaaatatgttctgaacagttnatcgtgtgatcaaac

SEQ ID NO: 214416 - DNA, 461 bp, Glycine max
agataattgcagacattttgtcctctattgtatgttacaatctgctgtgatacaggaaacagggtattctacataaccatcgggggttgggtgataatgagtagcatgtatctctaaatctgcttttacagggcaaccgaatacaataaagataccaacaaaaatatcatattaaatagaaaaggaaagcgcagcattctcatatggaaacaacacttcacgagcctagaaacgggcattgcttccttgcatgctctggaaccaatttcaccaaaatctcagatgggactcctttcagttcatgggatttgaaattaaatagtggtggaaggaatcggccatttggcaagcgagtatttggatcacgaagctcgtcgaagaaaggatgcgtcaaggcatcaaaagctgtgcaccgcaagttaggggagtattgtagtagtcttgataccaaatcaacagcc

SEQ ID NO: 214417 - DNA, 564 bp, Glycine max
gacaagcagcttaagaaaaatctgcaaagaataaaacaagaggaggaaatgcaacttacttgttgatataaacttcagacagagcgagttgttgtaaagctagccttgttgcagccatggccacccacgcggctctagcttctacaaggatccccactaacaccaagttcccatccaaggcttcacactctttcccaacccaatgcgcctcaaagagacttgaggtgacagaattctctgggctaagatccacttcatgtgtgacatatgctaacgatgctagagaatcttccttttttgatcttgtagcttcccaactcactcccaagaccaatggatcatcaactcctgtgaggggagagacagtggccaagttgaaggtggcaatcaatggtttcggacgcattggtagaaacttccttcgctgctggcacggccgaaaagactcaccccttgaggtcgttgttgtcaacgacagtggtggtgtcaagaatgcttcgcacctgcttaaatatgattccatgctgggaacttttaaagcagatgtgaaaatactggacaatg

SEQ ID NO: 214418 - DNA, 494 bp, Glycine max
aagaaataccatatcaatcaatatatgggcgatattcatgaatttcagtcacgccaaaatttattattggctgcagataatgttaaactttgaaaatctctcctcagacaccgtctgaacgaacaatttccttctttttcacatgatacgttaacacaaggcaaagagtaaaaatggtttgctgctggtaatggtaatcatcaaatcagaaaaaggcgctctcctctattcatatactttgcattcctcatcagcagggtttgtctcgcagaattcctccaatgggtctccactccctgctttagctgcccctggccacttgcttgctactaggtgtgccaaatccaccaccctttggctgtaaccccattcattgtcataccaagcaaccaccttaaccatgtcatctcccatgaccatagtcaaggaggagtcaatagtagaggaaacatcagagcagcggaagtcgatagacacaagtggaacatcacaca

SEQ ID NO: 214419 - DNA, 588 bp, Glycine max
gacaagcagctcaagaaaaatctgcaaagaataaaacaagaggaggaaatgcaacttacttgttgatataaacttcagacagagcgagttgttgtaaagctagccttgttgcagccatggccacccacgcggctctagcttctacaaggatccccactaacaccaagttcccatccaaggcttcacactctttcccaacccaatgcgcctcaaagagacttgaggtgacagaattctctgggctaagatccacttcatgtgtgacatatgctaacgatgctagagaatcttccttttttgatcttgtagcttcccaactcactcccaagaccaatggatcatcaactcctgtgaggggagagacagtggccaagttgaaggtggcaatcaatggtttcggacgcattggtagaaacttccttcgctgctggcacggtcgaaaagactcaccccttgaggtcgttgttgtcaacgacagtggtggtgtcaagaatgcttcgcacctgcttaaatatgattccatgctgggaacttttaaagcagatgtgaaatactggacaatgaaaccatcactgctgatggtaagcc

SEQ ID NO: 214420 - DNA, 509 bp, Glycine max
aagaaataccatatcaatcaatatatgggcgatattcatgaatttcagtcacgccaaaatttattattggctgcagataatgttaaactttgaaaatctctcctcagacaccgtctgaacgaacaatttccttctttttcacatgatacgttaacacaaggcaaagagtaaaaatggtttgctgctggtaatggtaatcatcaaatcagaaaaaggcgctctcctctattcatatactttgcattcctcatcagcagggtttgtctcgcagaattcctccaatgggtctccactccctgctttagctgcccctggccacttgcttgctactaggtgtgccaaatccaccaccctttggctgtaaccccattcattgtcataccaagcaaccaccttaaccatgtcatctcccatgaccatagtcaaggaggagtcaatagtagaggaaacatcagagcagcggaagtcgatagacacaagtggaacatcacacacgtgcaacacacctt

SEQ ID NO: 214421 - DNA, 536 bp, Glycine max
agaggtcctactggctttggagtatcttcacatgcttgggattgtctaccgtgaccttaagccagaaaatgttcttgttagggatgatggacatattatgctctctgactttgacctctccctccgatgtgctgttagtccgaccctcgttaaaacctcgtccacagattctgagcctttaagaaagaatgctgtttactgtgtccaacctgcatgtattgagccaccttcctgcatccaaccatcctgtgttgctcctactacatgcttttcaccccggcttttctctagcaaatcaaagaaagacaggaagccaaaaaatgaaatcggcaaccaagtgagtccgttacctgagctcattgcagagcctaccgatgcccggtccatgtcatttgttggaactcacgaatacttggcaccggagatcattaagggtgaaggtcatgggagtgcagttgattggtggactatcgggatctttctatatgagctgttgttcggtaaaacgcctttcacgggatccggtaaccgagcta

SEQ ID NO: 214422 - DNA, 464 bp, Glycine max
gttgaagagtggtggttgcggtggttgtggaggtggttgtggaggctgtggaggagggtgtgcaaataggttggagagtaccggctgtggaggtcgttgcggtgatcctttggttggtgactgtgacattcacgaacttcgcacagaaactctgcatcaactgtatgaattggctgacgataggtctatctctggacattcatactctggctctctcttgatgcagttttgtgatctactgcttatcagcgatgcactcttgcatttttcgcattcatatcctgcttatgctaattacacttttgagtacgcatactacttatggtcaccttcataacctgtcaacgcaacgagatgctgatctcatcctttgttgggacatatgcctttctgctcctgcatgctctttcatgttaactgcatctcataaacaatttatgcaacctatgtctcatttaatgcat

SEQ ID NO: 214423 - DNA, 551 bp, Glycine max
ctttgttgcatttcacacaccaacttcccatagaagagagaagagagaagagactcttccttccatcctgcaactcaaatcatcatgcaagactccagctcaatgaagatctcccctctggatctcatgtccgccatcttcaagggcaagctcgacccctccaacgtctcctcctccaccaacgccgccgacgccgccttcctcctcgagaaccgcgacttcctcatgctcctcaccacctccgtcgccgtcctcatcggctgcgtcgtcgtcttcatctggcgcagatcatcctcccccaaggccaagcctctcgagcctcctaaacgcgtcgtcgagaagcttcccgaaatcgaagtcgacgacggcaccaagaaggtcaccatcctcttcggcactcaaaccggcaccgacgaaggcttcgccaaggccacagctgaagaggccaaagcgcgatacgagaaggccacgttcagagtcgtcgatatggatgattatgccgacgatgacgatgaatacgaggaaaggttcaaaaagagactcacgttctt

SEQ ID NO: 214424 - DNA, 536 bp, Glycine max
cgttgccattctcatcctcttctttctctctctaccattgccatggatccctacaagcaccggccatccagcgccttcaattctcccttctggactacaaattctggtgctcctatttggaacaacaactcctctttaaccgttggagctagaggtccaattctgctggaggattatcatcttgtggagaagcttgcaaattttgatagggaacgtatcccagaacgtgttgtccatgccaggggcgctagtgcaaagggtttctttgaggtcacccatgacatttctcacctgacatgtgcagatttccttcgagcccctggagttcagacgcctgtaattgttcgtttctcaactgtcattcatgagcgtggtagccctgaaaccttgagggaccctcgaggttttgccgtgaagttttacaccagagagggtaactttgaccttgttggaaacaaccttcccgtcttctttgtacgtgatggcatgaagtttccagatatggctcatgctcttaaacccaatgccaagaacca

SEQ ID NO: 214425 - DNA, 539 bp, Glycine max
  unsure (1)..(539): unsure at all n locations
aaatactaacaaatacaaacggcatttattgagataggtcaacgagttgcattcatggagttatgggtacacacaacataatattgcaagaaaaggattagttctttcaggtaatccaaaatcacatccttatcgtactctttgcacgtctgcaactctaacaatcattctggagttggcaacaacattaaatatttggcctcgtgctgagatgagaagctatcttttggcctagagaacggtcagcctgagaccagtatgatatccagacactgcggatctcatgggtgacccgtgggtcagataaagcatcaacccatcggcgagcaaatctatcttgcctgtcaggtgcccaagaccggtatctctctccgggctgcttgaagttgttctccttctcaattacacacttttcacgccttccactgcagatagcaggaggtatggggaacctttctgcatgacgaacaggatcataccttgaagggaaggaatngacctcctcatccctgtgaatgaaattcatgaaaccttcatga

SEQ ID NO: 214426 - DNA, 480 bp, Glycine max
gttttgtcgcagcattccatacgaggccgaagggaagagtttttgttgggtttgggaggctaagtagggtttgcgttgagaaagagagagatgggaagagaaaaggagacaacaaaggtagcttacacagtggagcagcttgtagccttcaatccatacaatcccgatattcttccagatctcgaaaactatgtcaacgaccaggtttcgtcgcaaacttacagcctggacgcgaatctctgccttcttcgcctctaccagtttgaaccagagaaaatgagttcccagattgtggcccgcatattggtcaaggctctcatggcaatgccggcgccagatttcagcctttgtctctttttgattccagaacgcgtgcaaatggaggagcagttcaagactttgattgtcctgtctcactatttggagacaggaagatttcggcagttctgggatgaagcagcaaaaagtcgtcatatagtt

SEQ ID NO: 214427 - DNA, 516 bp, Glycine max
cgcttgagctctgcgagatcttgagtcgccgatttgaaaagatgagtaagcttcagagtgatgctttgcgtgaagccatctcaggaatcatggccgattccaaggagaagaatcgcaaatttgtggagaccatcgaactccaaatcggtttgaagaactacgatccacagaaggacaagcgtttcagtggctccgtcaagttgccccacatccctcgccccaagatgaaaatttgcatgcttggtgatgctcagcatgttgaagaggcagagaagataggactggactggatggatgtagaagccttgaaaaagctaaacaaaaataagaagttggtgaagaagctagctaaaaaataccatgcttttttagcatctgaagcagtcattaagcagattcctcgtcttttgtgtcctggtctcaacatagcaggaaagttccctacacttgctactcaccaggaaactcttgagtcaaaggttaatgagtctacggccatggttaaatttcaactta

SEQ ID NO: 214428 - DNA, 539 bp, Glycine max
gagtaaaaacaaaagcagcaccaaaaacagcgcatatcattatcaaatgtttttgaacatgaaaacgaaacactttaacataaaaatccatcccacaaaactgtaacaagatgataatttgtatctagctattaagattaatcaacatatcatgcacgatcacaatttcaccgaaataaaaaaagaaattcctcaaaagacacggtaacatttccccattgtactcttcagatacaagcacctaacattttgccagttctttttcaacaaagagacaaggaagttaacactcagttgaacattttggaagatttgcttttcctccatactaacattgcccacagctactcccatgcagagcactttcttaagttgaaatttaaccatggccttagactcattaacctttgactcaagagtttcctggtgagtaacaagtgtagggaactttcctgctttgttgagaccaggacccaaaagacgaggaatctgcttaatgactgcttcagatgctaaaaaagcatgtattttttagctag

SEQ ID NO: 214429 - DNA, 592 bp, Glycine max
cgaaaatgtggaagagaacgggttttgaagaagaagcagttcaattgatcaactcagatttcagggacctaagtctagctgctaatagactcgcccatcatgccatcaaacttggtggcattggctttggagcctcttttttcggattgtttgctgccattgctgctatttatctgttgattttggatcgtacaaactggaaaacaaatattctcacagcactactcattccatacattttcttcagcttgccttcattaattttcgacgtcttcaggggagagcttggaaaatggattgctgcagttgctgttgtattacgccttttccttccaagacacttccctgattggctggaattgcctggtgctctgattcttcttatcgttgtagctccttctctaattgcaagcacctttagagacaacattgttggggtggtagtgtgcctcatcattgcatgttatttgctgcaagaacacattcgggcttctggtggtttcagaaactccttcactaaagctcacggcatatcaaattccattggcataatacttctgttgtttatcccatctgggcgctggtggtcata

SEQ ID NO: 214430 - DNA, 515 bp, Glycine max
tcctcatccaccttcgttagatttccccctcaacattttttgtttttctctccatcccaattatcgccacctcctctttcttcaaatttcaatctcagaggatgggtggtgaggaattgtgtttgatggagaactcagggaaagggaagaggctgtggaagaaggtgaagtaccagctggtggagtaccactccttgcccggttatttgagagacaacgagtacattctcggtcactatcgatccgaatggcccatcaggcaggttttgttgagcgcattcaccatccacaacgaaactctcaacgtttggacgcatttgatcgggttcttcatatttctggcattgaccatatacactgccatgaatcttaattcgctacagcagtttcctgacatgctcaagaaggccgacctgcacacattacaatcagaaatcttgacgtgtctcccttccatgcctgatttgcacatactcagggagggaatctcaagtcggcatattaaagaatatctg

SEQ ID NO: 214431 - DNA, 478 bp, Glycine max
gttcaactggggtgatggctttgtttttgccttctaccgcccaagtgaagacccttattggtgtattcaaataactccacagaacttatcaggtagcttttctttgaagagaaaagatagtgacacaacagtagagagacgagtttattgctgtgccgatgctcaatcaccaccaccagcatggccaggaacagctattcccgagccttttgatttcaagacatgggatgggcaaaaacctagttctgtcttaggatctacgggttcaattggaacttagacactgagtatagtggctgagttcccagaaagatttaaagatgggagccttgctgctggctataatattactcttgttgctgaccagattaaaacatttaagcctgaagttgttggtcttagaaatgagtctttaattgatgaactcaaagaggctttggctgatgtggatcacaaaccccgaaatcattcctggaga

SEQ ID NO: 214432 - DNA, 607 bp, Glycine max
  unsure (1)..(607): unsure at all n locations
gttcaactgaggtgatggctttgaatttgccttctcccgcccaagtgaagcccttattgttctcttcaaataactccacaaaacttccaggtagcttttctttgaagagaaaagatagtgacacaacagtagagagacgagtttattgctctgccgctgctcaatcaccaccaccagcatggccaggaacagctattcccgagccttctgatttcaagacatgggatgggcaaaaacctatttctgtcttaggatctacgggttcaattggaactcagacactgagtatagtggctgagttcccagaaagatttaaagttgtgagccttgctgctggctctaatattactcttcttgctgaccagattaaaacatttaagcctgaagttgttggtcttagaaatgagtctntaattgatgaactcaaagaggctttggctgatgtggatcacaaacccgaaatcatccctggagagcaaggagtcattgaggccgctcgtcaccctgatgccaccactggtagtacaggcatagttggtgtgcaggataaaagccacagttgcagcattgaagcagggaagacatagcatggccacaaaagacatga

SEQ ID NO: 214433 - DNA, 488 bp, Glycine max
ggagatattcatgcaataactgcagcaaacaatcttctagctgctgcaattgatacccgaattttccatgagtcaacacagtcagataaggctctttttaaccgtttgtgccctccaaataaagaagggaaaaggagctttagtgatgtcatgttcaggcgtcttaagaagcttggtatttcaaagatcaatccagatgatcttacaccagatgaagtaaataaatttgctaggcttgatattgaccccaattctatcacatggaggagagtaatggacatcaatgaccgattcttgagaaaaattactattggccagggacctgacgagaaaggaatggtgagagaaacaggctttgatatttcagttgctagtgagataatggctgttttggcactgacaacatccttagctgatatgcgagagaggcttgggaaaatggttattgagaatagcaggagtggtgaccctgttactgctgatgatct

SEQ ID NO: 214434 - DNA, 536 bp, Glycine max
  unsure (1)..(536): unsure at all n locations
ctcagccaatattttgactttgagggatgataaagcttatgtaggctacacttcacgttgtagctgcgtgaaggtgcagggccattaaaggaatgggtttcacttgtatgtgatggagacaaacaccccagaatacgtactgctcgtcctcttaatactttacaatatgaaggaacaagaaagagacgtagagctgctatgggagattatgcatggtctgttggggatagagttgatgcatggatacaagaaagctggtgggaaggagtcatcacagcgaagaataaaaaagatgaaacaacatttactgttcactttcctgctagtggagaaacgttggttgttagagcttggcatctccgtccatcccttatctggaaggatgggaaatggattgaatcttccaaagtgggggcaaatgacagttctacccatgagggtgatacaccaatcgaaaaacgacctaaattgggtagtcatgcggtagatgtaaaagggaaagacangatgtcaaaaggcagtgatgcctgggagtc

SEQ ID NO: 214435 - DNA, 399 bp, Glycine max
tattgccccacttgttaaggtttcaggttttaagacagtattccgccagaatgccgatccaagaaaggtcaagaatatttcaaaggcggagatgtttcgtttctcccaccaggtaccttcacactggcttactggtgtagagggtcacaatgctccgaaaggttgcttggagcttgatcctgctgctactccgatggaacttcttcaggtgttagccgaggatctggagcaagtaattctaatgacaactgaaaaatctgtggaagatgaattgaagcacaaagagaattccagggaggagggtttgatcaagatgtgccagacaactaaggacgaatgttctgatgaaaggtgggagaaaaaaaaaggaagtctgagagctgcctgacaactaaaaag

SEQ ID NO: 214436 - DNA, 461 bp, Glycine max
tgaacttgggataacaataattgcatattcaccaattgctcaaggtgctctcactggaaagtatactcctgataaaccaccaagtgggccaaggggcagaatttatactccagaattcctaacaaagctccaacctttgctgaacaagatcagtgaaataggggagaagtatgataaaactccaacacaggtatccctgaactggctggtagcacaagtcaatgttgtgccaattccaggagccaagacagcagaacaagctgaggaattcagaggtgcacttggctggagactaactgatgaagaggtagctgagctgcgtagtgtggcttcagaaattaaacctgttataggttttccagttgaaaaactctagaatatagcatgcaccttctaaatcaaatgtaaagatgtatctgtttatggatatagctcttgttattattaattatttattttgc

SEQ ID NO: 214437 - DNA, 442 bp, Glycine max
gttcccattgttcacatgggaactgggcacggactgcacagggaacatgtgcgcactgggagcttgtactttgccaagatgggaatcaaccccatcatgattagtgctggagagttggaaagtggaaatgcaggacagccagctcaactgatcaggcatcatataccgtgaagctgcacacatgatcaagaagggaaagatgtgcgctctcttcatcaacgatcttgacgcaggagctggacgtcttggtggaaccacacaatacactgtgaacaaccagatggtgaatgcctctctcatgaacattgctgataaccccaccgatgtgcagcttccaggtatgtacaacaaggaagagaacccccgtgttcccatcattgtcaccgggaacgatttctcaacactctatgcacctatcattcgtgatgggcgtatggagaag

SEQ ID NO: 214438 - DNA, 515 bp, Glycine max
aggacaaaaggaaaaggcaccaaattcaatttaaggggacactgtaactcaaaattatagaggaagacggtccaatatgaaaaatatagtaagatcatctcaaacttagcatcttctctttgcacctaagacattgagaatgctaagaatgttacacgcaagttccatcacaacttctagcacttggattagtacaacaaccttcacgaacagaaatatttacttgccaagtttgctttgcctccaattcaagactggaagaaagttcccctctgaatagcatcctcgttagcatttccaagagcagcctcgttcaagtacttgtcagccaattggactctcttgacattctcttgttcttggacaagcatgttaccatacagcaagagcttctccagagtcatcttgggctgctcaaaggttggaggtccatcttttgagttcacaagcttcttcccaacactgtcaacaccaacaccagaaatccacttcctcacttcatcatcatatactct

SEQ ID NO: 214439 - DNA, 283 bp, Glycine max
cagatgagcactgtcaggattttttgtatcaaatcctccgtgggttgaagtacatacagttctgctaatgttctgcatagggacttaaaaccgagcaaccttctgctaaatgccaactgcgagttaaaaattagggattttggactggctcgtgtgacctatgaaactgattttttgactgaatatgttgatacgagagaggtccgtgcaccggagcttctgttgaactcttgtgactacactgcagcaattgacgtatggtctgctgggtgcattctcatgg

SEQ ID NO: 214440 - DNA, 321 bp, Glycine max
aagagggggggggagccaatgaattggacaataatttgaagcaaaaagccaatacaaataccttttgattgtttcagtctaccaattatgcctttgatggaaataattcaactccaaaaacacctgggttcagatgatagattttttttccccatgaaattttttgatctatgggcacaaacattacacgatccaaattcaatgataacaaggctatcactactggtgatactcgagggtaaatgctaaagcctctcgggatatcaatttttttatttgttcctcaaacaaagcatgttgttcaaagtcaaagctgaaggg

SEQ ID NO: 214441 - DNA, 435 bp, Glycine max
gtggtgtttcatttgtgaaacttacaacaacacaaggccatcatcatggcagctgctgccccaatggcaagccaactcaagtccaccttcactaggactcttgtagctcccaagggcctctctgcctcttcaccacttcacctcgtgccttctagaaggcaatttagcttcactgttaaggccatccaatcagagaagccaacctatcaagtgattcagccaatcaacggtgacccattcattggaagcctggaaaccccagttacatccagccctttgatcgcatggtacttgtccaacctgcccgcatacagaaccgcagtgagcccactactaagagggatcgaggtgggcctggcccacggataccttttggtgggcccattcgtgaaggccgggcctattaggaacaccgagatcgccgggcaagcgggc

SEQ ID NO: 214442 - DNA, 405 bp, Glycine max
ggagagaggaatgaacattataacatgttgagagtcatacaatacatcatgtacatccatctctattgcacaaatagtccattcatggagaatgaataagaaaaagtaaagaaagctagtaagcacattcatcatttgatgtagtatggaaggtccaagacgtagaggaggaagtaggcccaaataacacccgaaatgcctccgaagaagaagcctccggtgaacttggcccacccatcagcagtttggagctgatcgggctccttcttgcggcccgtcaaggtcagcgacggagcagtggatggggctccttcgttgaaggatgaaatcccatagattgtgaggcaaaggctgaggatcaccacaagcccaccggcggccagagagcccgcttgcccggcgatc

SEQ ID NO: 214443 - DNA, 489 bp, Glycine max
gaaagaagatttcatcattttgcatttatgctggtatgtactattgaattgtaatctatatttatagaccctttaaatattatgaccatgttgttttctattaaggacagtttttttatttttgtccagatccaatcagccataccaacataatttaccttgttattatagtgataaacagaaatgtgactaaattgcaggtacttgtctgaagatagcatatatctttttctaaaagcagataaaaatagacattgaattgcgggtttaacagattaagcagctgctccaacagctacaccacccttgagcctggatttaccatacagggtttcttcaaaccggattatctcattcttggacccataagcaacttgagttctgtcatcaatgttactgatgactttgtctagcacagactgatgaccatcactgctgtaacctccagctttttcaatcaagaaccccaaaggagctacctcaaacaac

SEQ ID NO: 214444 - DNA, 417 bp, Glycine max
gcgagcaatgcgttttatcgatctgcatgcgcaacagcgctctggacatctgcaatatgtacacatcatgcagagcatcctcacttctggctgaccttctgcgtgagctcgggtgtcagctcaaacaggtcgccaacgagaccgacgtctgcgacttggaaaattggcgcatcgggatccttgttgatggcagcgatagtcttcgaatctttcatgccggcgagatgttggatagctccgctgactccgacagccaagtaaaggtcgggtgaaacgatcttgccagtctggccaacctgaagggagttgtctgcatagcctgaatcgactgccgcgcgcgacgcaccaatagcagcacctagagcgtctgccagaggttccatgatcttgtcaaaggtcttcttattcttgaggcct

SEQ ID NO: 214445 - DNA, 415 bp, Glycine max
gtaaaaagcaagttacattaagttggattcggatacgcccgattgtccacattatctgaagtacttcaccaaacacaaatctaaaaactctcaaaagtcatttcgttctttgacgctcactttccggggacgaagttggtggcataggcccaggcgttgttgttgacagggtcagcaaggtgatcggcgaggttctccaatggaccctttccggtgacaaaggcctgaacaaagaagccaaacatagagaacatgggcaatcggccgttcttgagttccttcaccttaagctcagcaaaagcctatgggtcatcagcaaggcccaatgggtcggagctgccacctgggtagattgggtcagtgacctcaccgagggggccaccagcaatacggtaaccttcaacggcacccatta

SEQ ID NO: 214446 - DNA, 364 bp, Glycine max
ataacacaaagcacacagcaaatcttatgcttgagataaaaaatggcagcagctctcttgcatggctctctcatccccatccttggctggcaaagtcgtgaagctgggcccatcatccccatacactggacgggtgagcctgaggaataccgataaccaacacgtgttctgaggaaccccatggtacagaccataccagctcaagcacttggacccattctatggctagcccccggcctacctaaccggagaattgcccagcgactacgggtgggacactgttgatcttttcgcagacccagagaccttcgcccagaaccgcgacactgaagatgtccactctctgtgggccattctcgcagcc

SEQ ID NO: 214447 - DNA, 542 bp, Glycine max
gccaaaaaggacaataaagtttctagccttattttatatattgctggattgatgtttttagctacattggtatgtgccagagataacatatataacaagtgtatgtattatagcataatccttagtttaggggcaaaaatgttcctccaacatgaaggttttaaaaacttgaccaagtcctttcccttgcacagaccataatatcactcatcaggatgaaagcactccatattgatcagtctgcttaggtagtgtagaagccaagaatttaccattggtacttagcagcaacaagaacctcctcatactgctgagcagcattggcccaactaagatcctgcgtcatccctcgccgttgaagcccttcccagctctgcttatactgcctgaaggtcaacaagcagttccctatcgcgtttattaacttgttagtttctgcactgtcaaatgtccatccaaggcctgactcttaaacggattaaaaggcttcacagtgtccctcagtccaccgacagcatgtacaactggaattgttccataat

SEQ ID NO: 214448 - DNA, 493 bp, Glycine max
gtaaaaagcaagtaacgggaagttggatgcggatacacaagataattcacattatctgaagtacttcaccaaacacaaatctaaaaactctcaaaagtcatttcgttctttgacgctcactttccggggacgaagttggtggcataggcccaggcgttgttgttgacagggtcaacaaggtgatcggcgaggttctccaatggaccctttccggtgacaatggcctgaacaaagaagcctaacatagagaacatggccaatcgtccgttcttgagttccttcaccttaagctcagcaaaagcctctgggtcatcagcaaggcccaatgggtcgaagctgccacctgggtagattgggtcagtgacctcaccgagggggccaccagcaatacggtaaccttcaacggcacccattaggataacttgtgtggcccagatggcgaggatgctctgggcgtggatcacgcttgggttgcccaagtagtcgagcccac

SEQ ID NO: 214449 - DNA, 471 bp, Glycine max
gcgctgtggtctcaaattttatgcatagtctctctgctgttatgcagcgattgtgcagcatcttttgccaaggagcaactaaaggaccgggttggtaggctcccaggtcaaggcttcaacatcagcttcgcacactatgctgggtacatcaccgtcaatgagaaagctgggagaacactcttctactggttcattgaggcacttgaagatcctcattctaagccccttgttttgcggctcaatggagggcctggatgttcgttcattgctttcggacagtcagaagaagttgggccttttcatataaattcagatagcaagacccttcatttcaatccctattcttggaaccgagttgccaacattatttttcttgacactcctgttggggttggattttcatattcgaataacacatccgacatgctgatcaatggcgatgagaggacagctgatgacaatttagtattt

SEQ ID NO: 214450 - DNA, 439 bp, Glycine max
gtggtactattggatctgccctgtggcgtggaccttgaatggattggtggcttcggaatatggagacaacagggacaaacttgagaatggtcaaagggttgaagaatttgtgaagagttattttgggtttgaacatgattttctaggggtagtggcatctgtggtggctggcttctcactattgtttgctttcatcttcgcctttggaatcaaagtactcaacttccaaaaacgatgaaatcatcccaatgattctcactctagagcttttatgcatccatttgaagcattgaataatttatatgaaaaatgcttagtggtgacgggtgaactaaatttacaattttctttttctttttttttattcattggaatcaaatttaagtatagaagtttactcccattcaaacttattattctacttattgagctggactcc

SEQ ID NO: 214451 - DNA, 287 bp, Glycine max
ggaaaatgcatttctgataactgaagctgttagaggtgatgggggcatcctttataattttggcatggaaagattcatgcccttgcatgatgagagggcagaacttgctccaagggatgtggtggctagaagtattcacgaccaactttaaaagcgctatgagaagtatgtgcttctcgatataagtcacaaacccaaggaagaaattgctctcccattttcccaaccttgcttctacgtgtattcagtatggtttggacataactcctcgaacaatcccagctgtt

SEQ ID NO: 214452 - DNA, 514 bp, Glycine max
tcctcatccaccttcgttagatttccccctcaacattttttgtttttctctccatggcaattatcgccacctcctctttcttcaaatttcaatctcagaggatgggtggtgaggaattgtgtttgatggaaaactcagggaaagggaagaggctgtggaagaaggtgaagtaccagctggtggagtaccactccttgcccggttatttgagagacaacgagtacattctcggtcactatcgatccgaatggcccatcaggcaggttttgttgagcgcattcaccatccacaacgaaactctcaacgtttggacgcatttgatcgggttcttcatatttctggcattgaccatatacactgccatgaatcttaattcgctacagcagtttcctgacatgctcaagaaggccgacctgcacaaattacaatcagaaatcttgacgtgtctcccttccatgcctgatttgcacatactcagggagggaatctcaaggtggcatattaaagaatatct

SEQ ID NO: 214453 - DNA, 515 bp, Glycine max
  unsure (1)..(515): unsure at all n locations
ctccaaagttgaaccataattttaaatccaaccaagagacaccatgtcatcaagtgggaccatttggagctatgaggaagaaaaagcatttgagaatgccatagctatgcattggattgaggaatcctcaaaagagcaatgggagaaaattgcttcagcagttcccagcaaaagcatggaagatgtgaagcaacattaccaggttctagtagaggatgtaagtgcaatagaggcaggtcacatatcattcccaaactatgctgcttttgaggaaatcacatcttcaaataaggactttcatggctctttcaaggccacaagctcagataaaagatcaaattgtaattatggacgtggtttttctgggttaggacatgactccaccactcatagtagtgggtaaggaggcttgtcaaggtcatcacaacaagaaagaagaaaaggaatcccatggactgaagaggaacacacggtatttttacttggtctanagaagttggaaaaagagaatggag

SEQ ID NO: 214454 - DNA, 548 bp, Glycine max
gggaaacataattaccacgacatctacgaaagcattcaaatgcagagtatgtattcatcatgtaaatacaacacaataacaagtcatccataagcagcatataggatttcttgagaggtacatataaagccagaagaaaaatatataagatacttttcttccacagtgtctctagtaaaaggaccctaaaaaaataaaatatgacatcatagggttcctgaaaccccactacaacatatttgtcagaatctagtgcccacttcaatctttctttttatctttcagaggtcctctgggtatcttgctcaataccttcgcatcaaacactgcatattgcttcttaatctcggcaattgctttctcaccaaaagagtcgacatgatcttcatatttctcataaagcacaggcacagtgtgaagcaaaacaaaagctatgtagaacaaggtcaagaagttggcccaacaacccagaatagagaaaacccataatccagcaatcactgataagaaacttctgagatcccttccagaaaagcatatccttaaca

SEQ ID NO: 214455 - DNA, 501 bp, Glycine max
attaaaacaaaaattacccatatttattggtactaaaaccatatttaaagggatttacaaatctccaatgttcccttatataattgtcctctttttgaatcaggaagtcaaatttctaggtacatacttcctctgtgtatatatacattgtaacatatttctatgatgagtccaaatttaatgtttcaatagcatggcttccatttgtctcttcctcgcagcatgttttagtttctccaatgcaacaagtccaacttgccttactctttctcttgacaaacctatccgtttactaatgtcttcccatgtaagaccttctttatccaatccataataaagtcgaataatttctctctctcgttccacaagggtcacattaatgagtttgctcacttcggcctttagtgcccactcgtctactccattccatgggatgttctccactcgatcattcgcaatataactatgatgagtttctccttgtataccattcagagaggg

SEQ ID NO: 214456 - DNA, 449 bp, Glycine max
  unsure (1)..(449): unsure at all n locations
ttccattctctctgtgtattttcctacctctcccttcaagatgcagatcttcgtcaagaccctcaccggcaagaccatcacccttgaggtggaaagctctgacaccatcgacaacgtcaaggccaagatccaggacaaggaaggaatccccccggaccagcaacgtctcattttcgccggaaagcaacttgaggacggccgtacccttgctgactacaacattcagaaggagagtactcttcacctcgtcctccgtctccgtggtggcatgcagatcttcgttaagacactcaccggcgagaccataaccctagaggttgaaagctccgacaccatcgataacgtcaaggccaatatccaggacaaggagggtattcctcccgaccagcaacgttttatcttcgcccgaaagcaactcgaggacggncgcacccttcgcgactacaaca

SEQ ID NO: 214457 - DNA, 446 bp, Glycine max
ggggggatattagagtactattattaatgggacacaattgagttcaacacaaaccgaacttattttcaagggacattattacagacccattaaacatcaaagttcttcaaatgttttgggaacacatccaacattacacaacgagcttaaaaccccccacggagacggaggacaaggtgaagggttgattccttctggatgttgtagtcagcgagggtccttccatcctcgagctgcttgccagcaaaaatcagcctctgctggtccggtgggatgccttccttgtcctgaatcttggccttcacattgtcaatggtgtcagagctctccacctcgagggtaatagtcttacccgtaagagtcttcacgaaaatctgcataccaccacgaagacgcaacaccaagtggagagttgactccttctggatgttgtagtcagcaagggt

SEQ ID NO: 214458 - DNA, 493 bp, Glycine max
ggctggttcaactgaggtgatggctttgaatttgccttctcccgcccaagtgaagcccttatttttctcttcaaataactccacaaaacttccaggtagcttttctttgaagagaaaagatagtgacacaacagtagagagacgagtttattgctctgccgctgctcaatcaccaccaccagcatggccaggaacagctattcccgagccttctgatttcaagacatgggatgggcaaaaacctatttctgtcttaggatctacgggttcaattggaactcacacactgagtatagtggctgagttcccagaaagatttaaagttgtgagccttgctgctggctctaatattactcttcttgctgaccagattaaaacatttaagcctgaagttgttggtcttagaaatgagtctttaattgatgaactcaaagaggctttggctgatgtggatcacaaaccccgaatcatccctggagagcaaggagtcatt

SEQ ID NO: 214459 - DNA, 543 bp, Glycine max
ttttttttttttttttttttttattatttatttttattttctttttgggtattattgtattttttttttttataaaatatctttattcttttatattactatttatattcacaatttttattattgttttaaacaaaaaaaaaaaaaaaaaatactctttaacaaaaaaaaaaaaaatttaaaaaccaaaaaaacacaaaaacaaaaaaaaaaaaacaaaaaaaaaaagagcaacaaaaaaaaaacccccttttctaagaaggacttagaccaaaaaaagaaaaaaccccccacaaccataaaaacacatgtataaaaaaaaaaaaatccaaaaaaaaaaaaaaattatacgcacaaaaaaaaaaaaataagccccccaaaaaatttgagcccaaaaataaaaaaaaaatacaaactaccccctgggtatcccaaaccccaacaaaaaaaaaaaaatctccccaacaaaaaataaaaaaaaaccccccttctttattggccccccccccgcatccgcccctccttatccaaagacactttttt

SEQ ID NO: 214460 - DNA, 482 bp, Glycine max
gtaaaaagcaagtaacattaagttggattgggatacacaagataattcacattatctgaagtacattgcaataacatatacttcaccaaacacaaatctaaaaactctcaaaagtccacaagtcatccttttctttcatgctcacttgccggggacgaagttggtggcgtaggcccaggcattgttgttgactgggtccgcaaggtgatcagcaaggttctccaatggacccttaccggtgacaatggcctgaacaaagaacccaaacatagagaacatggccaatctcccgttcttgagttccttcacattaagctcagcaaaagcctctgggtcatcagcaaggcccaatgggtcaaagctgccaccagggtagattgggtcagtgacctcaccgaggggcccaccagcaatacgataaccctcaacagcacccattaggataacttgggtggcccagatggcgaggatgctctgggcgt

SEQ ID NO: 214461 - DNA, 448 bp, Glycine max
gacccgcgaaattatagctaattagctaaatatccattgaacactgtcatcaatccaaaataaaaaaaggagaaaaaaacatagccaaaaaaggcattagagacgctactaacaagaaacgcatcatatttaattttaatcaacctcctccatcttgctgccctcagcatcagcctcggcctcctccagtgggggcatttcagcatcagcttcacctgcatcctcgtcaatgctcagtccaagcttcaacattctgtggatcctgtttccaaaagtgttgggctcgtcaaggctgaaaccagaagtgagaagagcagtctcaaacagcaacagaacaaggtccttcacggatttgtcattcttgtctgcatcagcacgcttcctgagctcctccatgattgggttctcagggttgatctccatggtcttcttgcttgacatgtaccct

SEQ ID NO: 214462 - DNA, 486 bp, Glycine max
atgaacttgaacctttatttgttcaccggggttggagttcaaaactgcacaaaggagacttgatctcaaaaaatgagaaaaggaaaacaaaaatcacatttaaaggatgctcttctcttcactgttgcgtgctcttttcaataatagctattaacttcagcgatcaatgccttcaattttgtcttccacttctgaatacaactgcctgagcttctcaatattatcttctgaagtttcccaataaccacatccattggcttccaagaatgtctgcaccagtttcctgaaggagtttggattagtgctcatgagcttgatcagcatttgctcatcttgaatgaaagttgtgttggcttcttcatacacccaaatatcaacttggcctgaagttgcactccaccccactgtattggtgagaatcttatcgatctcgcgtacaccctcatatgcagtagacaacatgccttcataccactttggattaac

SEQ ID NO: 214463 - DNA, 483 bp, Glycine max
cacacttttgtcaaggcataggattggtgaggtaaacttgaattgaagtgaagaaggagatggctgcaacctcttccttgtgctcatcgaccctccaatcccagatcaatggattcttccttcacaaaacctctctttcccatactccttccctcactttctccaggaggaaaatttcaaccacagtgaaggctacatctcgagtcgacaagttttcaaaaagcgatatcattgtctctccgtccattctttctgcaaacttttcaaaattgggagagcaggtgaaagcagtggaattggctggttgtgattggattcacgttgatgtaatggatggtcgctttgttccaaatattacaattggacctcttgtggttgatgcattgcgccctgtgacagatcttcctttggatgtacacctgatgattgtagagcctgaacaaagggtaccagattttattaaggcaggagctgatatagtca

SEQ ID NO: 214464 - DNA, 465 bp, Glycine max
ggaattttcttctacattgcaatagtccaacagaacacaatgctggtcttccaagcccttcaatccgacagacgcattctcagcaccaacttcaagatcctagcagcctcctacaccatcttccagatgctgagcctaaccatatggctacccatctacgaccgaatcctcgtgccgtcgctccaaagggtcaccaaaaaagagggtggcatcacagttcttcaaagaataggctttggcatgttcctctctatactatgcacaatggtgtctggtgtagtggaagaaagaagaaggacattggctttgaccaatcctattggattagagccaagagaaggtgccatttcttcaatgtcaggtctatgggtgggttctcagctaacactggcagggttatctgatgcattcgcgattgtgggacaagttgagttttttacaaacagtttccagaggacatgaaaa

SEQ ID NO: 214465 - DNA, 461 bp, Glycine max
gtctctcaaatttgtttcattgcattgtattctagggaatacggggggagttcacataagacttgtttgttagaaatatgcctgacatagtattcctattctacagctgcaaactgtaaattatacaatttagcacatgcaaaatgaaagtgtgtgtactccatcttgtcgactgtgatcgaaaggtatgcaatgttggtgtcttggatattagaaacttctttgattgcgtctagtagaaaaaccagtgtcgtcttcatctttgatgaagggtttaaatctagcgaggccaccacttccactgtatgcttggcttctgtttgcagcttgatgatcggatggatctggattgccacaaatctcaagtttgattataaatgtagctgtgctttctttgtcaggaccctcactctcaatccatatgtggcctcccatgaggtttacaaatcttttacaaatgg

SEQ ID NO: 214466 - DNA, 511 bp, Glycine max
aagtggacactttaactcaaaattatagaggaagacagtccaatatgaaaaatatagtaaaatcatctcaaacttggcatcttctctttgcacctaagacattgagaattctaagaatgttacacgcaagtcccatcacaacttctagcacttggatcagcacaaccttcaggaacagaaatatttacttgccaagtttgctttgcctccaattcaagattggaagaaagttcccctgttaatagcatcctcgttagcatttccaagtgcagcctcgttcaagtacttgtcagccaattggactctcttgacattctcttgttcttggacaagcatgttaccatacgtcaagagcttctccagagtcatcttgggctgctcaaaagttggaggtccatcttttgagttcacaagcttcttcccaatgccgtcaacaccaacaccagaaatccacttcctcacttcgtcatcatatactctggccctcagtgcaccaaagaaatcaatggat

SEQ ID NO: 214467 - DNA, 357 bp, Glycine max
ggggtatagctcagccaatattatgactttgagggacgataaagcttatgtatgctacactttacttgtagctggtgaaagtgcaaggccattaaaggaacgcggctcatatgatcggatgggtacaaacaccccaaaatacggacccggttgaactctctagaacattgacaatatgaagaaacaagacacgagaccctgagctgttatgggagattatgcatggcctgggggcgatagagatgatgcctggatagcaagaaagcttgtgggaaggagtcgtcaccgcgattaataaaaaagatgagaccacaattactggacactctaccgctgatggagaaacgatgactgtga

SEQ ID NO: 214468 - DNA, 442 bp, Glycine max
gcatatccctacacaggaaaagatggtgtctgcaaattctcagctgaaaatgttgctgttcaagtccttgactctgtgaatatcaccttgggtgctgaagatgaactaaaacatgcagttgcatttgttcggccagttagtgtggcctttcaggtggtgaatgggttccatttctacgagaatggagttttcactagtgacacttgtggtagcacttcccaggatgtgaaccatgccgttcttgctgttggatatggagttgaaaatggtgtcccatattggctcataaaaaattcatggggagaaagctggggtgaaaatggctacttcaagatggaattggggaagaacatgtgtggtggtgcaacttgtgcatcttattcaattgtggcataaattgcataacaatatggtcccttgtgactaccaccttgtcatgctt

SEQ ID NO: 214469 - DNA, 456 bp, Glycine max
agcaaagacaatgctatcttataactgatatttgaagcgggagcatcaatacaatacaatatgtaactatgaactatcaatatatgatcgttattatgtctgtgatacacacaattaaggccataatatacttatgtgatttacaacaacttctagcttattttatacatcatgccaacccaactaggagcaattttcatcatacaattacacttatctttaatcatcattcatcaatactggcatcagcaatacgctctaaactctgaagcatgacaaggtggtagtcaccagggaccatattgttatgcaatttatgccacaattggataagatgcacaagttgcaacaccacacatgttcttccccaattccatcttgaagtagccattttcaccccagctttctccccatgaattttttatgagccaatatgggacaccattttcaactcca

SEQ ID NO: 214470 - DNA, 490 bp, Glycine max
ggcatgcatcactccattacctaataatggatatggaggaaatgttacagagtggcctttgcggcttcatcaaccaccagacaggcttcatagcatccaattggatgccattatatccagagatgaactcttgagggctgacacaaaatattggtttgaaataatagaaagttatgttcgggctttccgttggcaggactacaacctgagaaatgtaatggacatgagggcaggatttggaggagttgctgctgcgctgcatgatctccagatcgactgttgggttatgaatgttgttcctgtcagtgggtttaataccttgcctgttatatatgacccggggctgataggagttatgcatgattggtgtgaaccatttgatacataccccagaacatatgatctgctgcatgcagcaaggtttttctctgttgaaaaaaagaggtaaacgtgtacatctcaaccttatgcttgagatggatcggatgct

SEQ ID NO: 214471 - DNA, 525 bp, Glycine max
ataatgctgtagagattgatacaaggcaagttctttaaagtgtttacaagaaaacctgttagtagggattcaacattgtaattaagactaccatttctggcaaatagcagaattttttatgggttagttttggccacatttctggcacaaaatgagatttctggtggagtaccatgttccggttgcatgagccaatatatggtgttctataagttacagacacaattgagcaattcagaaccctttatcagaccttaatatcttccagcttgaatagggaccctctcctacatcatttatggtatttgaccatcccagtgcagttgcaatttcttcaagctcacctataacatgtgtggtgtcacgtatatatacacgtcctcctggtcttagcatccgatccatctcaagcataatggttgagatgttacacttttacctctttttttcaacagagaaaagacctgctgcatgcagcagatcatatgttcttgggtatgtatcaaatggttcacaccaatcatg

SEQ ID NO: 214472 - DNA, 404 bp, Glycine max
gacgggaaaattcatcaagcaatgttttgattcaaatggcccatgatgactgattgggcattgctacttcaacaaaactcaatacaatgctaaaggttttccggataaacaagagtaaaaaatggggacccgggttttttacccatttagaccattgaatcagaatcaaccccctggattagggattgctgcattatttgcaaaagcccgcaccagttgagatttaagaattgctccttcttggctagcttttttgcgttcacccctcactcggaagaactctttcttccttggtctataaatgtgggggttctcaggctgtacttcttgagggtaaacactcacctttttcctgtcagggccatatttctcaaattttacaactccctcaatcaaggagaaaa

SEQ ID NO: 214473 - DNA, 300 bp, Glycine max
gggaatccagcccccccaaaatttatttttggctgcaaataatgttaaactttgaaaatttttccttaaaccccggttgaacgaacaatttccttttttttcacatgatacgttaacccaagggaaaaagtaaaaatggtttgctgctgggaatgggaatcatcaaatcaaaaaaaggggccctcctctattcatatactttgcattcctcatcaacagggtttgtctcgcaaaattcccccaagggggctccactccctgttttaactgcccctggccacttgcttgctactagggggg

SEQ ID NO: 214474 - DNA, 424 bp, Glycine max
aaattcatcagaaaacccattatcaattggggggtggaagggagcaataaaaacttacaaacgacaaatcacatcacaaccaatattttggagaaaaaacagacaacccttgctttctcaaccaacaaacaaatgaaagagacggagctcatgaccaatcgctcttatccctttcttatatcttgtgaatagaccatagtaacatacacaccctccctccttgtagctaaccacattcttccgcttgtcttaaattaagtctatgcaaaaaaccttgacctaaacttggttgacactgaatacatgaatacctctgtgatcaaataatgctcccttgacagcttgtatccatgaagaataagtgccaaatccttggtcatattaccagactctactactacaatgcaagctgccttttgctttt

SEQ ID NO: 214475 - DNA, 490 bp, Glycine max
  unsure (1)..(490): unsure at all n locations
aaaactagttaattgtaaataaatctaacacatcaattacttgtcaatcacaattttgaaccgttgattaaaaataaaggtgcactatatgatggtgatatagtggtgcaccacctattgtatggttcacccgatcattcactatagaaggaaaacaaaagaagacaaaactaaaaagaacaccacaagtttcagtgcatttttagctattcatagattagatttgatggctgacttagcagaaataacttccctcattacaccttcttgaaccacagacacaagatgctctcccttctgattgaacatttggccagtgacatagccgcgggcattattggcagtaggactaaagatcacaaatagtatccaatcatcagctcttaaaggtctgtgaaaccacatggagtggtccagactcacagcacgagccttccttcccttcctacggntggggttcaaactcacttgagggaagatagatctgatg

SEQ ID NO: 214476 - DNA, 534 bp, Glycine max
aagttgaaaggcgttgatttatagtcataactaaagaagatgtgttgaacaattgccaataatagaacaaaaacaaatgaaagaatttactgtcatcaattcagtcaactgatttaacaacacatttttatcatataaaacgaggacaccgtattttctttcaccaagccaccttgcaacattcagaagcatttcctgtgtacaattgaaggaccagcctcatcatactcagcctttgcaatccacatctgttggaaagtgctgagagaagccaagatagagccaccaatccagacactgtactttctctcaggtggagcaaccaccttaatcttcatgctgcttggggccaaagctgagatttccttgctcattctgtcagcgatacctgggaacatggtagatccaccactgagaacaatgtttccatacaagtccttcctaatgtcgacatcacacttcatgattgaattgtaagtggtctcatgaatgccagaagctttcattccgatcatggatggttggaagagaact

SEQ ID NO: 214477 - DNA, 433 bp, Glycine max
aaaactagttaattgtaaataaatctaacgcatcaattacttgtcaatcacaattttgaaccgttgattaaaaataaaggtgcactatatgatggtgatatagtggtgcaccacctattgtatggttcacccgatcattcactatagaaggaaaacaaaagaagacaaaactaaaaagaacaccacaagtttcagtgcatttttagctattcatagattagatttgatggctgacttagcagaaataacttccctcattacaccttcttgaaccacagacacaagatgctctcccttctgattgaacatttggccagtgacatagccgcgggcattattggcagtaggactaaagatcacaaatagtatccaatcatcagctcttaaaggttctgtgaaaccacatggagtggtccagacttacaagacgagc

SEQ ID NO: 214478 - DNA, 467 bp, Glycine max
atagggaagaactgggatttaggacgtcagatcggaaattatcccttcgacaatcataaaaaagcaagcaatacactgttcactttctcacaatcatttgatcaaacactacttatctttagtccacacacactacggttacggaaacatcaacagtttcatcatcattttcatcaattctgattttagcttccacacaagtcattactggtgggcacactgtaccctttgggcaccaccaggcatgtcatcatcctcatcatatgcctcctgagcttgggggtgcttcctcctaggctcctcctccatgttgacatcatggagggtgggttcctcacattcatccacctccatgtctgtcaattgtgaagaaggctttggtggcagaacagcttccaaggccttaacctggtcagggtttaaggaatctgggaactccacagtgaagtgaatgtgaagcttcccct

SEQ ID NO: 214479 - DNA, 381 bp, Glycine max
ccgtactgatgtcccgcaacggtgtcaagtttggagaatctgtgtggctcaaggccgggtaccagatcttcagcgagggtgggctggactacttgggcaacccaagccttgtacacgcccagagcatcctctgcatatgggccacccaaggtatcctaacgggtgctgctgagggatatctgattgctggcgggcccctctgtgagggcactgacccaatctaccctgtgggcagcttttacccattgggccttgctgatgacccacaggctttagctgcgcttaatgtgaaagaactcaagaacgggagattggccatgttctctatggtggggttccttgttcaggccatagtcaccggtcagggtccattggagaacc

SEQ ID NO: 214480 - DNA, 492 bp, Glycine max
  unsure (1)..(492): unsure at all n locations
aaattggtgacagtctggaagaattcctcacaaaagcaacaccagataaggggttgatcaggttgttggtgtccatgggagaagcattaagaacaatttccttcaaagtgaagacggcttcttgtggtggaacacaatgtgttaatacttttggggacgagcagcttgcagtggatttgctagctaatcagcttctttttgaggccttaaattactctcatttctgcaagtatgcttgctctgaagaaaatcctgagctcctggacatgggaggtccagttgaaggtggatttagtgtcgcatttgatccccttgatggctccagcattgtggacacaaatttcacagtaggcaccatctttggtgtgtggcctggagataagttgactgggatcaccggaagagatcaagttgctgcagccatggngggtttgggtcctagaacaacatatgtgcttgctctaaaagacttccctggcacccatgaatttc

SEQ ID NO: 214481 - DNA, 578 bp, Glycine max
  unsure (1)..(578): unsure at all n locations
gtacggaaacgatacaaagtagatggtcaggacatggaagtaacatatttccactcttatatcgatggtgttgacttcgtttttattgacagtccaaacttccgccatttacaggataacatatacaggggaagccgagaggatattctaaaacgcatggtgttgttttgcaaggcagctgctgaggttccttggcatgttccatgtggtggtgtttgctatggagatggaaatttggccttcatcgcaaatgattggcatactgctttgctgccagtgtatctgaaagcctattatcgtgaccatggtataatgaagtacacaagatctgttcttgtgattcataacatagcacaccagggtcggggccccgttgatgattttcgctacacggacttacctgaacactacatagaccttttcaaattatatgacccagttggaggtgagcacttcaatatctttgcagccggtttaaaggcagctgacccgattgtcactgtgagtcatggatatgcatgggagattaaaacttccgaaggtggtggggttngcatgggatcatatatgagaatgac

SEQ ID NO: 214482 - DNA, 526 bp, Glycine max
tcataacacaaagcacaaagtttagctcatccttgagttaaaaaatggcagcagctggttccatgggtctctcatccccatccttggctggcaaggccgtgaagctgggcccatcagccccagaagtgggaagggtgagcatgaggaagaccgtcaccaagcaggtctcctcaggaagcccatggtacggcccagaccgagtcaagtacttgggcccattctctggcgagcccccgtcctacctaaccggtgagttcccaggcgactacggctgggacactgatgggctttccgcacacccagaaaccttcggcaagaaccgtgaactcgaagtgatccactccaggtgggccatgctcggagccttgggctgcgtcttcccggagttgctgtcccgcaacggggtgaagatcggagaagccgtgtggttcaaggccgggtcccaaatcttcagcgagggtgggctcgactacttgggcaacccaagcctgatccacgcgcagagcatccttggcatctgggccac

SEQ ID NO: 214483 - DNA, 477 bp, Glycine max
  unsure (1)..(477): unsure at all n locations
tgaaccatgggctgacatactcgaanaccaatcnanaagtncgcatgcacacgcccggaagctgggtctagatatcacgtggcacagggccaagttcatccttgagtaaaaaaaagtgagaatggtattgcatggctgtctgatacccatccatgactggcaaggccatgaacctgggcccatcacccccggaagacaccatggacagcagtgaagaagaccgtctccaagcaagcctgctcaagaggcccatgggacagaccacaccgaggcaagtacttgggcccattctatggcgagccctcatcctacctaaccagtgagagcccaagcgactaccgataggacactgatgggctttgcgcatacccagaaacctacgccaagaaccgtgaactcgaagtgatccactccaggtgggccatgctctgagccttgggctgcgtcttcccggagttgctgtcccgcaacggggtg

SEQ ID NO: 214484 - DNA, 432 bp, Glycine max
  unsure (1)..(432): unsure at all n locations
ctgaagctagaacttttattgaaacccttttaggagtacatagactttatatggctacccctttacattttacaagattgatgaaccaacaaatacatttacaaaatatgctagcagttgccaacaatccaccacagccccaacttctaaaatatgtcagaaatatgggattcaaacacttgaagctttttgcagactagcagcatattgtcgagcccattggtcatagtgaataatttcttcgagtgacggagatgctactaattccttttgatgttcctgacaagttagttccacaaccttgaatatatccagataactaatcttttcttcaacaaacatttctacagctttctcatttgctgcactaagaactcctgtcatggtgcctncagcacgttccgcagcatagcaaagattcaccgatggaaa

SEQ ID NO: 214485 - DNA, 410 bp, Glycine max
cggctcgaggagactttgagtcttggcctctccactgcctccagaagctaccaatccaggctcaagtcacacttcgagctattcatcgattttgatgagggcaatggggacgaggagttgaggacggcttatccatgccctttttgcactgaggattttgatcttcttgagctatgttgccatattgacttggaccatcctgtagaagccaagtctgggatttgtcctgtttgtaccatgtggataggaacaaatatggttgatcatatagcactacaacacggaaacctgtttaagagtcagctcaaatcaaaatgctacaaggatgaatcctacccacctctttccttttcaagaaagggtgaacactggcaatcgttgttctactgggttatctgcgatgtctacct

SEQ ID NO: 214486 - DNA, 502 bp, Glycine max
ctgaagctagaacttttattgaaacccttttaggagtacatatactttatatagctacccctttacattttacaagattgatgaaccaacaaatacatttacaaaatatgctagcagttgccaacaatccaccacagccccaacttctaaaatatgtcagaaatatgggattcaaacacttgaagctttttgcagactagcagcatattgtcgagcccattggtcatagtgaataatttcttcgagtgacggagatgctactaattccttttgatgttcctgacaagttagttccacaaccttgaatatatccagataactaatcttttcttcaacaaacatttctacagctttctcatttgctgcactaagaactcctgtcatggtgcctccagcacgtcccgcagcatagcaaagattcaccgatggaaacttcttgtcatccggtgcataaaatgttagagaaccatacttgctaagatcaagacgagggccagttact

SEQ ID NO: 214487 - DNA, 317 bp, Glycine max
gtcttttttcactcttaagttctcgtttgcggtcttcggtttcctgaaactggggttttcaattaccatccattcgctaataattaaagatgtttgggagggcaccgaagaagaccgataatacgaggtactacgaaattgctctggtctggaagaacactacgcacgatgatctgaagaacgcttatagaaagccgtcatcaagaatcaccctgacaagggcggagatccctagaagtttaaagagctcgcacaagcatatgacgttctgactgaccctgagaagcgagagatatatgatcagtatggtgaagatg

SEQ ID NO: 214488 - DNA, 487 bp, Glycine max
gaaattttaaaaatgactgggataaacttaagaattcaattattgaaattgaataagtaaacaatttaattggattggtcgaatggtatcaaaaaaatggagtactaactcccatttcttatttattattgaattaaccgatcaacttgctttgttatcgaacatttctttttgatttcaaaaattttccggaaaaaatttgaatctatttttatatgcgaatcaatcctactacttctggtcctgaggtttctgcgcttgaaaaaaaaaatctgggacgtatcgcccaaataattggtccggtactagatgtagcttttcccccaggtaagatgcctaatatttacaacgctctgatagttaagggtcgagatacttgtggtcaacatattaatgtgacttgtgaagtacagcaattattaggaaataatcgaattagagctgtagctatgagtgcgacagaaggtctaatgagaggaatggaagt

SEQ ID NO: 214489 - DNA, 446 bp, Glycine max
gttttaacaataatattactagtttcattgatagttgcattgagagtttcaatttaggtgatattgacaaatacaatgatatttatttttatagttacatttttttgaagggcagaaattgtagtgaaagcgataattctagtactagtataataactagtacgaatgatacaaatgatagtgattccactataggagaaagttctaataatctcgatgaaagtcaaaaatataagcatttgtggcttgaatgcgaaaattgttatggattaaattataaaaaattttttaaatcaaaaatgaatatttgtgaatactgtggatatcatttgaaaatgggcagttcagatagaatcgaacttttgattgattctggtacttggaatcctatggatgaagacatggtttctctggatcctattgaattcattccgagaggaacctat

SEQ ID NO: 214490 - DNA, 494 bp, Glycine max
  unsure (1)..(494): unsure at all n locations
atattattatataaagatagtctataatcactagaatttctagatatttatacttagtatataataattctagtgattatagctaagccaatatatatcataatataatatacccttttcttattcaaagaatttatggctatgccttatcatttttagtcaaagaaaagaaattatggaattgaaataactcactcagaacgccctttaaaagattacgcggtacgattgaatcaaataagcccttatggaataaatattcagctgcttgtgaaccttcaggtactgccttattcaatgtttgttcaattactcttttaccagcaaatgcaatataagcatttggttcggcaataatgatatcccccaacatgccaaaactagcagttacccccccagtagtgggagatgtaagtatggatacatagaataactttttattntnttgataatcatataaagcagaagagattttagccatttggatcaagctc

SEQ ID NO: 214491 - DNA, 394 bp, Glycine max
tttttttttttttttttatatttatttttattttttttttttttttggttttttctagtttttttttttttttaaaatttattttttttataattttatactacatactaccactaatcatttcaattaaaaaccaaaatttcctaattacaaaaaaaacggaccataaaaaaaaaacacctaaaaccaaaaaaaaaaaagccaaaccccccaacccccttcaccaaaaaaaaagaacaaaaattaaaaaaaacaaaaaaaaaaaaaaacccccaacaaaaaaaaaacctcaccctttaaaaaaaaaaaaaaagattggccttaaaaaaacacaccccataaaaatacaaaaaaaaaaacacgctgtatatacacaaaaaaaaaaattctcctc

SEQ ID NO: 214492 - DNA, 535 bp, Glycine max
atatatatataatgtatttagctggttttgggcaaaacttggattgatagaaatcacaactgctttacaatatgggggaatagaattgacaggctacaaggtgatacagagtaaagggctttatcttgaattaaacttgtcctgatactccaaaagattatacacaaactacgcatcacagcagcagccttacttggactgatttcttatagttatttccagagaaaagcaaattgccagtggtgacagcaggccaggcaacataatggtgctcgataggccactaattcatgagtactgtgttggagcatacggtgaatattgaaccacatgggcatttcacacagcaactgcttcaggtcttttgctggttttgattcctcttatagcttcggcataatctttagctccaaacacagcagagcctgcaaccagagcattggctccagcctcaatcaccttgtaagcatttgctggaccaactccaccatctacttcaatccatggattcactcccttttccgcgcacactctt

SEQ ID NO: 214493 - DNA, 527 bp, Glycine max
ggaaaacaggtggggatgagtgatgtatgttaccctgacagtctgattgggaatattccaaatgtatattactatgctgcaaacaacccttctgaggccaccattgccaagcgcaggagttatgcaaacaccattagctatctgactcctccagcggaaaatgctgggctatacaaaggtcttaagcagttaagtgagctcatctcctcatatcagtccctcaaagacaccggccgtggggcacaaattgtgagttcaattatcagcacagctaaacaatgcaatcttgacaaggatgtgactctgccagacgagggtgaggagatcccacctaaagagcgcgaccttgtggttggacaggtgtattccaagatcatggagatcgagtctcgtttgttaccttgtgggcttcatattattggtgagcctccctcagccttggaagcagttgctacactggtcaacattgctgcacttgatcgtgctgaagatggtatttcttctcttccaatcaatatagctgacac

SEQ ID NO: 214494 - DNA, 509 bp, Glycine max
gtctgaacaaaattcttgagctaaaagaattggaggctgagatgtcaaatacgggggagtgggagcgacgaccagttcaagagaggcaggagaggacccggttattccattctcaagaaaatattattcggatagatatgaagttggcaaacgaagatgttagtatgcttgcatttacttcagagcagattactgctccattcctacttcccgagatggttgaaagagtggctagcatgctcaattactttctgctgcaattggtgggtcctcaaagaaaatcgcttagtctgaaggatcctgagaaatatgaatttcgtcctaagcatttgctaaaacagattgtgcacatatatgttcatctagctaggggtgacacgaattccatcttcccagctgccatctcaaaggatggccggtcatacaatgatcagttgtttagtgctggggcagatgtccttcacagaattggggaggatgggagaattatacaggaatttattcaactt

SEQ ID NO: 214495 - DNA, 302 bp, Glycine max
gagatcacaagccacacctccgatgttatgctcaagataaaaaatgggagcatgtcagatggatagcatgctcattgctatccctgagtggcacggtcatatatatctcggaccatgactcccatacacggaccaggggagcctgaggaatacccataaccaacaggtgtctgaggaacaccatgggtccaaccggaccatatggagccctggaatccattgtatggctagctgccggtgtacctaaccggagaattccccagcgactacgggtgggacactgctgggcttttcgcagaccc

SEQ ID NO: 214496 - DNA, 490 bp, Glycine max
gtaaaaagcaagtaacattaagttggattcggatacacaagataattcacattatctgaagtacttcaccaaacacaaatctaaaaactctcaaaagtcatttcgttctttgacgctcactttccggggacgaagttggtggcataggcccaggcgttgttgttgacagggtcagcaaggtgatcggcgaggttctccaatggaccctttccggtgacaatggcctgaacaaagaagccaaacatagagaacatggccaatcgtccgttcttgagttccttcaccttaagctcagcaaaagcctctgggtcatcagcaaggcccaatgggtcgaagctgccacctgggtagattgggtcagtgacctcaccgagggggccaccagcaatacggtaaccttcaacggcacccattaggataacttgtgtggcccaaatggcgaggatgctctgggcgtggatcaggcttgggttgcccaagtagtcgagcc

SEQ ID NO: 214497 - DNA, 306 bp, Glycine max
gggtatagatatcacatatcacagagcacatcttatacttgactaaagaagcgggggcagcttctggcatggttctctcatccccatgcttggctgaccaggtcaggaaactgggcccatcaggcgcaccactgggacgggcgagcatgaggaagaccgtcacgaaacatgtctcctgacgaagcccacggtacggcccacacctagtgaagaactggggcccaatctttggctagccctcatactacctaaccggggagtggccaggcgactacggctgagacactgctgggctgtacgcagacc

SEQ ID NO: 214498 - DNA, 356 bp, Glycine max
tttttttttttttttttttttttttttttttttttttttttttttttttttttttttttttttttttttttttttttttttttttttaaaccgggaatatttaattctttcatttggggggaaaaaaaagggttttttgggttgttcccccccccttttttttttgtaaaaaaaggggggtttgcccctaaaggatattttattttccccccccccccaaaaaaattgcaaaaaggtgttatgttccacccaaaaaaactttttattccccccgggttcaaagggcaaaaaaaaccccccccccaacccaattttacccccccccaaagcacaatagggggttaggggccccccac

SEQ ID NO: 214499 - DNA, 417 bp, Glycine max
gtgtttgtgaaactccctctcacacacaagtcacaaaaacaacttgtgttggtccaatggcatcagcaacaccccttttgaaagatgagctcgacatcttgatccccacgatcaggaatctggatttcttggagatgtggaggccattctttgagccttaccatctcataattgcgcaagatggggacccttcaaagaccatcaaggtccctgaaggctttgactatgagctctacaaccgcaatgacatcaacaggatccttggccccaaggccaattgcatctgcttcaaggactctgcatgccgttgctgtggctacatggtcttcaaaaagaagtacatctacaccattgatgatgactgctttgttgccactgatccatctggacacaagatttatgcacttcaacagcata

SEQ ID NO: 214500 - DNA, 415 bp, Glycine max
cacatgtaacgaaatgctgccatgtgaactctacccattaaacagtaataaaaagaaagtaacgccctacgggtgtacttgttctttctaagctcaaatcattaagttactaaatagaattacagctaacaatgctgcaaaattcaagccaagaataaaagttaagttgaaaataaatactaaggggaaaaaatacagtatataaatagttccacttcaagttctgcggctgttgttatgcagttaaccaaaactgattcatgctttgccattggccactgatgctccagctgggttaagctcatcccaagcttcaatccaagtgaccatggcatctgccaacttgtcaaagtaaggatctaccttggtaagcttttccttgacttgcttggcagctcatgtagcacttctgaca

SEQ ID NO: 214501 - DNA, 492 bp, Glycine max
aaccctttcgacttaacgccctttcccaaagaggttgtgagtctcaagaatctcaattggctctacctatcgaactgcaccctcggatggaagcttccggtaggactcggcaacctcacggagctcaccgaattagaattctccgataacttcctcaccggcgattttcccgcggaaattgtgaaccttcggaagctctggcagcttgagttcttcaacaattccttcacgggaaagattccaaccggcctgagaaacctcacaaagcttgagcttttggatgggtccatgaataaactcgaaggggatttgtctgaattgaagtacttgaccaatctggtttcgttgcagtttttcgaaaacgatatgtcgggggagattccggttgagataggcgaattcaaacgcctcgaggctctgtctgtgtacaggaacaagatgataggtcccattcctcagaagggtggttcctgggccaagtttgattacatc

SEQ ID NO: 214502 - DNA, 522 bp, Glycine max
atatatatataatgtatttagctggttttgggcaaaacttgggttgatagaaatcacaactgctttacaatatgggggaatagaattgacaggctacaaggtgatacagagtaaagggctttatcttgaattaaacttgtcctgatactccaaaagattatacacaaactacgcatcacagcagcagccttacttggactgatttcttatagttatttccagagaaaagcaaattgccagtggtgacagcaggccaggcaacataatggtgctcgataggccactaattcatgagtactgtgttggagcatacggtgaatattgaaccacatgggcatttcacacagcaactgcttcaggtcttttgctggttttgattcctcttatagcttcggcataatctttagctccaaacacagcagagcctgcaaccagagcattggctccagcctcaatcaccttgtaagcatttgctggaccaactccaccatctacttcaatccatggattcactcccttttc

SEQ ID NO: 214503 - DNA, 498 bp, Glycine max
aaaattgtaacattattcagacttgtgcaattgaaataaatagaaaacttgggtacggttaatctaacgagcaaaaagataaagatgtcgaatgtttctagttgttttacatgtcaattcttacagcggcacaccaaggaacaaaatgtccagatgatggtagagtcccaaagagcaaagagaggatatagaaaggtggttgagctttggtaactgcgaagcgaacaagaaccaagaccaagagggtaaagaatatgatataatacatttagtggaacttgagactggtcaagatgttgttgtgcacggggtcagccaaatgatctaggaggttttggtatgggccaacacctgtgacaagagcttgaacaaagtaacccaagattgccaacatagccaaccttccattcttcacttccttgagcttcaaatccttcaaggacttctcatccttaccaaagccaagtgggttgaagaaaggtccttctgggtaagctg

SEQ ID NO: 214504 - DNA, 488 bp, Glycine max
atgaaacaatactattttggtagtgaacaattgtgaagacgggaaaaaaatcaacagaatcttacaaaagattaatatgaggttctcctcccaactaaaagagaaaccccaaagtaataaaaaaatttcaccaacaccatgtgtaaaagcatacaacagttatgaaatactagtatatactataccaatcctgtggctgtataaaatttacaacaaaacaaaccaaaaaatgcaataaatcgaatggaaccttatttgtccaataaatcctagtcccccacttccaaaatttccaaccttccatagctaccaaaaagggaaaaaaaaaattccttcagcatagtagagactcaaggaacatgtcatctctaggctcctccttggtcctggaggagaaaacattgtcagatagttgctgctggttcacgtaagattgcattggattcccaaaccctgagaatccaaaactttctggactttgtagcatc

SEQ ID NO: 214505 - DNA, 555 bp, Glycine max
  unsure (1)..(555): unsure at all n locations
caacatcaaggttcctctcattcttggtatctggggaggcaagggacaaggaaaatctttccaatgtgagcttgtctttgccaagatgggaatcaaccccatcatgatgagtgctggagagttggaaagtggaaatgcaggagagccagcaaaactgatcaggcagagataccgtgaagctgcagacatgatcaagaagggaaagatgtgcgctctcttcatcaacgatcttgatgcaggagctggtcgtcttggtggaaccacacaatacactgtgaacaaccagatggtgaatgccactctcatgaacattgctgataaccccaccaatgtgcagcttccaggtatgtacaacaaggaagagaacccccgtgttcccatcattgtcaccggtaacgatttctcaacactctatgcacctctcatccgngatgggcgtatggagaagttctactgggcaccaacaagggaagaccgcatttgtgtttgcaccggacattttcgcactgatggtatttcttgacaggacattgtgagcttggtgacaccttccct

SEQ ID NO: 214506 - DNA, 451 bp, Glycine max
cacttcccaaggaaagcttgattatatagggaacatatgaacacacattgatttgatatcacaaacttcaggggcaggcttaagtgaaggtacaagggttaacattaacaagttcaagaggagcaatcaaacatgtgggggtgtgatttcctcggtaagctcggttgaagcattcagctttctgcctctttcacttctgctattatcagcaaatttcaagcttgcatgatgggagcctttctccttctcctttgagttccactcagccaagtagtaatcttcctctgtgacctttttagatgaaggaccagagaacatgccaccccattggggaaagtagattaagcatattggcaggctgcatattatgatcatggctcccattagagtgattcctctttcttttgaaaacctggatcctttgaagacaattagttgggtgacaactgct

SEQ ID NO: 214507 - DNA, 556 bp, Glycine max
tgaagggcaagcttaatggaatagcgctccgtgtgcctacacccaatgtttcaggggttgaccttggtgtgaatgttgagaagaagggtcttactgctgaagatgtgaatgcagcattcagaaaggcagctgagggtccactgaaaggtgtgttggacgtgtgtgatgttccacttgtgtctatcgacttccgctgctctgatgtttcctctactattgactcctccttgactatggtcatgggagatgacatggttaaggtggttgcttggtatgacaatgaatggggttacagccaaagggtggtggatttggcacacctagtagcaagcaagtggccaggggcagctaaagcagggagtggagacccattggaggaattctgcgagacaaaccctgctgatgaggaatgcaaagtatatgaatagaggagagcgcctttttctgatttgatgattaccattaccagcagcaaaccatttttactctctgccttgtgttaacgtatcatgtgaaaaagaaggaaattgttcgttcagacggtgtctgaggagag

SEQ ID NO: 214508 - DNA, 427 bp, Glycine max
accacttgccatggcagcagcagcgtcaatgtgtatgagcttcaacctggcaacagcattcaagggtctctctttttcttcttcttcctcatcgttcttcgctggaagtggtagttattctctccgcgcgggtcccacctcggtggtgtcgctgccccggcgctgcccgctgaccatagagaacgcccacaagaagggggcgggcagcaccaagaacggccgcgactcgcagggcaagcgtctcggagtcaagatatacggcgaccaggtcgccaagcccggctccatcatcgtccgccagcgcggaaccaagtttcatgcaagaaagaatgtggggcttggcaaagattataccattttctccttgattgatggagttgtaaaatttgagaaatatggacctgacaggaaaaaagtgagtgtttac

SEQ ID NO: 214509 - DNA, 553 bp, Glycine max
cgatgataatcatccagagtttcaattgaaaagatttgactattttggttttgggtgatcaaatgaagttcaccatgctgatgttgtagctttgacaaagctatcatgcttggtgctgccccatgagcactcagcattgctgcagccaaagtctatttggagtgcagaaaaatctcatgatacatgctcacttgtggagcatatattgcatttggaccctatagaggtagacatcttccgaggaatcactcctccagatgctccaacatttgggaaggtatttggtggacaaatagttggacaggcactggctgcagcatcaaaatctgttgattgtcgtaaagttgttcatagcttgcatgtctattttcttcttgtgggggattttaacatacccattatatatcaagttaagcgtctccgtgatgggaagagttttgctacaaggaaagtggatgcaattcaaaagggaaatgtcatattcacttttgtggcttcatttcataaggaagaagtgggtttcaccaccaggaagtgtctatcccatcagtcc

SEQ ID NO: 214510 - DNA, 487 bp, Glycine max
  unsure (1)..(487): unsure at all n locations
gtcttttttcactcttcagttctcgttgttgttcttcgctttcctgaaactagggttgtgaatttcgattcattcgttaataattaaagatgtttgggagggcaccgaagaagagcgataatacgaggtactacgaaatcctcggcgtctcgaagaacgcttcgcaggatgatctgaagaaggcttacaagaaagccgccatcaagaatcaccctgacaagggcggtgatcccgagaagtttaaagagctggcacaagcatatgaggttctgagtgaccctgagaagcgtgagatatatgatcagtatggtgaagatgcgcttaaggaaggaatgggtggtggcggnggccatgatccgtttgatatcttttcatctttctttggaggtggaagtagtcgaggtaggaggcagaggcgcggagaagatgtggttcaccctctcaaggtctctctggaggacctttatctcgggacttctaagaagct

SEQ ID NO: 214511 - DNA, 555 bp, Glycine max
cgatgataatcatccagagtttcaattgaaaagatttgactattttggttttggggatcaaatgaagttcaccatgctgatgttgtagctttgacaaagctatcatgcttggtgctgccccatgagcactcagcattgctgcagccaaagtctatttggagtgcagaaaaatctcatgatacatgctcacttgtggagcatatattgcatttggaccctatagaggtagacatcttccgaggaatcactcctccagatgctccaacatttgggaaggtatttggtggacaaatagttggacaggcactggctgcagcatcaaaatctgttgattgtcgtaaagttgttcatagcttgcatgtctattttcttcttgtgggggattttaacatacccattatatatcaagttaagcgtctccgtgatgggaagagtcttgctacaaggaaagtggatgcaattcaaaagggaaatgtcatattcactttggtggcttcatttcataaggaagaagtagggtttcaccaccaggaagtgtctatcccatcagtccct

SEQ ID NO: 214512 - DNA, 292 bp, Glycine max
ttcactacaaacacaggctttgaatcttatggtttccctctaccaattatctgggcaggaaccatgaaacaatgaaaaaattatgcatattccatacacatggaccttggctgaattatctatctttgatgatgtggaaatcactggtaataattctaccacccttgacatgtttttacacgatatgaaacatgtactatttcccgatggtcttatgcggtaattcaccaagatgttaatcaacacagactggaacagtgccgacatatatgctcttatcaccaaacttctg

SEQ ID NO: 214513 - DNA, 455 bp, Glycine max
atccaaatatattattattttatggttttggtaacagagttagaacaccaattgacacttattgagcaatccaaaatccaaatacacgagatatattaagaacttttcagggcattatattaattgatgatacatattgctacttgtccttcgaagacaccggacagattgcctatgtcctcagcacattagatatgtagaataaaatcttagtactcaagattgcaagagcttctcgatgtctttctcgattttcagaggtgaggtggtaggtgcatatctgtccacaaccttcccttctttgtttactaagaacattgtgaagttccacttgataccatcgccaaatattccccctttcttctcctttaaaacttgtaaagggcactgcattctttccattgacttaaccttatcaaagataggaaaattagcttgaaccttgtggaaactac

SEQ ID NO: 214514 - DNA, 466 bp, Glycine max
  unsure (1)..(466): unsure at all n locations
ctctcctttgtttcattctctaacttatcttttgtttagttttgctgatctgtgtcgtgcagtctctggcgaggttaccaaagactccgtggtgcccaacaacaacgtttgatacatcaagagacacataacataacagaatactcaaaacattctccatttctaatcaagaaaacaatcagaaatgttacctcaaacattagccatccctgcattactctttgnggtattcatatttattctatctgctggtgtgttgcaatcaaaacaaaatgagaaatatccacctggtcccaagaccctgccaattattggcaacctccacatgctagggaaactaccacaccgcacccttcaatcccttgcaaaacagtatggacctataatgtccttaaagctaggacaggtcacaaccattgtgatttcctcccctgaactgctggactattcttaagacccatgacac

SEQ ID NO: 214515 - DNA, 435 bp, Glycine max
aacgtgacaaagagaaagatacgcatagaaaggagttggagaataagtagaagtactggtcaaccttttaatattacagttttgttgggtaccagtgacaccattgcatttagtgcactgggtttgatccaattgctacaaagaagctataaggcagggaccaattcttattttaagaaacaaaatacaagtatcatttcctaatttaatgataagtaaatcttagcaaacctaatatattttaatttatttctttccaacttcaccagctagccggtaagttggcacagctagcaagtgattacttcttggaattgtgaggccaaatttttcagtcatgtccaagttatctggggacatgcctaatggaagttcccaattgaagcagtgcactaattgagctagaacaatcttaacagtagttagacccaaatg

SEQ ID NO: 214516 - DNA, 380 bp, Glycine max
gcaaaataaataattaagaataacaggagctatatccataaacagatacatctttacatttgatttaaaaggggcatgctatattctagagtttttcaactggaaaacctataacaggtttaatttctgaagccacactacgcagctcagctacctcttcatcagttagtctccagccaagtgcacctctgaattcctcagcttgttctgctgtcttggctcctggaattggcacaacattgacttgtgctaccagccagttcagggatacctgtgttggagttttataatacttctcccctatttcactgatcttgttcagcaaaggttggagctttgttaggaattctggagtataaattctgccccttggcccactt

SEQ ID NO: 214517 - DNA, 494 bp, Glycine max
gtgaaaaagggggagtttcttattccttctagacgcttccattgatcggcgatttctgatacatggcggagcatcacgaacacgaggaagtgaagggtgagtccttgttggagaagatttctgggaagatccacgaccacgattcctcgtcttcgtcggattccgacaacgacaaaaccagcgccactgattccttcaagtctaatgttttcaggcttttcggcagagaaaagcccattcatcatgttcttggcggtggaaaaccggctgatgtttttctatggagaaacaagaagatatccgcatcgacactcggagttgcgaccgctatatgggttctagtttgaattgcttgagtaccacctcctgactttggtttgacacttactgatccttgctctggcggggtatgtcttgtggtccaatgcatccactctcatcaacaagagtccaccaaagatcccacaagtgcgcattccagaggaacctgtttt

SEQ ID NO: 214518 - DNA, 542 bp, Glycine max
cttctccaatcggaccaatccccttactcgacttcttatatttaaagtgattagtgtatctacttcaacgatactattgttccgtaccattatggaagaagattctggtaaaatatgcacttcctcgggaatgaaaaaaaattgatctactttaatttggtattttgtcttaaattctttaactccttgatactcaattaaaaaatcctcttttttaaaaatggaatttatacctatagtcctatatttagtaattcccgagctctgtgttcggtattgaggatcatcgaaataagcaagaatgctatttctacgaaaaataccattgattggtatttcaatcgagatactggaagctaacattagctctttgtctcgttcttgaatcgattggaattgaaatggaataattaatctatttctccgcctctttgctaataaatccgtagtatcatggaaaatagtaggatgtgtaaaatgacaatgatctatagatatgatttgattaaatattgaataatctgaaatccttctttcttttt

SEQ ID NO: 214519 - DNA, 502 bp, Glycine max
aaggagtggtaaattaagagcatggctgcacaagctcttgtatcatcatcatctcttaccttctcagccgaggctacaagacaaagtcttggaccaagatcactccaatctccatttggcttctcaagaaaagcctcctttcttgttaaggcagctgctactccccctgtcaagcaaggatcagacagacctttgtggtttgcatcaaagcaaagtctttcctacttggatggcagccttccgggtgactatggatttgaccctctgggactttcggaccctgaaggaacaggagggttcattgagccgaaaaggctagcatatggagagataatcaatggtcgttatgcaatgttgggtgcagttggtgcaatagcacctgaaattctaggcaaggctggtctgatccctcatgagacagcactcccatggttcaaaaccggtgtgttcccacctgcaagaacctacaactactgggcagactcctacacacttgtcgtgt

SEQ ID NO: 214520 - DNA, 485 bp, Glycine max
  unsure (1)..(485): unsure at all n locations
ngtncntgcgggactgcactaggtatgactccncatgcactcccacgtgggggcggaatccggctcgagttcggcttccttttgtacccttttagcaactttatacaccccgacgcgtttgcggagaaacttttgagcattctcggacctatgttccttcggtccccttgatatcatgaggacagtggtgcttctgcctgttctatgccatggctgcatcgcgggggagtgaggttatttccgcgctgttttgggcggttgccaatcatataacgactatggaaaaagcagaacgatcccacccactggtgggacttgcggccaatgtaacccttatgttctctggccggacagagacatcttttgtaacctgaggcagacttcatgttctggagtccatggttgggccatctctctcaaagcaatgaccaacatacctgcgggtatggggttagcagttcgattcctgccctggtgggggaaca

SEQ ID NO: 214521 - DNA, 468 bp, Glycine max
  unsure (1)..(468): unsure at all n locations
ggcccccaagagtctgctcttaaagaagaacatattttgaaccaactcaatggcatgaccgttcaagaggcaataaacgaaaacaagctgtttatgattgattatcatgatatatatctacctttcttagaagggatcaatgcccttgatggtaggaaatcatatgccacacgcaccatctttttcttgactccacgtagcactctcaagcctgtggctatagaacttagcctccctcacgctggacctaattcccgatcaaagcgcgtggttacacctcctgttgatgctactactaattggatgtggcagcttgccaaggcccatgtttgctccaatgatgctggggtgcaccaacttgttaaccattggctacgcacacatgccaacttggaaccatttatattggcggctcataggcaattaagtgctatgcatccaattntcaagttgttggacccccacatg

SEQ ID NO: 214522 - DNA, 520 bp, Glycine max
aagagtgtgcgcggaaaagggagtgaatccatggattgaagtagatggtggagttggtccagcaaatgcttacaaggtgattgaggctggagccaatgctctggttgcaggctctgctgtgtttggagctaaagattatgccgaagctataagaggaatcaaaaccagcaaaagacctgaagcagttgctgtgtgaaatgcccatgtggttcaatattcaccgtatgctccaacacagtactcatgaattagtggcctatcgagcaccattatgttgcctggcctgctgtcaccactggcaatttgcttttctctggaaataactataagaaatcaggccaagttaggctgctgctgtgatgcgtagtttgtgtataatcttttggagtatcacgacaagtttaattcaagataaagccctttactctgtatcaccttgtagcctgtcaattctattcccccatattgtaaagcagttgtgatttctatcaatacaagttttgaacaaaacccgctaaat

SEQ ID NO: 214523 - DNA, 501 bp, Glycine max
aacgctaaaattagatgctccactccaaaccaagaccaagatcacataacagataatttgaaactgaaaaacaccaccactcactacatgactaaagcaatagggaataaacaaacaaaaacaaaaatcagccaatgactatcattgctttaacagctcttagaagcatcttcaagtgctgtagtcgatccattcccttctaacagcccttctgcattcattcttccatctgctgcatttgcagtagcagattcattgatcaaggttgcatcaagagacttcggaaatgtaaccgtcccaaatgtgaaatcactgggcttgctgatctgttttggtaactgctgttccttagactttttctcctgagtcaccttttcacgatcctcgtagaacccaaaatcatccaagatgcatgtttggcttgaatgctccttgaatattttgacaagttgaacacccttctcaaacttaacctcctgagtatccctactatttgttaca

SEQ ID NO: 214524 - DNA, 403 bp, Glycine max
  unsure (1)..(403): unsure at all n locations
ggaaaagcgagagtcaagacgatatancaattnanaagtacgcgtgcacacgctcgtaatctcggtattgccctactgaattcacagtatagtattgaatatgatgaaactgttgggtgcaaggccgggcaccacatactcactgagggaagtgttatctacttgggcaaaccatatcttgttgacgaccgaagtgtactctgcctttcggacaccataggtattcttagggccgccgatgacggctatattatagctagaggacacctatgtgacgtaactaacacggtttgacgagatgaccgatttgacccatctggcgtctaccaaaacacaaaaactaagggtgcccttaatattatagaacttaggaacgggagaaaaaacctagtcgctctggtgg

SEQ ID NO: 214525 - DNA, 485 bp, Glycine max
cggaaccggaaatgaatagggtttggtttctactattccttctgctgatctcgaaatgcgatcatgtgtggagctcttacgcgggttccgctagctccgtcatcaacccttccaaggtcaaacagatttcctggaagccaaggtttcctcacggatttggaatgcgaccacttgatctctctagcgaaatcggagcttaagagatctgccgtagcggataatctctctggagagagccagctaagtgatgttcgaacaagctctggaatgttcatttccaagaacaaggatcctattgttgctggtattgaggacaagatttcgtcatggacctttcttccaaaagaaaatggggaagatatacaagtattgagatatgagcatggccagaaatatgacccgcattatgattacttcactgataaagttaacattgctcggggtggacatcgcatcgcgactgttctcatgtatctcactgatgt

SEQ ID NO: 214526 - DNA, 517 bp, Glycine max
aataataaattaatttgtatttgttatatcgttttatacatagaggataagtgtaagcaatgaaagaaaaaagcagaatcccccgagaaggtctcaattcttccacttgaagtggggttgtgatagtagaaccctgattggaaccattataataatgcagaattactttacagtccgggaaaaaaaatcaagaactagttgaaatttgaaacccgaggcagagatggcttgtagtatctaggaaagcattcagtaaaatttctaacacgccttgcagcttttcctacaatagccgggaatgtctgaagatccaatcatatactcaggatttttagtgcattctccaagtgaagcccatctctcacagcttacatgattatcagaacaatcacctccagctcccacagtcttatcaaacgagtctacatgaatccactttgttgcggaccatttctcaccttcgataacagggcatccagcatggagactgctagtgtctggggtagcatttgtgtga

SEQ ID NO: 214527 - DNA, 530 bp, Glycine max
  unsure (1)..(530): unsure at all n locations
gagcatttggctgtcaagcacttctcagttgagggacagttggagtttaaggctatcctctttgttcctaagagggcaccttttgacctctttgacacaaggaagaagcctaacaatattaagctttatgtccgccgtgtctttatcatggacaactgtgaggagttgattcctgagtatttgggctttgtcaagggtattgtggattccgaagatctaccactcaacatttcaagagaaatgttgcaacagaacaagatcttgaaggtcatcagaaagaacttggttaagaagtgccttgagctcttctttgaaattgcagagaacaaggaggattacaacaagttctatgaggctttctccaagaacttgaagctaggtatccatgaggattcacagaacaagggaaagattgctgaattgctcangtaccactccaccaagagtggtgatgaaatgacangcctcaaggattatgtgaccaggatgaaggaggtcagagtgacatctactacatcacacgtgaaagc

SEQ ID NO: 214528 - DNA, 466 bp, Glycine max
agacccgcgaaattatagctaattagctaaatatccattgaacactgtcatcaatccaaaataaaaaaaggagaaaaaaacatagccaaaaaaggcattagagacgctactaacaagaaacgcatcatatttaattttaatcaacctcctccatcttgctgccctcagcatcagcctcggcctcctccagtgggggcatttcagcatcagcttcacctgcatcctcgtcaatgctcagtccagcttcaacattctgtggatcctgtttccaaaagtgttgggctcgtcaaggctgaaaccagaagtgagaagagcagtctcaaacagcaacagaacaaggtccttcacggatttgtcattcttgtctgcatcagcacgcttcctgagctcctccatgattgggttctcagggttgatctccatggtcttcttgcttgacatgtaccctgccatgctgttgtccctt

SEQ ID NO: 214529 - DNA, 498 bp, Glycine max
gaagaacaagtagttgagaactaagaaggagaagcaaatggcttcctcaatgatctggttccccagctgttaccactgtcaaccgtgccggtgccggcatggttgctccattcactggcctcaagtccatggctggcttccccaccaggaagaccaacaatgacattacctccattgctagcaacggtggaagagtgcaatgcatgcaggtgtggccaccagttggcaagaagaagtttgagactctttcctacctgccagaccttgatgatgcacaattggcaaaggaagtagaataccttcttaggaagggatggattccttgcttggaattcgagttggagcacggtttcgtgtaccgtgagcacaacaggtcaccaggatactacgatggacgctactggaccatgtggaagctgcctatgtttggctgcactgatgcttctcatgtgttgaaggagcttcaagaggctaagactgcataccccaacggcttca

SEQ ID NO: 214530 - DNA, 437 bp, Glycine max
agcttattcattatttctcatccattaatttccattgaagtccgaaaagagaaaccaaaaatacaggatgatgaaatctcaaaaagcaaaaacaaatgggaatgtagtttaagtacaaacaaacaaagtggggtggcggctacaaatgctttgcaaatttttcacacttataaacctgggggcttgtaagcgatgaagctgatgcactgcactttgcgaacgtttttgaatccgatgatacggatgaagccgttggggtatgcagtcttagcctcttgaagcttcttcaacacctgagaagcatcagtgcaaccaaacataggcagcttccacatgtgccagtagcgtccatcgtaatattctggtgacctgttgtgctcacggtacactaaaccgagctccaactcgaatttcaagcaaggaatgcatcccttcct

SEQ ID NO: 214531 - DNA, 531 bp, Glycine max
  unsure (1)..(531): unsure at all n locations
acggatataatgtctcctttatttcattcatacagatcaccaagcatgcaaacaaacaaggaggaatgttactgtgacattcatgaacatcgcaaagggatatgtaaatgacatccataaagcttttgaaaggtgatagagcaagtcactttgatttaagagagaccaatgactttttcagttgttgtatcaagaccaatgtcatagaagcatggccttgttggaagccctggcatcgtactcattgttccaactaaaggataaataaatccagcgcctatactagctctaacatcccttatgggcaagacaaacccacttggagctccctttgctgcagcattgtctgagaaagaatactgagtcttagccatgcagattggaagacctgaaaatccttgcttgctatacatctcaatctgcttctcagcctgttctgagtactcaacacccctggctccatatgactntgctattgcctctattttctcttttatactcagttcaacaggatacaggaacttcaatggt

SEQ ID NO: 214532 - DNA, 530 bp, Glycine max
  unsure (1)..(530): unsure at all n locations
gagaatccccgtgtgcccatcatcgtcaccggtaacgatttctccacactctatgcgcctctcatccgtgatgggcgtatggagaagttctactgggcaccaacaagggatgaccgcattggtgtctgcactggaatttttcgcaccgattcaattcctgaacaggacgttgtcaagattgttgacaccttccctggccaatccattgatttctttggtgcactgagggccagagtatatgatgacgaagtgaggaagtggatttctggtgttggtgttgacggcattgggaagaagcttgtgaactcaaaagatggacctccaacctttgagcagcccaagatgactctggagaagctcttgacgtatggtaacatgcttgtccaagaacaagagaatgtcaagagagtccaattggctgacaagtacttgaacgaggctgcacttggaaatgctaacgaggatgctattaacaggggaactttcttcaatcttgaattggaggccaagcanacttggcaagaaatatt

SEQ ID NO: 214533 - DNA, 447 bp, Glycine max
ctattttcttacaaggctctactctactgcttcaccttctgctctagaaaattcagtggttatacatggcttcggctactctctctgtagccaaaccagcccttcaggcaaatgggaaaggcttctctgaattctctggcctccgcagctcatcaggctttcttcccttttctagaaaatcttcagaggatttccattctgtcattgccttccagacctatgcagttggaagcagtggaggatacaagaagggtgtgacagaagcaaaactgaaggttgccataaacggatttggaaggattggaaggaacttcttgaggtgctggcacggtcgcaaagactcccctcttgatgtcattgccatcaacgacaccggtggcgtgaaacacgcctctcaccttctcaagtacgagtcgatcctcggaaccttcgatgctgatgtcaagc

SEQ ID NO: 214534 - DNA, 572 bp, Glycine max
aaccctttcgacttaacgccctttcccaaagaggttgtgagtctcaagaatctcaggtggctctacctatcgaactgcaccctcggatggaagcttccggtaggactcggcaacctcacggagctcaccgaattagaattctccgataacttcctcaccggcgattttcccgcggaaattgtgaaccttcggaagctctggcagcttgagttcttcaacaattccttcacgggaaagattccaaccggcctgagaaacctcacaaagcttgagcttttggatgggtccatgaataaactcgaaggggatttgtctgaattgaagtacttgaccaatctggtttcgttgcagtttttcgaaaacgatttgtcgggggagattccggttgagataggcgaattcaaacgcctcgaggctctgtctttgtacaggaacagattgataggtcccattcctcagaaggttggttcctgggccaagtttgattacatcgacgtgtcggagaatttcttgacggggacgattccgcctgatatgtgtaaaaagggaactatgtcggcgctgctcgtgct

SEQ ID NO: 214535 - DNA, 534 bp, Glycine max
aagagtgtgcgcggaaaagggagtgaatccatggattgaagtagatggtggagttggtccagcaaatgcttacaaggtgattgaggctggagccaatgctctggttgcaggctctgctgtgtttggagctaaagattatgccgaagctataagaggaatcaaaaccagcaaaagacctgaagcagttgctgtgtgaaatgcccatgtggttcaatattcaccgtatgctccaacacagtactcatgaattagtggcctatcgagcaccattatgttgcctggcctgctgtcaccactggcaatttgcttttctctggaaataactataagaaatcagtccaagtaaggctgctgctgtgatgcgtagtttgtgtataatcttttggagtatcaggacaagtttaattcaagataaagccctttactctgtattaccttgtagcctgtcaattctattcccccatattgtaaagcagttgtgatttctatcaatacaagttttgacaacaccagctcaatacatttatatatatt

SEQ ID NO: 214536 - DNA, 450 bp, Glycine max
agcagttgtcacccaactaattttcttcaaaggatccaggttttcaaaagaaagaggaatcactctaatgggagccatgatcataatatgcagcctgccaatatgcttaatctactttccccaatggggtggcatgttctctggtccttcatctaaaaaggtcacagaggaagattactacttggctgagtggaactcaaaggagaaggagaaaggctcccatcatgcaagcttgaaatttgctgataatagcagaagtgaaagaggcagaaagctgaatgcttcaaccgagcttaccgaggaaatcacacccccacatgtttgattgctcctcttgaacttgttaatgttaacccttgtaccttcacttaagcctgcccctgaagtttgtgatatcaaatcaatgtgtgttcatatgtttgctatataatgaagctttcctttggagag

SEQ ID NO: 214537 - DNA, 499 bp, Glycine max
  unsure (1)..(499): unsure at all n locations
gggggtggacgaggtcgagcgtagaacagaagtangagttgggaggcacgctcacataaggcaaataataaagatataggcagtggcatccattctgtttcttaccaatgccaaacaatgcttcaaaccacaccaacactgcagccacttccggaggctctggccagtgatccaccaaagggacaattcccttcagaaccaaagatcacaagcaccaccagaagggcaatcacccttcaccctagagatgctacaaagtccaggaagttttggattctcagggtttgggaatccaatgcaatcttacgtgaaccagcagcaactatctgacaatgttttctcctccacgaccaaggaggagcctagagatgacatgttccttgagtctctactatgctgaaggaatgttcttttttcctttttggtagctatggaaggttggaaatattggaagtggcggactaggatttattggacaaataacgatccattcgattta

SEQ ID NO: 214538 - DNA, 510 bp, Glycine max
aatacaaaagtccttcagcatcatgttacccaaaatgaatgtttacagtaaaaaggaaggggggagtaactcaaattatactacgtattcatagcatatatggacaaatgaggggcactgtttttcataatgtacaattataagattgcatcagctcatgttactccttccttgcaaatacacttgatcagcgtaccttaacgatgtacgtactgttctatatgcatatgcattttacttctgaaaatgcttatccaaagcataaacccgcatgctagtgcctgcaattctacctacacattggactctgcttacaagagaatcacaacgtttgagaagctatttcatcaaatctaagaagacgaagccattccaaagactatgcaacagcattgatggcagtaaattccttgaccgtgtatatatcacacccatcaccatcccaagaaatataaggggaagcatcctctgtatgttaaaatgtgcaagagcaaaggcgattgaacttac

SEQ ID NO: 214539 - DNA, 480 bp, Glycine max
gagcatttggctgtcaagcacttttcagttgagggacagttggagtttaaggctatgctctttgttcctaagagggcaccttttgacctctttgacacaaggaagaagcctaacaatattaagctttatgtccgccgtgtctttatcatggacaactgtgaggagttgattcctgagtatttgggctttgtcaagggtattgtggattccgaagatctaccactcaacatttcaagagaaatgttgcaacagaacaagatcttgaaggtcatcagaaagaacttggttaagaagtgccttgagctcttctttgaaattgcagagaacaaggaggattacaacaagttctatgaggctttctccaagaacttgaagctaggtatccatgaggattcacagaacaagggaaagattgctgaattggtcaagtaccactccaccaagagtggtgatgaaatgacaagcctcaacgattatgtg

SEQ ID NO: 214540 - DNA, 461 bp, Glycine max
agacccgcgaaattatagctaattagctaaatatccattgagcactgtcatcaatccaaaataaaaaaaggagaaaaaaacatagccaaaaaaggcattagagacgctactaacaagaaacgcatcatatttaattttaatcaacctcctccatcttgctgccctcagcatcagcctcggcctcctccagtgggggcatttcagcatcagcttcacctgcatcctcgtcaatgctcagtccagcttcaacattctgtggatcctgtttccaaaagtgttgggctcgtcaaggctgaaaccagaagtgagaagagcagtctcaaacagcaacagaacaaggtccttcacggatttgtcattcttgtctgcatcagcacgcttcctgagctcctccatgattgggttctcagggttgatctccatggtcttcttgcttgacatgtaccctgccatgctgttgt

SEQ ID NO: 214541 - DNA, 532 bp, Glycine max
gaaaaagtacaaggcgttcaagccgctgaacctgccagacaggcaatggcccaacaagaccatcgagaaacccccgagatggctgtcaaccgatctgcgagacggcaaccaatctctggttgatcctatggacggcgagcaaaaatggatgtacttccagatgctcacaagacttggctacaaggagatcgaagtttccttcccctccgcatcgcaaaccgacttcgacttcacacagcgcctcgtccagacacccggcatagtgcccgacgatgtctggctgcaggtcctgtcgccgtgccgcaaagagctcatccgccgcactgtcgactccctgaagggcgcaaagaaggccatcctgcatctctaccttgcgaccagcccgtgcttccagcaaatcgtcttcaacatgaacgacgaggagacaattgccctggcggtcgagtgcacaaaatacgcgagatcaatcacaaaggacgaccccgagcaggcagggacacagtggcactacgagttttcgcccgagacgttc

SEQ ID NO: 214542 - DNA, 512 bp, Glycine max
gcttctttctttcatcacaccccattctcccaaactaacaaacaaatcccagggagcgaccaaccatggcttccaagctctgcgactcatgcaaatcagccactgctaccttgtactgccgccccgacgcggccttcctctgcggcgcctgtgactctaaggttcatgccgccaacaagctcgcatcgcgccacccgcgcgtcgtgctctgcgaggtgtgcgagcaggcgcccgcgcatgtgacctgtaaagccgacgccgccgcgctctgccttgcctgcgatcgcgatatccactccgccaaccccctcgccagccgccacgagcgcatccccgtcacgccgttcttcgagtccgtacattcagtcaaggcctcctcgccgatcaacttccaccaccgcttcttcttcgacgccgacgctgatgctgacgtcagcaccgaggaggccgaggccgcgtcatggctgctacctaatgcaaagacagatctaaattcgtctcagtacttgttc

SEQ ID NO: 214543 - DNA, 362 bp, Glycine max
acattgcataattcaaacaaaagaaggggtaggccatatatacagcagcaaaagcaaacataagaaaacaaaaaagtaagcattcatattcatatatgatatatatgataatcatcaacacgacggaacgacgccgtatccagccagaggggccgcatcagtgcgtttcgcgaaccttcctttgattcttggcctcgtttcggcatacgcttttctcgatgcgtaacgaatggtcttctcgaactttcggttctttcttttctccctgtacctcaacactttagcctccctattcgccgccgagaactgcgccgtcaccgtcaccggagccactttgctgtagctgcagttcgatatcttcg

SEQ ID NO: 214544 - DNA, 475 bp, Glycine max
acatctaatattggggttggtgcgataaaaaaaaaacacaaattgggtaacgcgtaaaagaaatcaacatcggattccccatgtgaaacagtcaaatacagtcaattagaacttatttaaagggagaatattaacgtaaattcaggaggcaccgactagctcaagattgggcattgatgttcctgctaggaaggctttgaacagtgtcaaagcaagttttggtgaatgcaaaggaacttcgtgccccgcaccccttacaaccacaaacgtaagggcagcatatttttgagtgcatcctcccaccttcccattattataccatgctcgccaaggactcacagtaggaaggtcgagagcttttatgctatagcgagtagatgtcacgggtattaccacgtctgtgttaccactgaacacccatatcctcaatcccatctgaataagttcatgataaatattgagcactgttcttgga

SEQ ID NO: 214545 - DNA, 479 bp, Glycine max
accaacaacactactcagctgagcagttaggatatcgtactttcacatgaaagtgtcataaaggcagataaaagcatatacattcaacacacacgaccataaggctcaagcacaaggcaatagtatgacttaaacggtgacacatttcagcaattattcttaaaacactgcagattttctgaatttgttcaaaatacaagagccttgttactgtagaaccacacattcttgtgaaccagccaccaccaccacagtagggtgttcgcttgtgctgactgcatcaacttcttttttgacactttgaacattgacatcctccaattcaccacagccaatggcttcaaaaacaagatcattgacttcttgaaacctctcttgagaaagggacacctcagcaagaagcctccaagcattgccttcagacgcctcatcataatccttcctcctctttaaaaccatgtgtccactaatttcccaca

SEQ ID NO: 214546 - DNA, 580 bp, Glycine max
tcgcgatctagaaccctgtccactggccaggatcagacctcttgtgggaagatatgtgccgcctgaagttgttgctgttcgggtgccacttctaaatttgtccaattttcaaatcaacgattggcccgatatgtcagcaaaaagctatgcaatcatggttctcatcctccctactgatagtgttagaaaatggcgagaccatgagttggaacttgttgatgtggttgcagatcaggtagcagttgccctttcacatgctgctattttggaggagtctatgcgagcccgtgatcaactcttggagcagaatgtcgctttagatttagctcggcaagaggcagagatggcaattcatgcccgcaacgattttcttgccgtcatgaatcatgaaatgaggacgccaatgcatgcaattatagcattgtcatcccttctcttggagactgaactgactccagagcagagggttatgatagagacagtgttgaagagtagtaatgttttggcgacactcattaatgatgttctagatctttctcgactttgagatggtagcctcgaattagaaaagggaaaatca

SEQ ID NO: 214547 - DNA, 469 bp, Glycine max
aaagtttcttcctttctctgctctttgccttctctgacacatttggtgccttgtagagcgtgttttggcaggaaggtggtatggcgaaggacgttgaggttgctgagcgtggctccttctctgggaaggactaccaagaccctccaccagcaccactcattgatgctgaggagctcacaaagtggtccttttacagggctctcattgctgaattcattgccactttgctcttcctctacattactgtgctcacagtcatagggtacaagcaccagactgacctcaaggaaaatggtgaaatctgtgggggggttggcattcttggcattgcatgggcctttggtggcatgatcttcatccttgtctactgcactgctgggatctcagggggtcacattaacccagcggagacatttgggctgtttttggctcgcaaggtgtctttgatccgagccatcatgtacatggt

SEQ ID NO: 214548 - DNA, 450 bp, Glycine max
aaaattaaaatttaacattttccataaatatattttgagtacagagatgacagctgaagagaataacttaaaagaaaaaaatgacacactaaagggaagaacaccacagaggaaagtgcaaaaggctccccctgtcatgaaagagactttaatctacacttatccacaatcttgaagacataatcgagagggtcaaagaaacgttgcaaaacacaagccaaaagcattcccaattattattaaacttgccatatcaacctccatctctccaattatcttctttccactagagccatcataaggaagagaaagacaactcaattatgggggttactcctgaatgatccaagagccttagctgcacctgctcttaaaatgaactgatggtagaaggctgcaatggctgccccaataaatggtcctacccaaaagatccaatgggcatcccat

SEQ ID NO: 214549 - DNA, 520 bp, Glycine max
cctaaccttaaataattctcctctcacccttataaaaacactcattttaactcccacttttgcatttccacctatctatctatccatctatcttttctaacatggctgctgggactggactctttgcagagattttggatggagatgcgtacaagtactatgctgatggagagtggaagaaatctgcttctgggaaaagtgtttccatcatcaaccccactaccagaaagactcaatacaaagttcaagcttgttcacaagaggaggttaataaggtcatggacttagcaaaatctgcacaaaagttatgggcaaagaccccactatggaaacgtgctgagcttcttcacaaggcagctgctatccttaaagagcacaaaactccaattgcagagtgcctggtgaaagaaatagcaaagccagccaaagatgctgctatggaggttgtaagatctggggatctggtttcttacactgctgaagaaggtgtaggattctgggagagggaaagtcttggcgt

SEQ ID NO: 214550 - DNA, 456 bp, Glycine max
ccccctcctttcattgattggacattcaatttaactggaacacaattatattccttacttaatgataaggcacaagataaaaattcagattcatatcatgctaaatatgagtacgacaaggggtcacgtgaagtagctacgtgacagatcaatcaaactcgttattcatctttatgataccctgctgcaaaagagaaggcaatgttgaactcatacgttttgaacgttcactatgatttatggaacatgatataaattgattttcctccatgcatgtgtgggtataactattacactactagcccatagtataggaagggctgggtaagttgatcacaaacgttttgaccttgggcatcatgtttatgctgtggggaatcccttgagatccaatgccactgtcctttataccctgaaagggaaaatgatctggcccacgagccggggcggaattta

SEQ ID NO: 214551 - DNA, 429 bp, Glycine max
aatactaacaattcatatccttgctacaaatgcatacaacgtgttggattaagggcatgctttaatgcaagtgggtcctttgcctataatatgcatgaacaatcagttctgtgttagcgtggctactagtgattggatagaaaaccaataacgtcaacggaaccccaagcctccatcagtgaaaacctcattctctggatgcgagccacctgaacagaaagcttccacatcaatttgccaaggttctcgggcagcagcattgacagcttccttggcgttaccatcctgggagactatatcttctgctggacaactgggttcaaaacgaacaatggctgtctactctccttgaggaacagcgattgtttgccaactaaatgtttgttctgaactaatgctaactctgacaagttgccgagcggggagaac

SEQ ID NO: 214552 - DNA, 472 bp, Glycine max
attccattctctctgtgtatttccctacctctcccttcaagatgcagatcttcgtcaagaccctcaccggcaagaccatcacccttgaggtggaaagctctgacaccatcgacaacgtcaaggccaagatccaggacaaggaaggaatccccccggaccagcaacgtctcattttcgccggaaagcaacttgaggacggccgtacccttgctgactacaacattcagaaggagagtactcttcacctcgtccttcgtctccgtggtggcatgcagatcttcgttaagacactcaccggcaagaccataaccctagaggttgaaagctccgacaccatcgataacgtcaaggccaagatccaggacaaggagggtatccccccggaccagcaacgtctcatcttcgccggaaagcagctcgaggacggccgtaccctcgccgactacaacattcagaaggaatcaacccttca

SEQ ID NO: 214553 - DNA, 476 bp, Glycine max
gacaattaatcatttcatatttcacacattcataacaaacgtaggtgggatattagagtactattattaatgggacacaattgagttcaacacaaaccgaacttattttcaagggacattattacagacccattaaacatcaaagttcttcaaatgttttgggaacacatccaacattacacaacgagcttaaaaccccccacggagacggaggacaaggtgaagggttgattccttctggatgttgtagtcagcgagggtccttccatcctcgagctgcttgccagcaaaaatcagcctctgctggtccggtgggatgccttccttgtcctgaatcttggccttcacattgtcaatggtgtcagagctctccacctcgagggtaatagtcttacccgtaagagtcttcacgaaaatctgcataccaccacgaagacgcaacaccaagtggagagttgactccttctggatgttgt

SEQ ID NO: 214554 - DNA, 504 bp, Glycine max
ctaaaacatctcaatgggttcttcttctattacaacatcgcccgcaaccatgaccatggctgcgatcgtgctcctgttcacggtctttgccgtttcctccgccctagacatgtcgataatctcgtacgacagcgcccacgcggacaaggccgccacgttgcgcaccgaggaggagctgatgtccatgtacgagcagtggctcgtgaagcacgggaaggtgtacaacgcgctcggcgagaaggagaagcgcttccagatcttcaaggacaacctgcgattcatcgacgaccacaactccgcggaggaccgaacctacaagctcggactgaaccggttcgctgatctcaccaacgaggaatacagggccaagtacttgggaaccaagatcgatcccaaccggaggctcggaaagaccccgagcaaccgctacgcgccacgtgtcggcgacaaattgcctgattccgttgattggaggaaggaaggtgctgttcctcctgtcaaaaa

SEQ ID NO: 214555 - DNA, 565 bp, Glycine max
aattccacattgtaagcaaattaaaatagcatgtgaatatgggacaaatccaaatattgctgctgcattgtcacataatctacagaaccttgaaaactaacagcaatcaaatatgttcgccatttggaatttgaatacaaatacagtgcatcgataatataaccctatgtacagagccaatgtctgactgaaatttgatacagaacattatctattttgtatcataataaaatggtaaagatctttatgttacgtgcagcattatgtgaagaagggggaagtgcatccagctggtgctttagtccttcgtcttcccttttacttcatcattggctccttctgcacgttcacatttccttaaactgcttaagcactgctgaccttgttcttacgtccgaaggtccaatggggtttcgctggagtacgccttaatgccttcactccaaaggggttgttcttgctcctgagacaagttccagcgtaagtgttgcagatgggatagtctgcagggcaacaactgtagtggtcatcacagcaggaagcacccctcagaggacagcaaccc

SEQ ID NO: 214556 - DNA, 467 bp, Glycine max
cacaaggcagaaagcaagctcatcctagagttttaaaaatggcagcagcctcctccatggctctctcttccccatccttggctggcaaggccgtgaagctgggcccatcagcccccgaagtcgggagggtcagcatgaggaagaccgtcaccaagcaggcctcctccggaagcccatggtacggcccagaccgcgtcaagtacttgggcccattctctggcgagcccccgtcctacctcactggcgagttcccaggtgactacggctgggacactgctgggctttcggccgacccagaaaccttcgccagaaaccgtgagctcgaagtgatccactccaggtgggccatgctcggggccttgggctgcgtcttacccgaactgttgtcccgcaacggggtcaagtttggagaagctgtgtggttcaaggccgggtcccagatcttcagcgagggtgggctggactac

SEQ ID NO: 214557 - DNA, 482 bp, Glycine max
gtaaaaagcaagtaacattaagttggattgggatacacaagataattcacattatctgaagtacattgcaataacatatacttcaccaaacacaaatctaaaaactctcaaaagtccacaagtcatccttttctttcatgctcacttgccggggacgaagttggtggcgtaggcccaggcattgttgttgactgggtccgcaaggtgatcagcaaggttctccaatggacccttaccggtgacaatggcctgaacaaagaacccaaacatagagaacatggccaatctcccgttcttgagttccttcaccttaagctcagcaaaagcctctgggtcatcagcaaggcccaatgggtcaaagctgccaccagggtagattgggtcagtgacctcaccgaggggcccaccagcaatacgataaccctcaacagcacccattaggataacttgggtggcccagatggcgaggatgctctgggcgt

SEQ ID NO: 214558 - DNA, 477 bp, Glycine max
cagtgtttcatcatttgggtttcgcagaagagagagaaacccattgctagagagagaaactcgcagtcgcagacatgtcttccttcgatgccttcgccgacgacttgaacgtcaactcttcttccactcgccagcacgacgatgacgaggacaacttctctggctacggcggctactcctccttcaccggaggattctccgccgacggagatgtcgccgtcgatcactccggcgacgcgtcgccggagatctacggcttcactgattcgaatcccgcttactctcagtctcccttcgaatcggccaccgtagagaacgaaaacggaaacggatactgcgacggcgacggggtttttgtctacgacggtccggtgcttcctccgccgactgagatggagccggaggaaagttacgctcttcgcgagtggcgccgtcaaaatgccattcaggtagaggagaaggagaaaagggaaaaag

SEQ ID NO: 214559 - DNA, 494 bp, Glycine max
cagtgtttcatcatttgggtttcgcagaagagagagaaacccatttctagagagagagactcgcagtcgcagacatgtcttccttcgatgccttcgccgacgacttgaacgtcaactctttttccacttcgccagcacgacgatgacgaggacaacttctctggctacggcggctactcctccttcaccggaggattctccgccgacggagatgtcgccgtcgatcactccgccgccgcgtcgccggagatctacggcttcactgattcgaatcccgcttactctcagtctcccttcgaatcggccaccgtagagaacgaaaacggaaacggatacggcgacggcgacggtgtttttgtctccgacggtccggtgcttcctccgccgacggagatggagccggaggaaggttacgctcttcgcgagtggcgccgtcaaaatgccattcagctagaggagaaggagaaaaggggaaaagaaatgagattgaagat

SEQ ID NO: 214560 - DNA, 580 bp, Glycine max
gcgagaaatggcgatggcaatggcgcttcgcaggcttttatcttcaattgacaagccgcgtgcgccctcggttcaatgccggctccctctactacaagtcgtctttgcctgatgaagctgtctaccaaaagggagccaaccccggagttacatggccgaagcagttgaatgctccacttgagggcgaggatcctgagatcgctgatattattgagctagagaaagctaggcaatggaaggggctagaatggataccgtcagagaattttacctctgtgtctgtgatgcaagcgggtggatcggatatgaccaacaaatacagtgaggggtaccctggtgcaagatattatggtggaaatgagtatattgacatgggtgaaacactgtgccaaagcgtgccctaaaagcttttagattgcatccccctaaatggggagtggaacgtgcagcctctgtcatggtctcctgctaatatgcacgtttacactgcattgctttaaccctatgaaagaaatatggaacttgatcttcctaagggggcccattttctcacgggtatcatactgatacccaaaagatt

SEQ ID NO: 214561 - DNA, 384 bp, Glycine max
gaaacatctaagtgagatacacagtttttaggtagcaagcgtgagtgggtcaccttcgagacatatcagctacatatcgggcgcatatgggaattgcgccactaaaatactgttcatagatgggcggcttagctaatgctgtgcagacaatccttgcaaaccctatgatccgcattttcagtgggtctagggagaaccatattggcgttgctgcttatcacatgaaagggaatgttggccggaaagttacgtccatggctgaagaaaaaccaccaagatctgctgcgaccccagttgcaccacacaccagcagaacccaagccacaggactgactctacttcttcagcaaaggagatcaccaagctttctgatgtgttggcttt

SEQ ID NO: 214562 - DNA, 547 bp, Glycine max
  unsure (1)..(547): unsure at all n locations
ctccaattaatccattccgnatnccnnannncnnnnttnnnnnnnnnnnncnnnnnnnnnnnnnnnnnnnnnnnnnnnnnnnnnnnnnnnnnnnnnnntttnnnnntttnnnnnnnnnnnnnnnntntgggttggttttttttttnttttttttttttttttttttttttttnntttttgttgttcttttttgacttaattacaccaaggtaccacccttaacatactcattaaaagccagagcaaccaaacccaacatagcaaatctcccattccacagttctgcatctgaggacatgaaccctttggacttaaactccacactgatcccttggaagagtggaatcaatgaatcaagggtaaggaccacacttgttcccaagaaccatgggataccaccattttatatttgttcaaacacaccttgccctttggctacttccactgccattgcacccacaaacccaatcatgtccaaccttccattgatcctctcacgtgctggcccactgaacgccaacacatcagaaaacttgttgctcacctt

SEQ ID NO: 214563 - DNA, 422 bp, Glycine max
cttcttcttcttacttacttgtacactcttcaaccactcaacaaagtggctggtttttggttcttaagccatggcatacacatcctctctgcatctatgtgaggcccttatggcacgtgctgcgtaccttcatggatcttcttgggaccgtgattcactctccttcccatcattgtctggcctcaagatacactctccatgcaaagcagctgccacgatctcacgcagaaggggggcgtgcgcttccaccatcagagttcgagccgctgtgagagagacactgctccagaccactgaagtgtctctggaggagaaatacgtcaacaccattcggttgtcgcacattgacgctgttgacaaggtcaagtgtggtcaccctggtcttaccatggggtgtgctccaatgggacacattttctacg

SEQ ID NO: 214564 - DNA, 541 bp, Glycine max
aaaactcacaagccaaatagttgttacaaattcatacaacttcattaattcaactcatcctttaatgtaagtggctcctctgactataatatgcaagaacaatctgatcttctttattgtggctaaaagtgatatctcaaaaaacaaataatgtaatagtaacccaaagccaccaccagtgaaaaccacaagttctagatgagataaaacttaaaagaaagtcaacaaatagatctacgaaagttctttggcagcagcaataacagcttccttggtgataccaaactccttgtatatttttcctgctggagcacttgctccaaatcgatcaatgcctatggcctttccttggcttccaacaatcttttgccaaccaaatgttgatcctgcctcaatgctaactctaactgttaccgaagcagggagaacactctctttgtattcatctgactgctcatcaaaaagttcccagctaacaaaagaaacaactctaacagcttttccttccttccttagatcctcagcagcagcagcagcaatt

SEQ ID NO: 214565 - DNA, 567 bp, Glycine max
  unsure (1)..(567): unsure at all n locations
ctaaaacatctcaatgggttcttcttctattacaacatcgcccgcaaccatgaccatggctgcgatcgtgctcctgttcacggtctttgccgtttcctccgccctagacatgtcgataatctcgtacgacagcgcccacgcggacaaggccgccacgttgcgcaccgaggaggagctgatgtccatgtacgagcagtggctcgtgaagcacgggaaggtgtacaacgcgctcggcgagaaggagaagcgcttccagatcttcaaggacaacctgcgattcatcgacgaccacaactgcgcggaggaccgaacctacaagctcggactgaaccggttcgctgatctcaccaacgaggaatacagggccaagtacttgggaaccaagatcgatcccaaccggaggctcggaaagaccccgagcaaccgctacgcgccacgtgtcggcgacaaattgcctgattccgatgattggaggaaggaaggtgctgctcctcctgtcaaagaccaaggaggctgtgggagctgttgggcatctcagcaatcgtgcagtngaaggataaatagata

SEQ ID NO: 214566 - DNA, 536 bp, Glycine max
aattccacattgtaagcaaattaaaatagcatgtgaatatgggacaaatccaaatattgctgctgcattgtcacataatctacagaaccttgaaaactaacagcaatcaaatatgttcgccatttggaatttgaatacaaatacagtgcatcgataatataaccctatgtacagagccaatgtctgactgaaatttgatacagaacattatctattttgtatcataataaaatggtaaagatctttatgttacgtgcagcattatgtgaagaagggggaagtgcatccagctggtgctttagtccttcgtcttcccttttacttcatcattggctccttctgcacgttcacatttccttaaactgcttaagcactgctgaccttgttcttacgtccgaaggtccaatggggtttcgctggagtacgccttaatgccttcactccaaaggggttgttcttgctcctgagacaagttccagcgtaagtgttgcagatgggatagtctgcagggcagcaactgtagtggtcatcacagc

SEQ ID NO: 214567 - DNA, 536 bp, Glycine max
  unsure (1)..(536): unsure at all n locations
tctctctagggtttgatcagactcaagggtttaagccatgggaaaaaggaaggcaaaggcaaagcctcctccaaagaagcgaatggataagctcgataccgtcttcagctgccctttctgcaatcatggcagcagcgtcgaatgccgccttgacatgaagaacttgataggggaagctatttgcgggatatgccaagagagctttagcactaccatcacagctttatcagagccaatagacatatacagtgagtggattgatgaatgtgaactggtaaaccacccggacgatgatggtgctgagcactgatgctcagattcctgttcttgtggttgcgaacggattaactggccaattttatatcttcaacctgtaactatgtcggttcctgatgtgagtgagcactggtgcaactataagatgcatgtaatagcttagttatgtaatagcatgtgcaagaacatgagaataattgtcctatttagatgaagcccnctggataaaagctagtctgaatatctaatactattatact

SEQ ID NO: 214568 - DNA, 495 bp, Glycine max
  unsure (1)..(495): unsure at all n locations
gcaaaaagcaatgggaaaactgtgttgcattcttctgcaagaaatggctacttggaggttgtcaaggcccttgtgagcaaagaaccagaaattgcaatgagaattgataaaaaggggcagacagcactccatatggcagttaaaggacagaatcttgagttggtggatgagctcgtgaaattgaatccatctttggccaatatggtggatgccaaggggaacactgcactgcatatagcaacccggaagggtcgtctacaggttgttcagaagttactagattgcagagaaataaacacagatgttatcaacaaatctggagaaactgctttagatactgcagagaaaaatggtcgtttggaaattgccaactttctgcaacatcatggagctcaaagtgccaagtccatcaagtcacctactacaaacacggnccttgagctcaaacaaacagtgagtgacataaaaagtgaggttcataaccagcttggacac

SEQ ID NO: 214569 - DNA, 461 bp, Glycine max
tccaaatcctcctttttgtctctctgaattccaatagttgttgtgttctgaagagagaacatgtcaagcaattcagatgcagcagcagcgacggtgcatgctcgtggccgtttggccatgctcgctgctcacctcctcccctttgaactcactgatcacgacgccctccgccctatccctctctccgctcagttgccgccgacgaacctcgccggaagtttgaccgtcgtcgacgacagaaccggcaagaagtaccagcttcaggtctccaaagaaggcactgtcaaagcttctgacctcaagaagatatcgactgggaagaatgacaagggactcaagctttatgatcctggctatttgaacacggctcctgttcgatcagcaattagttatattgatggtgatgaggggattcttagatatagaggctaccctattgaggagttggcagagaaaagcac

SEQ ID NO: 214570 - DNA, 450 bp, Glycine max
actggtacacagaaaactctcttatttctttaacacaaacgttttgctaatcaattgtacatggtactgctcccatgagatatgtaaactatgcttatctgtttattattccattgtgacaattaacgaataatttgaaagtagaagtactgaaacgtgactttcacataaaggctcaacaaatcacaccagcatcgttcttctggtaggtgatggatgtgacaccagtagcattatttatgcagagaaatgtcatccttttggtcatcttgctcatataactaaattgagcctgtaagctataccccggatccggcaagccgccgctttgaggcatttgatatggacacctcgccaagcttgtcagcatctcttgatgtagtcctgacattgactggtgtataatgccgtaaccagtccccaacgtaaacctgttgaggtctcaaaatc

SEQ ID NO: 214571 - DNA, 530 bp, Glycine max
ggcacgtttaagttgattcttcaatttactgaggattatccaaacaagccaccaactgtgcgatttgtctctcgaatgtttcacccaaacatttatgcggatggaagtatttgtttggatatattacaaaaaccagcgggagtcctatttatgatgtagctgctatactcacttctatccagtcattgctttgtgatcccaacccaaattctcctgcaaactcagaagcagctcgaatgtttagtgagaacaagcgggagtacaatcgaagagttagagaaattgtggagcaaagttggacagctgactaagcttgtcttcatatgcttctgggcctttgaagtcacgaattagattgcactgctacctataagaatcattgtgccaacttactgaattttatgtcacattccttactgctttgaatgttaggatcatcttatgtttaattcagttgagggttgtgcattgtccatgtcagttcatgtattatagaattctgtcaatttgcattaagattgttgtcaaca

SEQ ID NO: 214572 - DNA, 504 bp, Glycine max
ctcatggctctttccgttcccactcccactgctactctgccattcaaatatgcaattgattcccaccattcaaagccaaattctctattctcatcctcaccacaaaaactgaacacaacccaccttataatacaagtagctgattctggcaagtggagcaacatggtttcatttttcccaggttttataaccgaaggtagagatgttcagagcctcaaggtggatctctatgaagcaattgcaccacttgaccgaggtgccgaggctactcctgaggaccaacaacgtgtggaccagattgctcgtaaacttgaggctgtgaatcctgttaaggagcctctcaagtctgatttgctcaatgggaaatgggagcttttctatacaacatctcaatcaattctgcaaacacagagaccgaaacttttgaggccaaatggaaagatctatcaggcaattaatgtggataccttaagagctcaaaatatagaaacttggcccttctac

SEQ ID NO: 214573 - DNA, 357 bp, Glycine max
gttacactgaaggtggtcaattgaccgaggcagttctgcgccttccttacactgttgtatgatttgatgagatggacaaagcccgtcctgttgtgttcaacatgatgcttcagatcctggaagagggaagactgacacacactttgggcacaacggtggattataagaccactcttcgtataccgacatctattgcagaaagccgtgtgattgagagaggaggcctcactattggatttgatctggtttctgatgcgaatgctaacatgtatgacagactccctagcctgcccaccgatgagctatatcaatactctctgccagaatcttagaatgggaaggttgaaatgaatgcct

SEQ ID NO: 214574 - DNA, 392 bp, Glycine max
tttttttttttttttttttttttttttttttttttttttttttttttttttttttttggtttttttttttttttgggtgaaaaagggcccaaaaccctaaacctggtattataaggcaagaatcctggcattacatggttaaaactaaagcaaggaacgcgccataaggaacatttccggggggggtgggattttacatcggggccaaactaggggaaaaataaaagccccccagtttccgacagaatagtttattggggccaaagttataccaaatacggggcttttttaacctttaggttttcaaacccctctttgggcattatggcagcaatctccttaacctccagttttgggggcggcctgaaaacttttttttcttccaacctatt

SEQ ID NO: 214575 - DNA, 289 bp, Glycine max
cacatctccaacaacttcatgaccctctccaacatcatacgcacccctcattcttggcatctggggcggcaatggaccagggaaaggtttatactgtgatcctgtcttcagccaatatacttatgaagcctatcatgaagactgcattgacagcaagaaagtggtaatgcacgtaaggccgcgtaactgaatatgtaacaaaaccgcgaagctgggtacgtgaacataaaagctgagagtgtgcactatattcatcaaccagctacaagcaagagctgatgaccctgct

SEQ ID NO: 214576 - DNA, 457 bp, Glycine max
atagaggaagacggtccaatatgaaaaatatagtaagatcatctcaaacttagcatcttctctttgcacctaagacattgagaatgctaagaatgttacacgcaagttccatcacaacttctagcacttggattagtacaacaaccttcacgaacagaaatatttacttgccaagtttgctttgcctccaattcaagactggaagaaagttcccctctgaatagcatcctcgttagcatttccaagagcagcctcgttcaagtacttgtcagccaattggactctcttgacattctcttgttcttggacaagcatgttaccatacagcaagagcttcttcagagtcatcttgggctgctcaaaggttggaggtccatcttttgagttcacaagcttcttccaacactgtcaacaccaacaccagaaatccacttcctcactttatcatcatatactc

SEQ ID NO: 214577 - DNA, 506 bp, Glycine max
tctctctctccaccattgccatggatccttacaagctccggccatccagcgccttcaattatcccttctggactacaaaccctggagctcctagggggaacaacagctcctctttaaccgttggagctggaggtccaatgcgtggttgaggattatcatgttgtggagaagcttgcaaactgtgacagggaacgtatcccacaacgtgttgtccatgccagaggagctagtgcaaagggttgcttggaggtcacacatgacatttgtcacctgacatgtgcagatttccttcgagcccctggagctcacacgcctgaaagtgttcgtctctcaactgtcattcatgagcgtggtagccctgaaaccttgagggaccctcgaggttttgtcgtgaagttttacaccggagagggtaactttgaccttggtggaaacaacctatccgtattctttgtacgtgacggcatgaaaattccagatgtgggtgatgatcttaaaccccatcc

SEQ ID NO: 214578 - DNA, 487 bp, Glycine max
aaatactaacacatacaaacggcatttattgagatagctcaacgagttgcatgcatggagttatgggtacacaactaaaattgcaagaaatggataagttctttcaaattgatcgaaaatcacatccttatcgtactctttgcacgtctgcaactctaacaatcattctggggttggcaacaacattaaatatttggcctcatgctcagacgagatgctatcttttggcctagagaacggtcagcctgagaccagtaagatatccagacactgcggatttcatgggtgacccgtgggtcagataaagcatcaacccatcggcgattaaatctatcttgcctgtcaggtgcccaagatcggtatctctctccgggctgcttaaagatgttctccttctcaattccacacttttcacgccttccactgcagatagcaggaggtatggggaacgtttctgcatgacgaacaggatcataccttgaaggga

SEQ ID NO: 214579 - DNA, 473 bp, Glycine max
ttctattcattcaagattcagcaagtgcgttttggaagcagagaccgaactacttcgagatggcccgtacaaagcaaactgctcgtaagtcaactggaggaaaagctcccaggaagcagcttgcaaccaaggctgcacgtaagtctgcaccaacaactggtggtgtgaagaagcctcatcggtatcgccctggaactgttgctcttcgtgagattaggaaataccagaagagcactgagctcctaatcaggaagcttcctttccagaggttggttcgtgaaattgcccatgatttcaagactgatctgcgtttccagagccatgctgtgcttgcattgcaagaggctgctgaggcataccttgttgggctctttgaggacactaacttgtgtgccattcacgccgagcgtgtgactattatgcccaaggatattcagctggcaagaaggattcgtggtgagcgtgcttgagtt

SEQ ID NO: 214580 - DNA, 504 bp, Glycine max
ggccaaatatgcgagaaataacattaagggtggaaattcaaaatcagaacaaacagacacgataagctagcttcaactagattagatggcaacagaaagttgtccaatacaattcccaaagtggctgcacaaccagaaataaaacgagaaataaaggatccaaaaaaatcaaatacatgccaaatttctaacaaccagacctttacagtgtcttaggcagtatttgccaatgacaattaatatgactaccaagtaaacacctatttttccctaataacctataggcttcaacaaaaagaaaacttattaacaaaacaccatccgcagccaccaaacaatccatcttcacaaacacagaacgcaccaactcaagcacgctcaccacgaatccttcttgccagctgaatatccttgggcataatagtcacacgcttggcgtgaatggcacacaagttagtgtcctcaaagagcccacaaggtatgcctcagcagcctcttgcaatg

SEQ ID NO: 214581 - DNA, 380 bp, Glycine max
ctttttgccattggtaggtgggaaaaggtttgtccaaagatgataaggcgcacaaattagctctaaggcactggcttgaagctattgatccacgtcatcggtatgggcacaatctgcacatatactatgctgtttggtttcataagcagagttcacaaccttttttctactggttggatgttggagacgggaaagaagtgtatcttgacgagtgcccaagaagtgaattgtctatgcagtgcataaagtatcttggacccaaagagagggatgcgtttgaagtgattattgagggaggatggcttgtttacagaaaaggccagaacctagcacacactgtagagggagctaagtggattttagtcttagctcatatagaa

SEQ ID NO: 214582 - DNA, 566 bp, Glycine max
catcctcacaaatacaattatacaaacacatattcattctcctcacataccaaaaataaattatttttcttgttattttccctttgctaacggaaagccatgaaattcgggaagagcctgagcagccagatcgagaaaaccctgccagagtggcgcgacaagttcctctcctacaaggagctcaagaagaagctcaagcaattcgaccctcccgcccccgcctccgccgccgatgaacgccccggcaagcgcctcaagaccgacgccggcaacgccgacgccgacgccgtttccgacgcctccgacatgtcgaaagaggagagcgacttccggaacctgctggagaatgaactcgacaaattcaacaccttcttcgttgagaaggaggaagagtacattatcagactcaaggagttacaagatagtgtggcccaagttaagggttcgcgggaagagatgatgaaaatccacaaggaaattgtgggattccatggagagatggtcttgctggaaaactacagtgcccctcactatacagggctagtgaaaatacttaaaagtatgac

SEQ ID NO: 214583 - DNA, 516 bp, Glycine max
cagcaaaatgtcaaaacataacttctttaaaatccagaggttttattatatggaacctataattctataaaattaactccatctttacatttagcatcttacatctgtgttagtatctaaggcgtgcataacagaggcgtccgatttaagagaagaaaaatagatgggaaaatagccatccctctacattactcagcaacgtaacccagcaggttacttggctgcttgttccaaaacagggattttcttccatgtttctttttctgaaccacttatcttcaacggtggcaatgaaaacatgctaactggtgagcttccacttctaatttcctgcaaaacatgcaatgctgatacagtactcttcatataaaggctctccatgtactcgatctcagctaattccttcggaatcaccaaaccatcactcttggtagtggttgaagttgaaggatcaaaaccttcagcttggggagttgtctcagtggaaactggagcaggatcattcacagggaaaag

SEQ ID NO: 214584 - DNA, 368 bp, Glycine max
ctataaccaacgaacacactctcacataactctctctctctctctctctctgagtccttcttcttcttcgtccagccaacatgagctcaatcgttcagggtttctccaagtcactggccatgaccattctgtctgagatcggtgacaaaacgttttttgcagctgcgatactggctatgcgacaccctagacgcctagtcttatcaggttgcttatcggctttgattgtgatgaccattctctctgctcttgttggctgggcagctccaaatctgatctctcgcacatggactcatcacattacaacatttttattcttgggatttggactttggtccttgaaagatgctatatttgaacaaggggat

SEQ ID NO: 214585 - DNA, 554 bp, Glycine max
  unsure (1)..(554): unsure at all n locations
aaacataacaatccactcacgttgactgtttatattgaatttggctgtcatcctacaatggtaaatttattttaaactacaaaagggtcgaaataatgaaatctatgacctggggaggattaggcacgaagctgagcatttttagcaaccaaccccaaccataataacaaacatatttgctaaacatgtcttgtaaaaaacacaatgaataatcactaaccaatagcacagccttcatgattcaactggagagaggaatgactgaattccaaaaacaatgaaaagaattccacctgagagtgcaacaattttttcagatatctgagaagctaaactcttccctccaacaacagcagcagaagtgcacaatgcttgtcccagaatccctccaagaaccacaccaaatgggttctcatctgcagccaaacctatggtagccagctggctcttgtcaccccattcaccaaaaaaggtgattgaaaatgcctgtaaaaagataggagaaaaaaactgagataaaaatgacccgttatgcttntttgtggcatcatcat

SEQ ID NO: 214586 - DNA, 497 bp, Glycine max
  unsure (1)..(497): unsure at all n locations
agcacaaaaagcaaaagtcaattgcatcactttacataatgaaacagatttttacagagtactatataatgaaatgttacatgtaaaagtgcccctatctactacacattggcaatcaatcaacttgatacggtatgtctcaaactttggatgatggggcacattcaggaaaacaacaatatggcagatcttccattgtgaaaattactccagcaaaaaaaattcaaattactggggcaaaatctgctgcatatcagccagccggagcacccacagatagaagggttcttcnagnaagttccttttgctcaattataaggacaacagggttactgaccacagattgaagataaactatgagctcacctcttttcttgatggtgatatagaagatgctgttcagtcttgtgttacaatggagcaaaaggaacttctggaagaacttgctgaatctggggcaaaatctgctgcatatcagccagccggagcacccacag

SEQ ID NO: 214587 - DNA, 447 bp, Glycine max
agcttttcttgcagagactctgaaccatggcttcatgtaccgcacctccctccctcatgctcgtccactctcaagacctttctccctctcttcgctccttctctcacaggcccatttctagaaccaccttctctctctatcctctccttttgaagccctccaaatggctgcacatagagcccaaatccaggacttgccatgccctcatcgacgcttggtctgcagaggtgcacgtgcccgaaactctacacgacacagaggaggacgacggggctgatggcttcaccgccaccaacaccggtcccaccaccaagcctaagaaaggcaacgccgcattgcctctcaagagggacaggacgagatctatgatggtcttggaaatacaacaattgagggagcgtaagatagagtatgactgtgagacagcaatatcttcggtttaagaaa

SEQ ID NO: 214588 - DNA, 500 bp, Glycine max
caaaacgtaaaaatgaaaatttattcccacgaaagaaaatataattagatctctggtgttagttacaaagtaatacaaggaaaatcctcagccggggtcaaagattatgtaatgtagcagtgtgcaaacatttggaacagagagatcccatcccctgtatgtaactttggtaacatctttgaataaatatttggcaagatctcacaatggcacccgggatagctgactgaggccaaacgaacatttacatgtgagggttctattctgatggaggtctgtaatcaagcatctccctgatatttaacctgattgaaggtcccatggctgagcatatgtgagcacttttccagtacacacctttagcacctgaaggtttgtttgcctctactgatttcactgcagcaagcaagtttacaagaagatcctcttctggaaagtcagcttttccaaaaggtaagtgcacgattccagttttgtctgccctgtattaacttttccct

SEQ ID NO: 214589 - DNA, 430 bp, Glycine max
gtgactcccgcggcctttcaggagtgaggaaggaagtggctgagttcatactcaggcgtgatggttatccaactgatccagaactcatatatctcactgatggtgccagcaagggggtgatgcagatattaaatactatcatcagaggtcaagacgatgggattttggttccagtcccacaatacccactctactcagcaacaattgctctgcttggtgggacccttgttccatactaccttgaagagacagcaaattggggtcttgatgttaatgaactttgtcaatcagttgagcaggctcgctttaaaggaaaaactgttaaagcaatggggatcataaatcctggaaaccctactggtcaatgccttagtgaagctaatctaagagaggttttgcaattctgttatcaagaaatttaaccttgctt

SEQ ID NO: 214590 - DNA, 505 bp, Glycine max
gatatctgctgcccttggagaggaggatattaccacccggcaaactgatcctgaggtaattgttgaggattattttactgatgaagaaattggggtacatgaactccatcagatgatgtggaaggacaaaatgcgtctcatgcgactgaaagaacaaacgaaatctaaggaaggaattgatgcaacgaatcagaggctactccaagaacaggctcagagaaaaaagatggcgagggctcatgatggaatcttgatgctcatgctgaagatgatggaggtttgtaaggcccacagatttgtctatgggattattcctgagaaggagaaaacggtgactggagcatctgataatcttcgtgaatggaggaaggataaagtcctgttcgatcgaaatggtgctgctgacatattcaagtgtcaagctgataacactattccagggaggaatgatggatgccatttcataggtccaactgcacacacaatgcaagagctgtttgacaca

SEQ ID NO: 214591 - DNA, 542 bp, Glycine max
attttgactgagcgtggttattccttcaccacctcagccgagcgggaaattgtaagggatgtgaaagaaaagctgtcttacattgcccttgactacgagcaagaactggagacagccaggaccagctcatccgtcgagaagagctacgagttgcctgatgggcaggtcatcactattggcgatgagcgtttcagatgtccagaggttctgttccaaccatccatgatcggaatggaagcttcaggcattcatgagacaacatacaactccataatgaagtgcgatgttgatatcaggaaggacctttatggtaacattgttctttcaggaggaacaaccatgttccctggtattgctgacagaatgagcaaggaaatttctgcattggcacccagcagcatgaagatcaaggttgtagcaccacctgagagaaaatacagtgtctggatcggtggttctatcttggcatctcttagcaccttccagcagatgtggattgcaaaggcagaatatgacgaatctggtccatcaatggtgcacag

SEQ ID NO: 214592 - DNA, 536 bp, Glycine max
  unsure (1)..(536): unsure at all n locations
ggagntcaacggatgaaggattataattatgcataccaagggtacaagcgtagtttgatataatccagctaactcatactcagaatgaaccagttaaaaacttatcaaagtataagaaaagaactggaccattttaaaaaacaactctcctcaccttctgcaaataaatgatcactccaacaagagaataaaatgaaaggataacaaaagctagaatcaaagggttacaatctgcaatgcattgcttccagacaaatcgtgatgatagtagtctttcccttcaataaccctatctatcgaaacagtttagaagcactttctgtgcacaattgatggaccagattcgtcatattctgcctttgcaatccacatctgctggaaggtgctaagagatgccaagatagaaccaccgatccagacactgtattttctctcaggtggtgctacaaccttgatcttcatgctgctgggtgccaatgcagaaatttccttgctcattctgtcagcaataccagggaacatggttgttccttctg

SEQ ID NO: 214593 - DNA, 545 bp, Glycine max
ctttttgccattggtaggtgggaaaaggtttgtccaaagatgataaggcgcagaaattagctctaaggcactggcttgaagctattgatccacgtcatcgttatgggcacaatctgcacatatactatgctgtttggtttcatagccagagttcacaaccttttttctactggttggatgttggagacgggaaagaagtaaatcttgacgagtgcccaagaagtgaattgtataggcagtgcataaagtatcttggacccaaagagagggaagcgtatgaagtgattattgagggaggaaggcttgtttacagaaaaggccagaaccttgtacacactgttgagggatctaagtggattttcgttcttagctcatctagaattttgtacgttggggagaaaaagaaaggctcatttcagcactctagttttttagctgggggtgctactattgcatctggaagattggttgcccagaatggagttcttgatgcgatatggccctacagcggtcattactgtcctacaaagaagcacttatggaat

SEQ ID NO: 214594 - DNA, 496 bp, Glycine max
  unsure (1)..(496): unsure at all n locations
cacaacggggtttctagtatgcatagtgttgctttgggttccaagtatttgaaagcaacacaggagcttcttgatgaagttgtgaatgtgggcaagggaatctccaaaggggaggaatctatggaaggggctaagaaggagaagatgaaagggaatattgaatccacttctggggttggcgatggttcgagctgcggaagggagaataatgatcgagccaaacaaggagttgaactcagcacagcacagagacaagagcttcagatgaagaagtccaagcttgtgaccatgctcgatgaggtggagcaaaggtacagacagtatcaccaccaaatgcaagttgtgctaacatcgtttgagcaagcagcgggtgttggtgcggcaaagtcttacacggcccttgccttgaagacaatctcaaagcaatttcggtgtctcaaagatgcaatctcttcacaaatcacgacaactagcaagaccttangtgaagataatt

SEQ ID NO: 214595 - DNA, 586 bp, Glycine max
agcctcttttacagttcagtctcttgttaaagcaaaatggtcttagaagagtgtgtagtgcatgatgtgaggctatcctcagttgggccaggccgggccaccaggtcggaggtgttccacagcccgggtggcttggacttggccatgaagcttcactatctcagggtggtgtacttctttgctagtgaggctgcacaagacctaaccatcatgaaaattaaggaggccatgttcactttgctcaaccattacttcatcacatgtggccgcttccggcgatcggattccggtaggcccttaatcaagtgcaatgattgtggagtaaggttcattgaggccaagtgcagcaaaaccctagatgagtggctagccatgaaggattggcccttgtacaagttgctcgtctctcaccaagtcattggcccagaactatctttttctcctcctgttttggtgcaggtaactaaatttaagtgcggtggaatttcattgggtcttagttgggcccatgtattgggggacccgctttcagcttcaaattcattaactcttggcgcctaatattgaaaaatatgggcctcaacag

SEQ ID NO: 214596 - DNA, 467 bp, Glycine max
aagaagaatcacaccatgtcacatttacgtttaacgtgagacacacatgactttaaagtaatacactatgtactacaaactaaaagtttcccttgctcacaaatatacttaataaaaaagaaatttattcgttgataaacacttaatctcattaaaacttaattatcctcaagcagaagaccaattatcttgagctcagatttaagcttcaccatttcatcctccggtataatcatggtcacaaacttcccatcaacaccattctcgatagaaccttttggccacggatacaccaaaacaatcccttcatctccaaccccttgaagggtgtagtaaacaaactttggtgtgtgtcccttcaattgcaagtcatacacattggtgtcttccaagtctagaaatgtcaaattgacaccatacacaaagaaatcactcacaccttggtctttctcaatggcttcctcaat

SEQ ID NO: 214597 - DNA, 516 bp, Glycine max
  unsure (1)..(516): unsure at all n locations
tgaatttgcaattgaagttaaaagccttagccttccctacaactccaaacacaaagacatcatcatccatggctgcctccgtctccactgtcggagctgtcaacagagctcttttgaacctgaatggttctggagctggagcttcagctcccagttcagccttctttgggaccagcttgaagaaggttattgcctcaagggtccccaacagcaaggtttccggtggaagcttcaagattgttgctgtagaagagaagaaagagattgaagagacccagcagaccgacaaggacagatggaagggtcttgcctatgatatctcagacgaccaacaagacatcacaagaggaaagggtttggttgactcccttttccaagctccacaggatgctggaactcactatgcagtcatgagctcctacgagtacctcagcactggacttcgccagtacttggacaacaaaatgattggnatctccattggctcagcttttatggacaagctngttgttcaca

SEQ ID NO: 214598 - DNA, 484 bp, Glycine max
agaggaagacggtccaatatgaaaaatatagtaagatcatctcaaacttagcatcttctctttgcacctaagacattgagaatgctaagaatgttacacgcaagttccatcacaacttctagcacttggattagtacaacaaccttcacgaacagaaatatttacttgccaagtttgctttgcctccaattcaagactggaagaaagttcccctctgaatagcatcctcgttagcatttccaagagcagcctcgttcaagtacttgtcagccaattggactctcttgacattctcttgttcttggacaagcatgttaccatacagcaagagcttctccagagtcatcttgggctgctcaaaggttggaggtccatcttttgagttcacaagcttcttcccaacactgtcaacaccaacaccagaaatccacttcctcacttcatcatcatatactctggccctcagtgcaccaaagaaatcaat

SEQ ID NO: 214599 - DNA, 475 bp, Glycine max
  unsure (1)..(475): unsure at all n locations
aaaaaaaagattctcaagaaatataactaatattctttagaataatcaaaccgaatattaaattcaaatacatgttagatataaaaaagacttaaaaaggaggatttgaaatgctagaatttaaaaccatttctttccgtggcaccagtagtaagtactctatggctcggggctttggcgggtctcttgatagagatcaatcgcttctttccagatgcattgctattccctttcttttcattctacatattgacacggactggggcgaagaagattatcgcatccaattaagttttaaatatctgtaattaatatgtaattaatctcctcttctttatttccactggtatttcttctttttgttaccactgtaatagaatcagttaggacagagaaagagtaatggttaatttggcctaattgaaattcggagagaaactcatgaactcgttcaggcttccatggnattgaatta

SEQ ID NO: 214600 - DNA, 269 bp, Glycine max
taaaggacaatctatttacgcgtgtggataatattttaccttgtccactagaaaaggcactagttcaacccatgtttttataatcaatggggcccccctattggatggggggcaaacccctacaaaaagagcgtttggattttatgaaggggccctaaaaaattaccatggttcattcatccctatcccaaacatcacctttgttaccagaaatactataagcggttggttatttaattctgcctcttctaagataaggtgaaaatttt

SEQ ID NO: 214601 - DNA, 530 bp, Glycine max
  unsure (1)..(530): unsure at all n locations
aaaaaaaagattctaaagaaatataactaatattctttagaataatcaaaaagaatattaaattcaaataaattttagatagaaaaaagacttaaaaaggaggatttgaaatgcgagatctaaaaacatatctttccgtggcaccagtagtaagtactctatggttcggggctttggcgggtctcttgatagagatcaatcgtttttttccagatgcattgatattcccttttttttcattctagttattgacacggaaaggggtgaagaagattatagatccaattaagtattaaatatatgtaattaatatgtaattaatctcctcttctttatttcgncttttatttcttcttttttttacaattgtaatagaataagttaggaaagagaaagaataagggttaatttggcctaattgaaattcggagtgaaactcgggatctcgtccaggcttccatggaattgaattaataattcaattccatttctattaaataaagagtgaaagcagaaatttaaatggaatg

SEQ ID NO: 214602 - DNA, 560 bp, Glycine max
  unsure (1)..(560): unsure at all n locations
cgaaactatatctgatctcattacgaaannccnnnnnnnnnnnnttnnnnnnnnnnnnnnncnnnnnnnnnnnnnnnnnnnnnnnnnttntnnnnnnnnnnnnnnnnnnnnnnnttttnnnnttttttntnttnnnttttnttnntttttttttgtgtttttggtggttttttttttttttttattatttttttttattttttttttnttttttgtttttttttttaattcaaatttttttaataccaaaggatattaacccttgttgtttaaaggtcaatctattcacccatgtgcccaaaatcttcccttgttcactaaaccaaaaactaattaaccccatcttttaataatcaatccccccccccaattggatcgggggcaaacccctacaaaaaaatcccttgcatattaaaaaccagtcgctccaatatgtgccatcggtgataaatccctcccccaaaaatcacgtttttcccaacaaaaactataaacgattcaacttattattctgactttatccaatatatgttggaaaaattttaatagagcttcaaata

SEQ ID NO: 214603 - DNA, 405 bp, Glycine max
tgacaaccacgcattcctacactggagaccagaggcttttggatgcttcacaccgtgacttgagaagagccagggctgcagcacttaacattgtcccaaccagcacaggagctgccaaggccgtgtctctagtgttgccacagctgaagggcaagctcaatggaatagcgcttcgcgtgcctacacccaatgtttgaggtgttgaccttgttgtgaatgttgagaagaagggtcttactgctgaagatgtgaatgcagcattcacaaaggcagctgaggggccgctcaaaggtgtattggacgtgtgagatggtccacttgtgtatatcgacttacgctgctctgaggcttactctactattgactgctccctgactatgggcgtgggagatgatatggctaaag

SEQ ID NO: 214604 - DNA, 506 bp, Glycine max
acaagaattcagaaattcaatatcaatcaatatatgggtgatattcattcagtcacgccaaaacttattattggctgcaaataaatataaactttgaaaatctctcctcagatagactgtctgaacaatttccttctttttcacatgatacgttagaaaaggagctctcctctattcataaactttgcattcctcatcagcagggtttgtctcgcagaaatcctccaataggtctccactccccgctttaggtgcccctggccacttgcttgctactagatgtgccaaatcgaccactctttggctgtaaccccattcattgtcataccaagcaaccactttaaccatatcatctcccatgaccatagtcaaggaggagtcaatagtagaggaaacatcagagcagcggaagtcgatagacacaagtggaacatcacacacgtccaatacacctttgagcggcccctcagctgcctttctgaatgctgcattcacatcttcagcag

SEQ ID NO: 214605 - DNA, 505 bp, Glycine max
ggaattcgagacataaccatagacaatattaagttaattgcaagaatacaatttgtaaaaagccattaagaagtaccatcgagtacctaagcacttgctcattgaatcagaagctgaaactaagcacttgcttcacatgtctgcatatttctttacaacaagctcctataacaagtaaaacagatgcctagattgtactggtttggaaagcatatgattcgcctgttgttgcaaagagaaccataagaagagttaaatgagacacggggagatttttactttcatgaaagcttcaacttcggctttatggcttgtgaactttgaacccaaaaactctcggaacatagccttgtgctggtttctgtggcttcagttgtccataagtcatcaagaagaggtgtggaaatgttgttccaaagtaagctccatcaatgttgccttgatacttggaacgcggatagtaaagatcttcacacctagggcagtatattttcacagtacttga

SEQ ID NO: 214606 - DNA, 495 bp, Glycine max
cttgagctatgtttcagggataatagggcagggatgtacaaagaacgagagcgaggtggtgtttccgtttccgcctctaaatccgaggatcggaagcgaatcaacgacgttctcgataagcacttggaacgatcctctccttccacttcccgccccatcaacaccgctttcaagaattccaacctccaagtggaggaatctgagacggagagtgaagagtctgatgttagtggctctgatggggatgacacctcttggatctcgtggttctgtaatctaagagggaatgagttcttttgtgaggtggatgatgattacatacaggatgactttaacctctgtggattgagcagtcaagtgccctactttgattatgcccttgatttgattctcgacgttgagtcatcccatggtgacatgttcacggaggaacagaatgagttgattgaatcggcggcggaaatgctttatggtatgattcatgctcgatatgtg

SEQ ID NO: 214607 - DNA, 500 bp, Glycine max
ggaattcgagacataaccatagacaatattaagttaattgcaagaatacaatttgtaaaaagccattaagaagtaccatcgagtacctaagcacttgctcattgaatcagaagctgaaactaagcacttgcttcacatgtctgcatatttctttacaacaagctcctataacaagtaaaacagatgcctagattgtactggtttggaaagcatatgattcgcctgttgttgcaaagagaaccataagaagagttaaatgagacacggggagatttttactttcatgaaagcttcaacttcggctttatggcttgtgaactttgaacccaaaaactctcggaacatagccttgtgctggtttctgtggcttcagttgtccataagtcatcaagaagaggtgtggaaatgttgttccaaagtaagctccatcaatgttgccttgatacttggaacgcggatagtaaagatcttcacacctagggcagtatattttcacagta

SEQ ID NO: 214608 - DNA, 511 bp, Glycine max
tacctctgcatttttctctcgctctctgccttccatcaccctcgccatttcccttcccaagatagtagaagatggcagacgctgaggatattcaacctcttgtttgtgacaatggaacaggaatggttaaggctggttttgctggagatgatgccccacgtgctgtgtttcccagcattgtaggtcgtcctcgtcacactggtgtgatggttggcatgggccaaaaagatgcatatgttggtgatgaggcacagtctaagaggggtattttgactctcaagtaccccattgaacacggaattgtgagcaattgggatgatatggaaaagatttggcatcataccttctataatgagcttcgtgttgccccagaagagcatccagttctcttaactgaggcccctcttaaccctaaggctaatcgtgagaagatgacccaaatcatgtttgagacctttaacacccctgctatgtatgtagccatccaggctgttctttactttatgcaagt

SEQ ID NO: 214609 - DNA, 509 bp, Glycine max
aacaacatggcaactattgcatctgcatgccttccttcctacatcatcaaaaaaccacttggatttcacccttcaaacctccacaacaagtgtttctctaagtccaatgcctccacctccactctcacatgcaaggcatcatcatcatcatcatcaaccatgatggactttgacttgtatgaccttctgggcattgacagctcttgtgatcagtcacaggtcaaagtggcgtatcgctctcttcagaagcgctgccaccctgacattgctggccctgctggccatgacatggccatcatactcaacgaagcttattccattctctctgacccaaatgcacgccttgcctatgataaggagcaagcaaaaagttcagaattcaaaggcttcactggcagacccatatactcggtctggtgtgggtcagaaagtgagcagcgggcaatatttgtcgatgaaatcaaatgtgttggttgcctgaaatgtgctttgttagctgaaaagacttt

SEQ ID NO: 214610 - DNA, 460 bp, Glycine max
attcgatttgcagacagtaattgtaggaggagctgacacaaccagtacctctcttacatgggcaatgtgtttgattttaaaaaacccatatgtgttggaaaaagttaaagctgaatttgacatccaagttgggaaagagaattgcataagcgagtctgatataagtaagttaacataccttcaagccatggtcaaagaaactttaagattgtaccctccaggtcctctctcgggacctcgtgaattcactgagaattgcactttaagtggctacaatatcgaaaagggaactcgcctaattacaaatctttggaagattcacacagatcttaatgtttggtcagatccattagagtttaaaccagaaaggtttcttaccactcacaaagacattgacattaggggtcatcattttgagctactaccatttggaagtggtagaagaatttgtcctggaata

SEQ ID NO: 214611 - DNA, 443 bp, Glycine max
attccatatgatagttaagttgaaagagacaatacatatacatagcttcaaaatagttcgagacaaatctaatttaaccaaaatggatcacatatactttaatattcgacaatccaccaagatcacatagctaccaaaggatcacttgctttcataacaacttggagataaacgtggtttaataaaaatctcaagtggagtggctttagcgttgactaatccaaagctttcagtcatatcaagaggttcagtagacggatttaatatttcaaaggaatgcaaaaaactagcaagagggaaatgaagcattcgaaggccaaaggatattccaggacaaattcttctaccacttccaaatggtagtagctcaaaatgatgacccctaatgtcaatgtctttgtgagtggtaagaaacctttctggtttaaactctaatggatctg

SEQ ID NO: 214612 - DNA, 486 bp, Glycine max
ctcgagccgaatcggctcgagggaagccatttgcttctccttcttagttctcttccccagctgttaccactgtcaaccgtgccggtgccggcatggttgctccattcactggcctcaagtccatggctggcttccccaccagaaagaccaacaatgacattacctccattgctagcaacggtggaagagtgcaatgcatgcaggtgtggccaccagttggcaagaagaagtttgagactctttcctacctgccagaccttgatgatgcacaattggcaaaggaagtagaataccttcttaggaagggatggattccttgcttggaattcgagttggagcacggtttcgtgtaccgtgagcacaacaggtcaccaggatactacgatggacgctactggaccatgtggaagctgcctatgtttggttgcactgatgcttctcaggtgttgaaggagcttcaagaggctaagactgcataccccaacg

SEQ ID NO: 214613 - DNA, 483 bp, Glycine max
attcattagttctcatccattaatttccattgaagtccgaaaacagaaaccaaaaatacaggatgatgaaatctcaaaaagcaaaaacaaatgggaatgtagtttaagtacaaacaaacaaagtggggtggcggctacaaatgctttgcaaatttttcacacttagaagcctgggggcttgtaggcgatgaagctgatgcactgcacttggcgaacgttgtcgaatccgatgatacggatgaagccgttggggtatgcagtcttagcctcttgaagctccttcaacacctgagaagcatcagtgcaaccaaacataggcagcttccacatggtccagtagcgtccatcgtagtatcctggtgacctgttgtgctcacggtacacgaaaccgtgctccaactcgaattccaagcaaggaatccatcccttcctagaaggtattctacttcctttgcaattgtgcatcatcaaggtctggcaggt

SEQ ID NO: 214614 - DNA, 469 bp, Glycine max
tccatcttttggcttgaggagtctgaaatcgagttctttatttggagaatctctaagagtggcatccagatcaacactaaaggtttcaaagacaaagaatacttcactcgtgaccagatgtgaaattggggacagtctggaagaattcctcacaaaagcaacaccagataaggggttgatcaggttgttggtgtccatgggagaagcattaagaacaatttccttcaaagtgaagacggcttcttgtggtggaacacaatgtgttaatacttttggggacgagcagcttgcaggggatttgctagctaatcagcttctttttgaggccttaaattactctcatttctgcaagtatgcttgctctgaagaaaattctgagctcctggacatgggaggtccagttgaaggtggatttagcgtcccatttgatccccttgatggctccagcattgtggacacaaatttcaca

SEQ ID NO: 214615 - DNA, 294 bp, Glycine max
tgaattgccggtttaacaaattaagcaggtgctccaacagctacaccacccttgagcctggatttaccatacagggttttttaaaaccggattattttatttttggccccattagcaacttgggttctgtcatcaatggtactggtgactttgtctaacacagactggtgaccattactgttgtaacctccagctttttcaatcaagaaccccaaaggggcttcctcaaacaacagtcttagtttggctttggctgatggtgatgacacgttggtgaagattcctttttctttt

SEQ ID NO: 214616 - DNA, 580 bp, Glycine max
tcactggacgagatttgaacttcacaatcccacctgaagcaagtgacttcagttcatggaggaatcttcccaacagagaatttgagctcgagagaccacttcccctgatcaagagcactctgaattcacaccccaaagaagctgcttaatggatctgtgttgaatttatcaactcatctgcctagcctcagtaatggtaatgggactgtcctgtcttctattagcagcaagaaaaggaaggacttttttctttatgggaaagatgaagaatgctgtttggctattaatcctccatctgatcggagtccagatttggtaatgcacccaagtgaatcacactggttgaatgacttcagaggggtgatgaagaatgtttgtggaccatttacagctgcaaaaactgtttatgaggacgaacaaggtttcttgatcattatcagtctgcccttcgaggatcttactagtgtgaaagtttcatggaggaacactgttactcatggtatcataaaggttttttgtgtgagcatatctttgcagccatttattaaaagaaacgttaggacatttcagctttcagagc

SEQ ID NO: 214617 - DNA, 520 bp, Glycine max
tgttgacaattctcccagctttgttgtcatcaatgtcagtcctattgagtatgggcatgttttgctgattccgcgcatatttgagtgtttgcctcaaaggattgaccgtgagagctttcttctttcactttaaatggcagtggaagccgataatccttattttcgattgggttacaacagcttgggtgcttttgcaactatcaaccatcttcacttccaggcttattatttggctctgcccttcccaattgagaaggcccccactaagagaattgcaagtgtaaatggtggggtgaagatatctgaactgttgaagtatccggttagaggctttgtctttgagggcggcgaaatgctggaagatctatcaaacgttgtttcagatgcatgtatatgtcttcagaacaacaacatacctttcaatgttcttatctctgactgcggaaagcaagtgtatctgttaccacagtgttatgcagagaaacacgcacttgggtgtcaaaaaactcagcattcactt

SEQ ID NO: 214618 - DNA, 480 bp, Glycine max
ggacaagaaagatacaaatgataaaattgaagagggtactgccaatggtgaggaagaagagtcttctgagttttccttgttcagaagactatttcgcgtgcaccctgtagaggctaaaagtggtgtgttcaatgaaaacaagtataatggcggtttatttgaaagtagtccaggtacagagaattttttacgtaaattgctcagagaccgtgaccgttcaattgaagattcagagctattgggttcaaaaagacagaaagagaagcattctgtatccccaaagcagcagagtgaaaagtccagcacaaagcctccattaccaattagttagtctcagttccggaaaggggcttatcatgactcattggagtttgtgcagtcattatgtgatacatgatatgggttagaggatgtatttcccatagaagatcgcacaagtgctcttcgcgaggcacttgtagaaatcaatctacatgtagc

SEQ ID NO: 214619 - DNA, 513 bp, Glycine max
cttgagctatgtttcagggataatagggcagggatgtacaaagaacgagagcgaggtggtgtttccgtttccgcctctaaatccgaggatcggaagcgaatcaacgacgttctcgataagcacttggaacgatcctctccttccacttgccgccccatcaacaccgcttccaagaattccaacctccaagtggaggaatctgagacggagagtgaagagtctgatgttagtggctctgatggggatgacacctcttggatctcgtggttctgtaatctaagagggaatgagttcttttgtgaggtggatgatgattacatacaggatgactctaacctctgtggattgagcagtcaagtgccctactttgattatgcccttgatttgattctcgacgttgagtcatcccatggtgacatgttcacggaggaacagaatgagttgattgaatcggcggcggaaatgctttatggtatgattcatgctcgatatgtgttgaccagcaaaggaatg

SEQ ID NO: 214620 - DNA, 499 bp, Glycine max
ggaattcgagacataaccatagacaatattaagttaattgcaagaatacaatttgtaaaaagccattaagaagtaccatcgagtacctaagcacttgctcattgaatcagaagctgaaactaagcacttgcttcacatgtctgcatatttctttacaacaagctcctataacaagtaaaacagatgcctagattgtactggtttggaaagcatatgattcgcctgttgttgcaaagagaaccataagaagagttaaatgagacacggggagatttttactttcatgaaagcttcaacttcggctttatggcttgtgaactttgaacccaaaaactctcggaacatagccttgtgctggtttctgtggcttcagttgtccataagtcatcaaaagaggtgtggaaatgttgttccaaagtaagctccatcaatgttgccttgatacttggaacgcggatagtaaagatcttcacacctagggcagtatattttcacagta

SEQ ID NO: 214621 - DNA, 551 bp, Glycine max
cttagaaagaaaaaaacttaaatcaaaatacttaatagcatggcgatacatttatacaaaacttctaccccaagcacacgcaatggagccgtagacagtcaagtaaaatccaatccacgaaatcatttgatctatggacagcatcgttgtggtaaaggccgtaatgccagaggaatcattaccgcagggcatagagggggaggtcataagcgtctataccgtaaaattgattttcgacggaatgaaaaaaacatatatggtagaatcgtaaccatagaatatgaccctaatcgaaatgcatacatttgtctcatacactatggggatggtgagaaaaaatatattttacaccccagaggggctataattggagataccattgtttctggtacagaagttcctataaaaatgggaaatgccctacctttgagtgcggtttgaactattgatttacgtaattggaagtaaccaactaggtttacggcgaaacctagaaatcgatcactgatccaattggagtacccttcaggatagacctcaacagaaaactg

SEQ ID NO: 214622 - DNA, 536 bp, Glycine max
  unsure (1)..(536): unsure at all n locations
cttcaagcagttacactggtaaagtatacacatacgatggcttgtacaaggttgtcaattattgggcagggaagggaatatccggatttacagtctacaagtttagacttaggaggcttgaagggcaacctacattaactacaaatcaggtatattttacatatggacgtgtacctcaatctctaacagaaatacaagggttggtttgtgaagatatcactggaggtcaagaagatatgcccattccggctacaaatttggttgatgacccccctgttccacccacagatttcacatattgttagtcactcaaggttgcataaaatgtgaagcttgccatgaatgccaccggatgcaaatgtgaaggcatttgtaatgacccaacaagctgtgcgtgtgcattgcgtaatggctctgatttttcctatgtatctcgggatggtggcaggttaattgaagctaaagatgtagtttcgaatgtggtcccaatgtggttgcggtcctggttgngtgaacccaacgtctcaaagaggact

SEQ ID NO: 214623 - DNA, 410 bp, Glycine max
agccaaaaaagaaacctattttatttccttgcatctgcacaaaaaggtacaatgttcctttggtgccatttcagcccaatacataaactgggcaaattaaccgggaatgaatagagaccactttgcagctcatgttttaaacaaccaatacttaaccgcacttgttttgcaattgcaaaaataccacattcaacttccagagttttagaataatcgctttctgcaaactgaggctccacagaaacatgggatttgcttaatcttcccatccgagtccaacacgcttttaagcacgccaccatagtcatatgttaattcctgcaaagggggtatgttgtctgtatcaaacaacattttacgagccaatctcaaatcatcgggtgtgctcaaaacacattggacaaacagat

SEQ ID NO: 214624 - DNA, 441 bp, Glycine max
cttcaagcagttacactggtaaagtatacacatacgatggcttgtacaaggttgtcaattattgggcagggaagggaatatccggatttacagtctacaagtttagacttaggaggcttgaagggcaacctacattaactacaaatcaggtatattttacatatggacgtgtacctcaatctctaacagaaatacaagggttggtttgtgaagatatcactggaggtcaagaagatatgcccattccggctacaaatttggttgatgacccccctgttccacccacagatttcacatattgtaagtcactcaaggttgcaaaaaatgtgaagcttcccatgaatgccaccggatgcaaatgtgaaggcatttgtaatgacccaacaagctgtgcatgtgcattgcgtaatggctctgattttccctatgtatctcgggatg

SEQ ID NO: 214625 - DNA, 423 bp, Glycine max
agccaaaaaagaaacctatatcatttccttgcatctgcacaaaaaggtacaatgttcctttggtgccatttcagcccaatacataaactgggcaaattaaccgggaatgaatagagaccactttgcagctcatgttttaaacaaccaatacttaaccgcactagttttgcaattgcaaaaataccacatacaacttccagagtattagaataatcgcttcctgcaaactgaggctccacagtagcatggcatttgcttaatcttcccatccgagtccaacacgctatcaagcacgtaaccatagtcatatgttaattcctgcaaagggggtatgttgtctgcagcaaacaacattatacgagccaatctcaaatcatcgtggtgtgctcaaaacacattgaacaaacagattaggctcacaac

SEQ ID NO: 214626 - DNA, 439 bp, Glycine max
gcgttgccattctcatcctcttctttctctctctaccattgccatggatccctacaagcaccggccatccagcgccttcaattctcccttctggactacaaattctggtgctcctatttggaacaacaactcctctttaaccgttggagctagaggtccaattctgctggaggattatcatcttgtggagaagcttgcaaattttgatagggaacgtatcccagaacgtgttgtccatgccaggggcgctagtgcaaagggtttctttgaggtcacccatgacattaatcacctgacatgtgcagatttccttcgagcccctggagttcagacgcctgttattgctcgcttctcaactgtcattcatgagcgtggtagccctgaaaccttgagggacccttgaggtgttgccgtgaagttttacaccagagagggtaac

SEQ ID NO: 214627 - DNA, 460 bp, Glycine max
attgagataggtcaacgagttgcattcatggagttatgggtacacacaacataatattgcaagaaaaggattagttctttcaggtaatccaaaatcacatccttatcgtactctttgcacgtctgcaactctaacaatcattctggagttggcaacaacattaaatatttggcctcgtgctgagatgagaagctatcttttggcctagagaacggtcagcctgagaccagtatgatatccagacactgcggatctcatgggtgacccgtgggtcagataaagcatcaacccatcggcgagcaaatctatcttgcctgtcaggtgcccaagaccggtatctctctccgggctgcttgaagttgttctccttctcaattccacacttttcacgccttccactgcaaatagcaggaggtatggggaacctttctgcatgacgaacaggatcataccttgaagg

SEQ ID NO: 214628 - DNA, 544 bp, Glycine max
tgttgacgtgctgcttgagcaaaacattgttcctggtattaaagacgacaagggtttggtgccccttgcaggttccaacgacgagtcatggtgccaaggtttggatggtctagcctctcgctcagctgcatactacaagcaaggtgcccgtttcgccaaatggcgtactgttgtgagcatccccaacggtccctctgctctggcagttaaggaagcaacctggggtctggctcgctatgctgcaattgctcaggacaatgggttggtcccaattgtggagccagagatcttgcttgatggggagcatggtattgatagaacttttgaaggagcccaaaaggtctgggcagaggttttcttctaccttgctgaaaacaatgtcctttttgagggtattctccttaggcctagcatggttacacctggagccgagttcaaggacaaggccaggccttagacaagtgctgattacacccctcagctccttcacaggagaattccccctgctgttcctggattatgtttttgtctggtggacagtttg

SEQ ID NO: 214629 - DNA, 380 bp, Glycine max
tgcaaacatcttagtaggagtagcttttgacgaacaactccttcttggcttcctcggattcaccctcaccagtgtacttcccaagctgagcgagtgagttggacttggcacggaatgcgagtgcatcttgtgctgccttcacgttctctgggcggcctccccatgtcttcaaggcagtgttttggagggctctggcatacgagaatgacacgtgccacgggtttggagattggttcatggcattcaaattgagggtagcttcaacctcagactgtccaccagacaaaaacataattccagggacagcacggggaattctcctgtgaaggagcttgagggtgtaatcagcaactgtctgaggactggccttgtccttggac

SEQ ID NO: 214630 - DNA, 550 bp, Glycine max
tgcccttaggcacggcaatacataacatagaaatcacactcggaaagggtggacaattagctagagcagcaggtgctgtagcgaaactaattgcaaaagaggggaaatcggccacattaaaattacccttttggggagggccgtttgatatccaaaaactgctcggcaacagtcggacaagtgggaaatgttggagtaaaccagaaaaatttaggtagagccggatctaaatgttggctaggtaagcgtcctgtagtaagaggagtagttatgaaccccgtagaccatccgcatgggggtggtgaagggagggccccaattggtagaaaaaaacccgcaactccttggggttttcctgcacttggaagaagaagtagaaaaaggaagaaatatagtgataatttgattcttcgtcgtcgtacttaatagtagagaaaatagaaattgtttcttcgtctttacaagaaaaggagtaattaactgtgacacgttcactaaaaaaaaatccttttgtagcgaatcatttattaagaaaaataaataaacttaa

SEQ ID NO: 214631 - DNA, 484 bp, Glycine max
ttagatatagaggatatcctattgatgacttggcagagaaaagcagctttatggaagggtcatatctcataatgtatggaaatttgccttctgaaagtcaattaacagaatgggagtttaccatattctcacccttcccctgtaccacaaggagttttggatatgatacaatcaatgcctcatgatgcacattctatgggtatgcttgtcaatgccatgagtgctttgtctgtttatcatcctgatgcaaatcctgctctcaaaggtcttgatatctacaactcaaagcacgtgagagacaagcaagtagcacgggttattggaaagataacaacaattgctgctgcaattaatcttagattggcaggaaggccacctgtgcttccatccaacaaactttcttacacagagaacttcctatacatgctagattcttttggccatcgatcatataaacctaatcctcggctaactcgagcactgg

SEQ ID NO: 214632 - DNA, 553 bp, Glycine max
  unsure (1)..(553): unsure at all n locations
gaactcattgatcaatagcgancccnnnnnntttnnnnnnnncnnnnnnnnnnnnnnnnnnnnnnnnnnnnnnnnntnnntttnnnnnnnnnnnnnnnnnnnnggggnggggggnnnnnnnnnnnnnnnngngnnntttttttttgtttttttttttggtttttctgaaaccatagtctaactgatttcatgatgttatttatctatttgacttcataattttattcataaacaaacaaacttattttatataccagaaaaaaaaattaattttttctctgaagtggactttattgaccacttggcattttcactatgttaagccccagatccagcaagtcgcctctttgaggcgtttgatacagccaattgaccaagtttgtcagtgttacttgatgtagtcctttgattgattggtgcataatgcctcaaccactccccaacataaacctgttgaggtctcataatctttgtatcaggatcatccaatgactctcgccaatgtgccaagtacccagccattcgaaggatggcaaataaaacagtgaaaaac

SEQ ID NO: 214633 - DNA, 344 bp, Glycine max
gtacacaagttgctataaaaatgggaaatgccctacctttgagtgcggcttgaactattgatttacggaagtggaagtccccaactacgcttaccgcgaaacctagaaatcgatcgctgatccgatcggagtgcctttactggatagacctaagcacaaaactttagagtgacggctgagcgcgattgagtgcattcatctctgatctaaaatgatggtgtctcgggatacactgatctggatatgacaacattgtatgggcacctacagaaccggaagcaccctctgattgcagattaatagagggggaggcggtttattcacatttcataacatggttagag

SEQ ID NO: 214634 - DNA, 360 bp, Glycine max
ataaaagaaatgatttgaatttcattttaataagaattccattttgtaatatttaggtgtaaattacgatttaaaaatttatgttaaaattaacgttaacgacgagatctattgtcatttttggcatggcctcggaaatttagagtaggtgaaaattctcctaatttatgggctaccatacgatctgttatataaataggtaaatgctctttttcgttgaggatagcaatggtgtggccaatcattggaggtataatgggggatgctctggaccaaggtattattatatctttttccgcttttgagttaagtttatttattttttttaataaaggattcgctacaaaaggattttttttt

SEQ ID NO: 214635 - DNA, 400 bp, Glycine max
gtacagtagtggctataaaaatggggaatgccctacctttgagtgcggatggaactgttgatttacggaattggaagccaccgactgcgtttaccgcgaaacctagagataaatcactgatccgggcggagcacctttactgggtagacctaaggacagaactttggagtgacggatgagctcgatagattgcattcatttctgatctaaaatgagggagtctagggatacactgatctggatatgacaaacccgtaggggcgcctacaggacgggaagcaccctttgattgcagagaaatagacgcgggggcggtctactcacattgaataacttggttagaggctaattgaaagcatagccgtggggaaattgacgactttctgcagcataaatggag

SEQ ID NO: 214636 - DNA, 547 bp, Glycine max
gatgacattgcattcaatggggaaaacccaaggcctggagtcatcattaacaaaccagatggaggtgatgtttataaaggagttccaaaggattacaccggcgaagatgttactgttgataacttttttgctgctttacttggaaataagtcagcactgactggtggcagtgggaaggttgtggacagtggttctgatgatcatatatttgtatactatactgaccatggaggtcctggggtgctcgggatgcctgctggtccttacttatacgcggatgatctgattgatgtcttgaagaaaaagcatgcttctggaacatataaaaacctagtattttatctggaggcatgtgaatctgggagtatctttgaaggtcttgttcctgaagatattaatatttatgcaaccactgcttgcaatgcagaagaaagtagttggggaacatattgccccggggagtatactagtcctcccccagaatatacaacctgtttgggtgacttgtacagcgttgcttggatggaagacagagacagacacaatt

SEQ ID NO: 214637 - DNA, 563 bp, Glycine max
aatattaaacaataattttggcatcataaattcttccggaataattatacaaaagtgaccagggaaaacccgatctgccagttgcccactgaataaaaacacacatcatattactatgtgttgtcatacatgcattgtaatgagtggatattccaaagcaattggtccctttatccctccttaatccttatgccgtaaatggcaccatcccttgtaaattgtaattgcttcttcagaaatagaattatacaaaggtagttgcaatatctatttgccaaactataaatgtaaagacccttcttcccaatcctagtagtgtcccaattgtatttacaaaggtgggacaagatatgtatatacaagtacaaccatgtaacataatgtaacaataatcatactttggtctttactagtgcacattacagggagttattatgcactgaaacccctttgcagagaactccagggattggaaggaatactgacacaagcttgtgctgaagcctcagccatttgttcattctttatccctacattgcagatgtttgcaaggacctatgtgt

SEQ ID NO: 214638 - DNA, 530 bp, Glycine max
gttaaaagccttagccttccctacaactccaaacacaaagacatcatcatccatggctgcctccgtctccactgtcggagctgtcaacagagctcttttgaacctgaatggttctggagctggagcttcagctcccagttcagccttctttgggaccagcttgaagaaggttattgcctcaagggtccccaacagcaaggtttccggtggaagcttcaagattgttgctgtagaacagaagaaagagattggagagacccagcagaccgacaaggacagatggaagggtcttgcctatgatatctcagacgaccaacaagacatcacaagaggaaagggtttggttgactcccttttccaagctccacaggatgctggaactcactatgcaggcatgagctcctacgagtacctcagcactggacttcgccagtacttggacaacaaaatggatggattctacattgctccagcttttatggacaagctagttgttcacatctccaagactttatgaccctgcccacatc

SEQ ID NO: 214639 - DNA, 588 bp, Glycine max
gtagatggtccagattagtaccacaaaaatggagaaatagaataactgaatatcgtatagctcaaaataaagatttaaccaaatgcaattcatatgaaaaaagccaattaattctttacaaagaacaacaagtaaacgcattaaaaaaaaaaattagaaaacaatatagatacgatcttttatcctataattttatcaattatgcagataagaaagactcatatatttatggatatagatccctatttcaagtaaaaaaaaaccaagtgatttcttctaattacaacacgtataaaaaagaattattggatatcatagataatctctttatcaagaattatatatcggaagatgcgattctagatatggaaaaaaatatgtatagaaagtattttgattggatgggaatcaatagagaaatactaaatcgttccatatcgaatccagaattttgtttctttcaaaatttgtgatattttatgacgcatataggggtaactcgcaaggtataccaatcaaattacttttttttctttaatggaaatcaaatgttgggaaaataaaagacattctagaaagaaaaaatga

SEQ ID NO: 214640 - DNA, 518 bp, Glycine max
gatctcttgttcttgtaatatatttataaaaatttttcttattaacatgaattttttctgggtatttgtgataaatttttcgtttattcttttgaattaatgaaagacctatggtttgatacataaaaaattgtttattgttttttctagacaggcgaactggttcgataacaaatatttcttttttcataaatttgttatttttctttttccttaagcctagaagaattaaattcttctgattttgaatcatcataatatctagacctagttctcctctttgaatagaggctattgtaatttctcttaaattttttaatctaatcaggagacaatatactttgacattgttaaatattctttgacctaagaaattattccaatttaaatgtaaaatcaaaaaatttcttagtaagaaattaagttctgcctccatcttgttcttggctttctttttctttatacccttactattcttttcactgtctgatcctacataatcgttttcaatatctttt

SEQ ID NO: 214641 - DNA, 437 bp, Glycine max
gtgactcccgcggccttccaggagtgaggaaggaagtggctgagttcatactcaggcgtgatggttatccaactgatccagaactcatatatctcactgatggtgccagcaagggggtgatgcagatattaaatactatcatcagaggtcaagacgatgggattttggttccagtcccacaatacccactctactcagcaacaattgctctgcttggtggtacccttgttccatactaccttgaagagacagcaaattggggtcttgatgttaatgaacttcgtcaatcagttgagcaggctcgctttaaaggaataactgttaaagcaatggtgatcataaatcctggaaaccctactggtcaatgccttagtgaagcttatctaagagaagttttgcaattctggtatcaagaaatttaaccttgcttggagatg

SEQ ID NO: 214642 - DNA, 483 bp, Glycine max
attgtaagttcagagatgatatagaagaaagtgtaaggtttaagaattatctccaaggacaaatagtagaaagggaggttatgtttttcttacaaaagcacaagagtataatgcatcttttacgataattttcttacaaccttgaataacctctattgtcttcgtattgctccatgaattcatcattgaactttttgaaactatccataatagcgggcatgtcttcctcgtctggtaaaatagtagtcctcaaatggaagaccccttctctctgtccaaatcctgaaccaggaacagtggatatgccagtggcttccaaaagtttgaggcagtagaaaacatctggaacctttgcagcctgtttagcagcctctaaagctcttggcggcaaacgtatttgagggaatgaatacatggcaccttcagtaaaattacaaaccacatttctgcaactgttgaatccatcagtcattagccttgctc

SEQ ID NO: 214643 - DNA, 503 bp, Glycine max
gctcttcaagagcgtattacaacaaccaagaagggttcaattacctctgtccaagctatctatgtgcctgctgatgacttgacagatcctgctcctgctaccacttttgctcacttggatgccacaacagtgttgtcacgacagatctccgagcttggtatctatcctgctgttgatcccttggattctacatctcgtatgctttccccccttattttgggtgcggatcactacgaaactgctcgtggtgtacagaaagtgcttcagaactacaagaatcttcaagatatcattgctattttgggaatggatgagctcagtgaagatgataaattgactgttgcccgtgcccgtaagattcagcgattcttaagccaacctttccatgttgctgaagtcttcactggtgccccaggaaaatatgttgagttgaaggagaacgttgccagctttcatggtgtgttggatggaaatacgatgacctttcaagcaatcgtttacat

SEQ ID NO: 214644 - DNA, 528 bp, Glycine max
acgctggccatggaccaggtggaacagttgcagagtttttaacattaatgcatccaacgttctcaaccagaaagtaaaaaatgtacatcctcttgcccttttccccttattaaataacacaacttaaaaacaggggggcagtttggccacagacattgaccgtagttcatctcacagtcggcaacattaaaatggaaggaaggaataacctgatacattttcatacccaaaaaatggaaaattttgttgtttggcattgccaagagttcctaaattattaaatttagcaattacaaaaaaaaaagggattaaaatgagaacagggctgtgtgtgattaagacgctgcagattccttagcaattttctcggcctttgcaatgacctcctcaataccgccaaccatgtaaaacgactgctctggaaggtcatcgtattttccatccaacacaccctggaagctggcaacgttctccttcactcaacatattttcctggggcaccagtgaagacttcagcaacatggaaag

SEQ ID NO: 214645 - DNA, 504 bp, Glycine max
ctcattgccgcaaatgactcctcctgctagtgttaggtgaattccctcgcttcacatgcatgatcgcaccttcaactctcttcttcttcttcttctccatggctttttttcaaggttttggcgccgtggagttcgttttgtagcatcaccgtatcatcagcttcagcttgctttcaccaaaacggctttactatttggtgtgttccatgtcacaaaaaacgaaaggagatattccttttacccactcctcgtcagggaagatctgaagcagcgctagcagcacacgttctctaatggacgccgactcctctggagaagaagtggttattaaaacaagaaaaccatatactatcacaaagcaaagagaacgatggacagaggaagaacataacaagatttctagaagccttgaagctatacgggcgagcatggcagcgcatagaagagcatataggaacagagactgctgtacaaatcaggagtcatgctcagaaattctttaca

SEQ ID NO: 214646 - DNA, 552 bp, Glycine max
ggtacttaatgtttcttgtctaagtctattttagcggagtttttaactgcagtaacatcaggccaagaaagtaaaaagtgtgtatgtagtaatttaatatggtacacagacctacacgacaagtttcgtgagctgcagaattagaaaataagcaatacagacaatgaacaaggaaacttagaaatatatgcaaaactagagattttctttgtgtggttgcatgggaatatcaggcatcaagttgaagcctccccattcaagcgtaatctcttgggacctttttcttcaccttggatgcaggctgttccgatcctgttttcattggcctctaccgaacatcttttgtaaggtttaaaccctgttcgacgagtctttagctttcctggtccaagacctatggttagcagtccctcctcctcattggtatctttgacaaatagcagatttttctgcaccccatcacaaatagaactgcatttcttgctttcaaggtcttcatctttgtagtctgtgtttagctcgttatccttgatgctatctatctcgatatct

SEQ ID NO: 214647 - DNA, 484 bp, Glycine max
cttttgtaaagcttttttttttttctatgcactacactctttggaaggaacgagccatgggggagttaggttctgcacgctctgcttccagcgagtgttctttcttcgtttcaacaccttaatttgcaccacgcttgttttttcagcttgagaaatggcacaagaaacctttctattcacatctgaatctgtaaacgagggtcaccccgacaagctgtgcgaccagatctctgatgcagtgctcgatgcgtgccttgaacaggaccctgacagcaaggttgcctgtgagacatgcaccaagaccaacatggtcatggtctttggagagatcacaaccaaggccaacgtagactatgagaagattgttccgtgacacatgccgcgaaattggattcatctctgatgatgttggtcttgatgctgaacaagcaaggtgttggtcaacattgagcagcagagccctgatatcgccaaggtgtgcacg

SEQ ID NO: 214648 - DNA, 537 bp, Glycine max
cgattgcaagaggaaaagaagaagattaaaggctccatcgaaatcaatttcccacagggtcaaacaaatggttggagttggaaaacaaaacaagagaaaatgggtggacgcaagtgtttgttaacgtttggtgttgagtttggtgttgatgatgagtatggcagaggcgcaatctggtactagcgcagactgcgcccaggagctaattccatgcctggactaccttaatggcacgatcaacccaccaagctcctgctgcgaccctctgaaacgaacagtccaaaacgaactcgcctgcctctgtaacatctacttctcccctggccttcttcaaagcgtcaatgtcactgtcgatgaggctctcggcctcagtcgccgctgcggcgtcactagcgatctcagcagctgcaaaaacgggtcagcttcagcttcgggttcacggccaccaccagccacttctggaggtgacaaaagaggagcaagcacagtcacattcaccgggctttctttcctccttttattttggtgtctatgctg

SEQ ID NO: 214649 - DNA, 512 bp, Glycine max
  unsure (1)..(512): unsure at all n locations
atcccgtagccatcgatccccnncnnnntnnnnnnnnnncnnnnnnnnnnnnnnnnnnnnnnnnnnnnnnnnnnnnnnnnnnnttttnnntnnnnnnnnnnnnnnnnnnnnnnnnggggnnnggggnnnnnnnnnnnnnnnnnnnnnnnnnnnnnnnnnnnnntnnnntnntnngnggggttgaaatacaaagataacttcaacatagtagaggctccgaaggataaacaaccaccttcctaattaaacagcatagacacccaaaataagaggaggaaagaaagcccggtgaatgtgactgtgcctgctcctcctttgtcacctccaggagtggctggtggtggccgtgaacccggagctggagctgacccgtttttgcagctgctgagatcgctagtgacgccgcaacggcgactgaggccgagagcctcatcgacagtgacattgacgctttgaagaaggccaggggagaagtaaatgttacagaggcaggcgagttcgttttggactgt

SEQ ID NO: 214650 - DNA, 521 bp, Glycine max
ctctgtcaattaatcaaaagaatgaactaacggatactataattactgataatgtcaggttagaacaagatattgttaagccggagatggtggaagaaccatcatacagaaatgatgtttctgttttttatgatgaatcacattcaatggatgttggagggctgcatgagaaaaaggcatctgtggaagaaaatatcaataatgtttcaagtccagacttgaacaagaccaatagcagtgatgatgtagggtattcagaaaagttgaacttggacagaagttctggtgatgattctatggaagaggatttgcctgagactaagcaaattgattctaagtttaatgttgatgaacttaaagacaaagtttagattgaaaagcctattgtgaatgaggaaagttgtactatagctgttggagatagtctatctgcaggaaaagatgatacccaccaagatattgacattagtcctgctgccctgactgagaaacggaaatttaatgaagttgggaacagtgag

SEQ ID NO: 214651 - DNA, 541 bp, Glycine max
  unsure (1)..(541): unsure at all n locations
atccaatgatcgcattccgnatncnnaannncnnnnnttnnnnnnnnnnnnnccnnnnnnnnnnnnnnnnnnnnnnnnnnnnnnnnnnnnnnnnnnnnnnnnnnnnnntttttntnttttttnnnnnntnnnnntnntnttnttttgggggntttgggtgtttttttttttttttttttttttttttttttttttttttttttttttttttgttgtgtaaatttatccaaccccagacgcttttaattcaccacttctaaaactaaaaaaatttaactctcaaaatacattaccaatgacaattttttcccaaaacaaaacaccaccagatcttcccacaagacccattcaaaataatcccatagcactaataaaaatctccaaatcatttaaagggcttcaagggaaaaattgcccgctaatggcctatctactgcctcccccttttaccctgtgttgaaaattttgcggcaactttctcttcaaacaaaggtgttatagctaaacccacgagtcccctgggttttgcccaaaaaatcat

SEQ ID NO: 214652 - DNA, 500 bp, Glycine max
ctctgtcaattaatcaaaagaatgaactaaaggatactataattactgataatgtcaaattagaacaagatattgttaagccggagatggtggaagaaccatcatccagaaatgatgttcctgtttcttatgatgaatcacattcaatggatgttggagggctgcatgagaaaaaggcatctgttgaagaaaatatcaataatgtttcaagtccagacttgaacaagaccaatagcagtgatgatgttgggtattcagaaaagttgaacttggacagaagttctggtgatgattctatggaagaggatttgcctgagactaagcaaattgattctaagtttaatgttgatgaacttaaagacaaagtagagattgaaaagcctattgtgaaggaggaaagtagtactatagctgttggagatagtctatctgcaggaaaagatgatacccaccaagatattgacattagtcctgctgccctgactgagaaacggaaattt

SEQ ID NO: 214653 - DNA, 470 bp, Glycine max
cgaaatttctcagccaaagaacaaggatcagaatcgcttaatcaagttgaggaagatggcactagtctccggaggaagatcaacactgaaccctaacgcccctctttacattcccgccgcgttccgccaagcggaggatttttctacacaatggcggcaggtggtgacgacactgacatggaaccatgactactggctaagccagcagcacgatgatggagccttctatggtgaggatgggtttgatggcaatgatggggccgatttacttactgattcgactgattttgatgctggtgaagatatttctgcagagtttattcggtcgtgtgaatcccacgaagaaactggacccaaaggaactgcatgagcttctacagatgaacccttatagaagaagctaccaatctaagagactgggcccaacgccttagctttaggccatttaactgatatgggtgataatgttg

SEQ ID NO: 214654 - DNA, 544 bp, Glycine max
gaataattgtaggttgtagcagcttttacaacatcagtacataaaacagtcacatttttttctccatctttttcctttccctatttaccatacattttggcaaaaggcagagaaggatagattggaagtttgaaaccttgcctatacaagaagttacaggaagttgaagctacggataacaacatgatacaaacatatcagctaaatgacctaaagctaaggccttgggtccagtctcttaggttggtagcttcttttaaaagggttcatctctaaaagctcatgcagttcctttgggtccagtttcttcttgggattcagaagatcgaataaactcttcaaaaagatcttcaccagcatcaaaatcaaacgaatcaggaagcaaatcaaccacatcattgccatcaaacccatcctcgccatagaaggctccatcatcgtgctgctggcttagccagtagtcatggtaccatgtcagtgtcgtcaccagctgccaccattctggagaaaaatcctccacttggcggaacgcggccggaaatgt

SEQ ID NO: 214655 - DNA, 449 bp, Glycine max
  unsure (1)..(449): unsure at all n locations
gtccagggttcagcatcatcgggtagggcgcggagagatgctgcagcaagggctatgcagggttggcactcacaacgtctccttagcaatggtgaatttagtgatcctattattaaggataggaactctttgtctacacaaaagcgtgaaaagcagcttaaaaacatcaatttacttaaacgcaagaaatcatcagacacagttaatgctgtcaaagtggcacacagccaaccatctagaccacaatcggacacatatgtggttgacattggacctcctgctgattgggtaaaagtcaatgtgcaaaaaactaaagattgttttgaggtctatgctttagttcctggccttctgcgggaagaggtgcgtgttcaatcagacccagctggacgcttgtgtataagtggagagcccgagaattttgacaattcatggngggtgacaccttt

SEQ ID NO: 214656 - DNA, 463 bp, Glycine max
acaaccaacgttgcccctttactaaggggggattttaaacaatggttaaaattgtaaagcttttgacagggaaacatcgggggaaaaatttaaataaaaaattttttacctaattcagagttaataaaatcccggctgaatttggtttagggggcaacttttcttttaaccatgggaaaatagttcggcatgaatttatcaaccctttttattttgaggggcctcaaagggaacttgaacaaacaattgtccattccagggcaccacagcccacctctggtgagtatcaattcttgaagggaagctgacaacctttttgaaagggggccccccccatggattggcaaaatttttgggctttccaattatgaccaaacgttcagctgggtctgattgaacacccccctttttccgcagaagggccggaactaaagcatatacctcaaaacaatcttttgttttt

SEQ ID NO: 214657 - DNA, 485 bp, Glycine max
ccggctacatcgactacgaccgcttggaagaaaaagccctagacttcaggccaaaactcataatctgcggtggcagcgcgtaccctcgcgattgggactacaaacgtttcagggaagtcgctgataagtgcggagcattgcttctctgcgacatggcgcacactagcggccttgtggccgcgcaggaagtgaacagccccttcgagtattgcgacattgtgaccaccacgactcacaagagcttgcggggcccacgtgcggggatgatcttttaccggaagggccccaagccgccgaagaaggggcagccggagaacgcggtttatgatttcgaggacaagattaacttcgcggtgttcccttcgctgcagggtgggccccacaaccaccagatcggtgctctcgccgtggcgctgaagcatgccgcgtcgcccgggtttaagcctacgcgaagcatgttaaggcgaacgccgttgcgcttggaa

SEQ ID NO: 214658 - DNA, 493 bp, Glycine max
aaaaaagaaagaaaggcagcacgtattatttcaattgttaaataagaaaaaaaatatgatatcaatcaggctaacaaaattaaacatgaaatcaaagacaaagaaacttcaaacttttgaattgaaacaccatggcgataaaccctatcactcccaggaaaggaagacacatatttcctttttctccatttctgcactttgtgtcgaacttgagtgacacaatttagtagaaagtggtatggttgaacctaatccttgtacttcatttcagataccaggaagccaggcatgtcaaacaaggcagagaacttctcaacatcagctttgagatcttcaatagccttgttgttgacgagacccttgttgaaatccttgagaagtttgccatgctccttctggatctccagtgtgagagtcacagcacgggtgaaggaactcaccaatctgctcaaagtctttttcaaccaaaaccctagaagtcatggcaggggca

SEQ ID NO: 214659 - DNA, 415 bp, Glycine max
ccttccttcaccttcttcgttgcttgcggtgccctagattttctctatcctttcaatcgttcccgaattccctcccgctagggtttcccatggattccgaggacgatatgcacgacgccaacgatgtggagtcccttgacgacgatttctacagtggcgagaccgaggacgctcccatggattactacagtgactacgacgacgaagctgacgattacttcgacgatgctgacgattctgaccgggttgagtctcgccgccctgagcaaaactttacaatattgagggaattggatatccggcaaaggcaggaggatgacatagctagagtagcggcagttctttccataccgcgggtttctgcgagcatcctacttcgtcactacaactggagtgttagtaaggtgcatgatgc

SEQ ID NO: 214660 - DNA, 404 bp, Glycine max
catcatacactccctcttgtttagctgcttcataacgattgcaagcataaaatccaccagtcctttcaccatggtctgaccatgcaccaaggcatagccagcaaaactcaaatttacaaggaggagtacatgtcatatgcatgcacccttggtttttttcaattggtcgcttgcacttgggacatggttttgagttagcaagtatccagttcatgttttcagattcagcactatttttcaaaatccactttgaaacagtgccacagtcaactggacggtgagcctcctctgtgcaattccagcaaaagctatatgaacagaggcaagatacatcataatttccactgccagcatcaaaagtaactgcatattcacaacctggagcaggacaccacttggtcttc

SEQ ID NO: 214661 - DNA, 466 bp, Glycine max
  unsure (1)..(466): unsure at all n locations
gaaaaaatgaccaagatcttctttgtatcgctgttatgtctgatcatagcagcttcttctgggtttgtgaattgctttgatgttgaaaagaaggaaaagattgtaatatttgagctcaataaaggtgacctttctttgaaggtcaccaactggggtgcttcaattttgtccctggtgattcctgataagaatggaaagatgagtgatgttgctcttggatatgattctgttaaggattacactaatgatacaacatattttggagcaactgatggccgggttgcttacagaattggaggagctcagtctactctaaatggaatccattacaaattatgtgctaatgagggaaacaatacacttcatggtggagccagaggatntagtgatgttctttggaaagtgcatatgtatcaaaaagaaggttcaagtcccagcattaccttcagttaccacagttttgatg

SEQ ID NO: 214662 - DNA, 477 bp, Glycine max
cctaccacccaaaagagaagggattttattattaaatataattcacatatgtatcaaaaaagaattctgcattagaaatacagaatcaaaatatcaataaaaagcaacaaatccaaaccaaaaacatgtttagagaaacatcttgaaaggttctgaagctgccaccaattatgagactaaccatgggactctaattattcattctaaaaggaccccaagtttggatgaaatccaaagttataaatgctacactgacttaccgtggcacattaaaaatgggggaaagctcactcctcctatctcactttgaactaatgtagggatttttggtggaaaacttaaaaagcatataatgcttgtaaggcttttctggtgtcacaattgttgaagggaaattaggctgattcactgaatcagggaaggcttgagactccaaacatagtcctgaatgagattggtacacatatccaccttttc

SEQ ID NO: 214663 - DNA, 494 bp, Glycine max
tatgcatctaagtttggagttgatgaaggaaaaatgatggaaaggctctggggtgaaaacttctttgatccagccacaaagaaatggtccagcaagaatactggttctgctacctgcaagcgtgggtttggttccaggtctgttacgagcccatcaagcagattattaacacttgtatgaatgatcagaaggataagctgtggcctatgctgcaaaagcttggggtcaccatgaaatctgaggagaaggacctaatgggcaaagcattgatgaagcgtgtcatgcaaacctggcttccagcaagtagtgcattactggaaatgatgatatttcatctaccctctccatcaacagcccaaaagtatcgtgtggagaatttgatgaaggtccccttgatgatcaatatgcttcggctatcagaaactgtgatcctgagggtcctctgatgctctatgtctcaaagatgattccagcatctgacaggggcagatttt

SEQ ID NO: 214664 - DNA, 586 bp, Glycine max
ctctgtcaattaatcaaaagaatgaactaaaggatactataattactgataatgtcaaattagaacaagatattgttaagccggagatggtggaagaaccatcatccagaaatgatgttcctgttttcttatgatgaatcacattcaatggatgttggagggctgcatgagaaaaaggcatctgttgaagaaaatatcaataatgtttcaagtccagacttgaacaagaccaatagcagtgatgatgtagggtattcagaaaagttgaacttggacagaagttctggtgatgattctatggaagaggatttgcctgagactaagcaaattgattctaagtttaatgttgatgaacttaaagacaaagtagagattgaaaagcctattgtgaaggaggaaagtagtactatagctgttggagatagtctatctgcaggaaaagatgatacccaccaagatattgacattagtcctgctgccctgactgagaaacggaaatttaatgaagttgggaacagtgagcctgccaaaggcaacgcaggtggaacactgaaacagttaaaggtccagatgcacaaagcactac

SEQ ID NO: 214665 - DNA, 405 bp, Glycine max
cacaattgaaattataaacacgactgttatatactaaacacttcacttatccaatttgggtagggtaacaatttaattgtattgagcgaatgggatcagaaagatggaccgctaactcccatttatgagttataatagaatccaccgaccaacttgctttgtcatccgacacaatcttttgattgcaaagatgttccagatacaatccaaactctatttttataagcgaatcaatcctactacttgtgcccctgaggtctctgcgcttgaaaaaaaaaaactgcgacggctcccccaaataatcggtccggccctagatggaccttttcccccagggaaaacgcctaatattgacaacgctatgatagtaaaggggagcgatactgttggctaacaaaataatgg

SEQ ID NO: 214666 - DNA, 476 bp, Glycine max
gaagcatctaagtgagatacacagttgttaggtagcaagcataagtgtctaaccttagaaacatatctgctacatatcgtgtgcattttggaattgtgccactaaaattctattcatctatggctgcctcatcttatgctatgcaatcaatccttgcaaaccctatgatccgcatttccagcgggtctagggagaaccattttggtgttcctgcttatcacatgagaaggaatgttggcctgagagttaggtccatggctgaggaagagcaaccaagtcagcctgcgaccccagttacaccaccaccagcagaacccaaaccacaggcagtctctactccttcaccaaaggtgagcaccaagttttctgatgtgttggcgttcagtgggccagcacctgagaggatcaatggaaggttggccatgattgggtttgtgggtgcaatggcagtggaagtagccaaagggcaaggtgtg

SEQ ID NO: 214667 - DNA, 619 bp, Glycine max
  unsure (1)..(619): unsure at all n locations
tgcgggtgtatgnatttaattccacacttcnggnanncccccntnnnnnnnattttnnnnnaannnacnnnnnnnnnnnnnnnnnnnnnannnnnnnannnnnannnnnanannantttnaantttttanaaaaaannaaaaanannanggggaagggggatatataattaattttttttttattaatatataattttttatntagttcaaaaagagattggtctttctaaccacgaatgacttaagaccattttggtgtgcattcatgactgaattacaccaaggtaccacccttaacatactcagtaaaagccatagcaaccaaacccaacatagcaaatctcccattccacagttctgcatctgaggacatgaaccctttggacttagactccacgctgatcccttggaagagtggaatcaatgaagcaagggtaaggaccacacttgttcccaagaaccatgggataccaccattggatatttgttcaaacacaccttgccctttggctacttccactgccattgcacccacaaacccaatcatggccaaccttccattgatcctctcaggtgctggcccactgaacgccaacacatcagaaaacttggttctca

SEQ ID NO: 214668 - DNA, 498 bp, Glycine max
cacaagactaattcattcaccaaaaagttcttcgcccctagtttgtgcccattctttgtgtgtaagatacttggaccatacgatcctctttctgtgactatcaaacatacatggctttcttgtcgtctaacacaaaaacagagccctaataaccaagaggaggatgagaaaccaataccacacgatcaaaacgtgctgccaaagcacgatgcgtactcacgacaggaaccacgatggcatcatatacccgcgggagactttgcaaggatttcgagcaagagggagtgggtactaattatcgcccgctgctgctatttacatcaatggaggactcagtcagaaaacccgcccgggaaagtttgctttaatactgctaccaatcgaagttcaaaacatccatacaaccacgcatggcagtgactctggtgtttacgatagtgaacgcaggggtgttctttcccaagttgaagaaatactcagccagcttgcttgaacaca

SEQ ID NO: 214669 - DNA, 404 bp, Glycine max
cactaacacaaacctcttccctcttctttttctatccaaatgctccggcagccatggcaggttcttcagcaacagcttcctccaaactcatactattcccccatgcatcatcatcctctttccttaattacaacagccttccgctcctccaccaccaacacccacaaactaacccctctctcctccttcttcctgcaccccaccaccgtcctccggcgcaccccttctttcaccaccaccccgcgtcgcaccttcaccgtccgcgccgcccgcggcaaattcgagcgcaagaagccccacgtgaacatcggcaccatcggacacgtcgaccacggcaagaccacccttaccgccgccctgaccatggctcttgccgccctaggcaacagcgccctcaaaaaata

SEQ ID NO: 214670 - DNA, 475 bp, Glycine max
tctctctagggtttgatcagactcaagggtttaagccatgggaaaaaggaaggcaaaggcaaagcctcctccaaagaagcgaatggataagctcgataccgtcttcagctgccctttctgcaatcatgggagcagcgtcgaatgccgccttgacatgaagaacttgataggggaagctatttgcgggatatgccaagagagctttagcactaccatcacagctttatcagagccaatagacatatacagtgagtggattgatgaatgtgaactggtaaaccacccggacgatgatggtgctgagcactgatgctcagattcctgttcttgtggttgtgaacggattaactggccaattttatatcttcaacctgtaactatgtcggttcctgatgtgagtgagcactggtgcaactataagatgcatgttatagcttagttatgtaatagcatgtgcaagaacatgagaataatt

SEQ ID NO: 214671 - DNA, 485 bp, Glycine max
  unsure (1)..(485): unsure at all n locations
caaaacgtaatcggaatccgaatnccnaaannccnnnttnnnnntttnnnnncnnnnnnnncnnnnnnnnnnnnnnnnnnnnnnnnnnnnnnnnnnnnnnnnnnnnnnnnnttttnttttttttttnnnntnnnnnntntttttttgtttttggtggtttttntnttttntttttttnttttttttttttttttttttttttttttttttttttcttttgtgaaaaaaaacacactctttacaaatgcaaccagcccccacataccaaaacagtataatagtattaaatattacaaactaccttctaatccagggggcttcatctaaataggacaattattctcatgttcttgcacatgctattacaaaactaagctattacatgcatcttataattgcaccagtgctcactcacatcaggaacccacataattacaggttgaaaaaataaaaatggccaattaatccgttcacaaccacaaaaa

SEQ ID NO: 214672 - DNA, 425 bp, Glycine max
cagcatcgtcctctcttgagtccccatatcaaatacccaccgtattcaacccggcatgtgacaaatctgctcccatcccatttttcagcaccaaagtttgaaacttttctcaattgggttgtggagaagttgactcaaattattatttttctagcgaaggatgcgctattagaagtgcgaaaattaaatgtccaacatcttcttggtgatggttgagattcatgtatccgattctcagggaaatctttttgtccgggtgtgtgatcaattccactgttaggcgcaggacccatttagttcaatgcttctgagatgcttaactctattggttgtgctaggtttcatgatttttaaacctgccttaggctaataatcatctactactagctattatgattattatgattattatcatccacgtcata

SEQ ID NO: 214673 - DNA, 449 bp, Glycine max
tccacctgctgccttctaagaggcaattgatcttcactgttagggccatgcaatcagaaaagacaacctatcaagtgattcaaccaatcaacggcgatcccttcattggaagcctggaaacctcagttacatacagtcccttgattgcatggaacttatcgagccttcccggatacaggaccgcagcgagccgattactaagagggatcgaagtgggcctggctcatgggtaccttctggtgggcccattcatgaaggccggacctctgaggaacaccgagatcgcctggcaagcaggctttgtcgccgttggagggctcgtggtgatctctaccctttgcctcacgatctatgggatttcatcttttaacgaatgagaccgatgcactgccatcgcactgaccttgactgtccggacgaaggatcccgatcagctgcaaactgctgat

SEQ ID NO: 214674 - DNA, 389 bp, Glycine max
aattgacaagaaccatcttttaaaagaaggcccaaacaggagagagagaatttaacattgaaacgtgtttggagtcatacaaaacactatttgccaccatttttatagcgcaaataaggagccattttcacccagtgtcctttcatcgggagtgaataaccacaaaaagtgaacaaggattataagccctttattcacttgatgtactaaggaaggttcaaaacgtataggcggaggttggcccaaaaaacacccgtaatgccttccaaaaaaaagccttcggtgaacttggcccgcccatcaacatatgggagctgatcgggcttatttttgccggcccctaaggtaactgacagggcaatgcttggctcttcttctatgaaagatga

SEQ ID NO: 214675 - DNA, 460 bp, Glycine max
caactacaaaggttgctgtaggagataagatattgaagtagtgctaagtgcctaacacctgcagtgaacaatggcctctgcatcagcatctcttctcaagtcttcacttgttcttgacaagtctgagtgggtgaagggacaaacacttcgccaaccttctgctgcatcagttgtgagatgcaaccccaccaccccatcaggcctcaccatcagagctggatcctatgctgatgagctcgttaagaccgcgaaaacagtggcttcaccagggaggggtattttggccatggatgagtccaatgctacctgtgggaagcgttcggcttcaattgggctagagaacactgaagctaaccgacaggcataccgtaccctccttgtgacagttccaggacttggtcagtacatctctggtgccattctctttgaggaaactctctaccaatccacaactgatggc

SEQ ID NO: 214676 - DNA, 546 bp, Glycine max
gattgccgagattcaaccatgtttgttatatattgagacataatcaatcaagtacaccactcacagcagaaggtttataagctgtaaaggtacatgtaaccataaacaaaaatagtctccaagactataaaaacattacattttagacaaattagtcttcttccacttcatcctccgtcaacacctactataactgctggtgttgctgctgcctaacatgtatcatattcactacatacatcttagtaggagtagcctttgacgaacaactccttcttggcttcctcggattcaccctcaccggtgtacttcccaagctgggcgagcgagttggacttggcacggaaaaggagtgcatcttgtgccgccttcacgttctctgggcggcctccccatgtcttcaaggcagtgttttggagggctctggcatacgagaacgacacgtgccacgggtttggagattggttcatggcattcaagttgagggtagcttcaacctcagactgtccaccagacaaaaacataattccagggacagcaggggga

SEQ ID NO: 214677 - DNA, 582 bp, Glycine max
  unsure (1)..(582): unsure at all n locations
gtcggtgatattggaaagggagaagtctttgttcctgagagtgttgtgcagtttggtgcccgagaggcggggcgagatggtgtccaaactttgaaagctgaggatcacaggataaaatatgatggggtacaccatgggtctagctatctggaacaccttaacttcttgtctgcaatcagagcaaaaggagaaaaggctcctagtgtagatctccaagatggattaatatctgttgctatgggagttgcagcacagctctctatagaatatggtcgatttgtttctattcaggaagttatgaatgagtgcaaaatttgagtgttgcaacttggaagtgagagtaatggttgactctgctgctatgtgttctttgacaaagggatgctgtattgttgctatcactgcctcaagaaaaagtgcaaaatgatttgtgaaatttacatttctttcacctaaactttaatcaattgggaactttagctcctatgttttctgcaacttattttctgtaaactgaaacaagtggaatgttaggaataagagctgaaaattttagcccnngngccaaagatttgatggtct

SEQ ID NO: 214678 - DNA, 497 bp, Glycine max
  unsure (1)..(497): unsure at all n locations
ctccaacttaatccgattncgcnatnccnnannnncnnntttnnnnnntnnnnncccnnngngggnnnnntnnntnnnnntgnnnnnnnnnnnnnnnnnnnnnnnttttttntntttttntttttntntttttttttttggggttgtgtttttttttttttctttttttttttttttttttttttttttttttttgtnggggtgntttttgttttaaacaaaaaaacttttccatcctccaaaaacttctacttacaaaaaaaaaagacttatatcacccaatccaacaagatcaactacaaaaaaaatttaactttccaaaacctacccactcttttttagacctcaaaaacattaatattagctttcttttcctaaaaaacacttacttgtttaaccacaataaaccttacctttaaactttccaaacaaaaataatgaactgcacataacccccaaaaaaaaaaaaaataaagccttttttaaaaaaagcgtcc

SEQ ID NO: 214679 - DNA, 352 bp, Glycine max
atccacacactccattttcgattcctttccatttctccgttccccttggaacgttttgtctctgtgtgtctcgatagggcaaaaaccatgaacatcttcaggctcgccggagatatgacccatctttttaagaattctcgtcctcctcctcaaaatctacgccaccaaatcatgctcagggatttctcgcaagactcaagagctctacgcgattgtgttcgtggcacgctatttggatctgttcacggacttcatctccgtttacaacaccttcatgaaggtggtgttcattgccagctccttagccattgtttggtgcatgcgttttcaccccatggtcaggaagaagtta

SEQ ID NO: 214680 - DNA, 419 bp, Glycine max
cccaatgttagattcccgtgtcagagatctcttggactttagcatcgacctagacattagcagtgagggcaaattcacttggaaaattcagagagacatggcagagcgtgcacacacttttgaaaactttcatgctagcattgaagcaaggaagcctgattttgaagcatatattgatccacaaaagcaatacgcagatgcagcgatagaagtgttgcccacgcaactcattccagatgacaacgagggtaagattttgagagtgagattgacacagaaagagggggttaagtactttaacccggctcacttgcttgatgatggctctaccattttatggataccatgtggaagaaagctaacatgcttcctccctggcatcaaatcttttattgacctgcgacttactacggaaatga

SEQ ID NO: 214681 - DNA, 635 bp, Glycine max
  unsure (1)..(635): unsure at all n locations
ctgaaaagtggcatcgngaagtccnccattnncganannnnccnnnnnnnnnnnnnnttnnnnnnnnnnnnnnnnncnnnnnnnnnnnnnnnnnnnnnnnnnnnnnnnnnnnnnnnnnnnnnnnnnnnnnnttttnnnnntttttntnnntntnnnntntttttttnttttntgtgttgggggntntttttntnttntnttgtnttnnttttttntttttttttttttttttttttttttttntttttttntttgtcaaaatcacatgaaataaagtggaattgtggaaaacatcaaagaagaaagaaaatgatgattttgatcatgagagaactcaatttggctgcgatgctccatcgatatatgtatatatattatggcaggttcaattcctaagcttttgcagctactggagtctcagccttgctggctattaactgctcatatagatctcttatcttcaaaccaactattgttagcaagagacctgttccattgctgctgccccgaaaatcagcatgcttcaacatctgttgagtaacctctccatagaactttgaagagacgttgcttaggtggctctcaacgtatattagttcatctagtctgtcaaattgtccatccatttctacaac

SEQ ID NO: 214682 - DNA, 436 bp, Glycine max
gttggggaaaggacgtctgaggactttgaaagcatgcttgctgcaggtgatgcagtgtgggatcccaacagaacagttattcatatagatcccaacaacaaagacgagatggaattttggggaggaaataacagtaatggtgctctcatggcaaagaataactttgcagtcaacaaggctgtagctcttgtatgccaaaacttcacttgtagcccctctgtgactgaccattcgtcacttaaagctttgctcttcaaaaaaaccttgctcttagttcacgtaagctattgtgtctgatgaagtggaaaatagtcaacgtcggcgagagcttcctcttagagatgccgctctcaatctacagaactagttgggtctgacttctctgtcagaataaagaaaggcggcattctctgctgacttgaggaattgatgcatg

SEQ ID NO: 214683 - DNA, 484 bp, Glycine max
cagcatcgtcctctcttgagtccccatatcaaatacccaccgaattcaaccccgcatataggcaaatctcctcccatcccatttttcagcaccaaaggttgaaacttttctcaattggggttgaggagaggtttgactcatatttttatttttctaacgaagcagtggctattagaagtgcaaaaattaaatgtccaacatcttcttgttgatgtttgagattcatgtatccgattctcagagaaatcttcttttccgggtgtatgatcaattccactgttaggcgcaggacccatttagttcaatccttctcagatgctttcctctattggttgagctacgttgcatgatttctaaaccttccttagtctaataatgatctactgctaggtattattatgattattattattatcatcatcatcctatataatgaaatctatctgcaatattatttttgtgagtttgtgtctagttagtgact

SEQ ID NO: 214684 - DNA, 555 bp, Glycine max
  unsure (1)..(555): unsure at all n locations
tgaaatgactccgatcccattncnnnnncnnnnttnnnnnnnnnnnnnnnnnnnnnnnnnnnnnnnnnnnnnnnnnnnnnnnnnnnnnnnnnnnnnnnnnnnnnnnttttnnnnnttttnntnnnnnnnnnntttnttnntnntttntggttttgggtttttttttnnttttttttttgttttttnttttttngttttttttttttttttttcgttttacgatacacattcattattattattccttatcaccatatggtactgattacaatttctcaacacactcaaacctacaagaataagaagaaatcctcatcaaatctcagactcacagaccatgcatctcaatactgcaatatatccgcaaaaaccataatatggtggttcagataccccatattcaacgggttgaagaagctattattattaattggctcaaccaaggtgctcgatcatgctgctgctacaaaacccgacacagtggtgccattcaacacgtcaacgatctcattcagagactctaacctgtgactaagctcacccacctgaacccta

SEQ ID NO: 214685 - DNA, 465 bp, Glycine max
gtccaacccaaccctcaagatgagtgtctcctccccattcatgaacaccacctgaaaagcctataccatgtctgaagtcagaaggcacaacaacgccgattcggcttggatcatagtccacggtcatgtctatgattgcacccgcttcctcaaagaccatcccggtggcacagacagcatcctcatcaacgccggcaccgactgcaccgaggagttcgaagccatccactccgacaaagccaagcaaatgcttgaagactaccgaatcggcgagctcaccaccacctgctacaactctgattcttcatcgtcaaacccctccgtgcatggcagctccgacaccatccctttgacccccatcaaggaagtgattacaccaatgcgaagcgtggctcttaacccacgcgagaaaattccatgcaagctcatctccaaaacctccatctctcacgacgttaggctttt

SEQ ID NO: 214686 - DNA, 539 bp, Glycine max
  unsure (1)..(539): unsure at all n locations
caaaaaaaaaacttaangctgcatgcccgcaatgccgccattnccnnanannncnnnttnnnnnnnnnnnnnnccnnnnnnnnnnnnngnngnnnnnnnnnnnnnnnnnnnnnnnntnnnnnnnnnnnnnnnnnntttnnnnnnttnnnnnnnnnnnnnnnnnnnnnnnnnngggggggggggnggnnnnnnnnnnnnnnnnnnnnnnnnntntntnnttnttttntttttttttttggttgtttttgcccaacttctccaaattctgctggactgcaaattgaatcataggtggtggtccacaagtcaatgccaaggtatcacgagatgcatttggaatattctccgtcaggatactttcagtgatgaatcccacactgtattcccacccttctcttatgctttcttgtatcacgtaccacaccttcaacctatcatacttcttagcccactcatcaagctcttccttcagcaatatatcatcctcggttcggttcgcgtaaaccacatgcatctcggtgcagtcctctggatccttt

SEQ ID NO: 214687 - DNA, 603 bp, Glycine max
  unsure (1)..(603): unsure at all n locations
cggctcgagcggctcgagcagcccttgaccgtctagcatctctgcatattgattacccaatgttgtttgaactccgtaatgatgctgccgagcgggtttctcattgtggggttctggagttcattgctgaagaaggcatgatatacatgccatactggatgattgagaacatgcttttacaagagggggacattgataaagtgaaaaatgtgacacttccaaaggggacatatgttaagttacagtctcacacaaaagacttcttggatatttccaatccaaaagctatcttagaaacaacattgaggaatttttcctgcttgactactggagatagcatcatggtggcttacaacaacaagaaatattacatagatattatagaaactaagcctgacaatgccataagcataattgagactgactgtgaggtggactttgctcctaccttggattacaaggaacctgaataacccattgcacccctttctgcctgaaggcagcagtggctgctgangagacccctgctgaagaggagcccaagtcaacccattttctggaaactggagacgcttggatggaaaccattaattatcagcctct

SEQ ID NO: 214688 - DNA, 566 bp, Glycine max
caggattctagagaggcacacaagagcttaatcttgttctttctattctcatgaatagctagtatttatatcaatgataaatgtttctttgggttaagtggttactacctcttcatggtaattgtcatctttgctctgtgttgatgttttatgattttgggaatattgtgcatggtacactatatgccttggatgacagacttgattggtgcagttcccaagtttactatacccctttaattcctgattatttaactatactttaagggattgatgagtctgtactgctgttgcagtattatttcgacacgttgtatcctcgcatccctgttcctgtattgcggcaggttgtgtctaatcttgaaaagttgaagctccccactacacattctggttcaacaggtgaaactactcgtcacggttctgatgatactgcccgaagaccaccttctgttaaagctgccctttctgactcatttggtcaacgggctgcacatcgggctttcacaagggattctttacctattcgacgtacattaccttatcatgaaaaagatggcagtgat

SEQ ID NO: 214689 - DNA, 587 bp, Glycine max
ctgaggcctgtgcggtgctctgagaggaggggccatagtttgggaccctttgaaccctaatctccacccaaacccattttcccgggaagttccctctgaaacgaagacgaaaatgcagaatcacaggctgaagcagcaggaacaagctctgatgcagcaagctcttctccaacaacagtctctctaccaccctggtctacttgctcctcctcagattgaaccaattccaagtggaaatctgcctcctggttttgatccaagtacttgccgcagtgtgtatgtcgggaacatccatacgcaggtaactgagccgcttttgcaagaagtttttgcgggtactggcccagttgaagcttgtaagcttatcagaaaggataagtcatcctatggattcattcattactttgatcgcagatctgctgctcttgccatattatctctcaatggaaggcatctatttgggcagcctatcaaagttaagtgggcatatgcgagtggtcagagagaggatacgtcaggtcattacaacatttttgttgcgatctaagtcctgaggtactgatgctacgctgttgcatgctttctgc

SEQ ID NO: 214690 - DNA, 554 bp, Glycine max
ctttgatgacattagcctcctctctgatggtcaaatagtataccaaggacctcgtgaggtcgtccttgaattttttgaatctaagggtttcagatgtcctgagaggaaagccatctttcttcaaaaaaaaattcagatatatctatattccatgacatgtgacttcaaggaaggatcagcagttccgtttgataagagaaagaaccacccagcagcattaactactatgaagtacggggtaaacaagaaggagcttttgaaagctaacttctctagggagtatttactaatgaagaggaatgcattggtttacatcttcaagctatctcaagttagttttagttcgcgtttaaatgcaattatgtttgattattacatgattttaatgtgcgatttttctgcttcctttcaccactagcttgcactgatggtagtgttagcaatgacaggatttctgcgaactgaaatgcacaaggattctgtggataaagggggagtttacaccggtgctctttttttcttatagcaatgatcttgtataacggaatgactga

SEQ ID NO: 214691 - DNA, 544 bp, Glycine max
  unsure (1)..(544): unsure at all n locations
tacaatttaattgaatcccatnncaaanacnaaaannnnatnnnancnangngccgaggggaaaaaaaaaaaaaaagaaaaaaaaanaaaaattataaaaagaaaaaaaaaaaanaaattggggggagggggaaaaaaaaaaaaaataaaaaaaaaaaaaaaaaaaaaaagnaannaaagaagggggttgngcactcattcccctaaaattttaaaccctctttaaattttaaattatccccttaccaaatcaaaacccctttccaaaaacccaaacattataccaaaatgaattgaaaccccaaaaatcccccctcctacaccccctccaaaatattttttttaaccaaatttttttttaaaaaactttttcactttacttttaaacccacccgcccttttatcaacccccacatttaaacccccccaccccttttactttcaacccccaagacattcccaataataccctttccccccccccggatttttaaccccaccaccctaaaatttccccccccccttaaatttcccccaacccttt

SEQ ID NO: 214692 - DNA, 408 bp, Glycine max
attgaagttaaaagccttagccttccctacaactccaaacacaaagacatcatcatccatggctgcctccgtctccactgtcggagctgtcaacagagctcttttgaacctgaatggttctggagctgggagctttagctcccagttcagccttctttgggaccagcttgaagaaggttattgcctcaagggtccccaacagcaaggtttccggtggaagcttcaagattgttgctgttgaagagaagaaagagattgaagagacccagcagaccgacaaggacagatggaagggtcttgcctatgatattttagacgaccaacaagacattacaagaggaaaggggtttggttgactcccttttccaagcttcacaggatgctggaactcactatgcagacatgagc

SEQ ID NO: 214693 - DNA, 166 bp, Glycine max
tacacgcaagttccatcacaacttctagcacttggattagtacaacaaccttcacgaacagaaatatttacttgccaagtttgctttgcctccaattcaagactggaagaaagttcccctctgaatacatcctcgttggcatttccaaaaagcagcctcgttcaag

SEQ ID NO: 214694 - DNA, 377 bp, Glycine max
gaaaattctctttagagagatagagagaggaagaaagaatggcagcttgcactgtctactcaacacaatctctgagcacaaattgctccatctcaaccccatcaaagacgcaacttagtttttttcaaccaaaagcaggtagttttctggaggaacagcaagaagggcagctgcagcagcagaagaagctatgtgataacatgtgcagcaggagactcacagacagtggtgattggcctggctgcagactcagggtgtgggaagagcaccttcatgaggaggctgaccagtgtgtttggaggagcagcacagccaccaaagggtggcaaccctgacttcaacactcttatcagagacaccaccactggcatatgctt

SEQ ID NO: 214695 - DNA, 528 bp, Glycine max
  unsure (1)..(528): unsure at all n locations
ctgcaatccatcctcattcngaatnnccnanaancannnttnannanaanaaaaacnnaaaaaananggagggaaaaaaaaaaaaaaaaaaanaaaaaaaaaaaaattttaattttttaaaaaaatattttattattttttaaattggtgtatattttaaaatatatttttattattattatataaatattataattattattaatttttattctaaaccccctaataacaatttacaaaataacataaaataaattggaattgtgcaaaacatcaaataacaaagaaaattattattttgatcattacacaactcaatttccctccattcctctatcaatatatccctatatattattgcaagttcaattcctaagcttttgcctctactggaatctcaaccttcctagctattatctactcatatacatctcttatcttcaaaccaactattgtttgaaatacaccttttccattgtttcttcctgaaaactcagcattcttcaacatcttttgaataacctctcc

SEQ ID NO: 214696 - DNA, 535 bp, Glycine max
ctttcccttcccactgggataggtattgtggttgcaggacctagagctattgaggcctgaaaacatgctaaatcacttcgagttttctttgactggaaagactacctgaaattctaccagctaggaacgtattgcccatacactccttccatacatttgctgtatggactgagagctgctcttgatctgatttttgaggaaggacttgaaaatgtgattgcaagacacagtcgtttaggcaaagcaaccagacttgctgtagaggcatggggtttgaagaattgcacccaaaaggaagagtggtacagtgacactgcgactgctgttcttgttcctgcttacattgatagtactgaaatagttagaagggcatggaagagatacaatttgagcttaggtcttggactgaacaaagttgctgggaaggtttatcagaattggacatcttggcaacttgaatgagttgcaactgttgggatgtctagctggaggtggagatgatactgaaagatgtgggctatcctgtaaagcttgg

SEQ ID NO: 214697 - DNA, 587 bp, Glycine max
  unsure (1)..(587): unsure at all n locations
cganaatatagcattgaatacccaatnccnnnnnnncnnntttnnnnnnnnnnnncnnnnnnnnnnnnnnnngnnnnnnnnnnnnnnnnnnnnnnnnnnnnnnnnnnnnnnttttnnnnnnnnnnnnnnnnnnnnnnnnnnnnnggggnngggggnnnnnnnnnnnnnnnnnnnnnnnnnnnnnnnnnnnnnnnnnnnggnnngnnnnngagggnaatttatattttacagaatttccgaaagatcagaaaaaatgaagtaaacacaagaatgacttgtgactcaaatcctccaagggatcataggaatagtgtcctgtaaatatgcactgtcagcagcaactccacttccaagctttacaggataacccacatctttcagtatcatctccacaccagctagacatcccaacatttgcaactcattcaagttgccaagatgtccaattctgaaaaccttcccagcaactttgttcaatccaagacctaacctcaaattgtatctcttccatgcccttctaactatttcagtactatcaatgtaagcagtaacaacaacagcagtcacaatgtcactgtaccactctt

SEQ ID NO: 214698 - DNA, 580 bp, Glycine max
agtatgaatattatgacatgttttatattggtaatgttacgtttgatctatgtctcttctccatctatttctggctttggctttgctttgaatgacttaaaacaattttctcaactaatagaatatggccttgggccagagtctccacaaattgcaaactgcttttactaaatgaaattgactacatatgctgcctcttttttatcctttattcgagcagatcttcccatttgcagtactgccctcctgctaatgctcgataatacctattcctacagtagacaggtcttccatcagcagcctcagcagcagcagctgctagagcatcatcagttatcacctcgactggtaattaaagcagctcctcttttcttaagagctttgtgttaaccttgggagcttgaacagttgatttaatttcttctttggtaaaggtcgttcgaaaaaaattctccaatggtgtagcaaagataaatagcataactccctgaacaagcaatgctcctgtcccaactagagtttgtttcaacaatttaacgactgggttaacctttgtagagcccaacattctatcacgagc

SEQ ID NO: 214699 - DNA, 515 bp, Glycine max
agccgtgttgtgaagagtcagagacaattgatggatcctgggaatgttggttcgacgatgcatgcatcggtgacatggattactttgtgaagaccctttcaagcatcaaacagaaaggtgctcgtgcagacttgattggttccatcatcactcattatgcctccatatggctccctgacctctcttcctctgctgaaaatggtgtcaccactcacttccaatccctcgaaagcgtcacaaattcatggatgaagaagaggttctttgtggaaaccttggagagtgttctgcctcctgagaaggattctgtcccatgcaacttcctccttcgccttctcagaaccgtcaacatggttcgagttgacgccacttatagaggtgagcttgagaaccggatttcgtggcagctagaccaagcttctctcaaagagctcatgataccctacttcagccacacgtgtgggacactcttggatgttgagctagtcctcaggttggtttagaggattatgagt

SEQ ID NO: 214700 - DNA, 459 bp, Glycine max
aatcagaaccgtcccacactaacaatccacccttctcccccaaaaggtgattttaataaatatccaaatataatacttggactaagggtcaaattggttatttttcttacatctccgccccccggagcccacgtatcatatatacctccaaaataaagagccttgaatactagaagaaacgcacctatacctaacaagattaagtgaatacccaaaattgtagtcattttatttctatctttccatacataaccgaagaatggaaaagattcttcaagagtctcaggtcccaaaagtgcatgataaataccgccaaagcccaatactgcagagaaaattaagtgaagtactccagacacaaagtatggaaaggtgtctataacttcccccccaggacctaccccccaacctagagtagctagatggggaagtaaaattaaaccttgttcatacatgggc

SEQ ID NO: 214701 - DNA, 563 bp, Glycine max
  unsure (1)..(563): unsure at all n locations
ggtatggacctcagaagcaaagccaggactcttcctgggccagtgagtgaccctgcagagcttccaaagtggaactacgatggctctagcacagaccaagctccaggggatgacagtgaagtcatcctatacccacaagctattttcaaggacccctttaggagaggcaacaatattcttgtgatttgtgatgtttacacccccgctggtgagccacttccaaccaacaagaggtatgatgctgccaaaattttcagccaccctgacgttgctgctgaggaaccatggtatggtattgagcaagaatataccttgttgcagaaagatgtaaattggccacttgggtggccacttggtgggtttcctggaccacagggcccatactactgtggaactggtgctgataaagcatatggccgtgatattgtagatgcacattacaaagcttgtatttatgctggcatcaatattagtggcattaatggagaggttatgcctggtcagtgngaatttcaaggtggtccttctggtggtatatctgctggagatgaggtgtgggcagc

SEQ ID NO: 214702 - DNA, 343 bp, Glycine max
gaagctgctgaatgatgaattatacattgggctaaagcaaaaacgaggaactgggcaggaatatgctgaacttatgcacgaatttatgacagcagtcaagcaaacttatggggaaaaagttctaattaaggttgacgactttgcaaaccacagtgcttgtgatctgcttgagaaatatagatgtacacatgtggtctttaatgatgatattcagggaacagcatccgtggttcttgctggacttggcgcaactctgaagatggttgggggtaacttagctgatcacagattcttattccttggagctggagaggctggcactgccataacagaactcatagct

SEQ ID NO: 214703 - DNA, 522 bp, Glycine max
attgggttgctctctattcattccattttcagaggccttcaagaacagcgctagaacctgcatggctgcaaagcccttcaacattatcttcctcctcctccctttactctctttgggggggggggggcatgaaactgtgaaatcggaacagcacccattggttgtgagcacgtggccctttatcgaggctagccatggctgcatggagggctgtagatgctggctcttcagctgtggattctgtggttgaaggatgctcagcttgtgaggaactcagatgggaagggacagtcggccccggtggaagtccacatgagaatggcgaaactacaatcgatgctatgataatggatggggtgacaatggaagtaggagctgttgcagccatgacatatgtgaaggatggaattaaagctgccagggtagtgatgcaacatactgaacacactttgctggtaggagagaaagcatcagaatttgctatctcagtgggtcttccatggtcccacgaacttgagttca

SEQ ID NO: 214704 - DNA, 563 bp, Glycine max
  unsure (1)..(563): unsure at all n locations
ctgactgtaaatttatacaccattcgnannccncnnnnnnnnttnnnnnnnnnnnnnnnngnggnnnnnnnnnnnnnnnnnnnnnnnnnnnnnnnnnttnnnnnttnnnnnnnnnnnnnnnnnnnnggggnggggggnnnnnnnnnnnnnnnnnnnnnnnnnnnnnnnnnnnnnnnnnnnnnnntgnnnacaatnttgcacaatcaatgttaattgctcggttaatatcagatgcaagaataatattacaatataagcacatttatgagccactaactttccctgaccaacaaaattaacatgctgatttgaattaattgttggaacttggaacatactcatttcttgaacagtctctctctcaaggtagcacagtaaaaacttccacatctttcattgcagggctcttgactgagtatttaaatgtccaaccatggcaagcaccagcatgttccccctttttattgagggcaacaattgctcccaaaaaatcttgaaattntcttgctattccngttattgcatctttagcagcaagtttgggttccattcccacctcatac

SEQ ID NO: 214705 - DNA, 478 bp, Glycine max
  unsure (1)..(478): unsure at all n locations
gattctctcggtagcttgaactcagcacactcttcggaactctggatctgctgttctgctactctgagacaacattctcatgttgaatcttaatctctgggaaactaagctctaacaacagacatggatggtgtacatcctcttggaaagtcgatgtccgggactgcctagcgtgcacagctaccgcttacgcggcgagcgcagagctgcgtgtattcccgttgatctgagaaacaactgcttatctcagatgaccctagctctgaaatctgcccatgatgctgattcgttggctcttgcgatcgccatgctctgataaagtacttatgcctcaagatcaagatagctcagcatccttgacagatcaagctgaaactcctgatataacctctgaggatacacggatgttagaggatntgaccatggaagatgaggatatgtactagctttgtgaagcagctggcagtaacagacatat

SEQ ID NO: 214706 - DNA, 573 bp, Glycine max
gattctcagcattgtctccctgatgaattaagttctgaacatttgcagcactgttcacaaaaacttaagcttttgggacatgaagaaacctcaccagtcattcaggaagctattacagaacatctggaaaatgtaggacccaggtcagagctcctgtcaaaattgctgatagcttgggcctaaggtctaatcaggaggctcttattgaggcagtggcccttgaaaggttgaaggagaatgcggaacaaactgaaaagactgcagaagctgaattgattgatcaaatgattgctgttgtaacacatatgcacgagcgtcttgttatgcttaaacaagcccagagtatcagcccagttccaatacctgctgattatcgatgtcctctttctttggagatgatgactgatcctgtgattgtggcatcagggcaaacatatgaacgagctttcatcaagaactggattgatctagggcttactgcttgtgcaaagacacgttagactctggttcataccagacctatacctaattatactgtaaaagcactaattgcatactggtgtgaatcgaaca

SEQ ID NO: 214707 - DNA, 541 bp, Glycine max
accacaacaacaaaaaccagacctttttctgttaatacaaaaaagctagacttacatgtgtaattttttacaacacagaaaggtttttcacaaagaggacacaatcaatcctccacaaatattcttttcccttcccaagcaagtgaaaacaatacgaaacacctttacacactttatttgcaccgtgtaacgtataaattggagacattctataggagtcaattcaaaacctttggataccactcaaggttgggaattcaagatcagcccctgccagcactcccatgcctttgacttctaaattgattgaggagagcctgggccttttctttggcccttggagtgcctgactgtgataaagctactaatggcgggacagctccttgttgaagcaccttgcctaaatatttggtactatgcaagcaaagatgtagaagagcagcagctgcattctcctttcctctcgcagaacccaactcaacaacctcaaccagaacaggaataccaccttcatcaccaattgcatttcttccttctggaa

SEQ ID NO: 214708 - DNA, 408 bp, Glycine max
gtgcctttcatggtggtcgtgtggacagctctatcattcatagtaccaagtaaagtgccttctggagttccaagaaggctcacttctcctcttgcttgggaatctacatctttacatcattggacagtaatcaaagatatgggggaggtttctctggcatatatttgtgctgctgatattcccgccttaatgatagcggggctttacttctatgaccatagtgttgcttcccacatggcacagcagaaggaattcaatctcaggaaaccttctgcataccactatgacatatcgttgctaggattaacgacattgctttgcggattaattggcttacccgcattaaatggagttctgcctcaatcctacatgcacaacaagagcctggctgctctcaagaaacagttg

SEQ ID NO: 214709 - DNA, 522 bp, Glycine max
  unsure (1)..(522): unsure at all n locations
caaaccataattagaattatcttcactgacattttcctgcgttgagatagtagaacaacgtagttcatcacgaaacataggtaattatcctcctacaattgacataatttaagtctataaaacatcacaccatcccaccaatataaatttgttatatacaatgtcccttagtcaacttgacaaggcaaaggcgaagttccgtggtgcactttccacaatagcaaactattaggtaccttgagatcatggataacaggcaaatcagaaaatggaaatgccggagaagagactaacatttcaagggcctgattaagtgggaggaaggngaaggacagtgctcgttcatattggcataaggatccaaggtgttatagccaggcaattccatcctatattcaccaagaatctggcagaatggatgccgatcgttctcattggtgcaccatcttggtagacgtgtttggttatcctcaaaaatcctaagcatgtatgcatcacgaattgtgaattcagttacttgaa

SEQ ID NO: 214710 - DNA, 508 bp, Glycine max
caaaaaagcactttaaatttgattatgtatttagacctgaagataaccaagagactgttttcgaacaaacaatacctatcgtcacatctgtattagatgggtataatgtttgcatttttgcatatgggtaaaactggaactcggaagacctttactatggaaggaacaccacagcataggggagttaactatagaaccctggaggaattatttcgaatatctgaagagagaaatgacgtaataaaatatgaattgtttgttagcatgttggaggtttacaatgagaagataagagatcttttggtggaaaattcagttgaacctactaagaagttggagataaagcaagctgcagatggaacccaagaagtcccaggactcgttgaagcttgtgtttatggaacagatgacgtgtgggaaaagctgaagtctggtaaccgagccagatctgttggatccactagtgctaatgagcttagcagtcgttctcattgttttgtgcgagtga

SEQ ID NO: 214711 - DNA, 535 bp, Glycine max
atgattgagatgatagtgttcctctttcttgtcttgcttatatccctgatcttgagcagcagttccaataatagcctacagcttcccccaagcccaccaagcattcctctgctaggtcaccttcaacaactttaccccttccctatacaaatccctctacaccctctcatacaagcacggtcccctcctcctcctacgcctcggcccctcccgccgcctcctcctacttgtctcctccgccgccgtcgctaccgatgtcttcaagacccacgacctcgccttctcgtcgcgccccgccttcgccttcgccgagaggctccccttcggcacctccggcttcgtcaccgccccctatgggccctactggcgcttcatgaagaaactctgcgtcacggagcttctctccacgcgccaacttgagcgctccaggagcataaggagggaagagatactacgttccatcaaagggttattgacaatgctcgtgagactgttgcacttgatttgggctccgagttaaccaaattaaccaaca

SEQ ID NO: 214712 - DNA, 220 bp, Glycine max
ttctccttttccatctttaccaattttccaatcaaagcactgcaccatagcagcaactgcagtgttcatcaagctgaatgccagtgctgtccctggacaacctctcctcccacctccaaatggaacaaaattgaacttcattctcttaccatcatcactcaaatcctcatgatcttgttcttgcaagaacctttcagggcaaaactcattaggattgtcc

SEQ ID NO: 214713 - DNA, 559 bp, Glycine max
atcatgtcggtgaaggtaattctagcagatgaggataacaagaaatggatcttctgtgaaaaggaagctgcctggaccaaatattcaaaacaggtcaatgtaggggacatttttgaagaaagaattgggttatgttgaggactatggtgcttttgatcatttgcgcttccctgacggtctttatcaccttactggactaatacacgtctcagaagtgtcatgggatctaattcaggatgtcagagatatcttaaaagtaggtgatgaagtgagggccaaagttgttggtattgattggggaaaatcaaggattaacctatcaattagacagctagaagaagatccactcttataaactctggacaaagtaatacctcaggatggatcaactgatcctgactctatgagtggaggggatagcggtagcattgagcctctttcagggctttgaacaatccttgaagagctactacaggaaagagggatttatgaccgaagaatcaagccggaagggtttgaaaaaagagtggtcttccaagactagcagctttgggttttt

SEQ ID NO: 214714 - DNA, 477 bp, Glycine max
cagagatgcttcgcagaggccaggttgagcatgttaaagccgaaaggaatctccttgcagaggttgacagcaattgcatagtcaagctttattgttctttccaggatgatgaacatttgtatcttattatggagtatctaccgggtggggatatgatgactctacttatgagaaaggatatcttgactgaagatgaagccagattttatgtaggagaaacagttttagctattgaatctatacataagcacaattatatacatagggatatcaagccagacaacttattacttgatagatatggacacttgaaattgtcagattttggactttgtaaaccattagattgtagtacacttgaagaaaatgatttttctgtgggtcagaatgtgaatggatctacacaaagctcaacttctaaacgctcacaacaggaacaactgcaacactggcaaataaacaggagaacacttgctt

SEQ ID NO: 214715 - DNA, 484 bp, Glycine max
atgaaatgtgatgttgatattaggaaggatctgtatggaaacatcgtgcttagtggagggtctactatgtttccgggaattgctgatcgcatgagcaaggaaattagtgctcttgcacccagtagcatgaaaatcaaggtggttgcacctcctgagagaaagtacagtgtctggattggtggttctatcttggcatcacttagcaccttacaacagatgtggatctccaagggtgaatatgatgaatctgggccagccatcgttcatcggaagtgcttctaaagttgggtcaagtcgagctggatggtgatcaagttcttgatgcacccagtcctgtgccatatttcagtaaaggttggttgacttcatttggtatgtgaagctttgggatcttaatagatatatctcagttaatgaatggatttgtaagttgagtatgttataagttctccgtaggacacttggaaccagacttttatgcatt

SEQ ID NO: 214716 - DNA, 540 bp, Glycine max
gactcaaaaatccctgtgagaaaagatgcttagactatcgtcctcctaactcgaggcacctaattcttggccacaacatgaaaatcgaataaaaggaaaaaccaaaccaagcagaacctacaaagttccaataccatccgccaattgcataaaaagtctggcttccaaggtgacctaacggagaaacttataacatactcaacttacaaatccattcattaaactagatatatctattaaaaacccaaagcttcaaataccaaataagtcaaccaaactttactgaaatatggcacaggactgggtgcatgaagaacttgatcaccatccagctcgacttgacccaactttagaagcacttccgatgaacgatggctggcccagattcatcatattcacccttggagatccacatctgttggaaggtgctaagtgatgccaagatagaaccaccaatccagacactgtactttctctcaggaggtgcaaccaccttgatttcatgctactgggtgcaagagcactatttccttgctcatg

SEQ ID NO: 214717 - DNA, 565 bp, Glycine max
agcaatgatgccaacactgaggcaacaagttggatgatgaatttctgtccaatgcaagcacgtgtaccagatccaaaaggaagaaatgctgcattttcatttggatcatttagtacacatgaactgacttctgtaatagaaaggtcttcagtagaacctgatccttttgtacccgttgacaaaaaatggtaaggattaaaatcacttgcatcactcccccaactagagtcatccttgtgtaccaattcgacaggtacaaccagtacagctccagcaggtatggttaaaccagttgcaaagcacaagtcatgtttcaaagaacacctctgcagcattggaccagtgggcagaaggcgtgcagattcataaattgtagccaataacaaaggcatcctataaacattttcatgctcatattttgatgggtttcttcctacaatgctaatctccgaataaaccttatcctgtatttccagatgcatgacaagcctagtcaatacattggtgattaaagcagatgtaggttgacatccatgaaatatcacacgcatgatgttcccacaag

SEQ ID NO: 214718 - DNA, 443 bp, Glycine max
cgagacatctctttgatccttggcctcaccctgttgtgtctttacatctcttgaatttgcaccacattccttcatagactgcgtatagaagttcgccatcatgtcaggtatcaccacgcaccctaggatcccgccggtcgtgatggacaacatcacccagcagattggcaacacgccgctcgtgcgcttgaacaagatcccccagtcgctgggcatcgaggccaccgtctacgtcaaggatgaggccttcaacgccggcggctcagtctaggatcgcattgcgctgcgcatgatcgaggctgctgagagggaggggcgcatcaagcccggcgacacactgatcgagcccacctgtggcaacacgggcattggccttgccctcgtggccgccgtcaagggctacaagaccatcatcaccctgcccgagacgatgagccccgaga

SEQ ID NO: 214719 - DNA, 453 bp, Glycine max
tccagatgaaggtggattaagtgttgcatttgatcccgttgatggctccagcattgtggacacatatttcacagtaggcgccatctttggtgtgtggcctggagataaggtgaccggtatcaccggaagagatcaagttgctgcagccatgggggttcttggtcctagaacaacatatgtacttgctctaaaagacttccctggcacccatgaataccttatgcttgatgacggataatggcagcatgtcaaagagaccacagacattggtgaaggaaaattgttctcctcaggatatttgtgagccacatttgacaaccgagattctgcttggttgatcgattactatggcaatgaacagtgcacattgggatacacgggaggaatggtgccagatgtagaccagattattgcaaaagacaaaggcatcttcaccaatgtgatatcaccatc

SEQ ID NO: 214720 - DNA, 510 bp, Glycine max
aggcataccaacataaatttactttgttattatagggattaacagaaatatgtgactaaattgcaggtacttgtctgaagatatagcatatatctttttttctaaaagcagataaaatagacaatgaattgcaggtttaacagattaagcagctgctccaacagctacaccatccttgagcctggatttaccatacagggtttcttcaaaccggatgatctcattcttggatccataagcaacttgagttctctcatcaatgttagtgatgactttgtctagcacagactgatgaccatcactgctgtaacctccggctttttcaatcaagaaccccaacggagctaccttaaacaacagtctcagcttggctttggctgatggagatgtcacattggtgaagatgcctttttcttttacaataatctggttgacatctggcaccattccttccgtgtatctcaatgtgtacttttcattgacatagtaatcgatcaacttagcataatc

SEQ ID NO: 214721 - DNA, 307 bp, Glycine max
gatagcgagcgtgaggagagagagcaccatgcccccgacactagacaacaacaacggacgacgacccacgcggtccaacgtaaaagtagccgccaagatgaaaccggttgtgacgaatccaacggccacggttgcaagaagtttatgcgtgtcgtttttgatcccagccttctcgaagatcctggggctgaacaaaacgacggcgtctacgcccgacgctggttggaagaagtgaatcccaagggcagcgattacgatgtgacgaattgcgggcgttggatagaggaagagttctttccatacgcct

SEQ ID NO: 214722 - DNA, 504 bp, Glycine max
gaacacactaccctcaacatagtaaagcagctggtgcaagtgaagcagtggctcaaaccatgttgctcatgtctagtgtctctagcagttattccgtggatttgaagaaagaccttttcctccaattgcaggagtaaagtttaaggcctaagttctctcaactctcattcaacccacttgcaccatcaacttcttccttttcttcaccccgtacattcacaaccctggctctcttcaaatctaagacaaaagccgctcctgctaagactaaggttacaaagccaaagcaaaaggttgaagatggtatctttggcacttctggaggatttggttttactaagcagaacgagctctttgtgggacgtgttgctatgcttggatatgcagcatcattgctgggtgaaggaataactgggaaaggaatcctagcacaattaaacctggaaactggaattccatttatgaagcggagcctcttgttctggtattcatcctcttcaccct

SEQ ID NO: 214723 - DNA, 232 bp, Glycine max
agaaattgcccgttcccggattcaaagccgcactgaagaaaaaaagaacgttgaacaacactaggggctcgatttacatggttgggacccccgactcaatgttgaattgggctagaacttcctttccagggataatttctccaatcaaggggaaaacgaaacccaattgagccaatcttcccacaaataggtcggtcgctttcgggaatccgaataaaggacctggaccgag

SEQ ID NO: 214724 - DNA, 482 bp, Glycine max
acaaaaacaagaaaaaaggttacctctttcaattttatcccttgttgtgagcttaattcaatttctgctcacacataatggcttgcacgctcgctgattcattactcctattcaagggttcttatcagaaaccagttctgaggagagacattgctgcccggtactccccgggtatatttagtctaaacagtaatgggcttatccagaaaaggttcaggcgtcaaaggaattttgttactaggaataaggttactgtcatacatgccgtggcaattccagtacaaccagctccggtggaaagtgcggagtatagaaaacagctagctgaagactacggtttcaggcaagttggagagccgcttccagatgatgttactttaaaggatgtcatcaattcccttcctaaggaggtctttgagattgatgatgtgaaagcatggaaatctgttctgatatcttgcacttttatgcactgagtctct

SEQ ID NO: 214725 - DNA, 484 bp, Glycine max
ggcatacgaacctaatttgatacataaaaaatttcatatgagaaaaaaagccagtttgggcataattaagcataatcaggcatggtttccttcaaaaatgtaattggacgagaatcttcaggggcaagttcgtcgaaggcaacataattttgctccttgtcgtacacatgacacactggcatgattgtcttcatcaatctccaattccaactagcctcattcagatactgtccccagttttcttggagagacttatgggctgctcttaaattatagcttggtatcctcggggatatgtggtgtggaatatggacattaatatcgggacataggatctcgatccatttaggataatcacaatgaacagttccattaagctgtgcttgcgcagcattccactcttctgagtatttgaatggtatatgcggtgcagtatgatgtaccatggtaaacgtactcatccagaagtgatagcccaaccatg

SEQ ID NO: 214726 - DNA, 451 bp, Glycine max
tgcttgtttatcattttcttacttacctatcacgctctgccacacaacttcgtctgcgcaataacggaataaaaaaacaagactgattactattatggcgccgagggatcataccacaagcaacgctaagcgttaacggtaacggcaacagcggcctgaaggaggagcattttcgaggagtgagaaagaggccgtgggggagatacgacgcggagatcagagatcctggcgagaagagccgtgtatgactcggaacatttgagcacagaggactgatgcagccgcgtgtatacgacgccggagcacgagagttatgtggtcatacggccaacgacaacacttccctgaggccttgggaaaatgttaagaactctagccacatccagagcaggaccgaacagtccttcagccgctagcgctacatcgtcgccgatgccttgcactagacctt

SEQ ID NO: 214727 - DNA, 465 bp, Glycine max
gcagacgaagggcaattcttgaacatgctccttaagctcatcaatgccaagaacaccatggaaattggtgactacactggatattcacttcttgccaccgctctcgctcttcctgaagatggaaagatcttggccatggatattaacagggagaattatgaattgggtttgccagtaatcaagaaagctggtgttgaccacaaaattgaattcagagaaggtcctgctctcccagttcttgatgaaatggttaaagatgagaagaaccatgggagctatgacttcatctttgtggacgcagacaaggacaactacctcaactaccacaagaggttgatagagcttgtcaaagttggcggagtgatcgggtacgacaacaccctatggaacggctctgtggtggcaccgccaaatgctcctcttaggaagtacgttagatactacagggacttcgtgctcgagctc

SEQ ID NO: 214728 - DNA, 436 bp, Glycine max
gtttgagcacacgagaattcagtgggcatgtcaatggcaaaaaaacctgtgaaatactctctggttgacgcgtatactgagtcagtgttcaaaggaaaccctgcagcagtgtgtttcttagaagagaagagggacaaaaagtggttgcaaggagtagctgcagagttcaatctatctgcgacatgttacttaactcgcatcaccgagtcccatggaacaacctcttatgctcgatttgatctcagatggttcactcctgttagtgagattaacctttggggacatgcgatcttagctgctgcgcacacaatattttcatctggtttggtggacaccgatgtagtcgaatttgtggctatatctggaatattgactgccaaaaagatcccagcgatcaatatcactagtgccttagacttgcataagggtgaagctc

SEQ ID NO: 214729 - DNA, 530 bp, Glycine max
ggcattgatttgaactgatgagaccagacgcagggcctgcaaactaaagcactgacctgaccatcttattcaaatcaacaagtattattattataccatgtttgtggacatcaaacactgaaacacataatgctcggaggttgcctattttatgtgataaaataaagtgtcgtaacacttcagaatttcagttacaattctagtcatctgaaacatactttgatgcaataatataatctgcaatgctaagaacaggactagaccagaacacacccttccatcactttaacagccttcccacgcaaaagcaccctttggttctgctcatcaagatgaacattgagaactccccctctggctgatgcctgataagctttgaaatcacacttccctagcttcttgctccaagagggtgccaatgcacaatgtgcacccccacaaacaggatcctcattgactccaagttttgggcagaagaatcgactacagaagtcaaattctgagcctggaggagcaatccccgtaacaat

SEQ ID NO: 214730 - DNA, 547 bp, Glycine max
gtgtgtgatcacattgtttccctctatcgtcttctccctccttgttcaatggtcttagggtttccggtgtccatgcgtagaagctagcaataatgcgtttttgaaacccgtattcatctgtatccaacgatttactagaaggagatcgcaatttctccatcttctcgtttcggtggctcgtgaaatcgaaagttatcgaaactttcgcgcgacacgaagtattgggaaccaagcaaaatttctatggctgacgaaccactatatccaatagcagtgcttatagatgagttgaaaaatgatgacatccagctgcggttaaactcaattcgcaggctatcaacaattgcgcgtgctcttggggaggagcgaacccgtcgagaattaattccatttttgagtgaaaataatgacgatgatgatgaagtacttcttgcaatggcagaagagttgggagtgttcattccttatgttgggggagtggaacatgctagtgtgttgctgccaccgctggagacactttgcactgttgaggaaacctgtgtgagag

SEQ ID NO: 214731 - DNA, 529 bp, Glycine max
  unsure (1)..(529): unsure at all n locations
aatgggaactaaatcacatcaatggtcaatgactagtagttactcacaaataaataaccattcagctataattgaaaagcactaaacataaatatgcagtattatttatggtagttggaaatattagcatctcttccgacgtcttcaacctaattaattgcgtgtggaaccatttctgcctagctagacatcatgacatgatcaattgcctgcagtgcttggttggagaaaaatcgcacgtcaacatcgggatcctcactgagctcaaccagacatggacgaatagtcttctccaccacagactgatcaacgatggggaagatggactctaatacctttgccacattgaactttatgttgggcactctgtcttttgatgcagcaacaacaactggtaacaagtttgaacaagtgatttcagggcccatcacaggagcaagcagagagatagcacgaagaatagtcatccgatacaaatagtgtgggttgttgttcatctncaaaacctgaggaattatgtgctgcatag

SEQ ID NO: 214732 - DNA, 430 bp, Glycine max
gtgtgtgatcacattgtttccctctatcgtcttctccctccttgttcaatggtcttagggtttccggtgtccatgcgtagaagctagcaataatgcgtttttgaaacccgtattcatctgtatccaacgatttactagaaggagatcgcaatttctccatcttctcgtttcggtggctcgtgaaatcgaaagttatcgaaactttcgcgcgacacgaagtattgggaaccaagcaaaatttctatggctgacgaaccactatatccaatagcagtgcttatagatgagttgaaaaatgatgacatccagctgcggataaactcaattcgcaggctatcaacaattgcgcgtgctcttggtgaggagcgaacccgtcgagaattaattccatttttgagtgaaaataatgacgatgatgatgaagtacttc

SEQ ID NO: 214733 - DNA, 471 bp, Glycine max
aatgggaactaaatcacatcaatggtcaatgactagtagttactcacaaataaataaccattcagctataattgaaaagcactaaacataaatatgcagtattatttatggtagttggaaatattagcatctcttccgacgtcttcaacctaattaattgcgtgtggaaccatttctgcctagctagacatcatgacatgatcaattgcctgcagtgcttggttggagaaaaatcgcacgtcaacatcgggatcctcactgagctcaaccagacatggacgaatagtcttctccaccacagactgatcaacgatggggaagatggactctaatacctttgccacattgaactttatgttgggcactctgtcttttgatgcagcaacaacaactggtaacaagtttgaacaagtgatttcagggcccatcacaggagcaagcagagagatagcacgaagaatagtcatccga

SEQ ID NO: 214734 - DNA, 498 bp, Glycine max
aaaagccttagccttccctacaacttcaaacacaaagacatcatcatccatggctgcctccgggtccactgtcggagctgtcaacagagctcttttgaacctgaatggttctggagctggagcttcagctcccagttcagccttctttgggaccagcttgaagaaggttattgcctcaagggtccccaacagcaaggtttccggtggaagcttcaagattgttgctgtagaagagaagaaagagattgaagagacccagcagaccgacaaggacagatggaagggtcttgcctatgatatctcacacgaccaacaagacatcacaagaggaaagggtttggttgactcccttttccaagctccacaggatgctggaactcactatgcagtcatgagctcctacgagtacctcagcactggacttcgccagtacttggacaacaaaatggatggattctacattgctccagcttttatggacaagcttgttgttcacat

SEQ ID NO: 214735 - DNA, 525 bp, Glycine max
  unsure (1)..(525): unsure at all n locations
cgaaatgaatcgatcccatncgaaancnnnnnnnnnntnnnnnnnnnnnnnnnnnnnnnnnnnnnnnnnnnnnnnnnnnnnnnnntttttntttttttntttttntntnntttttttgggttggtggtntttttttttntttgtttttttttttttttttttnttnnnnttttttgctcttggattagtacaacaaccttcacgaacagaaatatttacttgccaagtttgctttgcctccaattcaagactggaagaaagttcccctctgaatagcatcctcgttagcatttccaagagcagcctcgttcaagtacttgtcagccaattggactctcttgacattctcttgttcttggacaagcatgttaccatacagcaagagcttctccagagtcatcttgggctgctcaaaagttggaggtccatcttttgagttcacaagcttcttcccaacactgtcaacaccaacaccagaaatccacttcctcacttcatcatcatatactctggccctcagtgcac

SEQ ID NO: 214736 - DNA, 435 bp, Glycine max
ttgtacttgtatatacatattttgttccgcctttgtaaatacaattgggacactactaggattgggaagaagggtctttacatttttagtttggcaaatacatattgcaactacctttgtataaaacttatttctgaagaagctattacaactttcaagggatgatagcattttgtggcataaggattaaggaggcataaaggaccaattgctttggaatattcactcatgacaaggcacagagtcatgcgtgttttccaacacataagaatgatgtgtgtttttattcaaaaggcaactggcagagcgggttttcccttggcactttagaatcattatcttggaagaatttatcacgtcaaagttattggataatattaacggcgacattgggtttattattcgaaaaatattgggactcaactatgctttggt

SEQ ID NO: 214737 - DNA, 478 bp, Glycine max
  unsure (1)..(478): unsure at all n locations
caaaatgagacggataccccatncggaannccnnnnnnnnnnnnnnnnnnnnnnnnnnnnnnnnnnnnnnnnnnnnnnnnnnnnnnnnnnnnnntttnnntttttnnnnnnnnnntntttnttttttttgggtgttttttnttttttttttttttttttttttttttttttttttttgttttttgtttttttttttggtgacccgagaataattccatttttaaggcactaatctttccatacagcaataaccccctttccttccaaacttttttcaacccaaaaaataatttccctttcaaggaactttttttcatcaaccaaaaatttctcaacggcccttcctctctacttataccatcacaaaaaaaaccccttttgaccaataaggtttcctctgggaaaaaacccccaaaattaatatgggttacctttcttcaaaaactaaccttccaacttattttcctttaaaaccaac

SEQ ID NO: 214738 - DNA, 490 bp, Glycine max
gtttctaccttcaatgctgcctttcaaatgcctctcctccaacgcatcaatggccttgttgcggagcttgacaacatggttaaattggcagagaagtgcaacattcaggttcctatggaggcttgtaattttaattgatgatggaaagaatccacacgagtttaccaaagatgttataaatagcgtgattgtaaagaatcagatcaccaaaggaaaaactgatgctttaaagagtttgcgcaaacatcttttggaggaattggagcataacttccctgatgaggttgaaacttttagagagagtcgtgctgctgcagctgctgagttgaaacgtcaggcacaggcacaaagcgcactgccaaatggagatgtaagggttaaatcaaagattgagtgataggcatatttcttgtgcctttaacgttgatgtatacgttgtatagcgcacttcagcactgttccttgaatctgcatcttggttaaatgttgt

SEQ ID NO: 214739 - DNA, 484 bp, Glycine max
gaacacacttcttataatgacatcaaatgttggaagcagtgtgattgagaaaggaggccgcaaaattggatttgatctggattacgatgagaaggatagcagttataacagaatcaagagcctggtaactgaggagctaaaacaatacttcaggccagaatttttgaatagattggatgaaatgattgtcttcaggcagctcacaaaactggaggtgaaggagattgctgacataatgctcaaagaggtgtttgatagactgaaggtgaaagatattgaacttcaagtgacagaaagattcagggacagagtggtggaggaaggttataaccctagttatggagctagacctctaagaagagccataatgcgacttttggaggacagcatggctgagaagatgcttgccagagagatcaaggaaggcgactctgttatagtggatgtcgattctgatggtaatgtgattgtgctcaatggtagc

SEQ ID NO: 214740 - DNA, 454 bp, Glycine max
gccttcgttctttttttttttttttgttgatagatgaggcctgccaggaattccattaaaaactttaggaacattgacaggcaaaacatactatgactatggtttaaacaaattatgttcattggattagcgaattaaccgtgttatacaggaagcgtatgtggcgaggattagggggctgcgatgttcccattgagcacaatgacattaccatcagaatcaaggttcactataacagagtccgcctccttgatctctctggcaagcatattgtaaaccatgctgcactgcaaaaggagaattatgggtgttcttagaggtctagcttcataactagggttataaccattctgcaccactctgtacatgaatgtttgtgtagcttgaagagcaatttgtttcacatgaagtctatcaaacagctgtatgagcattatgtcagcgatcttcttga

SEQ ID NO: 214741 - DNA, 516 bp, Glycine max
gaaaaaatgaccaagatcttctttgtattgctgttatgtctgatcatagcagcttcttctgggtttgtgaattgctttgatgttgaaaagaaggaaaagattggaatatttgagctcaataaaggtgacctttctttgaaggtcaccaactggggtgcttcaattttgtccctggtgattcctgataagaatggaaagttgagtgatgttgttcttggatatgattctgttaaggattacactaatgatacaacatattttggagcaactgttggccgggttgctaacagaattggaggagctcagtttactctaaatggaatccattacaaattagttgctaatgagggaaacaatacacttcatggtggagccagaggatttagcgatgttctttggaaagtgaaaaggtatcaaaaagaaggtccaagtcccagcattaccttcagttaccacagtattgatggtgaacagggattcctggtgatctcctagttactgtgagctacattctaa

SEQ ID NO: 214742 - DNA, 548 bp, Glycine max
  unsure (1)..(548): unsure at all n locations
ccacaattgtctccagctagtagctacttgtcttacgaccacttcaatagacaacctagtccagccagatcgaggaacactacaatggccatgattcctttgatgatgatgatactgctgttgctgtttaaatttccttctgtcgtacttgccacactcaaatctgatgaagccaacctcgagctagtattcacataccataaatgtaacgaagagctcggaaactttatcactgagacctactccaacaaccggaatgtccttctgtccaatatgtattctgacaaagaaattgagaatggcttctacaattcctcatacggcgaaggccctgacaaagtttacggtatcggcttctgcagaggagatgttaagccagataaatgccgtagttgcctggaaaagtcctcgacacttctcaccgatcgatgtccagtacagaaagaggcgattggatggtatgacctatgcatgttacgctactncaaccgctcaatagttgagcaaccagttactgatactgacgacatcatcaaatgtagcaacac

SEQ ID NO: 214743 - DNA, 427 bp, Glycine max
taattgaggaataaggtattagaatcaagaggatctattttgtcacttatgttgcggcgagtggagatagtttggaatctgggcttgtactggtctaacttggtgtatgatttcctggttggaagggatgaagaggttgttccgtatcgtgctcgacagcttaagaatctcttgtgtgatctgcggccttcctttattaaagctggtcaggttcttgcaaataggccagatatcattcgagaagattatatgaatgaactgtgcattcttcaagatgatgttccttcatttaccaatcaaattgccttgagaatcatagaggaggatctgggtcaaccccttgaagctgtttacagcaagatctgatcagggacaatagcagctgcaagtataatgcaagtttacagagctacattacgtgcatctg

SEQ ID NO: 214744 - DNA, 513 bp, Glycine max
  unsure (1)..(513): unsure at all n locations
acagcaacaataacaatggcagcctcactacaagctgcagctaccttcatgcaacccaccaaggtgggcatggccactcgcaacctcaaatctacacaatgcatttctaaggcttttggcttggaacccgctgcagctaaactcatttgctcccttaagcccgatctcaaagattttgctcaaaaatgtgtcgacgccaccaaaattgcaggattcgcccttgccacctcagctctcgttgtttctggagcgagtgcagaaggtgttccaaagaggctaaccttcgacgaaatccagagcaagacatacttggaagtgaagggaactggaactgctaatcagtgcccaaccattgaaggtggagtggactcatttgccttcaaggcagggaaatacaaggcccagatgttgtgcctggaaccaacttncttcaccgtgaaggcagagggtgtggtcaagaatgccccgctcgaatttcagaacaccaagctcatgactcggctgacctacacc

SEQ ID NO: 214745 - DNA, 351 bp, Glycine max
aggaaaaacagcacaaagtatatcacatatttagaatattataccatctgcttccgagtgataggtaggtatttcactgtctactgctttggtttgagcttaagggcagcactattgatacagaaacgttttcccgtgggtggaggaccatcgtcaaacacatgtccaagatgagcatcacaaacagcacagagaacctcctggcgcggcatgaaaataattgacaaatccaactttgatttcacatttttcccaattgtctggtaataggatggccacccagttccactattgaacttagtagatgattcgaataaaggtgtgtcgcaacatatgcaatggtaaatcccc

SEQ ID NO: 214746 - DNA, 337 bp, Glycine max
aactggactgacaactgaagtcaagtttgtggagatgcaccatgaatgtgttacagaggcacatactgaaggcaatgtgggattcaatgtttagaatgttgatcgaaatgattagaagcggggctatgtgggactaaaactcacaggatgaccctgcaaaggagggtggtacctgcacagcccaagtaatgatcatgaaccaccctgagtagattggaaatggatatgcgcttgttctcgactgccacactgtgtacattgttgtgaagattgctgaactcatgaccaatagttgactgcgatccggtttagagcttgagaaggaactctcattttt

SEQ ID NO: 214747 - DNA, 331 bp, Glycine max
caattttgccaccgtcgatcaagaacccagttctgggaacaacagttgcgagatgatggtggagacttcaaactttgtccgaaaaacaagctacctagaaaagaagacacaagagtacagaaaagaaaccaacatttattgtaaccaacatcccctgatgaaccagcccgcacgattcacttcttcttctgggcagccttggtgaccttggctccggtaggatccttcttctcaacgttcttgatgactcccacagcaacagtttgacgcatgtccctaacagcaaacctaccaagtggaggatactcggagaaagtttcaacaaccatgg

SEQ ID NO: 214748 - DNA, 555 bp, Glycine max
caacaaaggagttgtaaattaagagcatggctgcacaagctcttgtatcatcatcatcgcttaccttctcagccgaggctacaagacaaagtcttggaccaagatcactccaatctccatttggctttgtaaggaaaagcctcctttcttgctaaggcagctgctactccccctggcaagcaaggatcagacagacctttgtggtttgcatcaaagcaaagtctttcctacttggatggcagccttgcgggtgactatggatttgaccctctgggactttcggaccctgaaggaacaggagggttcattgagccgacatggctagcatatggtgagataatcaatggtcggtatgcaatgttgggagcagttggtgcaatagcacctgaaattctaggcaaggctggtctgatccctcaggagacagcactcccatggttcagaaccggtgtgttcccacctgcaggaacctacaactactgggcagactcctacacactgttcgtgtttgagatggcactgatgggatgttgccagcacagaagattcaagact

SEQ ID NO: 214749 - DNA, 519 bp, Glycine max
  unsure (1)..(519): unsure at all n locations
aaaaactcaatcggaatccgnatncnnaaanncnnnnttnnnnnntttnnnnnnnnnnnnnnnnnnnnnnggnnnnnnnnnnaaaaannnnnaanannnaaaaaaaaaaaanaaaaaaaaaaattttttanaaaaanaaaaanaananaaaatannntattggggggatattttataataaaatnaatttatatttaataaaaaaatgtttttattattgaatagttccaaatagcaaatagaggatatagaaaggtggttcaactattgtaactcccaagcgaacaaaaaccaacaccaacagggtaaagaatatcatataatacattcagtggaacttgatactcgtcaatattttgtcttccacccggtcatccaaatgatctacgatgtttttgtattgcccaacacctgtgacaagagcttgaacaaactaacccaagattgccaacataaccaaccttccattcttcacttccttgaccttcaaatccttcaacgacttctcatccttaccaa

SEQ ID NO: 214750 - DNA, 607 bp, Glycine max
  unsure (1)..(607): unsure at all n locations
caacaaaggagttgtaaattaagagcatggctgcacaagctcttgtatcatcatcatctcttaccttctcagccgaggctacaagacaaagtcttggaccaagatcactccaatctccatttggcttctcaagaaaagcctcctttcttggtaaggcagctgcttcttccccctgtaaggcaaggatcagacagacctttgtggattgcatcaaagcaaagtctttcctacttggatggcagccttccgggtgactatggatttgaccctctgggactttcggaccctgaaggaacaggagggttcattgagccgaaatggctagcatatggtgagataatcaatggtcgttatgcaatgttgggtgcaggtggtgcaatagcacctgaaattctaggcaaggctggtctgatccctcaggagacagcactcccatggttcagaaccggtgtgttcccacctgcaggaacctacaactactgtgcagacttctacacactgatcgtgtttgagatggcactgatgggatttgcagagcacagaagattgcaagactgggccaaaccangctctatgggcaaacaatactttctaggactagagaagg

SEQ ID NO: 214751 - DNA, 446 bp, Glycine max
aacgagcaaaaagataaagatgtcgaatgtttctagttgttttacatgtcaattcttacagcggcgcaccaaggaacaaaatgtccagatgatggttgagttccaaagagcaaagagaggatatagaaaggtggttgagctttggtaactgcgaagcgaacaagaaccaagaccaagagggtaaagaatatgatataatacatttagtggaacttgagactggtcaagatgttgatgtgcacggggtcagccaaatgatctaggaggttttggtatgggccaacacctgtgacaagagcttgaacaaagtaacccaagattgccaacatagccaaccttccattcttcacttacttgagcttcaaatccttcaaggacttctcatgcttaccaaagccaagtgggttgaagaaaggctctcctgggtaagctggctcaccagaacc

SEQ ID NO: 214752 - DNA, 517 bp, Glycine max
acagcaacaataacaatggcagcctcactacaagctgcagctaccttcatgcaacccaccaaggtgggcatggccactcgcaacctcaaatctacacaatgcatttctaaggcttttggcttggaacccgctgcagctaaactcatttgctcccttaagcccgatctcaaagattttgctcaaaaatgtgtcgacgccaccaaaattgcaggattcgcccttgccacctcagctctcgttgtttctggagcgagtgcagaaggtgttccaaagaggctaaccttcgacgaaatccagagcaagacatacttggaagtgaagggaactggaactgctaatcagtgcccaaccattgaaggtggagtggactcatttgccttcaaggcagggaaatacaaggcccagaagttgtgcctggaaccaacttccttcacggtgaaggcagagggtgtggccaagaatgccccgctcgaatttcagaacaccaagctcatgactcgtctgacctacaccctgg

SEQ ID NO: 214753 - DNA, 536 bp, Glycine max
gctccaaaaggtaactcagacattttaattttaagcattataatcgaagtcattataatatacacacatgataacgctctgagtgcttcgccaactggggtcacaagaccgtggatggagttacaagaaagtagagttacaacattaagaaaaggtctatgagtcaagctgagcataccagatgccttgaatcttaacatccttaggagctttagcccccaaatcagtatcagaaggctgaacactctcgaacaccccaataacctcaccagtctcaggcttggacttggtgacactcaaggtgattttccctttggaagatgaagcacttttattgttctccttggcaagatcctcttcatctcctcttccaccagcaggcaaagcaacagcattgtcataaccagttgaggcaccccttcccttggggtccaagaaagaggaaccacggtaagacggcactaggaactccccactgaagctgtctggtttcccagatgccaccaactgcttaatggtgaagaggaatggcacac

SEQ ID NO: 214754 - DNA, 525 bp, Glycine max
gtggatcctgagattgctgatattattgagcttgagaaagctcggcaatggaaggggctagaattgataccgtcagagaatttcacctctgtgtctgagatgcaagcggttggatcggttatgaccaacagatacagtgaggggtaccctggtgcaagatattatggtggaaatgagtatattgacatggctgaaacactgtgccaaaagcgtgccctagaagcttttagattggatcccgctaaatggggagtgaacgtgcagcctctgtcagggtctcctgcaaatttccacgtttacactgcattgcttaaacctgatgatagaatcatggcacttgatcttgctcatggtggccatctttcacacggatatcagactgatgccgaacagatatctgcaggctcgatattttttgagacaatgccatgtcgattgaatgaaagtgcacgatacatctactatgaccagatggtgaaatctggtacactcttcaggccaaaattaattgctgatggagctagc

SEQ ID NO: 214755 - DNA, 432 bp, Glycine max
aagaaatatcattgaggtaaaataattcacatcagcatccagcaggattctatgcaattgaggaggctagttgaatttatagcagatacaaccacttacgatcgagtgtaaccccattataggggataggttcaacaatcatttgattaagaaatttggtattcgaagcctttattacatatgcatctatacatttcaacataacgatcaagattttctggattcttacatataaaggcttttgacattggttttaaaatatgttgccgtgctctaccatggatcaggaaaactgatcttgttgaattgcttgccattaagaccatgggatgacctaatggaaaattttcttttctcaagactcgtgcttcatggatgctttatcaaaaccaatggccggaaaatgttttgcatactcctcaacatcaaggc

SEQ ID NO: 214756 - DNA, 503 bp, Glycine max
tccaattgaaattttaaaaatgactgggataaacttaacaattcaattattgaaattgaataagtaaacaatttaattggattggtcgaatggtatcaaaaaaatggagtactaactcccatttcttatttattattgaattaaccgatcaacttgctttgttatcgaacatttctttttgatttcaaaaattttccggaaaaaatttgaatctatttttatatgcgaatcaatcctactacttctggtcctgaggtttctgcgcttgaaaaaaaacatctgggacgtatcgtccaaataattggtccggtactagatgtatcttttcccccaggtaagatgcctaatatttacaacgctctgatagttaagggtcgagatactgttggtcaacaaattaatgtgacttgtgaagtacaggaattattatgaaataatcgaattagagctgtagctatgagtgcgacagaaggtctaatgagaggaatggaagtgattgacac

SEQ ID NO: 214757 - DNA, 544 bp, Glycine max
tgaagttaaaagccttagccttccctacaactccaaacacaaagacatcatcatccatggctgcctccgtctccactgtcggagctgtcaacagagctcttttgaacctgaatggttctggagctggagcttcagctcccagttcagccttctttgggaccagcttgaagaaggttattgcctcaagggtccccaacagcaaggtttccggtggaagcttcaagattgttgctgtagaagagaagaaagagattgaagagacccagcagaccgacaaggacagatggaagggtcttgcctatgatatctcagacgaccaacaagacatcacaagaggaaagggtttggttgactcccttttccaagctccacaggatgctggaactcactatgcagtcatgagctcctacgagtacctcagcactggacttcgccagtacttggacaacaaaatggatggattctacattgctccagcttttatggacaagcttgttgatcacatcttcaagacttcatgaccctgcccaacataaggttcctc

SEQ ID NO: 214758 - DNA, 515 bp, Glycine max; identical to SEQ ID NO: 211411

SEQ ID NO: 214759 - DNA, 448 bp, Glycine max
gcacatgaaccctggggcacttcttatgctcaggagtgctcatggggcaagggcttttctctaccctgtggttgagccttgtgattttcgaggttttgaggttctctctgtgttccacccctccgatgaggtcatcaactcggttgtcatagcacgtaaattatatcactctcttgagcaaggccttgttggctctatgatcctacctaacaagtgttccgagattcaagccttcaaccctctcaaccatggcaacatgattgaggaattggccgttgaggagcaactcttgtgaattattgcttcttttttttttttatctatctctactccgtctcatgctttagatgggagattattattggggtcatgtgcggtaccaacttattatgtaggttacataatatttccacttaattgtgtccgactgttttgcatcacatcgagt

SEQ ID NO: 214760 - DNA, 459 bp, Glycine max
  unsure (1)..(459): unsure at all n locations
ctttcgtcgttttggggggctttgaaagagtgtcatggtcatggagggaagaatctgcgaggaattaaagcccaggtattatgctctttgtgccattggaggaatgctcagtgctggcaccacccatcttgccatcactccctttgatgtcttgaaagtcaacatgcaggtgcacccaattaagtattacagtatttcctcttgctttactagcttactgagggaacaagggccatctgttctttggaaaggttggaccggcaagttctttggatatggtgctcaaggaggatgcagatttggtctctatgagtattttaaagaggtttattccaatgtattggtagaccagaacaggagttttgttttctttcttagtagtgcgtctgctgaagtgtntgccaatgtagctctatgtccatntgaagctgttaaagtgagggttcaagcacaaccctg

SEQ ID NO: 214761 - DNA, 562 bp, Glycine max
cgcgaagcgtgagaagcagtcgataaagaagctggagtcgtcgctgaagctctacgaggcgggcagcgcccccgcactggccattaaggcgagcgtggagaagacgaagaggaggttcgacaactacgcgaagcaggggttgctgtgcggcggcgatgggttgccgcacctgatcgtgagcggagaccagaggcactggggtgagttcatcacacccggaatactattcctgtacatctcgggatggatcggctgggtgggtcggagctacctgattgcgatcagggacgagaagaaacccaccatgaaggagatcatcatcgatgttcctctggcttctcgcttgctcttcaggggtttcagctggcccgttgctgcctacagagaactcatcaacggcgacctcattgccaaggatgtctagataagaaagggtggatggctacattggaggaaagcctggagaatttgtatgtggatgggatccttacgcgctcttttggaattactttttttataaatgtacatgatatgatgtaatctaatgcatgtgaaccacaat

SEQ ID NO: 214762 - DNA, 496 bp, Glycine max
ctccagaaagccctgctgatgctacaagaaatctgtctcagcaaaatctaaatgcccttgttaaggttcttcctggtctacttggtggcagtgcagatcttgcctcttccaacatgaccttgttgaaatcatacggagatttccaaaagaatactcccgaagagcgcaatgttagatttggcgttagagaacatggaatgggagcaatctgtaatggtattgctcttcatagccccggattcattccatactgtgcaactttctttgtcttcactgactacatgagagctgccataaggatttctgcactgtgtgaagctggagttatttatgtgatgactcatgattcgattggacttggagaggatggaccaactcatcagccaatagagcacttggcaagcttcagggcaatgccaaacactttgatgcttcgtccagctgatggtaatgaaactgctggatcatacaaagttgctgtggttaacatgaagag

SEQ ID NO: 214763 - DNA, 424 bp, Glycine max
gtgagatttgcgatggagaggcttcagcgaatgttcgcaggtgcaggtggagctctagggcaccctcccccagattccccaactctcgattcctccgagcaggtctacatctcctcactcgctctcctcaagatgctgaagcacggaagggctggggttcccatggaagtgatgggtttgatgcttggagaattcgtggacgagtacaccgttcgtgtggttgatgtcttcgcaatgccgcagagtggcactggtgttagtgttgaagctgttgatcatgttgttcagactaatatgcttgacatgctcaaacaaaccggaagaccagagatgcgttgtggctggtaccattcgcatcctggatttggctgctggctctctggtgctgacatcaatacacagcagcgttttgaggctcttgatc

SEQ ID NO: 214764 - DNA, 418 bp, Glycine max
ctcaagtccaccttcactaggactcttgtagctcccaagggcctctctgcctcttcaccacttcacctcgtgccttctagaaggcaatttagcttcactgctaaggccatccaatcagagaagccaacctatcaagtgattcagcctatcaacggtgacccattcattggaagcctggaaaccccagttacatccagccctttgatcgcatggtacttgttcaacctgcccgcatacagaaccgcagtgagcccactactaagagggatcgacgtgggcctggcccacggataccttctggtgggcccattcgtgaaggccgggcctcttaggaacaccgagatcgccgggcaagctggctctctggccgacggtgggcttgtggtgaacctcagactttgcctcacaatctatggga

SEQ ID NO: 214765 - DNA, 438 bp, Glycine max
gattttatgaattcctgtagttatatgcttctcaacaaaagttctgtacatcctcatgattgttggtttaaaaaatgcctggttttactgttggaaagaagagatttatccagccaaatatgtgtttcaccaatttgatccatcaagataaatgaactctttcacaaagcattcattgcttattccctgaggcactgaataaagattatagccccattctacctgtgctgcctgatgatgtggctgagtattgacttgcactcgtgcctcgttccaacttccctgctatgggtgatgtgtgtaaaggatggaggtcgtttattcaatgctgagaattcactactgtgcgaaaattgactgggatgctagaggaatggctctatttcttaacagctgactgtgaaggaaaggaaagtcattgagaggttatggattgcc

SEQ ID NO: 214766 - DNA, 519 bp, Glycine max
aaaattctaaagctatcgcttgatttatattatatcaaaaagcccaaaagagaacaataaacaattaactcacccaccacggtttgaaatagtgctactcaaaagtagacaatcacaagaccaagggaattagtccctcataacactaggagccaagtaactaacagccacaaacaagctaaaacacaaaattaaaatcagataatagtatgatgtgatcgtgaggaacactcacactcactgctgtcttcattcttgataaaatgcagagaattccatagatgtatccatcactccatagagccagataagacaaggtttcatgccttgattgttacacaacacaagcacaaaccagatggccttatgtcacaagtttgccactctgaccccagagttgcatttggatcatacagcaatgtttgaaaagcagtttcagcttccagagggaatagcaacaacttttcatctagtatcccaattcgaaaataatgctttgagcttctgtcaacggaactg

SEQ ID NO: 214767 - DNA, 500 bp, Glycine max
acagcaacaataacaacggctttctcactacaagctgaagctacctacatgctacctaccaaggtgggcatggccactcgtaacctcgaatctacacaatgcatttctaaggcttctggcttggaacccgcattagcttaactcattcgatcccttctgcccgaacttaaagatcacgcttaaaaatgtgttcaactccacctaaatggcacgattaccccttgacacctaaacttgtgacgtaattggagcgagtgcataatgtgttgcaaagaggctaaccttcgacgaaatccagagcatgacatacttggaagtgataggtactggaactgcttatcagtgcccaaccattgaaggtggagtggactcattagccttcaaggcatggaaatacaatgccagaagcttggcctggaacacacttccttcacggtgaatgcagaaggtgttgtcaagaatgccccgatcgaatttcagaacaccagctcatgacttgt

SEQ ID NO: 214768 - DNA, 457 bp, Glycine max
ggacaatggattactagtatagtaatcgattccctaaatttatgaacccctccaactaaatccaataatttttttattttattattaatcaaaaatttcgtatatagtttgaacgggccttacaaattggaaattctaatttgttaagaattaatcgaattgggggttttgcatcatcattagctggaattgaaaaatcggggagggccgggtcacaattggtgtcgattaaacaaattgttggaatttccaaagttatacattcttgaagagccgtatatttttcttgttgatcgacgattattacaatatcaggtaaccccggaatatatttaatgccgccaagatatgtttccaaatgagctgaatggctcttcaatatagcggcatttttttttggaaaactattgagtctccccgtcttttgttgcatttctaaggccctgaacttttgaag

SEQ ID NO: 214769 - DNA, 563 bp, Glycine max
  unsure (1)..(563): unsure at all n locations
cttttcgtttagcttgccgcacatatattgcggctcaatataatctacttagtaaacatctatatttatctacctatatctatatagatataggtagatagatatagatagatattcgattagcatatattagcatatattagtatatattggatattcaaaaaaaaaataataaataaaaaaattaagagccataattagaattctgtatgatatttacgtttacggcgtgtgataaaaagatactatatagaactaaaggagattcccgtttcagttacattcaattcaacgattgaccaaaagagaattcaaaaaataacatttagatcacccaaattccaatatttctatgaaacaataattaaatctaacgaatttatttcgattgattgtatccatatggggtaataataaaagggggaggagagctaanaaaaacaagataacatataaagaataagtgccgagggtcaaactgtgtgtatataatcggatcactataagacaactctttcttttgacgtttcaaagaatgattttcgaattcgatggatctaaac

SEQ ID NO: 214770 - DNA, 203 bp, Glycine max
aaacataagaaagaatatatgaagacagtccagtatgaagaatatagtaaaatcatctcaaacttggcatcttctctttgcacctaagacattgagaattctaagaatgttacacgcaagtcccatcacaacttctagcacttggatcagcacaaccttcaggaacagaaatatttacttgccaagtttgctttgcctccaat

SEQ ID NO: 214771 - DNA, 466 bp, Glycine max
  unsure (1)..(466): unsure at all n locations
tgcaattgaagttgaagtcttgcccttctctcttcaactccaaacacaagacatcatcatccatggctgcctccgtctccactgtcggagctgtcaacagagctcttttgaacctgaatgggtctggacctggggtttcagctcccagttcatccttctttgggagcagcttgaagaaggttattggctcaagggtccccaacacaaagatttcctctggaagcttcaagattgttgctgtagaagagaagaaagagattgaagagacccagcagaccgacaaggacagatggaagggtcttgcctatgatatctcagacgaccaacaggacatcacatgaggaaagggtttggtttgagctcccttttccaagctccacaggatgctggaactcactatgctgtcatgagctactacgagtaccttagcactggacttcgncagtacttggacaacaacatggat

SEQ ID NO: 214772 - DNA, 196 bp, Glycine max
caaaattatagaggaagacagtccaatatgaaaaatatagtaaaatcatctcaaacttggcatcttctctttgcacctaagacattgagaattctaagaatgttacacgcaagtcccatcacaacttctagcacttggatcagcacaaccttcaggaacagaaatatttacttgccaagtttgctttgcctccaat

SEQ ID NO: 214773 - DNA, 476 bp, Glycine max
  unsure (1)..(476): unsure at all n locations
cgccaacgaccttgccccactcttcaacgacaccgccgccgccaactacctctgcgcccaattcgattccatttctagaaagctcgccgaaacaacctacgccgtcgacaacacctaccttctgttttcagcgtatcttgtcttcgccatgcagctcggcttcgccatgctctgcgccggctccgtcagagccaaaaacaccatgaacatcatgctcaccaacgtcctcgacgccgccgccggcggtctctcctactacctattcggctttgcattcgccttcggcggcccctccaacggcttcatcggccgccacttcttcggcctacgagattacccgatgggctcctctccctccggcgactacagcttcttcctctaccagtgggccttcgccatcgccgncgcaggaatcaccagcggctccatcgccgagagaacacagttcgtggcttaccttatctactcttctttct

SEQ ID NO: 214774 - DNA, 564 bp, Glycine max
  unsure (1)..(564): unsure at all n locations
caatcatggactctaccatcaactgtaggcagaatggtagcctttttgatgtttcccatatgtgtgggctgagcctcaaggggaaggatgctgtcccattccttgaaaagctagtcattgctgatgttgccgggcttgcccctggaactgggacattgactgttttcacaaatgaaaaaggaggggcaattgatgattcagtaattactaaggtgacggatgaccacatatatttggttgtgaatgctggttgcagggataaagatctggctcatattgaggaacatatgaaggcattcaaggccaaaggtggtgatgtgtcttggcacatccacgatgaaagatccctacttgctctgcagggtcctcttgctgctcccgttcttcaacacctaacataagaggatttgagcaagctattctttggggagttccgtgtgttggacatcaatggctcacagtgctttcttacccggacagggtatactggagaagatggatttgagatctcagttccttcagagcatggactagatcttgccaaggcaatactggaaanatctg

SEQ ID NO: 214775 - DNA, 570 bp, Glycine max
  unsure (1)..(570): unsure at all n locations
ggatccaaccaaactgcactttttagttataactaagaaaatgtgcataatcccgcgaattacttctgaaaattacttctgaattaatgaaattttttcaataatttaagaaaaaatatttaagaactatagcatttcgcgatttattggtaatccactttgattctctattaaccaataattttggactattaccatggttaaagtgaatagtttgaagtctagacgcagtgtagtactctttctaccactatgttaatacagaaatgaaatggtttcgataaaattattagatttttttttcgatatagaacactcatgtcgataaaatggcttgaatcctatttacttacggcaagaaattgaaaaacgggttaatttaaccctcccttttgtacaatgcgtaatcgatgacctatgtataaatgaataagaattctttggatttgaagaaaaaaaacaactttgctgacatatatttgtttggtcagaagagtcctncgaatattctggtcttatattggtaattgttttcagtattctaaaaattaaaatagcgaatagaggata

SEQ ID NO: 214776 - DNA, 296 bp, Glycine max
cattcgaattcattttatttatatattaatattatattcaaatgaaataaaaagatattaaaagatactaattataagaatttgaaagtgaaattataaagttattaaatgattaatcaatttttttctacctgttcctgtagtaaaaagagttccatctgttcttgaatagcttccttcaaaaggacttctgcttccccagtgaatgtcttggtagaagatatgatttctttgaattgaggtttattcgtgtttaagtaagcacgtaactcaacaagaaatttccttacctgtcc

SEQ ID NO: 214777 - DNA, 473 bp, Glycine max
gttcggctcgagatttataataaaatgtggtgcaaactctaattccgaactagtcattaaagccgacgcacgagttcaggaaccaaaaggtagtgaaattgtgagggttgcccctagaccctccgttttggaaaatatgagcttggaggaaatgaaacaagtatttaatgaactacccgaggctctaagcttgcttgctctagcaaggactgctgatggcactcgggcacgatattctagattatacaggaccttggctactaaggttccatcgcttaaggatttggtcggtgagcttgaaaaagtgggtgcactcaaagatgtgagaacatgacctttgaagggttagatggttcttaacttatatgtgcaggtgcctgtgctaaattgctaatgctcttgaggagtttggataagtgttttgcttcgggtagttaatggaagtaggctaaaacgcagcttacgggttcagt

SEQ ID NO: 214778 - DNA, 427 bp, Glycine max
acgctttctccccggagccaagacttgatgacactttcaaaagcgcgattgcaagggccttcagcaagtggaccccagtggtgaacatcgcgttccaggagacgacgtcgtatgaaacagccaacattaagattcttttcgcgagtaagaaccacggtgatccgtatccttttgatggtccaggtgggatattgggccatgcattcgctcccactgatgggaggtgccactttgacgccgacgaatattgggtggcgtctggcgatgtcaccgaatcgacggtgactagagcgtttgaccttgaatctggggcagtgcacgagatcgggcacttgctctgattatgccactcgtcggacctaatagcccttatgtattcttctataccaactcgaactatgaatgtgaatctagcgcaagatcgatt

SEQ ID NO: 214779 - DNA, 297 bp, Glycine max
aaggtaaatttgtcacatttattcattatcatatatgcatcacctagtatcagctggtttattcttaattaagagaaaactaaaatacaatatcttacatgctatttttgttgttcttgaattagaataatttcacctcgataactttcaaaatcctttaatgcaaattaccgaaataaaactctagttctagtacaaacaacacctagctataataattaggggttgataccatagagctttcgaatcccgtctatatcatcttgcgctagattcaccttcctagttcgaggtggt

SEQ ID NO: 214780 - DNA, 561 bp, Glycine max
  unsure (1)..(561): unsure at all n locations
cgaccttgcgattcagcgcagcattgaaggcgattttttactagcatggcagcaataatgttgacgactatgaatattcctctgcacacttcggtttgggttaattcccggcggaagagttggtgctgctacgcctcactttcgcagccagacaggaaggagatccgtctcggtttgcccagcaaaggtcgcatgtccgctgacaccctcgaacttctcaagaattgtcaattgtcagtgaagcaggtcaatcctcgtcagtatgttgctgaaattcctcagctatccaacctcgaagtttggtttcagaggcccaaagacatcacaagaaaattgttatctggagatcttgaccttggtattgttggactcgatactttcagtgaacatggccagngtagtgaagatcttatcattgtccacgaggctctcgagtatggtgattgccgtttatcccttgcgattccccaatatggaatatntgaaaatgtaaattcagtggacgagcttgcaaaaatgcctcaatggacagaagaaaagcctctacgagttgctactggt

SEQ ID NO: 214781 - DNA, 512 bp, Glycine max
atatgatcttattgtcatagagttacttaccgtaagagacaccgggtggtttaagaagactaagagcaaaagaattgagtaatctgcgaggcaatggagaaggagaacgcaagagctttgaaagaatatacgagtacgacatatacaatgacattggagatcctgattaaagccttgaacttcagagacctcctttaggaggtaacgagagaccttatcctagacgttgtcgaactggtcgtccacatagtgaagcagatccattgtcagagaaaagaagtagaaagttttacgttccaagggacgagtgcttctcagaggtgaagcagttgacgttctcaaccaagatattacactcggtgttacttatattgcttccatctctggtgaaaatcatcaaagaaaaggaccttgcattatcctacttcgacgacatagattcactgttcagccatggacttgacttgcctactgaagaaaccgagaagggattcctaggagaaatcatgcct

SEQ ID NO: 214782 - DNA, 412 bp, Glycine max
ggcaattaatcaagagcaaccccttgggttttcgcagtgttctgtttttgaatgaaattctggttaagcagtagtgttgtttaggactaattctggtaatttcgaaaaagaaaataagctaaaaaaaattatcttattggttcaagaacatcctaaagaaacactagtaatatgtgtttatggaaattctgggggtttaggccccagtttatgggactatgtggctatcttatgtttaaattaaaaacccataccggtttaggatcatacttcacacataatatcagattgactttggcaacttaaattgatattctacggggaaccccctttccagtcacacctggctttgagaaagggttcaaaagctcgtacggtacaatgccagctccatttctgttcttaactttgg

SEQ ID NO: 214783 - DNA, 511 bp, Glycine max
  unsure (1)..(511): unsure at all n locations
ggctcgagaaatgccaccatcatcatgttgggaactggaaccgggattgccccatttcgctcatttttatggaaaatgttctttgagaagcacgaagattacaagttcaatggtttggcatggctcttcttgggtgtccctacaagcagctcattgctttacaaggaggagtttgagaagatgcaagagaaaagtcctgaaaacttcaggcttgacttcgctgtgagtcgagagcaaacaaacgagaaaggggagaagatgtacatccaaacccgaatggctcaatacgcagaagagctttgggaattactgaagaaggataacacttttgtgtacatgtgtggactaaaaggaatggaaaagggaattgatgacattatggtgtcattggctgccaaagatggcattgattggactgagtacaagacgcaattgaagaaagcagagcaatggaatgtcgaagtctattaatntctgttcacttgacaaatatcatctnctactttatgct

SEQ ID NO: 214784 - DNA, 539 bp, Glycine max
  unsure (1)..(539): unsure at all n locations
attgaagttgaagtcttgcccttctctcttcaactccaaacacaagacatcatcatccatggctgcctccgtctccactgtcggagctgtcaacagagctcttttgaacctgaatgggtctggacctggggtttcagctcccagttcatccttctttgggagcagcttgaagaaggttattggctcaagggtccccaacacaaagatttcctctggaagcttcaagattgttgctgtagaagagaagaaagagattgaagagacccagcagaccgacaaggacagatggaagggtcttgcctatgatatctcagacgaccaacaggacatcacaagaggaaagggtttggttgactcccttttccaagctccacaggatgctggaactcactatgctgtcatgagctcctacgagtaccttagcactggacttcgccagtacttggacaacaacatggatggattttacattgctccagctnttatggacatactngttgttcacattaccaagaacttcatgaccctgcccaacatca

SEQ ID NO: 214785 - DNA, 588 bp, Glycine max
aaatatcaaccctcttctctcttctccaacatcacacagaaaaatggagaagaaaagcatggctaggagagcacattgtcttgtgttaccatatccacttcaaggacacatcaatcccatgcttcaattctacaagctattggaacatcaaggggtgagaataacacttgttacaactcgtttcttctataataacttgcaaaaagtgccaccttctattgtacttgaaacaatctctgatggttttgacctacgggggcctaaagaggctggagggtccaaggcatatttagatcgcttttggcaagttgggccagaaacatttgctgagcttcttgagaaacttggtgaatcaaatgaccatgttgattgtgttgtttatgatgcattcttaccttgggcactagatgtggctaagagatttgggatagttggtgctgcttatctcactcaaaatatgactgtgaatagtatatattatcatgtccaatcgggaaagcttcaagctccactcatagaacatgatatttcccttccttgcttgcccaagcttcatcttgaggacatgcctactttcttctttgatga

SEQ ID NO: 214786 - DNA, 295 bp, Glycine max
aaatgtaagtgacaattagaccatcactattgaatttctaatttagaacatgatcaagcttatcaatgtaacaaatgattcgtaaattctataatattttcataagaacttccaccttcagcggtagctcttacagctaaagttttccactgaatggcattggttttcatctctttgtctctatccattatctcttttatacaatgttttagagcttctcgccgcacaatatttttctcatcaactggagttcgaatacctattttccaaacatcggcaataagctttgcgtttg

SEQ ID NO: 214787 - DNA, 386 bp, Glycine max
ggaatcacaagttttcttcaccaaagtttaacactgtgaatgcttcatcgttagtaagaggatgggggcgtggaagagtgaaccataggtgtagtagtaggggtttgttgtgtttggtggagaagaataagcacataagtgctttagggaagagttctgggacaagtgaggataaggatgagtcagaggaagtgcttcaggccacaattgagaagagtaagaaggttcttgctttgcaaagggaattgcttcaacagatttctgaaagaaggaaactggtttcttcaataaatagtgaaagcactcctgaaatagaaggagacagcatttcttatgagcacagtgacgaatccttgtcaagtgactcaatttcgcagaaaggttca

SEQ ID NO: 214788 - DNA, 496 bp, Glycine max
agataaaattcagtttcatatcatcctaaatacgagtacaacaagtagtcacatatgaagtagctatgcgacatatcaatcaaactcgttattcatctctgtgattcccagctgcaaaagacaatgcaatgctgaactcacacgggtgtacgttcactatgatttatggaacatgctatataatgatgttcccccatgcatgtgtgtattacactactagcccatagtataggaagggctgggtaagttgatcacagtcgttttgaccttggtcatcatgtttatgctggtggtaatcccttgagatccaatgccactgtcctttataccctgaaagggaaaatgatctggcccacgagctggggcagaatttatctgaactgttcccgtttccattgcatcactgatcattattgctttgttgacatcctttgtgaagacacatccctgaagtccaaagttgctagcattacaatgatggattccttcttcaact

SEQ ID NO: 214789 - DNA, 434 bp, Glycine max
gggaaagaccaagacaattgcattttcatcctaatttatacagaaaaaaagtaagttttagggcccgctattttttttatggggggatcacttggtatgaacctcactttacatggatgggaacatcattttgcctaattcagcttaaacagcaaaaagaggcaactagaaaaaaggggggcagaaacccagaagcttagcaaatccacaggggggggtataacagcctttttacttttgtgaaacaatccaatcagaagcagcattactttgacgggaccaagcttggttttcagttcatccacaggttttatatccagccattttgggcgttccttaagagggaataaaccaaagagacttgatctgtcagaagggttttgatctactccaagattactgacaaagagctcatagagacccattccaaagac

SEQ ID NO: 214790 - DNA, 557 bp, Glycine max
  unsure (1)..(557): unsure at all n locations
tccacaactacaaatctccgctgaacgtggtggaggggaagaggcagtacctgttcgacgataagggaaggaggtatctcgacgcgttcggagggattgctacggtgtgctgcgggcactgccaccccgatgtggtggaggccatcgtggaacaaacgaagcggttgcagcactccacagttctgtacctgaaccatgccataacggattttgctgaggctttggctgctaagcttcccggtaatcttaaggtggcattttttacaaattctggaacggaagcaaacgaattggcaatactgatagcaaaattgtacactggctcccatgacataatatctctaaggaattcttaccatgggaatggtggtggaacgatggggaccacagctcaaagcatttggaaatataatgttgagcagagtggtgttcatcatgcggtgaatccagacccttatcgaggccttttcggttctgatggagagaagtatngtagagatgttcaagaaatcattaattttggaacttcccggaaatgtgcagcttcatatctgagc

SEQ ID NO: 214791 - DNA, 480 bp, Glycine max
ttgcaattgaagttgaagtcttgcccttctctcttcaactccaaacacaagacatcatcatccatggctgcctccgtctccactgtcggagctgtcaacagagctcttttgaacctgaatgggtctggacctggggtttcagctcccagttcatccttctttgggagcagcttgaagaaggttattggctcaagggtccccaacacatagatttcctctggaagcttcaagattgttgctgtagaagagaagaaagagattgaagagacccagcagaccgacaaggacagatggaagggtcttgcctatgatatctcagacgaccaacaggacatcacaagaggaaagggtttggttgactcccttttccaagctccacaggatgctggaactcactatgctgtcatgagctcctacgagtaccttagcactggacttcgccagtacttggacaacaacatggatggattttacattgct

SEQ ID NO: 214792 - DNA, 329 bp, Glycine max
ttcgttttttttttttttaagtggacactttaactcaaaattatagaggaagacaggccaccatgaaaaatataggaaaatcatctcaaacgtggcatcttgtctttgcacctaacacattgagaattctaagaatgttgcacgcaagtaccatcacaacttctagcacttggatcatcacaaccttgaggaacagaaatatttacttgccaagtttgctttgcctgcaattcaggattggaagaaagttcccctgtaaatagcatcctcgtttgcattcccaagtgcagcctcgctcatgttcttgtcagccaattggactctcttga

SEQ ID NO: 214793 - DNA, 481 bp, Glycine max
ggaaaatctttccaatgtgagcttgtctttgccaagatgggaatcaaccccatcatgatgagtgctggagagttggaaagtggaaatgcaggagagccagcaaaactgatcaggcagagataccgtgaagctgcagacatgatcaagaagggaaagatgtgcgctctcttcatcaacgatcttgatgcaggagctggtcgtcttggtggaaccacacaatacactgtgaacaaccagatggtgaatgccactctcatgaacattgctgattaccccaccaatgtgcagcttccaggtatgtacaacaaggaagagaacccccgtgttcccatcattgtcaccggtaacgatttctcaacactctatgcacctctcatccgtgatgggcgtatggagaagttctactgggcaccaacaagggaagaccgcattggtgtttgcaccggaatttttcgcactgatggtattcctgaacaggaca

SEQ ID NO: 214794 - DNA, 311 bp, Glycine max
tttttttttttttttttttttttttttttttttttttttttttttttttttttttttttttttttttttttttttttttttttttttttttttttttttttttttttttaaaaaggaaagggcccccacctaattttagggggcccccgcctccaaaaaatttgggggaagccggccccatttaaaaaatttgagggaaatccctcaacattgcttttttttttttccccccaaaaaattggaaatgctaaaagtgttccccccgagtcccaaaaacccttttaccctggggatgtaaaaaaaccccttcc

SEQ ID NO: 214795 - DNA, 478 bp, Glycine max
actggctgcattaacccaaaacatggatcacttgacagtgagcagctgatatactcgaatgcacaggatcgttctaatgcaattgcactcgttgatgcatataactactctgatcactaccttggttgaactcttggacgttacgacggctatgtgtataccaagttagccaaagaggcatggaaggatcctgatgatgatccagtggatactgatggctttaaagagtgtatacgaccgatgcttaatcatcaacttcccaatgctactctggcgttaagtttgtggcaatgatgctatgggcatctaagaaagtcacgcacactattctgatgtacaactgttaatcaagctgcggttgccagctagtaattaccatcgcaacatggtgtatctggaactggaactgggacagactcatttatttatgacattaacgatactcgatgtctaggtaactatgaccttgttggaaaca

SEQ ID NO: 214796 - DNA, 533 bp, Glycine max
cgaactcccgatttttcttcctcttcaatctcgtccctctctgtctctccatccttaaatatacacaacatcttctaaggagaaaggggttccgaaagttacgataaaataaaaatggatccaaacgcggtgaagtccactctctccaatctggcgtttggaaacgtaatggcggcagctgcccgtgattatcagaaggaattgcatgctcaagagaagacacatgcatcaagttcagtacatcaggaggttgaccttgacgagttaatggatgatcctgagttggaaaaattgcatgcagataggattgcagctcttaagaaagaagcagagaaacgggaggaatggaagaagaaaggtcatggagaatttacggaagtaaccgagggtgatttcttaggcgaagtcacaggaagtgaaaaagtgatttgtcacttctaccataaggagttctatagatgcacgataatggataagcatttaaagtctcttgcaccaaagcatatcgatacaaagttcatcaagcttgatgc

SEQ ID NO: 214797 - DNA, 483 bp, Glycine max
cgaactcccgatttttcttcctcttcaatctcgtccctctctgtctctccatccttaaatatacacaacatcttctaaggagaaaggggttccgaaagttacgataaaataaaaatggatccaaacgcggtgaagtccactctctccaatctggcgtttggaaacgtaatggcggcagctgcccgtgattatcagaaggaattgcatgctcaagagaagacacatgcatcaagttcagtacatcaggaggttgaccttgacgagttaatggatgatcctgagttggaaaaattgcatgcagataggattgcagctcttaagaaagaagcagagaaacgggaagaatggaagaagaaaggtcatggagaatttatggaaataaccgatggtgatgtcttaggcgaagttacaggaagtgaaaaagtgatttgtcacttctaccataaagagttctatagatgcaggataatggattagcattta

SEQ ID NO: 214798 - DNA, 381 bp, Glycine max
gtgggaagaagcttgtgaactcaaacgatggacctacaacctttgagcagcctaagatgactctggagaagctcttgacttctggtaacatgcttgtccaagaaccagagaatgtcaagagagtgctattggctgacaagttcttgaacaaggctgcacttgcaaatgctaacgaggatgctattcacaggggaacttgctcccaatcttgaattggatgcaaagcacacttggcaagtaaatatttgtcgtcctgaaggttgtgctgatccaagtgctagaagttgcgatgagacttgcatgtgacattcttacaatgtttaaaagcctatgtgccaagagaagatgcctagtttgagatgatgcacctatattggtcat

SEQ ID NO: 214799 - DNA, 270 bp, Glycine max
gaggacaaaaggaaaaggccccaaatttaatttaagtggacacttttacttaaaattttagaggaggacatgtctatgttaaaaatatagcacaatcctttcaaacttggcctcttattttttgacctaacacagtgagaattctaaaaatgttacacgcaagtaccatcacaacttaaaccattttgatcagcacaaccttgaggaacaaaaatatttacttgcccggtttgttttgcgtgcgaattaagattgggagaaagatcccct

SEQ ID NO: 214800 - DNA, 470 bp, Glycine max
acctcttccatgcagatatgccatgagtttgagaggtttagcacttacttacccgatctcaaggttgctgtcttttatggtggagtcaacatcaaagttcacaaggatctgctgaaaaatgagtgccctcatattgttgttggaacaccgggaagaatactagcattgactagggataaggacctttctttaaagaatgttagacatttcatattggatgaatgcgacaagatgctggaatcactgggtatgtttcattgatgaatagtcactactgatttgaattttactttcgattttttatagtatgattttattgctcttatatgctgtctgcagatatgaggaaagatgttcaagacattttcaagatgactccccatgataagcaagttatgatgttctcagcaacactcagcaaggaaattcgcccagtctgcaagaaatttatgcaagatgtaaatgctcat

SEQ ID NO: 214801 - DNA, 501 bp, Glycine max
ttttttttttttttttttttttttttttttttttttttttttttttttttttttttttttttttttttttttttttttttttttttgggggggggggaaaaaaaaaccttttaaatattcccccttaaaaaaaaaattaaaagggccccctaaaaagggaaaaccctttaaagttttttggaaaaagtaaaaaacccccttttttccaaaataaaaaaacccaaatttttttaaaaacataaaaaaattagggggggggggttaaaacaaaaaccaaaaggaaagaggttaaaaaaaaaaaaaaaattggttccccaacaaaaaattggcgggaaaaagggttcctaaggggcctttgccatttaaaaaaaaaacttttttttctgggacatcccaaaaaaaatcctttttaggggaaaggtccccccccaaaggggttgggccaaaaaaatttttttgttaaaatttttaaaaaaaaaaaatttgaaaaagcccccggct

SEQ ID NO: 214802 - DNA, 442 bp, Glycine max
gataccatcgataacgtgaaggcaaagatacaggacaaagaggggattccaccagaccagcagaggcttatctttgctgggaagcagctggaagatggtcgtactctagctgattataatatccagaatgagtccactctgcatttggtgttgaggcttcgtggaggtatgcagatatttgtgaagactctgacagggaagaccattaccttggaggtggaaagctctgatactattgacaatgtgaaagctaagattcaggacaaggaaggtatctctccagatcagcagaggctcatttttgctgggaagcaattggaagatggtcgtaccttggcagattacaatattcagaaggaatccactttgcatcttgtccttcgacttcgtggaggttgctaaggggaatccctattatgaagtgctctcatatgtctcatct

SEQ ID NO: 214803 - DNA, 415 bp, Glycine max
  unsure (1)..(415): unsure at all n locations
tgtggttttcatcgtcttccttctcttatatttctttttttttttttgtcttcgccgcacgccgaaacaatggccggaaaaggagagggtcctgctatcggaatcgatctcggaaccacctactcttgtgtcggtgtgtggcaacatgaccgagttgaaatcatcgccaacgaccaagggaacagaacgacgccgtcttacgtcggcttcactgataccgagcgtctcatcggtgatgcggctaagaaccaagtcgccatgaaccccatcaacaccgtcttcgatgccaagaggttgattggtcgtagattcagtgactcctctgttcagagtgatatcaaattgtggccttntaaggtcattgctggtgctgctgacaagccaatgatcngtggtaactacaagggtgaagaga

SEQ ID NO: 214804 - DNA, 309 bp, Glycine max
cacacgggcaaaacaattagtatcccatccaacaaaaatcataaaagttaaaattcaataaaaaagcatcaaataagttttaaacagataaatggatgaaagcaactacacatttagtccacttcctcaatcttggggccagcaccacttccaccagaaggagcagcataatcatcctcggctgccccagcaccagcaccacccatgtcaggaccagcaccaccttggtacatcttggcaatgataggattgcagatgctttccaattccttcattttgtcctcaaattcatctgcttctgcgagctgg

SEQ ID NO: 214805 - DNA, 570 bp, Glycine max
  unsure (1)..(570): unsure at all n locations
caagtatgttgtttccttcctcaaggaacatggcaaggaaatatataatgaagttcatgcagcatacattgatacgatgaacaaggttcttagtgctcatttccgtgcttatatacaagcattggagaaactacaattggatatagcaacatataatgatttaattggtgtagagactagaagcagtggcctattcataagagcaagggaaccactgaagaatcgatctgctgtatttgctcttggggataggattaatatattgaaggatattgatgaacctgcattaattcctcatatagctgaagccagctccaataaatatccatatgaggtcctattcaggagcttgcagaagctgctgatggatactgctacttcagaatataatttctgtgatgatttctttggagaagaatctatattttatgaaattttttcaggtccatttggtgtcattgatgagcacttcaattctatacttccaaatngttatgatgctataggtctcatgcttatgattcgattatacacaagcatcagctcatcatgtctcggagacggatccat

SEQ ID NO: 214806 - DNA, 470 bp, Glycine max
aaaaacaaagaacaatgattctgagatctgcagcagctgcagcttctgcttctgcttctgtctcacgcatatcaaaaccccataacccaccattcctttcacttccacaccccaacactctcaaattccataaccaaccttctcataatccacgcaacaacgttcttctgccacttccctcacggactcaacgctgctacattcgagccataagtgacgcaactgcggaacctgaaatttctaagaaagaacaaaacgagtcacctaaagattggaagattaaaatgctctatgacggagattgccccctctgcatgcgcgaggtgaatatgctaagagagaggaataagagttacggcacaatcaagttcgttgatataggttctgatgattactctcccgaggagaatcaaggccttgactacgaaactgttatgggaagaattcatgctattctcttagatggatct

SEQ ID NO: 214807 - DNA, 620 bp, Glycine max
  unsure (1)..(620): unsure at all n locations
tgcaattgaagttaaaagccttagccttccctacaactccaaacacaaagacatcatcatccatggctgcctccgtctccactgtcggagctgtcaacagagctcttttgaacctgaatggttctggagctggagcttcagctcccagttcagccttctttgggaccagcttgaagaaggttattgcctcaagggtccccaacagcaaggtttccggtggaagcttcaagattgttgctgtagaagagaagaaagagattgaagagacccagcagaccgacaaggacagatggaagggtcttgcctatgatatctcagacgaccaacaagacatcacaagaggaaagggtttggttgactcccttttccaagctccacaggatgctggaactcactatgcagtcatgagctcctacgagtacctcagcactggacttcgccagtacttggacacaaaatggatggattctacattgctccaagctttatggacaagctngttgttcacatctccaagaacttcatgaccctgcccaacatcaaggttcctctcattcttggatctggggagcatggacaggaaatctttcatgtgagcttgtctttcagatggaatcacc

SEQ ID NO: 214808 - DNA, 310 bp, Glycine max
aggacaaaaggaaaaggcaccaaattcaatttaagtggacactgtaactcaaaattatagaggaagacggtccaatatgaaaaatatagtaagatcatctcaaacttagcatcttctctttgcacctaagacattgagaatgctaagaatgttacacgcaagttccatcacaacttctagcacttggattagtacaacaaccttcacgaacagaaatatttacttgccaagtttgctttgcctcccattcaagactggaagaaagttcccctcttgatagcatcctcgttagcatttccaagagcagcct

SEQ ID NO: 214809 - DNA, 561 bp, Glycine max
tcttcttcttcttttgtttctttttttttctgcgtaggcaaagagagagagagaaaagcgtgaatcatgtcggacgaagagcatcacttcgattctcaggcggatgcgggagcgtccaagacgtatcctcagcaggctggtaccattcgcaagaatggctacatcgtcatcaaatccaggccttgcaaggttgtagaggtctctacgtcaaagacaggcaagcatggacatgcaaagtgtcactttgttgcaattgatatttctaatgggaaaaagcttgaagatattgttccatcatcccacaactgtgatgttccacatgtgaatcgcactgactatcagcttatcgatatctctgaagacggctttgtgagtctgttgactgataatggaaataccaaggatgatctgaagcttactactgatgaggcattgcttgctcagattaaagatggattttctgaaggaaaagatctcgtggtttctgctatgtctgcaatgggagaagaacagatctgttcactgaaggacatcggtccccaaaaataatatgatgctatg

SEQ ID NO: 214810 - DNA, 556 bp, Glycine max
cggatctacaacaaactcatggacttcattcggaatcagcacagggacagaggctatcaagaggtcatatctccaaatgtatttaacatggatctatgggtgcaatctggccatgctgcaaattatagggaggatatgttgatcttagaggtcgacaaacaagagtttgggtcgaaaccaatgaattgcccagggcactgcctgatgtttaaacacagggttcgatcatatagagaacttcctcttcgctttgctgattttggggtttagcatcagaatgaggctagtggtgccctgagtggattaacacgtgttacgagatttcagcaggatgatgcacatatttgctgctgggagtcccagataaaggatgaattgatgaatggcttgaatttcatcaattatgtctataagatatttggcttcacgtatgagctgaagcttttcacgaggccagagaaatacctaggagatattgcaactagcgacaaagctgaaagtgctcttaaagaatgctcagatgatcttggcagccctggcagttgaatgaagggga

SEQ ID NO: 214811 - DNA, 480 bp, Glycine max
ggggaagcaccagatgcacgtgagggtcatgatgcagcacttgttggcaaacgactatttatgtttggtggttgtgggagatctgctgataacattaatgaggtgtactacaatgacctttacatattgaatacagaattgttcgtttggaaccgtgctacaacatcaggcactccaccatctcctcgtgatggccatacttgctcatcttggagaaacaaaattattgtgataggtggggaagatgaaaatgattcttatctgtctgatgtccacatgctagatactgatactctaatctggagtaaactgtgtacgtcaggccaattgttgccacctcgagctggtcattctacggtttcttttggaaagaacttgtttgttcttgggggctttacagatgctcaaagcctatacaacgacctgtatatgctcaacattgagacttgtgtgtggacgaaagtggcaattacaccctat

SEQ ID NO: 214812 - DNA, 421 bp, Glycine max
gacccgtcgtggagcaaaactttacattttgagaccgcaaaatgtctgaagtgaatgcgacccctgaaattcctcaaagcaacaccatctacatcaacaacctcaacgagaaaattaagattgatgagttgaagaagtctctgaacgctgttttcactcagttcgggaagatacttgaggtgttagctttcaaaaccctaaagcacaaaggtcaagcttgggtggtctttgaagatgcctcttctgcttccaacgccctaaggcaaatgcaaggtttccccttctatgataagcccatgagaatacagtatgcaaagaccaaatctgatataatagcaaaagcagatggtactttcgttcctagggaaaaacgaaagatgcatgatgacaaagccaaaaagcggaaggaccaacatgatgc

SEQ ID NO: 214813 - DNA, 429 bp, Glycine max
gccatttgggagttaggttctgcacgctctgcttccagcgagtgttatttcttcgtttcaacaccttaatttgcacacgctgcttcttcagcttgagaaatggcacaagaaacccttctattcacatctgaatctgtaaacgagggtcaccccgacaagctgtgcgaccagatctctgatgcagtgctcgatgcgtgccttgaacaggaccctgacagcaaggttgcctgtgagacatgcaccaagaccaacatggtcatggtctttggagagatcacaaccaaggccaacgtagactatgagaagattgtccgtgacacatgccgcgaaattggattcatctctgatgatgttggtcttgatgctgacaaatgcaaggtgttggtcaacattgagcagcagagccctgatatcgcccagggtgtgcac

SEQ ID NO: 214814 - DNA, 423 bp, Glycine max
ggggagaagacattagacctttgaatgaagttgtagtagtcatggaacacccaaattttttattcacacctagcaagaaattcattgggggggggggttaacttcacaacaattttaagcttgggggttttaaaacttgggggggttcacaacttcccaggggaaggcgggggcatccctttcaaagggtccataagcaggtgttttgaggaacctatggccaccccttttaagggccaagttaatggggatcattccagggctgaagtcgaaattcttctttacaatttgaagaattttcttggcaggaattttcccagtttcataaggggccacaaacactgacaagggcttagggacaccaatggcataggaaacttggacaatgcaccttttgggaagggcatttgccacaacactttt

SEQ ID NO: 214815 - DNA, 595 bp, Glycine max
  unsure (1)..(595): unsure at all n locations
ggcgcacgttagcacaaactatcatggccacggcaacagcagctgccacctcgtcctttatggggacgcgtctcctggaggctcactccggagcggggcgagtgcacgcccgattcggcttcggcaagaaaaagggctcccgccccaaagaaagcctacaggggatcgggccgagacaccgacagacccctttggtatccgggcgccaaagcgcccgaatacctcgatgggagtcttgtcggagactacgggttcgatccgtttgggctagggaagcccgcggagtacctgcagctcgagctggactcgctggaccagaaccttgcgaagaacgtggctggggacatcattggaaccaggaccgagctcgcggacgtgaagtccacgccgtttcagccctacagcgaggtgtttaggctccagaggttccgtgagtgcgaactcatccatggaaggtgggccatgctcgccactctcggagctctcactggtgaagtgctcactggtggtacatggcaagacgcccgaaaggttgagctagtagaaaggtcatcataccttgggcaccacttncttcttatcaccacactgatct

SEQ ID NO: 214816 - DNA, 522 bp, Glycine max
  unsure (1)..(522): unsure at all n locations
ctgggcaatcaaaaggctatggctttgttcaatttgataatgaggaatctgcccaaaaagctatagagaagctgaatggtatgctgttgaatgataaacaagtgtacgtgggacccttccttcgcaagcaagagagagaaagtgctgctgacaaggcaaaattcaacaatgtttttgtgaagaatctatcagaatcaaccaccgatgatgagttgaagaacacttttggtgaatttggaactattactagtgctgtagtaatgagggatggggatgggaaatcaaagtgttttggatttgtgaattttgagaatgctgatgatgctgctagggctgttgaggctctcaatggcaaaaattttgatgacaaagaatggtatgttggaaaagctcagaagaaatctgaaagggagaatgaattgaaacaacgatttgagcagagcatgaaagaagctgctgataatatcaaggcgcaaacttgtatgctaaaanattagatgatagcattggtgatgaaaaact

SEQ ID NO: 214817 - DNA, 292 bp, Glycine max
acggaaactccaaaatataaaccttaagaaacaaggttgtcattaagagataacgaaacaaactcaacctgaaatctgtatcaaagccagtgcagaaaataacaatccatcatcactaagtaaactccaaaatataaaccttaagaaacaaggttgtcattaagagataaggaagccagctgatcagcagtaccgccagcctgctgctgagcaacattccttaggacgtccattgcctcagccacctttgctttcagggcttctggcgactcaagcaaatgcagaacttcag

SEQ ID NO: 214818 - DNA, 442 bp, Glycine max
aaaccgacttcaaagttccggaaacgattacgctttgcgtcaacaactgcggcgtcaccggaaaccctgtcacgaataacatgtgccagaagtgcttcactgcctctaccgccaccacttcctgcgccggaggtgcccgaatagctactacggcgaccagatccggcgtattcgcgcgttctcagaagagatcttttcctgaagagccctcgccggtggcggatcctgcttcttcggaccagacgacgccgtcagaggcgaagcgcgtggtctaccgctgctgcggatgccggcggaaggtcggactcaccggattccggtgccggtgcggcgagctcttctgcgccgagcaccggtactccgaccgtcacgactgcagctatgactacgaagccgtcggaagagaagccatcgcgagggagaatccggtgatcagagctgc

SEQ ID NO: 214819 - DNA, 151 bp, Glycine max
ctctgaagtgggattatttatcgggggactctgtgatagttagtctcagaaatcggtaaacaaataccggttacagtggatggtcatgtattattaagtgtaggaattggtaacgaataattattttattaatgaaacatgtatttttttt

SEQ ID NO: 214820 - DNA, 385 bp, Glycine max
tgggaatgatcagactccaggttgccggtcgcccttaatgaactaattcgccggagctgacctagctcagtggccggccttcgtcctttttttttttagggtctacacacttataacagaaaaggtttacaaggaatgacagtgcgaagctggaaatatagcgataagctattaatggctgtggttttagggctaagcaattaacacattgggataattttgaatgttgcacactaataaatcgactaattatacccatgggttcataacaaatttgaggacccgattggatcgctggcaaacgcctacaaaatgaacgcttggattgcataaagggtcccttataaatagcaatggtttatgcatccctatgccaagcctcaca

SEQ ID NO: 214821 - DNA, 471 bp, Glycine max
ggttcatgagcaggttcgggaagagttaccgaagcgaggaagagatgagggagaggtacgagatattctcgcaaaacctcaggttcatccgctcccacaacaagaaccgcttgccctacactctctctgttaatcattttgctgattggacttgggaggagttcaaaagacacagactaggcgctgcccaaaattgctctgccactcttaacggcaaccacaagctcactgatgctgttcttcctcccacgaaagactggaggaaagaaggaatagtgagtgatgttaaagatcaaggcagctgcggatcatgctggacattcagcacaactggggctttagaagcagcctatgcacaagcatttgggaagagtatctctctttctgagcagcagctagtggattgtgctggccgtttcaacaactttggctgtaatggtgggttgccatcacaagcctttgagtacatca

SEQ ID NO: 214822 - DNA, 514 bp, Glycine max
aacagggagaaagtgaaaattccattgaggtagtgtgatatgatcacattcacattgattcaaatgctatatacaagtatcttagcatcatctgaaagctaagaagccaactacataataaaagcttcaaataaattaataataacatggcgcaagctttgatttaaatccactaatgccaacaacaaaaaaagaagaaattcagaaaccacgaaatatattacacaaatggcagaagagaacagagcaagacggagcataccaagcggaatcaaacaatggcacttgcacctccaccggaactcgaagcagagttaaccactctctcttcctcatattccttatcatccgctggtagctcatacctgcaaacagggcaagaatttcgagaactcaaccaaggaacaatgcaatctccatgatacccatgcccgcacggcaacctcttcgccaagtctccaacaccgagcaaatccttacatatagcgcacgccacggcttcgctttcggacgc

SEQ ID NO: 214823 - DNA, 441 bp, Glycine max
gaatgcgcaacatatgaagtctcacaggaggcaggcttctctggtggggagtgtggccatgggtttgttgttttccctcttctgcgtctttggtttgatcattattgccattgagaccaggaagaggaggaagaagaaggaggctgctcttgaagcctatgctgatggtaatttgcattcgggtcctgccaacgtgagctggaagcacaccagtacccgggaagcgcttagcataaaccttgcaacgtttaagaggccgctcaggaggcttacttttgcggaccttcttgacgctaccaatggctttcacaatgatagtctcattggctctggtgggtttggggatgtttacaaggctcagttgaaggatggaagtgttgtggctatcaagaagctgattcatgtcagcggtcaacgggacatggaattcactgctgaaat

SEQ ID NO: 214824 - DNA, 501 bp, Glycine max
gaatgagaaaagtacttttgaaaattctaggaaaacacagatggtaacaactgaagctgtttatatacaagttaaacaactttttttttttgtataaaataacaagactacatacatcaaaggcattcattcccccctttaaccgtttcccccttgtgtctgaaataatttgaagcggcaaagaggaaggaaaaaactttgaggggagctgaatccgtcatctcctccttttctctcttcttgtctgtttcccaaagaatccacatgacacttccggaatttgttgcctaatgcttgctcaattcaggggtttctttaatgctcatctccaccatttcaactgcattgaaactgtcatcttcattggctatggttgactgagaatcaatcccagatcctgcctgaatctccttgaacattgtcaacacttgaaatcatcgtggacgtctccaatgccgatcatccaaacaggaaactgcaatcttcaggtgctgcaaaagc

SEQ ID NO: 214825 - DNA, 534 bp, Glycine max
ggtaatttgtcagggaaggatgattatatggagattgatggtcaaggtagcagaagtgaaactagtggttatcattcggatacagatttggaagatgattgcagagaaacttctgaacctccggttccttcacaaagagttgtcaacatgcttcagggttgtagaagtgttgatgagtttgagagactgaacaagatagatgaaggaacatatggtgttgtatttagggcaaaagataagaagactggtgaaattgtggcattaaaaaaggtgaagatggagaaggaaaaagaaggttttccactgacttctctcagggaaataaacattcttctttcctttcaccacccatgcatagttgatgttaaagaagttgtggtagggagtaaccttgatagtattatcatggttatggaatacatggaacatgatcttaaaggactaatggagggaatgaagcgccctttagccagagtgaagtaaaatgcttaatgctccagcttttagaaggtgtgaagtatcttcatgacaact

SEQ ID NO: 214826 - DNA, 304 bp, Glycine max
tttttttttttttttttttttttttttttttttttttttttttttttttttttttttttttttttttttttttttttttttttaaaaacccaaaacccggttaaatgggttcccccggcaaaaggggaagggtacacatacaactttcgaggaaaacgggcttttccttttttaagaggggaaaattgcccaattttttgggcaaggggggccccaggggcatttcaattttggggtaaagcctaaggggggtcacccgaaaaagaacgggcccccgggggggaaaaaaaacttttttgggccc

SEQ ID NO: 214827 - DNA, 558 bp, Glycine max
gccatttgcatgagatagatagatagaacgaaaccgaatcgatgatggggtgggtggcgaatcggtggacgggcgtcgccgccgccatatggatccagtggagctgcggcgcatcgtacaccttcagcatctactcctacgtgctcaagtccacgcagggctacgaccaatccacgctcgacaccgtctctgtcttcaaggacatcggcgccaacttcggcgttctctccggcctcctctactccgccgtcggcctctacacaacccaccgcgcctccccctccaagtccatatggacctcgctcagcgggccctgtgtcgtcgtcgcggccggcgccgtccagtgcttcgctggcttcatcttcatctgggcctccgtcgtgggcctcgtgagcccgactgccgtgccggtcatgtgcttcttcgcgtggctcgcgtctaacggtcagaccttcttgaacacctaccatgtcgttaccggcttgcgcaattttcctgagtacagctgcaccatcattggtatcatgaagggatttctgcgactgagtggagctatct

SEQ ID NO: 214828 - DNA, 497 bp, Glycine max
gataaatgacaaatatggaactcattcattccccttctatatcttacatctatagtctttttgccctggcgtatctgtttcacatttaagaaaagtctctagtctagggttatagattgggggaatactctgcaatccgaaattttcttgactgacatgacagaaatgagtattctaaaaaaattcatagaatgtgccgaactgtttgtcttacatgacatgttaaactgaatgaccggaaacacatctacaagacctgcgtactggaacctatagagaaacagtcctattaatcagaacgctcaacgaacatcgcatgaatacgatattgcacttctcgactaatataatttgagtctttattctaagcggttattctattcttggtaatcaagaacttgttgtgactaactcttcgattcgagaatttatatatcacttaagtgacacaatgaaaggtatgcctagtcttctattaactgaaccatgtatcggac

SEQ ID NO: 214829 - DNA, 530 bp, Glycine max
  unsure (1)..(530): unsure at all n locations
attgattcagttttgtgacgctggaacttcatccaagctgttgatcaagggcggcaccgttgtgaatgctcaccaccaacaggttgccgatgtctatgtcgaagatggtatcattgttgccatcaatcccactattacggttggagatgaggtgacggtcatagatgccactggcaagtttgtcatgccaggttaccccttaatcttttcaatctaacactcaccactacttaatatctacacttaattaaagaaaatgaatcaggtcctgctagaattaatgtcatagatgaaggatctatgtatgtacataagatcatgggaagatacatatctgtctttctagtcttcttgcatctacttcaaagtcttgtataaaacaatattnttggtccttagtcaggcacttgatgcactattggatggttctgatacactacaccataggaaggaattgaatgcgtggtagtgagctctattaacaaatcaccttccttaatggtattccaaaactggtggaattcctactc

SEQ ID NO: 214830 - DNA, 583 bp, Glycine max
cttgtatgatggagaagatccagcacagtgaggtggaagtgaagggactgaagctgcacgtggcagagattggaagtggctccaaggcagttgtattcttgcatggattcccagagatctggtacacatggaggcaccaaatgatttctgtggcaaacgctggttatagggctattgcctttgatttcagaggctatggactatctgagcaaccagtggagccagagaaggaaaccatgtttgaccttgttcctgaagtcgtgggtcttttagatgctataaacatcagcaaggctttccttgttggcaaggacttcggtgccatgccaggatatcttacagctgccgtgcacccagaaagagtagctgctgtcataactctaagcattccttttattcttcctggtccctctgctgttcaaaaccaccacctacccaaaggcttctacattactaggtggcatgaacctgtgagggcagaagcagcatttggccgctttcccgtgacatcagtgataagaaacatctacactctcttctctacaagtgagattccaatagcagcagatgatcaagaaatcat

SEQ ID NO: 214831 - DNA, 302 bp, Glycine max
ggaatctgctaaaagtacatttattcttgactaacatattcaaagatgatacactaatagcagtttccctgaaactcatttagcaactagattggagctctgtagagctggagaaccttgttccatgatggtctactgctaatgtcatcccaccaggcacccacatgcttcctctcctctaacaaatactttttccccatattgttcacaacataatcaagaaatggaaggtggctaatatcagcaatgctgaagaaatccccagccaaatacttagtctttgagagcctctcctcatagat

SEQ ID NO: 214832 - DNA, 414 bp, Glycine max
aataggtataagccgagattcataattcaaattagccgaactttatacagaagcgaccaatttccaaacattaaaaaaaaaaaaaggggagccaccatgagcttaacacacccattacaaggccaaaacacttgaacttgctggaagggaagacatgacccctttattttaagggggtttggttaacacaaaacaccagagtgcccgaaaaccatgccaggcataatgcataagtttttagctccacattaatgggttatcattattcctaaataagggctatctttgtttgaagttggtcttcccaaacctcacttgccagggccggggttgcaggaacaatttggtccacatttgcaggcagtgtttttagcgggcacacccatttcagccccctcaaattgagccttaaca

SEQ ID NO: 214833 - DNA, 537 bp, Glycine max
catcaagaattgtctcattcattctacttttgattttaaagatcagtcacaacacatacaaaacagtgaaattgcatactttagatgcagaaacagaccatatggacaaatatagattcgttcatgggacaaatctttcactatacagttaaaagcacaccacttaatcatatgtcattcgtaacaatttattcgcatgtatgttggcatagatgcatacttgtatatcctattataaaaagcaacaccactcgactatatagtagttaggtgacacattttccctcagaaccttgaaactgaggaacatgatgctcagaactccctttctgggaacatgataggagctatgagagaccataagtacaaaagagcagttgcccaggaagtgatgattcgaacccacacagaaggccagcccacgtaaccaacttcccgctctcccaacagatgtagaccaacctgtcagaagcattgcagaatacatgctagcaagagagaaaatcaagtggaagaaggcatatgaatatgtaactg

SEQ ID NO: 214834 - DNA, 490 bp, Glycine max
aaatacaagaatagctatatcagaatcagatgaaattattttggttgaatatacaaacatcttaacaggagttcctcctatgcaaaccttaacattagaactaaaagcctcaaaatcaaaatatggcactacttattgtatcttaagagactgagagaaagcaccaaacatgccttcttgattctgtcttgaggactaggtgctactattggatgatgagatgttgcttttggcttgagaggaagcagctgaggcattactctttacctgtgaagtctgtgtggagctggagtcggtgaaaaaaacaacgttctcatggttgtcaacaaaggcttggagggtccttggaattggaggcaaagtcacatccaagaacccttcaaggatttgaaccacctgacccatggaaggcctatgagattcatcatcttggacacaccatgaagctactttgatgactctagtgacctcttcaatgtcagcaattttc

SEQ ID NO: 214835 - DNA, 591 bp, Glycine max
atcattgtcaccggtaacgatttctcaacactctatgcacctctcatccgtgatgggcgtatggagaagttctactgggcaccaacaagggaagaccgcattggtgtttgcaccggaattttccgcactgatggtattcctgaacaggacattgtcaagcttgttgacaccttccctggccaatccattgatttctttggtgcactgagggccagagtatatgatgatgaagtgaggaagtggatttctggtgttggtgttgacagtgttgggaagaagcttgtgaactcaaaagatggacctacaacctttgagcagcccaagatgactctggagaagctcttgctgtatggtaacatgcttgtccaagaacaagagaatgtcaagagagtccaattggctgacaagtacttgaacgaggctgctcttggaaatgctaacgaggatgctattcagaggggaactttcttccagtcttgaattggagggcaagcaaacttggcaagtaaatatttctgttcgtgaaggttgttgaactaatccaagtgctagaaagtgtgatggatcttgcgtgtaacattcttagcattc

SEQ ID NO: 214836 - DNA, 564 bp, Glycine max
atgtggagaaacttgatcgtacaggctgtctatcaaatcgcagttcttctcgttcttaacttttgtggtgaaagtattctaccaaaacaagataccaaagctgatgcctttcaagtgaagaatactttaatattcaacgcgttcgtcctgtgccaaatattcaatgaattcaatgctcggaaacccgatgaaatgaatgttttccgtggagtgacgaataacaaacttttcatgggaattgttggagtgacctttatacttcagataatcatcatcgagttccttggaaagttcacctcaacagtgagacttgattggaagctatggcttgcttctcttggtattggccttgtcagctggccccttgctatagtcggcaaattcattccagttcccaaaacaccattggctcgttacttcttgaaaccactcaggcgattgaagaggtctaggtctcgtgctacgcaataagcatcgcttcctcaagtggataaccagccatgcatgcatattaagctaacgcctcacaggttacaatatagtatatattattactgctccata

SEQ ID NO: 214837 - DNA, 384 bp, Glycine max
  unsure (1)..(384): unsure at all n locations
cttcagccagcaacttgcgtctctatccattgatttgcaacttgcaaacaacacgaaacaattgcggtgttttttgagcattccgaggatatattttttctctgtaattaattatcctttaaattcccaatattcctcgctctattctcttctcttcgtactaccataggaaggaaggaaggagagagagttatgggttccccagaaaatcaattgtcgctcgcagaagaggctcttcttcaggatgatgagagcaaacaatacacaggagatggatcggttgactttaaagggaggcctgttcttaagcggaatactggcaactggaaagcttgcccatttatcttaggcaacgagtgctgcgaacgttnggcgtactatggc

SEQ ID NO: 214838 - DNA, 363 bp, Glycine max
aactgggtcattttccattttttagttattccgatattcggacgcatcaacttgttatgaaatcacattgatagcctttactcggggcctagctcggctaaaagctagatttgcctcaattggttggctcttgccttccgccttattcaaattagcttctgctatttcaagagtttgctgggcttcttggggatcaatggcactacccttttccgcatcatttactaaaacagggatctcattattggttattttagcaaaaccgcccatcaaagccatcgttaaccattggtctttaagaagacgtattctcaaaatacctatatttacgggtgtgggaataggcgcatgatttgggaatac

SEQ ID NO: 214839 - DNA, 592 bp, Glycine max
  unsure (1)..(592): unsure at all n locations
gaattccacattggaagcaaattaaaatagcatgtgaatatgggacaaatccaaatattgctgctgcattgtcacataatctacagaaccttgaaaactaacagcaatcaaatatgttcgccatttggaatttgaatacaaatacagtgcatcgataatataaccctatgtacagagccaatgtctgactgaaatttgatacagaacattatctattttgtatcataataaaatggtaaagatctttatgttacgtgcagcattatgtgaagaagggggaagtgcatccagctggtgctttagtccttcgtcttcccttttacttcatcattggctccttctgcacgttcacatttccttaaactgcttaagcactgctgaccttgttcttacgtccgaaggtccaatggggtttcgctggagtacgccttaatgccttcactccaaaggggttgttcttgctcctgagacaagttccaacgtaagtgttgcagatgggatagtctgcagggcagcaactgtagtggtcatcacagcaggaagcaccctcaagaggacagcaaccccactcgngcaagcatttcgaactcaa

SEQ ID NO: 214840 - DNA, 491 bp, Glycine max
aaccaacaaatagaatattagatcattccctttgattaatttacaaactacacacaaaaagtttgataagaaaatatgcgatgccagtatggataaagctagagaaagagaagccaattattgtctcaatcttgtatcaacataactgaatctcagcctcacttttttttctcggataagtacatacatacatacatatgtgtttttttcattaattatgatgcagaacagcctaataacaatagacaaaataacatgaaacacagtgaaattgtggaaaacatgaaagaagaaagaaaatgatgattttgatgagaactaatgcaatttgactgcgtcgctcggtcgatatgtatatatattattatggcaggttcaattcaattcctaagcttttgcagccactggagtctcagccttggtggctattagctgctcatataaatctcttatcttcaaaccaactatggtttggaagagacctgttccat

SEQ ID NO: 214841 - DNA, 367 bp, Glycine max
gaagagaatagtaggaaagcagaaagagaagtacatcaatggaaaagaatggttggagcaaatgaaaacctgccactggttctttatgttctcgtattctaacttcttaactgacttcaggaattctctctcagcatatgttgattcatatggataatatcccaaaagcaaaccccatacctcattttgtaattcgtggtcaagtccaccataaaatactctctttctcaaagcttctgaatctgtgactcgtccttcacaatccaagaaggcattccactcttcagaacccaaagggggttgccttggttttccccatactaacgataaattatcgaactcctgagaatccaagacaacaggactt

SEQ ID NO: 214842 - DNA, 534 bp, Glycine max
cgaagaagtcccattcattgcactgatagcagcgatggggatcgatcttaaggctgggggtaagagcacaaagaccaaaagaacagcaccaaagtccaatgacatctacctcaaattacttgtcaagctttatcgattccttgttcgaaggacagacagcaatttcaatgctgtgatactcaagcgcttgatcatgagcaaggttaacaagcctccaatttctttgtcaaggttaattaagtatacgaaggggaaggaggataaaattgctgtagtagtggggactgtaactgatgatatcagagtatatgaagttccagcattgaaaattacagcactcaagtttacagagagagcacgtgcaagaatagaaaaggctggcggtgaatgcttgacatttgatcagcttgcccttagggctcctttgggacagaatacggtccttcttagaggccccaagaatgctcgggaagctgtgaaacactttggtcctgctcctggtgtgccacacagtcataccaagccctatgtacg

SEQ ID NO: 214843 - DNA, 550 bp, Glycine max
ctcgagccgaatcggctcgagattccacctcatatttcatatgtgttccaaacttcttcttggaatgtcccttcctaaataaccctcaaacaaaagccaccttaacatctcttctctgaaaattctctttagagagatagagagatagagagagagagaaagaaattaagaaaaaatggcagcctgcactgtctactcaacacaatctctgagcacaaattgctccatctcaaccccatcaaagacacagctgagtttcttccaccaaaagcaggtagttttctggaggaacagcaacaggggcaacagcagcagcagaagaagctatgtgataacatgtgcagcaggtgactcacagacagtggtgattggtcttgctgcagactcagggtgtgggaagagcaccttcatgaggaggctgacaagtgtgtttggaggagcagcagagccaccgaagggtggcaaccctgactcaaacacactcatcagtgacaccaccactgtcatatgcttggatgattaccactctttggatagaactggcagaaag

SEQ ID NO: 214844 - DNA, 233 bp, Glycine max
aaagcaaattaaaatagcttgtgaatatgggacaaatccaaatattggtggtgcattggcacataatctacagaaccttgaaaactaacagcaatcaaatttgttcgccatttggaatttgaatacaaataccgggcattgataatataaccctatgtacagagccaatgtctgactgaaatttgatacaaaacattatctattttggatcataaaaaaaggggaaagatctt

SEQ ID NO: 214845 - DNA, 532 bp, Glycine max
caatctcataaataaataatcagaacgaataagaagaagaattgaattcgaaaaatcgtagcgtagcgttggttgcgattgaaacggtacgatgggaagaggaaaattcaagagcaagcccaccggtcgccgccagttctgcaccccggaagatatgcttgctggaacctctaaccgtgctcgaacttttagacagaaagaagctgagcatgaagaggagcctgaggaagtatctggggatgaatctggagaagaatcagaagaggaaacttctaagaaaaaaggaacacaaggagttattgagattgaaaatcctaacttggtaaagccaaagagcttgaaagctagagatgttgatgttggaaaaacaacagaactttcaaggcgtgaaagagaggagatatgagaaacagagagcccatgagcgctatatgaggctgcaagagctaggaaaaacataacaagcaaagaatgatttagaacgtttagctcttatacgtcagcacaaggaagatgctgcttaaaagcgaga

SEQ ID NO: 214846 - DNA, 520 bp, Glycine max
  unsure (1)..(520): unsure at all n locations
ggtaacatagaattgagaagtaatggaaatgaagaagccgtgttgtgaagagtcagagacaattgttggatcctgggaatgttggttcgacgatgcatgcatcgttgacatggattactttgtgaagaccctttcaagcatcaaacagaaaggtgttcgtgcagacttgattggttccatcatcactcattatgcctccatatggctccctgacctctcttcctctgctgaaaatggtgtcaccactcacttccaatcccccgaaagcgtcacaaattcatggatgaagaagaggttctttgtggaaaccttggtgagtgttctgcctcctgagaaggattctgtcccatgcaacttcctccttcgccttctcagaaccgccaacatggttcgtgttgacgccacttatagaggtgagcttgagaaccggatttcgtggcagctagaccaagcttctctcanagagctcatgataccctccttcagccacacgtgtgggacactcttggatgttgagcta

SEQ ID NO: 214847 - DNA, 574 bp, Glycine max
  unsure (1)..(574): unsure at all n locations
ctaacatatctgtagagaaaaccagacaccagaaaaggttcgttcagagacaaaaccccaacgatccaaacggtcattgagcatttcatggtgcgagtcactgagttgaatcggataggaatctgagtttgtgatcgtttgacgcggtcatgggtgctgcgggctccaagctcgagaaggctctcggagaccaattccccgaaggagaacgttactttggcctcgagaatttcggcaacacttgttactgcaacagcgtcttgcaggcactatacttctgtgttccgtttcgcgaacaattactagagtattatggaaataacaaaagcatattggacggggaagaaaatcttttaacttgcttagcggacttattttcacagataagttcccagaagaaaaaaactggtgtcattgctcccaaacgatttgtacagaggttgaaaaaacagaatgaactcttccgtagctatatgcaccaggatgcccatgagttcttgaactttntgctgaatgaacttgttgacattctggagaaagaggctcangctgcaaaaactgatcaggagacatc

SEQ ID NO: 214848 - DNA, 416 bp, Glycine max
agagggaatatttcatattaatggcatgggaactaaaaaaacaaccttgagaaagttaataaatttctcaaaattaaaaattttccatgggtgaattaatgccccccccgcagttgtcacccaagttttatcatataatgcttaaaaaaaattaagcctagagttttccaaataccaccttaaatgagttctccaaaaaggaaaaaaaagggggttcatgaaacacaaataaaactggttcctccattgttctgcaccacattatacaaacttggctcaaatgaggagcaaattttttataattttggcaatgcccggggaaaaatgccagggtggtcccaatcagggacaatgtgatcaccagtgatttccttgagggaggggccacccctcaaggccatggttagcttaaactc

SEQ ID NO: 214849 - DNA, 528 bp, Glycine max
caaggtaagaattttattgcacaatgagaaggcagagaaaattgatggttctgtttctcagtacaagttttagaatgaaaaatgaagcaacaagtgtttgtagtggtagtagtagtagtagtaagcatacaaaactacaatggcatggtacatacatataataattgaattaccaattcagaatttgatggctctcacttccacttgttggcaacaatgtcagccaaatccacaaccctttgggagtagccccactcattgtcataccaagcaatcaccttaaccatgtcatctcccatgaccatggtcaacgatgagtcaacggttgaggacacattagtgcacctgaagtcaacagacacaagtggcttatcacacacagagaggattccctggagctcattgtctgcactctctctgaatgctgcattcactttttctgcaaaggtcttctttgagacctgaacaacgaggtccaccactgagacgtttggtgttggcacacggagtgcaatgccattgagtttg

SEQ ID NO: 214850 - DNA, 413 bp, Glycine max
agaatcaatccaatgataaactcaagttttttttggggaaacccaaaaatgttaacgatgtactacatactttcttagttgaaaggggaaaaagaagtaaaaaaaatgacaaccaactagactatgtcctcccttacgatggtaaacgacctacaagtataacgatcccttaaacaaggggggggggagagctcattggccgaacttaaaaaccaaagaagccaagctcgctagcttttttctttttaaatgtctcaaagtactgatagatgatgggtactggaagccatattcctgttcctgaaccgatggcccccatgaaatttggcaacactgtcagggcaccaatacaaatgccttcaaatgcttgcggagggggaaagtattgattcaactttttcttcaagtttgac

SEQ ID NO: 214851 - DNA, 511 bp, Glycine max
  unsure (1)..(511): unsure at all n locations
catcgtaatctcaaatttcattcatgatgattaatgtacagagtacagaaacgcatagataacgctggtaagtaataaacaagccaagaaatttatggatggcgtttatggaacaaatttttgaaacggaagccatccaggatgattcatacaaaaattggttgagcatctaacagtctgacaatgtttcaattaaggcaagctccaagacatgcaagcctaacattattgaaggcaaaaagtatacaacacttcagcaggaatccaggtcacggcagggaggaggcttgggctcacttaacaaagtagtgttccctccttcaggtccactcttaattcggcggggattttgggtgccgngcggnggcttctcaccctttctcagcttttctactatctcaactactatttttggggttatatcttcaaaagtattaataagtatatccctccgatccatttgaataatcggccactgtaatcataggagcattcacacagcatcccatgc

SEQ ID NO: 214852 - DNA, 490 bp, Glycine max
  unsure (1)..(490): unsure at all n locations
actgaaccttcagtttgtttaagtggagatgtcgagactaatgagtgtcttgaaagaaatggaggatgttggcaagacaaacatgctaacataactgcttgcaaggatactttcaggggaagagtttgtgagtgccctgttgtgaacggtgtccagtataagggtgatggttatactacatgtgaagcttttggacctgcaaggtgttctataaacaatggtggttgttggtcagaaactaaaaaaggactaactttctcagcttgctcagactccaaggtaaatggctgtcagtgcccagttgggtttcgtggggatggtactaataaatgcgaagacgttgatgaatgtaaggaacgaagtgcttgtcagtgtgatggctgcagctgcaagaatacttggggtagttacgattgtaaatgcaaggtgaacctcctatatataaaggaacangatgcttgtatcgaaagaagtgaatcaaaatttggac

SEQ ID NO: 214853 - DNA, 344 bp, Glycine max
aatatgaataaggtctatttatttaacttacaataatacattggcattaagacatcgttcggcaacaattgatagttagttacaaacaatattataaaaaggtgagcgaacataaagaaaagagcacgcaattctgaatcatgattcttcagctggtggtacctgagtcaaattcagtccctcttcaggcaagtatgaagataaatggtcccaggatcccatcaccgctgatagtcaatccactctcaggctggaaccttaacatgtctgcacgagccatagcttctgctagggctattctctgtctgaatgtgtgagccatctactccgtcttttcaaagaca

SEQ ID NO: 214854 - DNA, 476 bp, Glycine max
aaatggagcagcacagaaattaggaatcatgagcctcataccaatggtcctgttctggatgatgttttgctagcagacccagagattgcctatgccattgaaaatgaaaaggtggttaataagaccataaaaatatacaacattgatcgtgctgcatgtggacgtatagctggtgtcattgcaaagaagtacggtgacactggttttgctggacagttgaatataacgaagtgctgggcagtcatttgcatgctttctgacacctggaatgaacattcgccttgttggagaggctaatgattatgttgggaagggcattgctggaggtgagttggttatcactccagttgacaagaccggttttgaacctgaggatgcagctattgtagggaacacttgcttgtatggtgcaactggtggacaggtcttcgttagagggagagcacgggaaagatttgctgtgagaaactcgcttg

SEQ ID NO: 214855 - DNA, 598 bp, Glycine max
ggcttgttgttcaagaatggcaatttgtaagaaagatgtttggagagttgaatgtggaatcccttctggatttccgctcacagttatttgtaatagcatttttaatgagatgctcattagatatagctatgaaaaattactgcgccaggctaaagctccaagtatgtttttacaatccttcaaaaattttgtttctttgtgtgtgtatggtgatgataacttaattagtgttcatgaatatgtcaagccttactttagtggttctaaattgaaaagctttctagctggtcataatatcaccattactgatggtattgacaaaactagtgcaactttgcaatttagaaagttagcagattgtgattttctcaagagaaactttaagcagatgtctaatgttttgtgggtggctcctgaggataaggcgagtttatggtcacaacttcattatgtttcgtgtaataatctggaaatgcaagaagcttatcttgtcaatctcgtaaatgtgttacgagaattgtatttgcacagtccagaggaagctcgccaattgagaaggaaagctctttctcgtattgaatggcttgcaaaagctgat

SEQ ID NO: 214856 - DNA, 368 bp, Glycine max
ggagccaaccataaacaaattatataaaaacactacctacataatcttgactgcgaagggcaaaccatttcaatgttatacatagacataatgtctttttgactttggggtcataatcgatatttgatattacccacaacttattaaagttagcttttggatacctatcacagccttgaaggagactggttccagccccacgggtcattagagatataatgggtcacttgcttcacactcaagtaattatcaaggccccattcttctaattcacgaccaaaaccactgcgtttaaagcctccccatggggcttgagtgaagcatggtagacagcaattaatccacacaattccagccttaacagcctt

SEQ ID NO: 214857 - DNA, 448 bp, Glycine max
  unsure (1)..(448): unsure at all n locations
aaggagagaagtaactttcttcattgcacatcatttaaattgagcgacaaaaaaaatcttacagtcttgtctgaattgtttttacacattttggatataaatggatcacacagtcaccggaactttcaacgcctccaatatcttatcatctagctcgaactggatggacttcttatctctcccaatctttacgtactcctcaaaccgttcttttaggtcttcagggaggtttgtggttgattgccatcccaatttagctttggctgctctaggttctgcatataagtgataggtgcggaaagggaaagccttctttgcatcaactccaacagcttttggatcataatgcaaaatgttaacggngcgccctgcagcttgagcacatagttttggctattccgtctagagtcactgcacggtcatttacgcagttgaaaatggtctgatt

SEQ ID NO: 214858 - DNA, 586 bp, Glycine max
ctcgagccgctcgagccgattcggctcgagaaagaatatgagtttgaacagtctgctttttgttttttgttacttccccttccctaggtcatgccaagccagtctgtttcaatttccacctggaatttataattgcttattatgtgataataagaaattatttttttctgtctagctgattattcttccctaagttttgttactgattgctctttttccgagcattggcagcttcattcaccaggtgttttggcaattggaagtagtatgaaaggagaaaattcatattcacatcatttggattcagatgtatgtatgaatttaatagtccttcacacaattatttgacataatttgctacagtttatccattgggtttcttcttgtttaagtccatgttctgcacaaataaatttctttggtaattgttctttaaaatattcaggttggcgtttcagttgttgatcgttttacattttacactcttgctttctttgagaggctgaatatgtatgacaatgcttcgctgagcaggtactaaaaattttatcagccttttcacgtcaagggatttgtccttgctatc

SEQ ID NO: 214859 - DNA, 514 bp, Glycine max
caaactttgtaacttcaaaacatactcctctgttctctctgtttctcttcaatcttcctgaaaaaaacaaaaacacgaaaaatcatccaccctctcacattctctctctctctcctttcaactaatatggcaattgaaaaccaagacaacactgtcagagaaatcaagccaaagaacaggagaatcatgggtgctggaggccctgatgatgacgacaataggtggccaccgtggttgaagccactgctgaaagagagcttctttgttcaatgcaagttgcatgctgactctcacaagagcgaatgcaacatgtattgcttggactgtatgaatggccctctctgctctctctgcctcgctcaccacaaggatcaccgtgcaatccagattaggaggtcctcataccatgatgtgatcagagtctctgagattcagaaggtgttggacatcactggtgtccaaacctacattatcaacagcgcaagggtggtgtttttgaacgagaggccttaac

SEQ ID NO: 214860 - DNA, 566 bp, Glycine max
gagatacactacaagcctacaactctgtctattgcacaatggatgcagatgcagctcctttgcacatagcaatgtatccatggtttgctatggggcacctcaccccatttctccaccttgccaacaagttagccaaaaggggacacaaaatctccttcttcatacccagaagaacacaagccaagttagaagacctcaatcttcacccaaacctcatcacctttgtccccatcaatgttcctcacgttgatggtcttccttatgatgcagaaaccacttcagatgttccctcctctttgttcccactcattgccactgccatggacctcacagagaaaaacattgaacttctcctccttgatctcaaaccacacatcgttttgttcgatttttccacatattggctaccaaacttggctcgtagaataggaataaagtctcttcagtactggattattagccctgcaacagtagggtacatggcatcctcagctagacaaagagaagatgacatgagaaaaccaccttcagggttccctgatggtccatcaagctgcatgcacatg

SEQ ID NO: 214861 - DNA, 504 bp, Glycine max
caaaatactatattgatgctgtattccaaacgcctttaaatattttacatcaggacatgaataccttaaaatcacaaaggaacatagaaatttcgaatcatgaaggatgaactatgaatccttaatatattatctacttgaaattaaacaacttttcgcatattatacatggaaggaatcattttttggtccaaggaagaaagcacatgcaagaggggtctggcgacaactaagagagctacaattagcgataaaaccaccgagtgttcatcgccgaaatgcattgccttcaccgccagacctgccttgagaataatatgtccgacgacggacactctcagctattgatgtgctccctacttcagctgcaccatatacacttttctgaacagtatccaaaaaattcttgccacaaacattatcattctgaattgcttcctttgtatccgactcctcagccttctttatacgtttccatctctgctcttcatgcaactcagcagc

SEQ ID NO: 214862 - DNA, 536 bp, Glycine max
acgtaaccaaacttgaaaatttacataaagaagtagcttccacaaatccacacaccacatctatacaccggacaagaaactagaagtaacaaaacagtatctactgcaaaaaacatattctaatttaagttcacatttgaacataaaaaactacccccaaacaaagaaaactaacaagagatttaaaaatcaaatccaccgaaatctccaaaaccagcgtcgtaagaaccggcatcagaaatcatgtccccaattagaagtccacccaaggctccttcaagcaaccccgcacccaatcccattcccaaattgttcttccccggtctttgaactgctgcagcagcaggaggaggaggagcgtaaccgtccccgagttgtggcgcgtacccataagccgcttgtggcgcgtacccataagccgcttgtggcgcgtaaccgtatccatgttgtggagcgtattcgtatccttgagcgggttgaggcggcggaggataagcatattgtggcggcggcggcggaggatacatggcgggata

SEQ ID NO: 214863 - DNA, 528 bp, Glycine max
gctgtgctaattgttttttctccttgaatttgataaaataattattgattcttacagtgtacaagtcagagcgtattttatagtacaaacataattctgtgacttgcgtgtatgattatgcaacatataattcggcttttccatcaatgaatagactcatgaactcttcaccatccacagtttctttttctatgagaagttgagcaagcttgtgaaggatatcaatgtgagttgagataatatgtgttgccctagaatatgctctctctaccagttccctcacttccgcatccactacatccgcagttgccatggagtaatccttttgcgatgacatctgttgacccaagaatggatttccaccaggtccaccaatggcaacttgtccaatttttttgctgaatccaaatctctcaaccatctgccttgccactcgtgaaacttgcatgaagtcgtttgatgctccggtggtgacattttcctggccaaaaataacctcttcggcaacccttccacccagggcaacag

SEQ ID NO: 214864 - DNA, 531 bp, Glycine max
gttatcatgaaattaggctaaaaggccatcgaacatgtattattatttgaatataaacgtacacaattacaaactctaaacgagtttttttttttttgttgttgttgttgttacaaactccagcaagtttgaaaagtggtacacaataatgaaataatatattaggcatcttagatggccacactgggcagaacaacagtttcaatggtaagtccaggtccaaaaccgaacaacacaccccattcaagtccttcacctgtggttttaagtccattttcagcagatttcctcctcatctcatccaagatgaaaagaacacaagcacttgacatgttcccatattcactaagcacatctctagtggccttcatcttctcaggtttgagacctaacttttgctcaacttggtcaagaatagcaggcccaccggggtgtgcaatccaaaagatggagttgtaatcagagatgttcaatgggttgaaagccttcaaaagtgccttgtcaatgttctttgagacaatcccggggaca

SEQ ID NO: 214865 - DNA, 553 bp, Glycine max
ctttctctctctttgccggtgccacaatccctctctctctccgacgtacatttccatctttttagggtttcatttcatggactccgattcctggatttccacgcgcctctcttcctcttcacgccgccaccattatcgatctgatctgtacgcggaggagagtgaagggaacgatgatttcagggcggagtttctatgccctttctgcgccgaggattacgacgtcgtttccctctgttgccacattgacgaccaccaccctatccaagccaaaaacggggtgtgtcccatttgtgggaagaaggtgggagtggatctcgttggacattttactacacaacatgggaacttcttgagggtgcagcgcaaaaggagggtcaggaaaggaggctctgcttcaacaatttctatattgagaaaagagttacaagaaggagccttgcagtcccttcttggaggttcttcatacttagcttcctcaaattccgagcccgatcctctggtatcatcatttatgtttaacccagttgtagctgatgagtctgtgagtgca

SEQ ID NO: 214866 - DNA, 537 bp, Glycine max
ggaagacaaaaccaatatccattattttttgttgaaaaaaatactgaacgaaaagctcatgaatatttcacgacttcataatggagcaaatccgaacagcttttctaaatacaagggaaatacttaaaattgaaatagaaaagtttatacgctaacaagacttttgccaagaattatgtcatttgttgagaaatcagcctctttccgatatgttcctctaccaaaggccaggttgtacgagtctgctagaccctctacaagtccaaattcaggttccaatccaagcacgctctttgctttctcaactgatgcaaagaaatgctggtcacggaatggaaatgatttctttttcccaaaatcaaaatctttagggttgtagtgaatgatctttggctctgggaacccaccagccttagcacatgctcttgctaatccatcaaatgtgacatacttatctcccgagatgttgaatacttccttgctggccttctcattaccaagaacctggataaaagcttttgccaaaccttaacatga

SEQ ID NO: 214867 - DNA, 462 bp, Glycine max
ctctccaagggtcaattgcaatcatcttcaaatgcagtgtttccctagctagtgactagcatattaggtgtaatgaaacacataacacgatgcaattccaactagtaaaaaattgagctcgaaaactcacacacaccatcaatttaaaccttgaattttaaacattgtaattggaggtcgatataatatacaaccatgacagtactctcagtagtgctaggaaagttgggtcaagggataatgcagcaacaccatgcatgaagttactaacaaaatctgagccaacaaacaaaacagaaaacaaaacactctatgactcaagctgagcataccagatgccctggatcttgacatcctttggagcctttgctcccaaatcagagtcagatggttgaacactctcgaacacaccgataacctcacccgtctcaggcttggtcttggtgacactcaaagtgattt

SEQ ID NO: 214868 - DNA, 476 bp, Glycine max
ggaatagaagctaagagattccatttattgacgcacaagaatctgacatgaatgtggcagtcatagtaaaaattgactatagtacaaaataataatgtaacgacaatacatatttacaccaccatcctccaacccaggctacgtacatcaaccgaccacgtaaaaaaatgatggcagctttttccaatgtctaaactgaagcaaccgaaaacagtgtgtataatcccaacaacacattattagatgaactgtgtatgtacatacattcagttgcttgcactgccttccaacaagctcctcaagctacaaagagcctctgcagagaggctacagcatctcaatttccgttggcgaggaggggatggctctggctccgcgtggtcaagggaagagaaacatacaatgatcacagtgagattgtcgaatgtgttgagacgtaatgcctccataaccaggtccctggcgcatttctctgg

SEQ ID NO: 214869 - DNA, 444 bp, Glycine max
atattaatgttacccttggcgtcagttccaacagagacaattttcattccacacatagcagcactagcaggatttgtaccatgtgctgagacaggtataatgcaaacattgcgggggtggtctccccttgccaaatgatatgcacgaataaccataagtccggcatattctccagcagcaccagcatttggttgcaaggagaaggagtcaaacccagtgatggtgcacaacagttcacccaaattattgaacatttcctgataaccttgagcctggtcaactggtgcaaaagggtgaatatcagtaaagctgggccatgtcacaggcatcatttcagttgttgcattcagcttcattgtacaagaaccaagtggaatcatactgtggcatagtgagagatcttttgattggagcttatacaagaacctaagcaactcatgctca

SEQ ID NO: 214870 - DNA, 398 bp, Glycine max
cattcgaattcattttatttatatattaatagggtattcaaatgaaataaaaagatattaaaagatactaattataagaatttgaaagtgaaattataaagttattaaatgattaatcaatttttttctacctgttcctgtagtaaaaagagttccatctgttcttgaatagcttgcttcaaaaggacttctgcttccccagtgaatgtgttggtacaagatatgatttctttgaattgagggttatttttgttgtagtaagcacgtttctgaacaagaaattgccttacctgttcaatttgtaatgaatcaagataaccattcgttccagaagaaatagaaattatctgatctttcacaggaagaggaggtgattgggattgattaagcaactcggg

SEQ ID NO: 214871 - DNA, 522 bp, Glycine max
  unsure (1)..(522): unsure at all n locations
aaaaaaaccatggacctcataaattcttcaataagctctcacattttgtgaccaaaataatactttaggaaaaaagaaaaaaatgtcatccactgctagcttgggttatggggctccaacctgcttcaacaacgttcatcacacaaagaagcagcaagcaatgaggaacagtttcttgagcaataagcacaacagtgtgagagtgatgaagggttggagaggaagacatggtaacactaacaacacatccaaaagggtaggaattgtgcagtgtagagggttaggggacttcataggtggagacttgataaagtttgatcttggacgttggctttcagatgttgaagagcacaaagcacttgcaatataccctcctcatgaaggaggctatgagggccgctacttgtcgcgtctcaaacgccaagggtactatntcctcgaccttacggctcgtggccttggtgatcctgaaaccaccctcaccaagattcaccctggttgccctcctcatgttggcaagca

SEQ ID NO: 214872 - DNA, 567 bp, Glycine max
  unsure (1)..(567): unsure at all n locations
caaaaactcccgttttctctctctgtttttccatggccatctgatcaaacttttcttgattctctctctcagtttttgctattctgagtgatgggtatgccctgccgctgttcccacacctcccacatcactgaaatcatcatcaccagcttcttccgccacaagtcttaaattacaacaatttccctcaattattcatcaaccaaccaccttaatagccttttccaatggttccttaaagatccaacttggtcggagtaaacatggcggctagtggaagttccttttccaacatcactagcttccttcgcaaccaacaaccctcttcccaacctctcgattcttctctcttcctctctgctccttcaatttttgtttcaggttcgagatccatggtgagttttgaagcagaaggagggaaggggtgtaacggctccttcttccgcgcgtttgacatggacgacaatggggacgagtgcatggatgagtactntcataaacccgagaagaaacgtcgtctctccatgaaccangttcagtttctggagaagagttcgaggaggagaa

SEQ ID NO: 214873 - DNA, 538 bp, Glycine max
  unsure (1)..(538): unsure at all n locations
ctcgagccgattcggctcgagcaaacttccaccaccaagtttgcaagaaccatccaccccgtcacccgtctcgagtacattgttctaccacaaccactaccaccaccacctctaggtctaagtccaatgctaagtcattggtcattgagacccggctcgtgccggtgccgccaatgccaacggtcgttaccactgagatccaccgtccaatgaacaatgacccaagtttgcaatcaacatggtctcatagagcttgggtggcagctggatgctcaactttggtcatttccttgggagagtccataaagggtgctattgatttgaacatgtgggttgagcccattgtggcaggttgggttggatacatcttagctgatcttggatcaggggtttaccattgggccatcgacaattatggcgatggctcaaccccaatagttggggctcaaattgaagcctttcaaggccaccacaagtggccttggaccatcactaggcgtcaanttgctaacaatntacatgcaattgcacgtgcagt

SEQ ID NO: 214874 - DNA, 584 bp, Glycine max
ccttagccttctttgggaccagcttgaagaaggttattgcctcaagggtccccaacagcaaggtttccggtggaagcttcaagattgttgctgtagaagagaagaaagagattgaagagacccagcagaccgacaaggacagatggaagggtcttgcctatgatatctcagacgaccaacaagacatcacaagaggaaagggtttggttgactcccttttccaagctccacaggatgctggaactcactatgcagtcatgagctcctacgagtacctcagcactggacttcgccagtacttggacaacaaaatggatggattctacattgctccagcttttatggacaagcttgttgttcacatcttcaagaacttcatgaccctgcccaacatcaaggttcctctcattcttgggatctggcgaggcaagggacaagggaaatcttttcaatgtgagcttgtctttgtaagatgggaatcaacccatcatgatgagtgctcgagagtttgaaagtggaatgcaggagagccagcataactgatcaggcagagataccgtgaagctgcagacatgatcaagaag

SEQ ID NO: 214875 - DNA, 341 bp, Glycine max
gaaagagccagcagcggcaatgaaagcactcgcaagaaggagattgctgctttcttggctcaaacttctcatgaaaccacaggtgggtgggcaagtgcaccagatggtccatatgcgtgggggtattgttttatcaacgaacaaaaccaggcaacttattgtgatggtgggaattggccatgtgctgctggtaaaaaatattatggccgaggaccaatccaacttacacacaactacaattacgggcaagctggcaaagcacttggtctggatttgataaacaatccggatcttgtagccacagacgcaaccgtgtcattcaagacagccctatggttttg

SEQ ID NO: 214876 - DNA, 419 bp, Glycine max
ttgggctcgagagctactctaggttggggggtaggtcctgggggggaagttatagacacctttccatactttgtgtctggagtacttcacttaatttcctctgcagtattgggctttggcggtatttatcatgcacttttgggacctgagactcttgaagaatcttttccattcttcggttatgtatggaaagatagaaataaaatgactacaattttgggtattcacttaatcttgttaggtataggtgcgtttcttctagtattcaaggctctttattttggaggtatatatgatacgtgggctccggggggcggagatgtaagaaaaataaccaatttgacccttagtccaaggtatatatttggatatttattaaaatcacctttttggggagaaaggtggattgttagtgtgga

SEQ ID NO: 214877 - DNA, 336 bp, Glycine max
gaagaatatcgtgaatgcgtataaaaggaatattaagaaattagcgtcaaaatgttgggtgtgtttagctgcatccatagtgtcgccgacggactagctcgtggccgccggctgccgtactccgtctctgaaatatgactagtgttgcgctgcggatagcggttctgtgtaaacaactcctttgccgtgatcgtggaggccgttgagcatgttcagttcgtttatacccaccacaacgagtcgccgtttcagtcctgatcctttgctgtttatgatgatgtgctctgcttgtttgagggatcccttgacattatgggaaacttgagacaacatata

SEQ ID NO: 214878 - DNA, 79 bp, Glycine max
ttttttttttttttttttttttttttttttttttttttttttttttttttttttttggttttttttttttttttttttt

SEQ ID NO: 214879 - DNA, 226 bp, Glycine max
taggaagagacttcataggagatcatccacagaaacatgatggtctaagctatgtacggactcacatttcatctagtagagtgtaagctatttactaggatgagatggagcaattggtggacatatatggaactggttagcatttttctcacagtcggagcttaatataataatcctcatatgtggattgcttacaaatttgtttccttgcttaatgagcctttct

SEQ ID NO: 214880 - DNA, 367 bp, Glycine max
cggattcgctggctcgttacaagtcttatagtaaatgcagaccggtaccatccatgaagaaaaaaaattggctgccgtgccgacgctgtttatggactgctgttgcggctcgacctgccgaagtcatctttcatcccatgcactgaacgcctaatgctcgtcgtaatccgtcgcttaaaagaccatctggtgtggcctgtctgagctgcggaggctgaagctggcaccgaggtattcggcaaggggggcctccttcttgatggtggctagaagtgccttgtcaacagacttttggtcctcaatacggccctttgcggtctccttcttctggggctttttgccctgcttgaagaacgagtccttaccg

SEQ ID NO: 214881 - DNA, 333 bp, Glycine max
gtcatgataatagatttctctcttcaacttggcatgctcccaaaccttaaccaaacatcgtttgacctgccaactgttacgtacagttttagctgcctcctatgatgggaggagtgtctggcggcggcgacgactacttcgtttaaattcagctaccgtacaagcccggcgaccctttcatcatcaccggcaattgccccgacaagacaggcctcgcttgtgatatctgcagaatcattctcgatttcggtctctgcatcgccaaaggagatgtttcaaccgatggcgtgtggtgttacattgtgttgtgggttattccatactccgtgttgc

SEQ ID NO: 214882 - DNA, 508 bp, Glycine max
attcggctcgagctaagacttggcctgaggacattatacccttgcagcctgttggtcgcttggtcctgaataagaacatagataatttctttgctgagaatgaacaacttgcattttgccctgccattgtggttcctggtgtatactactcagatgataagatgcttcaaaccaggatattctcttatgctgattcacaaaggcacagacttggaccaaactatctgcaacttcctgctaatgctcccaagtgtgctcaccacaacaatcatcatgaaggtttcatgaatttcattcacagggatgaggaggttaattacttcccttcaaggtatgatcctgttcgtcatgcagaaacgttccccatacctcctgctatctgcagtggaaggcgtgaaaagtgtggaattgagaaggagaacaactttaagcagcccggagagagataccgatcttggcacctgacaggcaagatagatttaatcgccgatgggttgatgctctatct

SEQ ID NO: 214883 - DNA, 433 bp, Glycine max
gttgaaacttgcaacatgttatatacaaattgtgatgtattaaatacgatgcttgtttgctttgaatgagcatatatcaaacactagctgactgacagtctatttacgcggtctggatacatataatccttgctcactacataaatcgactaattaaacccatgtttttataatcaattcggtcccccgattggatcgggggcaaacgcctacgaaaagatcgcttggatttcataaagagtcgcttagatttttccatggtttatttatccctattccaaaaatcacatttattacaagatatactataaaggatttgtttttttattctgacttttttaatatatgttgctatttttttaatatatgttgatatatactgatatttgtatatattcaactgtaaatgatagaatacagatcgatctatcta

SEQ ID NO: 214884 - DNA, 322 bp, Glycine max
ctcggatggattattcttgagagtctttttcagaagtagttcgacgcataagtgtatttacttcacaatcatgggaaccgagacttcgactagtggaaatcctattgctttcagggggagaaaaggttgctttcccagcagcagagattgattaaagatctgcgtttcttaatgcaattgatgattggcttcccatatcttcttcaaggaacgcaaaatggtggttcttagctttacacaacgtcactgtcatggttggagctggtgttcttagccttccttctgccatggcaagttttggatgggggtctggggtggtgat

SEQ ID NO: 214885 - DNA, 353 bp, Glycine max
acttattttttttttttcagcgtggttgtttattttgatagctctatcatatgataaaaggtcatatgacaaagctatcaacggaaacaaatctacattctataccttaccggagtaaagactaaggggatcatcggtttcttatcatatcatagtcaatggcgaatagacaattttgctttaattcacctattagccgcacctatattacgattaagaagcaactgccccgtgtatagaccctatacgcaaacctctataactataatagttctttaatattcccgcgaattacagcaattattccaataatacataaaccacgaaaatctctttactctcctatctctatc

SEQ ID NO: 214886 - DNA, 395 bp, Glycine max
  unsure (1)..(395): unsure at all n locations
gagcgacgactgcnatgattttatctgacactgtcgtcatctctgaatcctgcttgagctcttcgtaaccaccaagagctcttggttgctcttgcaattctatattttcttgccacctcactcccttcagtttcagctcatggtccatatgcatgggatggggaggccacatataaattcactacttaccaccctggccaaaactacataggtttatccaatgtccataactacttacaccatctcggctacatccccaatgcaccacacttcgacgacaactttgatgacaccctcgtatcagccatcaatacctaccaaaagaattacaacctcaacgtcaccggtcagttcgacatcaacactcttaaacaaatcatgacaccccggtgtgg

SEQ ID NO: 214887 - DNA, 374 bp, Glycine max
aaagcttaaagaattacaatatatttatataattttactggggagtaacaacaaccacttgcttaccaacattgcgaccggtatagaggccaaccaaggctgcagggcccttctcaaggccctcagtaatgacttccacatacacgaccttaccttctctgatttgaggcaggacaaactccaagaattttggatataaatgatagaaatcagctgcaataaaacctatcacttataacccgcttaaatatgagaattgcccgattagtgacaccatgtaactcagtcagattgctctgggagatcatttcacagacaggtatgcggtcatgaaattacatgttagggagtactggattaagtgtcttgccccc

SEQ ID NO: 214888 - DNA, 398 bp, Glycine max
ctcttatcacagcttatcttggattgctacaaactatggcttcttatgttggaccatatctaattgacggttctgttcagatccatagtggacaacggctgtatgaaaaccatgggtataaattggaacctgcatttgacgttgcaacgattgtgatgtgcctgacccgtaggcattgcatgtttaggttgcagcaggttggtctacgaatacgagcgctgattgatacaacgatctataataaggctctgaccctttatagtcatcaaagcagggtcagacttctggtgagataatgaatttcatgactgttgatgctgtgtgacaaggtgtaatcagttggtttatgcatgaatggtggatggagggaatgtaagtatcacaagcctagatgatta

SEQ ID NO: 214889 - DNA, 423 bp, Glycine max
aagtacacaactcacagcaaaaaggtttataagctgtaaaggtacatgtaaccataaacaaaaatagtctccaagactataaaaacattacattttagacaaattagtcttcttccacttcatcctccgtcaacacctactacaactgctggtgttgctgctgcctaacatgtatcatattcactacaaacatcttagtaggagtagcctttgacgaacaactccttcttggcttcctcagattcaccctcaccggtgtacttcccaagctgggcgagcgagttggacttggcacggaaaagaagtgcatcttgtgccgccttcacattctctgggcggcctccccatgtcttcaaggcagtgttttggagggctctggcatacgagaacgacacgtgccacgggtttggagattggttcatg

SEQ ID NO: 214890 - DNA, 337 bp, Glycine max
cggagttgaagttcaacatgaacctttgggtggttatatttcttcctatgaaaagcagatagaagttactgcagctgaagcctctattgaagctactgcccaaggcattgcatcaatgctctgcgcccatgaaccatatgttgaatggagaacttgcaccatctgggaagctgcttatggcctgacttctacaagttgctcaactgtcgatactccggaaattctagtttcatccccacttcattgtcgaaacctgtcatggaattagaacatacccctattgaaggtcctggaacatctttctcgtggcagcccatcataggcatgtgttaagaaa

SEQ ID NO: 214891 - DNA, 493 bp, Glycine max
ggccgcccttttttttttttttttaatccaaaaacttaaatttgaatatttctagttctactttctggataggaaaactcagtatacaaacattggttttaatgcatcacttatttctggaatttcagaaactagtccgtcgacaaagataaatacttgctgtcaaaattctgttacaagtgtaaataaaaaggtttgagtagtaatgttttccatcatcttcatcatcctttgtctatatttgccagcaacattttaattgcacattgaaaaattaagcaaatggagaataataaattaataatactaccacttttcagctaccttcattttctttattcattggatctgagctcacagttggaagattccttctgtactgctgagacgtcaatctcctttccaatggtgttttcctcttgcttacaacacatctgttcacccctttgcgcataggcattattgaaggaaaatcttcgtctggaatctgact

SEQ ID NO: 214892 - DNA, 335 bp, Glycine max
agaagttagaagtgatagtgaagaatctcatttccagcttccattatcttctcatctcaatcaggggggaaaatgagcgggcggtcaagccgcacaatttatgttggcaatcttcctggcgacgttcgcttgagagaagtagaggatctattctacaagtatggtcctattggtgacattgatttgaagatacctccgagaccaccaggctatgcttttgtagagtttgaggatgctcgtgatgctgaagatgcaattcaatatcgtgatggttacaattttgatggttttcggttacgagttgaacttgcacatggtggacggggatattcatc

SEQ ID NO: 214893 - DNA, 486 bp, Glycine max
cagaaccgagcttgcagcagcgatttctcatttcatttttcacacttcaacaatggcgaaaaccttcaaatacatcatcctcggtggaggagtttccgctggttatgcggcgagggagtttgccaaacagggcgttaagccaggggagttggctatcatttcgaaagaagcggtagcaccttatgaacgtcctgctctgagcaaggcttacctttttccagagtcccctgctagacttcctgggttccatgtctgtgttggaagtggaggagaaaggttgcttcctgagtggtacacagagaaagggattgagttaattcttagcacagaaatagttaaggtagaccttgctgcaaaatctctgatcagtgctggaggagaaacattcagttatcagattctgattggtgcaactggctcaacagttataaggctgacagatttcggtgtataatgagctgatgcgaaaaacatcttttatttgag

SEQ ID NO: 214894 - DNA, 294 bp, Glycine max
ggaaggagctcatggggctgtattcagaggaaaacttacatatgagattctggtggctgcgaaaatcctcaataatacagagggagaagggaatgagttcattaatgaagtggaaattatgggcaaaatccaccacattaatgtggctcgtttgcttggctattgtgctgattgaattcatcgtgctctggtctacaatttctttccaaatggttcactacaaagcttcatatttccaccagatgacaagcagaattttcttggctgggagaagctgcattaatattgctcttg

SEQ ID NO: 214895 - DNA, 347 bp, Glycine max
tgaaacgacacacacaaaaaaaagctttagttaggatgacccaagtgaggaacaagcaagtggttctaagagattatgtcaccggattccctaaagaattcgacatgaacattgttgaaggcaccatatatatcgaacggttccagaaatgtctccaatgatgtccttcttaaaaatctctactagtcatgtgatccatacatgcgactcctcatggccaaggaccgttctttcggagatggctccttcacccttgcctctccattgaaaggatatggtgtgtctcaagtgctggaatctggacgtccagattacaagacaggtgatttagtgtgggggattactaa

SEQ ID NO: 214896 - DNA, 473 bp, Glycine max
gcccttttctctctctcttcaatttcacccttttagcatttgtacattcctttcccttccttgaatcgttcttaattgcgagaggggatatcggagaagttgattggcctcccattaattgtctgaatgatctgatggagtctaaagttgggaagaagaagtcgtctagtagtaagtcccttttgtacgaagctcctctcgattacaccattgaagacgttcgaccacacggtggaattaagaagttcagatctgctgcttactccaactgcatccgcaagccatcctgagattccctaggttgtgtgacgacatagcccccgtagtcttgcatctgctatattattctagtctcttcttttcccttttcttgttctcttccttgcccttctgttctctctacctattcagcacgactttgtttctttttgagctaagatggctggctcactattggtttctaaggctaccaa

SEQ ID NO: 214897 - DNA, 336 bp, Glycine max
aaaaaaaaaaaaaaaaactttcgaaagattttatccaattgaaattttaaaaatgactgggataaacttaagaattcaattattgaaattgaataagttaacaatttaattggattggtcgaatggtatcaaaaaaatggagtactaactcccatttcttatctattattgaattaaccgatcaacttgctttgttatcgaacatttctttttgatttcaaaaattttccggaaaaaatttgattctatttattatatgcgaatcaatcctactacttgtggtcctgaggtttctgcgcttgaaaaaaaaaatctgggacgtatcgtccaaataat

SEQ ID NO: 214898 - DNA, 410 bp, Glycine max
ggcgtctatacttttttctgatgtccttgacaataaaagaagcaatgcattaaagctgaaagtagagtgtatgttcatcttcaaaggagtgtaaaagagggtaatatatattttacagaatttccgaaagagcagaaaaaaggaagtaaagacaagaatgacttgtgactcaaatcctggatgggatcataggaatagcgtcctgtaagtatgcactggcagcagcaactccacttccaagctttacaggattgcccacatctttcaggatcatttccacaccagctagacatcccaacagttgcgactcattcaagttgccaagatgttcaattctgaaaaccttcccagcaactttgatcattccaggacctaggcttagattgtatctcttccctgcccttctaact

SEQ ID NO: 214899 - DNA, 330 bp, Glycine max
gatttgatggtggagaatgtggaagatgaggaccctatcatggctgtgaacttgctaactgctgctagcactggcattgctgcttttcttgaggagcttctaagagcaggtttggattcctgacattggagactccaaagggaaaatctcttagcacatagcagcatcaaaagggcatgaagagtgtgattaagacttactcaagcatgcatgcaacatgcatattaaagacatgaacggtaacactgcaatatgggatgctatagcattctatcattactccatatttcggatccttttccagttttctgctgtcactgaacctaacac

SEQ ID NO: 214900 - DNA, 333 bp, Glycine max
gaaaaaaaaaaccctagtaatgccgccgatggggaggaagcgaaaggtagcacccaaatcttctctatccaccgagccacctctcaagcagcaacaaccaaaacccgaaaatccctctcaagaatacgaagaagtcgaagaggaagttgaggaagaagaggtagaggaagaggtcgatgaggaagaagaagaagaagaggaggacgaggaagaagaggaggaggaagaagaagaagaagaagaaaacgacgtcgtcaaacaacagcagcagcaacagcaagacgaagacgacatcccgatatcgaaacttctggaaccgttgggcaaggacca

SEQ ID NO: 214901 - DNA, 536 bp, Glycine max
aaaatcagaatatttcttcggagtggatataataattgttgaagcgtacaaaatttaacaaatccaaaaaagataagatgatttgggtgagctttcactgtgacttacgtctatagtgaagagagctacactgaaagcttaggccatagaaatagagctacagaatacacttatacacctaggcattagtaacttatataagtgaatattatggcactattctgagaccttaatgctttcacttgtgagccacatcttcttttgaattataagcactacttcatcatcatcatcatctttaccttgatctacatcatatatggtcacagcattccagtgtaatgctgacaggtatttctttatgtactccaccatggaacgcttatcatggatgatgatgaaaccctttggccttaggattctgtcaatctcaattaataaatcctctggactgcattctttcttaataatatcagaaaacacagtccatgcatggagtagatcgtacgttcgaaggtaggttgaaatgctttaca

SEQ ID NO: 214902 - DNA, 170 bp, Glycine max
tatttctccattttatgcccattggtgttacaagagtacccttccgtagccatgtggaagaagatgcatcctgggatgatatatacaatcgactttatcgataaagattacttactttaggtcaagacgcttatagtgaaataatcaatcaatctaattagccatatcgg

SEQ ID NO: 214903 - DNA, 424 bp, Glycine max
ggtgcatcaaatcaacagagataactctctgaatctttatattatagatctattattgattcattacatacataattcagaaggaaaaaaaaaaaaacataacaaaaaaaaaagtgtccgcttcagatttgatcgcatttttcctattgcacaaagcctgcgcatttcattcaagtttcaacagaagcgtaaaaattgcacaagtgtcttagataaccacattagaaaatgaaaagggcaaccaccacccatcattataataagtaaacaatacctacaaattgcactattgcaaggcattggcaccagccacaatttccagaatttcaccagtgatcttagcctggcgctccctattgtacacaatggacaagttcttcttcaactcaatagcattatctgtggcattgctcatggcactcat

SEQ ID NO: 214904 - DNA, 347 bp, Glycine max
gcaattgaagttaaaagccttatccttccctactactccaaacacaaagacatcatcatccatggctgcctccgtctccactgtcggagctgtcaacagagctcttttgaacctgaatggttctggagctggagcttcagcttccagttcagcctttctttgtgaccagccttgaagaaggatattgcctcaagggtccccaacagcaaggtttccggtggaagcttcaagattgttgctgtagaatagaagaaagagattgaagagacccagcagaccgacaaggacagatggaagggtcttgcctatgatatctcagacgaccaacaagacatcacaagaggaaa

SEQ ID NO: 214905 - DNA, 328 bp, Glycine max
acggaagtaaaaattgtaaatacgggtaccgtacttcaagtaggcgacggtattgctcgtatttatggtctcgatgaagtaatggcgggtgaattagtggaatttgaagagggtactataggcattgctttgaatttggaatccaaaaatgttggtgttgtattaatgggtgatggtttgatgatacaagatggaagttcagtaaaagcaacaggttgaattgctcaaatacctgttagtgaggcttatttgggtcgtgttataaatgccctgactaaaccaattgatggtcgaggagaattttcagcttcggaatctcgattaatcg

SEQ ID NO: 214906 - DNA, 334 bp, Glycine max
caaaaacaatggccacttgttcactcatttccacactcttcccttctccttcttctggttctttttcactctctcgttcttcctcaaacaccaccaaaccaaccaccattcacctctccaaatccctccatctgcaaactcccatcctctggctccttcgccccccaaacccaaaaccgacacttccaataatacccctgttccccaaactcaccattcccaactcccttctccttctctgcacctccctcgctctctccttcactctcctcctctcccccgccgactccgccggcgcctttgttgtcacctccccaaggaagctgcagtccga

SEQ ID NO: 214907 - DNA, 401 bp, Glycine max
ggccgccctttttttttttttttttcaaggaaattttactcatgtaaaaagaaaattttatttctgcctctcactgtatttgtgacgcctaactatgtttggaaacacagtagatacatgggcaaccacgtccatttaccagaagatgcagaagcaatacctaccagctctgatctaactgtgaaattacgtcaacatgataccaaacatgctaaaaggcaaggaaaggaaacaaagaaaacaactgaaattttttgacattagatcatcagattcacttcgaaaagtgaatgcatccttaccaaccaagaagcaatacctttaagagagccatcctaatatatagaccattctttgcctgcctaaagtaagcagctcttggatctctaataacttccact

SEQ ID NO: 214908 - DNA, 320 bp, Glycine max
attattctttcgcaccttgcagaatcaattttctctctcaatcgtctttcatggctcgtaccaagcaaaccgctcgcaaatccaccggtgggaaggctcctaggaagcaactcgccaccaaggctgcaagaaaatctgcacctaccaccggtggagacaagaagcctcatcgctatcgtcctggaactgttgctctacgtgagatccgaaaataccaaaagagcacagagcttctgatccgcaagctcccctttcagcgtcttgatcgtgaaatcgcgcaagacttcaagactgatttgaggatccagagtcacgcggat

SEQ ID NO: 214909 - DNA, 466 bp, Glycine max
ataatactctatttgtattatttggtacattaataacttttaagcaaataacaacataccctaagatacctgtcaaaccttttgttttcctgaatcgcgccctcaaaccttatgttaacacttcctataagaaagacaaaagtaatggttaaaaaagtaagatttgcttgcataattacactatatataggagaaggaatttgctcatttttttctataatactcttaattaattactattttttttctataacatttaaatcttatttttataaaaatatatatatatataaatttgaagttaattaattattgtttttatagggtattttattgatgttgtttgctgaatggtgtgatagaaaaaacagacatatctaattttcttgtcttggtaactaactgattaatcaatatatctcaagcaaaatttatcaatctgcaatacatatgttgaaagtgggtg

SEQ ID NO: 214910 - DNA, 297 bp, Glycine max
gttaaaatgaaagcttgcatttcacgttattcatatcaaatgctcatagcaaaaggaagaggtttgtctccttggcctgctcgattgactactccaccttcttgttggcataaattcactattctactgaaatgttcgagaaggacatggaagtatggacacaacgagctcataatatactggagcatgctagccatccagattaagccagacacaattcgtaacgtgatggatatgaaggcgaatttggtgtcatttgcagcagctttgaaggacatatgagtctgggttatgaat

SEQ ID NO: 214911 - DNA, 394 bp, Glycine max
gaagaaacatatgtcttagctccaatcatcacacatgtgtggttgttcctacaaatactcttctccttgtcctgatctcactccagatactctacctctctctgctactgtaccttcaatcgcctatttctatgctcctctatcactaaaactccatactatcatagcatctacctttcacgtcttcattaaacctccccaaaatcctctgtggtctgagagaactcagaacccgcattgattccgtgaagaacactcataaaatcaccgaggctatgaagcttgtggctgcagccaaagtgagaagagctcaagaagctgttgacaaaggaagacccttctcagagaccctctgtgaagtactctacaacatcaactagccacttcctaactg

SEQ ID NO: 214912 - DNA, 505 bp, Glycine max
gaggaatcttatgtaaataccacagaataaggtttggtcctattcatggggattctgtaaatattccattccaaaaagagaaaaaattcgaaacaattgggattttttggagattggatgcagttactaattcatgatctgacatgtacagaatgaaaacttcattctcgattctacaagaatttttatgaaagcctttcatttgcctctcttcgatggaagttttattttcccagaatgtatcctaatttttggcctaattcttcttctgatgattgattcaacctctgatcaaaaagatatatcttggttctattttatctcttcaacaagtttagtaatgagcataacggccctattgttccgatggagagaagaacctatgattagcttttcgggaaatttccaaacgaacaatttcaacgaaatctttcaatttcttattttactatgttcaactctatgtattcctctatccgtagagtacattgaatgtacagaaatg

SEQ ID NO: 214913 - DNA, 457 bp, Glycine max
cggccaactcgttcccaccggaacatgcgtcgtcgtcgacggccacctcaaacttcctcccgctggcaccagacagaagatcgaactccgcgccgataaggtcctccacgtcggtcccgtcgatcccgccaagtatcctctgcccaaaatgagactcactctcgagttcctcagagatttcgttcaccttcgttccagaaccaacacgatatctgcggtggctagaattagaaatgctcttgcgtatgctacacatacatttttcaacaaggaagggtttctatacgtgcacacccccattgttaccacaagtgattgcgagggtgcgggtgagatgtttcaggtgaccactttgctgagtgaggcggagagattggagaaggagttgttgcagaatccaccttcgtcggaagcggatgtggaggcggctagggttggtgatcaggagaaaggggag

SEQ ID NO: 214914 - DNA, 330 bp, Glycine max
gaacaagtagttgataactaataaggagaagcaaatggcttcctcaatgatctctttccctgctgttaccactgtcaaccgtgccggtgccggcatggttgctccattcactggtctcaagtccatggctggcttcctcaccaggaagaccattaatgacattacctccattgcttgcaacggtggaagagtgctatgcatgcaggtgtggccaccagttggcaagaagaagtttgtgactctttcctacctgccagaccttgatgatgcacaattggcaaaggaagtagaataccttcttaggaagggatggattccttgcttggaatt

SEQ ID NO: 214915 - DNA, 491 bp, Glycine max
aattgcaacatctgatcctctccattttccatggtacacagtcccaaatgtaccagaacccagctctcgcaactcttcaagatcttcattctttatgaactgcacagtactggagtcaaattcccctgctacaaccacattcctcggttcattcttgtcatcctggtattcagactcctgtggtcgtatgcttatccattatggcatacatgttcttattttcattgccctttagttgggaatgctcatattcttggtgaaagatacttgcttctggtttagttgctacaggtacatttctctgattttctttaccaatatttaggtgggaatctgtgcgttctggcaaaacaccaccagctggttgaggagcagatggctgagatttactatccccgtcatgtacttttttcacagcagacgtatgaccaatatttttctgatcaattagaaaatcattatcaaacgcctctatagccatgctctgaaat

SEQ ID NO: 214916 - DNA, 492 bp, Glycine max
gccggcggcgtcgccatgccgccgacgctggcgaccgaggcgctcgacacggacgccggcagcgtggccgcgtggctgagcggcgaggcgagcggcgaagtgcgtggcgagacgcgcggcgaagaggaggcggcggcggcggcggcggcgtcgagcgaggcgcgcgcagagagctccaaggcctcgagcggcggcagcctaggactggcgagcgccgcggcggcactgctgcgcgctggggcagtgaggggcgcagacagcggcgaggcggagccggcgggctcgacgatcagtggagcgtcgtgcagcgtgctgttgttgcacacctgcggactctgctcggcagactcgaagccggacacgccatggctcgtcgagctcgacaccgtcgattcgcgtctctgctcgccgagcgcgcgcggcggcgcgttcgcacagctggagacgcatcggcgctgctgctgggcgcgtcttgcggctgcgcaagcgcct

SEQ ID NO: 214917 - DNA, 324 bp, Glycine max
gtgagatgcaaccccaccaccccatcaggcctcacaatcagagctggttcctatgctgatgagctcgtttagaccgctaaaacagtggcttcaccagggaggggtattttggccatggatgagtccaatgctacctgtgggaagcgtttggcttcaattgggctagagaacactgaagctaaccgccaggcgtaccgtaccctccttgtgacagttccaggacttggtcagtacatctctggtgccattctctttgaggaaactctctaccaatccacaactgatggcaggaagattgttgacgtgctcctcgagcaaaacatt

SEQ ID NO: 214918 - DNA, 573 bp, Glycine max
  unsure (1)..(573): unsure at all n locations
gtgacctgaagccaggagctgaagtaacaataactggacctgttgggaaagaaatgcttatgccaaaagatccaaatgccaccatcatcatgttgggaactggaaccgggattgccccatttcgctcatttttatggaaaatgttctttgagaagcacgaagattacaagttcaatggtttggcatggctcttcttgggtgtccctacaagcagctcattgctttacaaggaggagtttgagaagatgcaagagaaaagtcctgaaaacttcaggcttgacttcgctgtgagtcgagagcaaacaaacgagaaaggggagaagatgtacatccaaacccgaatggctcaatacgcagaagagctttgggaattactgaagaaggataacacttttgtgtacatgtgtggactaaaaggaatggaaaagggaattgatgacattatggtgtcattggctgccaaagatggcattgatgggactgagtacaagaggcaattgangaagcagagcaatggaatgtcgaagtctattaatntctgttcacttgcacaaatatcatcctctactttat

SEQ ID NO: 214919 - DNA, 480 bp, Glycine max
ctcattccttcatttttaaacctagctccatctccctccactcaccataacatggcatcagaagcaaatgctgccaacaccaacttctgtgtaaatgttagcaacaatggctacattagtgctaatgaccccttgaactggggtgcggcggcggaggctatggctgggagccacctcgacgaggtcaagcgcatgctagaggagtaccggaggcccgtcgtcaagctcggtggagagaccctgaccatctcgcaggtcgcggcgatcgcggcccacgaccagggggtgaaggtggagctggcggagtcctccagggccggtgttaaggccagcagtgactgggtgatggagagcatgaacaagggcactgacagctacggcgtcaccaccgggttcggtgctacctcccaccggagaaaccaacagggccgtgccttgcataaagagctaatagggtttttgatgctggatatttgcaat

SEQ ID NO: 214920 - DNA, 327 bp, Glycine max
ggaatctgtgaatgttttccttggaaacctgctaacttacccatttgttagagatggcttggtgaacaaaacattgtcactgaaaggaggatactatgactttgttaaaggatcttttgagctctggggccttcagtttggccttgcattctttgacttcgtttgaacatcaaccattatcaatgacctcatcttggttccctaagtattctcctatctaaaatgtactctgtaattaattgctcttgtaataatgcatgcatgtgctgaattttctaataataaaagtggatatggagatttctccacatatcaccctctatttca

SEQ ID NO: 214921 - DNA, 454 bp, Glycine max
agttattccgatattcggacgcatcaacttggtatgaaatcacattgatagcctctactcgtgtcctagctcgtctaagagctagatttgcctcaattgtttgtctcttgccttccgccttattcaaattagcttctgctatttcaagagtttgctgtgcttcttgtggatcaatgtcactacccttttccgcatcatttactaaaacagtgatctcattattgtttattctagcataaccgcccatcagagccatcgatgaccattggtctttaagaagacgtattctcaaaatacctatatcttcggctgtggcaataggcgcatgatttggtaatacttcaatttgctcgctattagtagattaaatgatttccttcacttccgaattcccaacaattcgattgcgggtcagtacacaaagatttaaagtcatttcttcaaattgctctcc

SEQ ID NO: 214922 - DNA, 416 bp, Glycine max
cattattaagaaaaggtaacgaagataaaatacgagcttgttttatagcaattgtcattaatcgttgatgttttaaggtcaatctatttacgcgtctggatcatatttttccttgctcactacataaatcgactaattaaacccatgtttttataatcaattcggtcccccgattggatcgggggcaaacgcctacgaaaagatcgcttggatttcataaagagtcgcttagatttttccatggtttatttatccctattccaaaaatcacatttattacaagatatactataaaggatttggttttttattctgacttttttaatatatgttgctatttttttaatatatgttgttatatactgatatttgtatatattcaactgtaaatgatagaatacagatcgatctatcta

SEQ ID NO: 214923 - DNA, 306 bp, Glycine max
gttaaaagccttagccttccctacaactccaaacacaacgacatcatcatccatggctgcctccgtttccactgtcggagctgtcaactgagctcttttgaacctaaatggatctggagctgtatcttcagctctcagttcatatcttctctgggaccagcttgaacaatgatattgcctctagggtccccaacagtaaggttatctgtggaagcttcaagattgttgctgtataagagatgatcgagattgaagagacccattataccgacaaggactcatggaagggtcttgtctatgatatct

SEQ ID NO: 214924 - DNA, 489 bp, Glycine max
ctagctaagtgtctttcaaacctatcttgtgcggccaatatcgcttgtcttcaaacttgcaacaatagacctgatgaaaccgaatgccaaattaagtgtggggacctgttcgaaaatagtgtggttgatgaattcaatgagtgtgcagtctcacggaagaaatgtgtacctaagaagtctgatgtgggagaatttcctgctccaaatcctgatgtccttgttaatagctttaacattgctgatttcagtggcaagtggttcatcactagtggcttgaatcctaccttcgatacctttgactgccaattacatgaatttcacacagaatccaacaaacttgtgggtaatttgtcatggagaatacggactccagatgctggatttattactaggtctgctgagcagagatttgtacaagatcctttctatcctgggatcctttacatcatgacaatgagtaccttcactatcaagatgactggtatattt

SEQ ID NO: 214925 - DNA, 458 bp, Glycine max
  unsure (1)..(458): unsure at all n locations
agtaaaacaccttctattatttgaagccacaaagttcagcagaaccacaatgaacaccaggaaatattaattgattatctcaagtgttttttttagtagtgagacaatgtaactcaaaattataaaggataacaatccaatatgaacaagataaattatttgattatatcaagtcatagcttctcttcaagtggagaatgcttaggttctcagggtgtgtataagcaggttccatcatcacttcttgcagttgggtcgaagtttgaggcatttggatcagtacaaccttcaggaacgggaatttttacttgctgggctgctttgccatagaaagttcctcttttgatggcatcctgattagcatcaccaagagcagcctcgttcaagtacttgtctgccagttgtactctcttcacattctcttgttcttggacagcatngtaccatacttccagagc

SEQ ID NO: 214926 - DNA, 385 bp, Glycine max
aggcgttggccgcccttttttttttttttttaaggtaaatttgtcacatttattcattatcatatatgcattacctagtatcagctggtttattcttaattaagagaaaactaaaatacaatatcttacatgctatttttgtcgatcttgaattagaataatttcaccttgataactttcaaaatcctttaatgcaaattaccgaaataaaactctagttctagtacaaacaacacctagctataataattaggggttgataccatagagctttcgaatcccgtctatatcatcttgcgctagattcaccttcctagttcgaggtggtatagaaggatacatgatggctcttaggtccgaccagtggcctaattcgagcaagtgc

SEQ ID NO: 214927 - DNA, 480 bp, Glycine max
ggccgcccgttgtctttttttttttttttttttatttttttctaatctttgaaatgatgcattttcccactcaacaccatgaccatggccaaacccagcgactcctcgactattcatcttacctaaacctgcatccctctcaccccgaacttcacttcttccgccagatttaagcggagaagtcagaaacgtgagcgccaatgaacttcttcatttactcctcaatctcctttggcaagacaccgtcggtgagcttctcgaggaaggcctaatgggtagatttcaattgctcggtgaatgacctctcccaagcgccaatcttgtcaacagggacattgtcaagcataccgttaacaccagcttctatcaaaggggccataacctcggttggcataaggttgtactggggctgtttgagaacttggtctacctagaacctcggttcaagaggtatcgaagtgaagcgttcaagtcggaacc

SEQ ID NO: 214928 - DNA, 344 bp, Glycine max
cattacacaagaactcttcaaggatccttcttcccacgaaattcatttggtgggaaaatccaagaagagggtggaatttcaagccagggaagatggattatttcaatgctccaggaagaaaccatctctttgttccggggccggttaacatcccggaccagatctttcgagccatgaacagaaacaatgaggactaccgttctccagcaattccagctatgaccaaaacactgcttgaggatgtcaagaagattttcaagaccataactggaatcccatttctcatccctaccactgtgactggtgcttgggagagtgctctcacaaacacactgtctcctggg

SEQ ID NO: 214929 - DNA, 498 bp, Glycine max
cagaaccgagcttgcagcagcgatttctcatttcatttttcacacttcaacaatggcgaaaaccttcaaatacatcatcctcggtggaggagtttccgctggttatgcggcgagggagtttgccaaacagggcgttaagccaggggagttggctatcatttcgaaagaagcggtagcaccttatgaacgtcctgctctgagcaaggcttacctttttccagagtcccctgctagacttcctgggttccatgtctgtgttggaagtggaggagaaaggttgcttcctgagtggtacacagagaaagggatagagttaattcttagcacagaaatagttaaggtagaccttgctgcaaaatctctgatcagtgctggaggagaaacattcagttattagattttgattgttgcaactggttcaaacagtattaggctgacagatttcggtgtataaggagctgatgccaacaacatcttttatttgagggaggttgacta

SEQ ID NO: 214930 - DNA, 465 bp, Glycine max
ttttttttttttttttttttttttttttttttttttttttgtttttttttttttttgtttttttttgttttttttttttttttttttgttttttttttgtgttttttttagttgtgtgtcaaaagaacaaataattgtgaaggaaaacaatcccctatgaaaaagataaattttttgaggaaaagggccaaaatttttccccccgtggaaaaggcggagggaaaaaaggagagaataagccggaaacaccatcactttttgcaaaaagggcgtggcccgaagcatggggatcggcccccccaaaaggagcgggggtttccacttggtgggcccgtttgcccccgggagatcccccggggaagggaccctgttgggcataaacaagagggggccccaaaaagggcttgtctgccaggggaacttggggcacaaacgcggggaaaaggacgagcctgttttcggggg

SEQ ID NO: 214931 - DNA, 565 bp, Glycine max
ctcgagccgcttttagcaaaggctattgcaggtgaagcaggtgtcccatttttctgaatctcaggttctgagtttgtagagatgtttgttggtgttggtgcttctcgagtccgtgatttattcaggaaggccaaagagaatgctccatgcattgtttttgttgatgaaattgatgctgttggaaggcaaagaggtactggaattggtggagggaatgatgaaagagaacagaccctcaatcaacttttgacagaaatggatggatttgagggtaataccggtatcattgtcattgcagctactaacagagttgacattcttgattctgcattgttaaggccaggacgatttgatagacaggtaacggttgatgttccagatatacggggaaggactgaaattttaaaggttcatggtagcaataaaaagtttgaagctgatgtttcacttgaggtaattgctatgagaacacctggttttagtggagcagatctggcatacctgctgaatgaagctgtatattagcttggtcggctggaaagacagcaattttttcccagagatc

SEQ ID NO: 214932 - DNA, 511 bp, Glycine max
gtctcggccacgtcattgacaaactgttagtgagctttggcctagagatccttaaggttgtgccgggctacgtgtcgaccgaggtcgacgctcgtctgagttttgacacagcagccacgatcgcacgcgctcatcgcattatcgatctgtacgagaaggctggcatcaagaaagatcgcgtcctcattaagattgccagcacatgggagggcattcaggcttgcaagcacctgcataaggagggcatatcgtgcaacatgacgctacttttcggctttgccacaggccgcgggctgtgccgaggccggtggcactctgatctcgccctttgtgggccgtatcctggactggctcaaggccaaaactggcaagtcaagctacgaatctcacgaggatcctggtgtagtatccgcgaccaagatttaccagtgttacaaaagatacgactacaagaccattgtcatgggtgccagctgccgtaacactggtgagatcactgaacttgctggct

SEQ ID NO: 214933 - DNA, 344 bp, Glycine max
cattcgaattcattttatttatatattaatatgatatgcaaatgaaataaaaagatattaaaagatactaattataagaatgtgaaagtgaaattatcaagttattaaacgattaatgaatttgtatctaccggatcctgtagtaaaaagagttacatctgatcgtgagtagcttgcttcaaaaggacttcgggttccccagtgaatgccttggaagaagatatgattatctttgaattgacgattattcgcgtataagtaagcgcgttactcaccaagaaattgccttacctgcccaattgctaatgaatcaagataaccattgcgtccactataaatagtta

SEQ ID NO: 214934 - DNA, 482 bp, Glycine max
cagctgtgttgactacaatatcagaggaattgccagatgttcccctctgtttgagtctgcacaacctctgtgcaaccctcaaatgcacttctccatcagcaattattttccgttctgcagtgatcaatgcaggctatcgtatatctggaactcatgttaatccattgggacttaaatcagatgcacccatggatgttatttgggatataatgcgctgctgggtaaaaaatcatcctgtgaagcctcaaccagcagatcaaccaggaagcatcatacttgcaaaggaacctgttcttcaggctaattttgctcgagctgtagcatctcttagcaaggcacaagctaagaaggttgcgcgctctctttcacatgctgaaagacactgaggtccaaaacttatggcatgacgtcaaattacaagcaagcatgtctctcttttgagtcctgaaacaattactggagctcttaatcaggaagacgat

SEQ ID NO: 214935 - DNA, 443 bp, Glycine max
ctcctgtatcaacctcatctttatcgtactactacttcccacgttctgctcctttggggatcgtgttcacaaaagatggctgacaatgaggatggaatggataagactactcgtgggaatgaatgggaggttgtatttctgacagcatcgatatatgcagctgctcctggttctgatgaagttgatatgaaggatgatgggaacaaagatgtatatggacaagatgaaggagaaacttcacatgctttattaatgtctcgtaactttgtctttccttccagtcagcatgaaaacatgtctgtggaacctgactatggtgtgatctatgatgattctggagacaaagatgttgtctttgaagagactcctgaagaattgaccattccaagtggaaaggatgaacaaaacttttcattaccaggattggaaatttcagatgagtt

SEQ ID NO: 214936 - DNA, 515 bp, Glycine max
tgaagtgctctgtgaagttgaaactgataaagccactgttgaaatggaatgtatggaggaaggttatctggccaagataatccgcggggatggggcaaaagaaattaaagttggtgaggtaattgctgtaactgttgaagatgagggagatattgtaaagctcaaagattatcaaccttcagcatctgaaccaagtgcagcccctgccaaagaaatatctgacccacctacaccaaagaaagaatatgaggtataggaacctggccgagaacctgagccaaaggcttctaaacccagtgcaccaccctcatatggagatcgcacatttgctagccctcttgctagaaaattgggcgaagagaaaaatgttcctctctctagcattaaaggaacaggacctgaagggctcattgtgaaggccgtcattgatgattacttggcttttggtgctaaagaagttcagcatcctccaaggccatgttgcaacagatgcagcattggattatactgacatt

SEQ ID NO: 214937 - DNA, 439 bp, Glycine max
cagtgattaaatacttcaatcaaaaattggtcagggatacaataacaaaacccaaatgggccatatagaaataccaaggtgaacaaaatctcatcccctgcctacaacgtcttgaaaggaatttagtacgtcatgggagccttcaatttattcttacaacaacatggtctctggattttcaatatagcctttgaatgcttttaaccattcggcaccaattgcaccatctataacacgatgatcacagctgagggtcacagacatgaaggaagcaaacttgaactcttcagcacctgaacccggaacgaccctcctctcagaagatccaacggcaagaatgccagcctgaggaggattgatgattgcacagaattgtctgacaccaaatggccctcccaggttagacactgtaaatgtaccttccttcatattctggggg

SEQ ID NO: 214938 - DNA, 331 bp, Glycine max
gattgccgaaattcaaccatgttatattgagacaatcaatcaagtacacaactcacagcaaaaaggtttataagctgtaaaggtacatgtaaccataaacaaaaatagtctccaagactataaaaacattacattttagacaaattagtcttcttccacttcatcctccgtcaacacctactacaactgctggtgttgctgctgcctaacatgtatcatattcactacaaacatcttagtaggagtagcctttgacgaacaactccttcttggcttcctcagattcaccctcaccggtgtactttccaagctgggcaaaccaattggactt

SEQ ID NO: 214939 - DNA, 496 bp, Glycine max
gagagaacatttttttttgtttcatcatataaaatatatatgttctgaaagaacacatacaagtacacaaaaaaaagggggaaattcataaaaaaatacagaaaaaaaaaaacagaattgagtaagagggaaggaaacatagagaaaattttagcaatcagataataagaagccagtagtagtgcaaaagtcccttgccaagagtgttggaaccccttttagttaagcaggtaccttctcccccttgagtggcttcaccacttcccatgtgaagtcagggtcatctctgccaaagtgtccatatgcagcagtcttcaagaacctgccatttccacccctcttgagatcaaggttgatggagatcatgccaggcctgaagtcaaaactctccttcacaatgctgaggatttccttgtcagggatcttcccagtgccataagtgtcaacaaacacagacaagggctcaggcacaccaatggcataggaaacttgcaca

SEQ ID NO: 214940 - DNA, 279 bp, Glycine max
agttgacagtgtgttctcgcaccttgcatggatccaaactgattgaaagtcatgtgggcttggtgacttgaattatcctttgatttctgatgtcaccaaatccatatcgaaatcttatggtgttctcattcctgatcagggaattgctttgcgaggtttgatcattattgacaaggaatgggttattcaccagtctaccattaacaacttggcaattatcagaacttgtgtcgagacatagagaactctgcaggccttacagtatgtgcaggacatccc

SEQ ID NO: 214941 - DNA, 476 bp, Glycine max
gaacacgaaacagagatcataatcaaaataaattgcaaattaatacatagtacacttcaaaatccagcatgcatttattagtatattcccataccctgcggctcaaaatttaaggacttacaaaacattaagaaacaagacccttttgcaattcacactgactgatacagatgcagatagccactcttaactatctagtatcctagctacaccgctgcaaagtagtctttgctaagtttagggtctggtttcatggacttctccccaggcttccacccagcagggcaaacttcatctgggttctcctgcacatactgtaaggcctggagagttctctttgtctcgtcaacacttctaccaattgccaagttgttaatggtagaatgctgaataaccccttccttgtcaataatgaacaaacctctcaatgcaattccctgatcaggaatgagaacaccataagatttcgatatgga

SEQ ID NO: 214942 - DNA, 468 bp, Glycine max
cggctccattctgtgactctgtaaattgtagtgtggcggaatagaatcaaaccaaacacggaataaatccatacactcggttgtctctagtgactgcaaacttgtgttgagttgagtcttgagcttatattcccgatagcagttctctcgaattgtttgcttgcgcggggataagaaaacaatatcaggaaatcaaaatgggcgcacagaaaaaaagcggtgctagggtttcagaggaccccgacgaactggttcgggttccgttgcaggccgttctcttggccgatagtttcaccaccaagttcagacctatcacgctcgaacgccccaaagtgctgctgccgctcgtgaatgttccgatgataaattacacgctcacttggctcgaatccgctggcgtcgaagaggttttcgttttctgctgttctcattcaaagcaagtcattagctacctcgagaaatctgagt

SEQ ID NO: 214943 - DNA, 495 bp, Glycine max
aagaaactcgagggatacgttcttttagcgttttcaaattttccttaactaattcccccacatcatatgcacaaatacatgtcaaaataactacctatttgaattacagggtagatgaatgcactgaagccccttttaagctttggctgagatgaagcaccttaaaaaaatcctttctattcctcgtcatcatcgtcttcttcaggtgcctcttttagccattgaattaacttttgggcctgcttaacaaaaactttatctgcctcgtcagcatcttttaactcggcttcccaactcaaaatagcatcttcttctacaacatcttcattgtacaagtagtgcaaaatccttgtgaacaatggagcaaattccttagcagattcctcacatatttcttcaaatttaagtattacttcgatctgctcatctatgtcagtcagataggatgtaagagcctttttccattttgtaaatacagccttgaacatttgaagc

SEQ ID NO: 214944 - DNA, 521 bp, Glycine max
  unsure (1)..(521): unsure at all n locations
gttgaagtcttgcccttctctcttcaactccaaacacaagacatcatcatccatggctgcctccgtctccactgtcggagctgtcaacagagctcttttgaacctgaatgggtctggacctggggtttcagctcccagttcatccttctttgggagcagcttgaagaaggttattggctcaagggtccccaacacaaagatttcctctggaagcttcaagattgttgctgtagaagagaagaaagagattgaagagacccagcagaccgacaaggacagatggaagggtcttgcctatgatatctcagacgaccaacaggacatcacaagaggaaagggtttggttgactcccttttccaagctccacaggatgctggaactcactatgctgtcatgagctcctacgagtaccttagcactggacttcgccagtacttggacaacaacatggatggattttacattgctccagctnttatggacaaactngttgttcacattaccaaagaacttcatgacc

SEQ ID NO: 214945 - DNA, 381 bp, Glycine max
cggggctcgtggacggccggaataatatccggcgggacgacgagctcagtacggcggcggccgcccttttttttttttttttttttttttttttttttgtttttttttttttttttttgtggtttttttttttttttttttaaaaagggcaagaaacgtaactttttgaaccctcaaattcggtatgcccttaaagggccctcctaatgaactccagggcccttttttacatgggagctttttgccgtgggtaacttggggggtcgctctcatttaaaagaaatattttttaccgtctaagggaagggattatgtgatcgacttcgcctttttaaggctccaaaaggggaactggtttcggcaggggtacgaaatttttgg

SEQ ID NO: 214946 - DNA, 458 bp, Glycine max
agagcttctagcattgtgatgttgattgcatatgttgtctacattgtctgtcaactgtggacacacagggagttatttgaagaagaagatgacggtaaagatggcgaggatggttcagaagaacaagctgtgattggattatggagtggcattgcttggttggttggaatgactgtattcattgctgtgttgtctgaatatgtggtggatacaattgaggatgcatcagattcatggggtttgtctgtgagcttcctaagcataatcttgctgccgatagttggcaatgcagctgaacatgcaggagcaattatatttgccttcaagaacaagctggacatctcattgggtgttgcattaggttcagcaactcagattgccatgtttgtggtcccattatgtgtaatcgttgcttggataatgggtatcaatatggacatgaacttcaacctcttaga

SEQ ID NO: 214947 - DNA, 435 bp, Glycine max
ataaaattaaaatttattaaaattttatttcccacgagacctagtacagtttttaggaacccaataaattcaagagattttggaaactgaaaaaggggtttttactaaaggaaactgcaacaagaacaatttccacttatttgggatgtaccggagtaacacaaggtcaaaaggagcttttttggtagaacacacgtccggttgattcaacattttttacaggagggggtcatttttaacaggtagcttttggaacttaaaatgaagggaagggtttggcaaaggggtaacttttttttccccccttttttatgggtatgacaatggggccagaatgggactatataccaatccattggatttgaagctgattttgggtttggagcggtaccaccttttttgattttagggaagggccaggaataggccgaaggc

SEQ ID NO: 214948 - DNA, 457 bp, Glycine max
gcgatacaaagccaaaatgcttttactagatcacggtgtggtcttccaattggagggggaatatctttgaattctggtgtgcatcctgttgcagatattccactacatgatcagttttcttgtggaaatgactatgccttgaaggtaaggaaaccatatactatcacaaagcaaagagagaggtggacagatgaagaacataagaagttccttgaagccttaaagttatatggcagggcctggcgactgattgaagattcttcgagagtctagtagaaacagtacaaccttggaggagtcaattgaaatcccccctccacgaccgaaactgaagccaattcatccttaccctcgtaaactagatgagatttcaaagacagaaatttccaactcagaactcccactgaggtcgaattctcttaagccatcagactttggtcaagaaaacaattcttcc

SEQ ID NO: 214949 - DNA, 436 bp, Glycine max
aaacttctctacgcttaatacaacatatttaacccttataatgggtgtatatatgttaaaaacgtaaaaacatggtaaaaaaccgagatgcataatacaaagcccaagcatatctcactgaacttggacatcaataaccttacgttcaaccttggtcttaggaatggtgatataagagcacaccatttttcaactctgccttaaccttgtccttctcgcaattatacggcagctttaaacgggtatcataggaactataggtcctgcttgaccaagaatcatcttcaccatgttcttgatcacttttgaggccaccttttataacaagcatattatcctccactgataccttagcatcttccttggcaagacccgagatgtcaaacctcattctgatatcatgggcttcatctttgatgtcccaaggggcacggat

SEQ ID NO: 214950 - DNA, 374 bp, Glycine max
gttgaatgttgtctggggtaaagtcacaggcatatagtagtatatagtacatacaagagagaaacatttagcgcggtaacaaatacatgatgagattcatagtatgatactattacacatgcggagggatgaagtggttggttctggatcaagaataataaaaagtagttagaagaaattttagaaaatgtcgagaatctcgaggatggagcgattgcaaaggggacaagagccttgattaagccacagttccctggaacacaccctgcaaaaagtgtgtccacatgggatgaacgctgcgccttttttgctttccatgcacacgcaggacaccggatcattccccacaacattctcctctttctctttctcct

SEQ ID NO: 214951 - DNA, 513 bp, Glycine max
attctgtagcacatttttgggaacagctgtacggatcccctgcgaagtgttgaagcagaggttacaggcgggtctttttgacaacgtgggcgaggcttttgttgcgacttgggagcaggatggtcttaggggtttctttcgtggaaccggagctaccttgtgccgcgaggttccattttatgttgctggcatggggctctatgctgaatctaaaaaggttgccgaacgactactagagcgggaactcggtcccttggaaacaattgctgctggagctttatctggtggcttggcggctgctgttacaacgccgatcgatgtcatgaaaactagaatgatgactgcacagggccgatctgtgtcgatgactttgatagccttctctatactaaaacatgagggaccccttggcttgttcaaaggagcagtacccaggttctgttggattgctcctctaggtgctatgaactttgcaagctatgagttggcaaagtacgccatgaataaaaatga

SEQ ID NO: 214952 - DNA, 479 bp, Glycine max
gcaattgaagtaaaaatgtaatgaacatcaagtcaaaataatttatacacttgagatggaacaaaatactaatagtattttgattgaggggaaaacaattccaaacaaaattacaagtaacttaatttaaaaacttgaacatgaatttctgaaactcttaaacttcaattaaatttcttttttggttatgtgggaaagcaagtaggtgccctctataagctgtgcttgttttttctggcacttttagtcatttctttggtgatggcatgactaagaaccccaatagggcaaaagaacaagcacagagaaactgaatgccgagtctctatctgattctctaatccatcaagaaaaacatgccttgcagcaaagagatccataaccaaaaggtgaatccaagctgatgctaaagtcatctcactggagaacattttccctatactagtcagctctggtagcaagtatttacttgcaaaaat

SEQ ID NO: 214953 - DNA, 435 bp, Glycine max
ggacaataatttattttatttcaagtccatatcgggtctacacatagacacaacataactcatgttgctagagtagttttctcacaaccatcgtgcacacaggccaaaacatctctgtagtctcttgaaatggtaaaggagtcgtagacctctccatcactacttttcttgtactcaaacaagagatatgaatgattgaaagcagtcaatttgccaaacccatagtcaacgtccctataaagactccaaatagggggtgatggtgtgaagtctgacaggtgacttcccccttcaccaacaaccacatgaattgttccattcacagtgccagagtagtgatgcttttcttcattcacacattgattctgataaatggggcatactctttcatagttatggacatgaccataaaatccaatggctactttggacttt

SEQ ID NO: 214954 - DNA, 531 bp, Glycine max
aacaaataaaacagtagtcttcaattacttcaaccaaaaggtctaacaaactacacgattataagcttaaggcaagtaataaccaactaaaattcaagtttgcaaaactatgatttcttattataaagcccctaccctacattcggggaaacttcaaaaccactatttttcatccaaattattcaatgcaaaggggaagcaacatcattgcctcagatagttgtcgtcgtcattatctgtatattaacctccaccaccagaaccgtatttctttccgaacaagacgagctgtagcttatcataaccagcgagcactccagcacctgcaacagcacgtaatatgtttgcaccggcacctttaaagagtgacttagtaccctcttttgcgacaattatcttgaatgcttccaaagagctcttgtattttacagcttctccagatgtcatcatcattcttctacgcacagtatcaatggggtaagaggccaagccggcacctattgtgatcccccatcccaagagaaaactcgc

SEQ ID NO: 214955 - DNA, 512 bp, Glycine max
  unsure (1)..(512): unsure at all n locations
acaaaggttgctgtaggagataagattgcagtagtgctaagtgctaacacctgcagtgaacaatggcctctgcatcagcatctctgctcaagtcttcacttgttcttgacaagtctgagtgggtgaagggacaaacccttcgccaaccttctgcatcagttgtgagatgcaaccccaccaccccatcaggcctcaccatcagagctggttcctatgctgatgagctcgttaagaccgcgaaaacagtggcttcaccagggaggggtattttggccatggatgagtccaatgctacctgtgggaagcgtttggcttcaattgggctagagaacactgaagctaaccgncaggcataccgtacccttctcgtgacagttccaggccttggtcagtacatctctggtgccattctctctgaggaaacactctaccaatccacaactgatggcaggaagattggtgacgtgctgcttgagcaaaacattgntcctggtattaaagtcgacaagggt

SEQ ID NO: 214956 - DNA, 584 bp, Glycine max
gttctgccaatcacgaaggactgttaatgtgatctcatctagatgccttccatgtggcactgtggaattggttctgtctaaacctcatagtttgagatacaatgcactaagtttcattttcgttcaagtcccggaactatcatggctgcagtggcatccattcagtgtttattctagccctttggatggaaagaatcaccttgctattctcattaaggttcttggcaaatggacagaaaagttgagacacaggattactgatgttgatgcacaaaaagattcatctgtcataacaacttcagttgaggggccatatgggcatgaagtaccataccacttaatgtacgaaaatcttatattagtggctggtggtattggactttcacccttccttgctatattgagtgacattctccaccgtgttaaggaggggaaaccctgtcaatcgagaaatatgttacttgttcgggcggtgaaaaaatcaaacgagctttcacttctctcaaacattgacatgcaatcaatttgtccatccttttcagataaagtaacattgatatccatatttatgtcacccgagaatc

SEQ ID NO: 214957 - DNA, 530 bp, Glycine max
cacaaattgattatactcaacccttagaggagcttcctttgttgtttgtgcaattgacaagattcaaagatggtgaaagctttgccattggagttgcctgctcccatacgttggctgatggtcttagtgcaattcaattcatcaattcatgggcaaaggtagctcgaggagagacactagagccacatgaagtgccatttcttgatagaacagttctcaaactccaacactctccatcagcaccatgctttgatcacccagaactgaagccactaccactcaaactaggaagttctgatagcattgctgaggaaaacaagaagacatgtgctgtattactgaaactaacaccagagcaagtggggaagctgaaaaagaaggccaatgaccaacccatgaaagaagggtcaagagtaagaccttatagcagatttgaagctattgctgctcatatatggagatgtgcatgtaatgctcgtgaacttgatgagaaacaaccaaccctagttcggttcaacggtgacattcgc

SEQ ID NO: 214958 - DNA, 523 bp, Glycine max
ctgccacagtcattagcctcctattgcctttattaaaactgaagttagaggcctttttggttctgtgttctgtgattttgggcctgagtttactgttgttgatgtggatggtgaagaaccccatactggcattattgcatccataagcaatgacaaccctgctctagtatcctgtgttgatgatgagaggcttgagttttaggatggagatcttgttgtattctctgaagttcatggtatgaaagaattgaatgatggaaagccagcacagattacagatgctagagcatactcttttactcttgaagaagacaccacatattatggtacgtatgagaaaggtggtattgtgacgcaagtcaaacaaccaaaggtattgaaccttaagccactcaaggaagcaatcactgatcctggtgattttcttctgagtgatttttcgaagtttgatcgaccacctctgcttcacttagcattccatgctttggataaattcatttctgagttaggtcgctcccctgtt

SEQ ID NO: 214959 - DNA, 467 bp, Glycine max
  unsure (1)..(467): unsure at all n locations
aacacgaggaaccaaagttgctttttcaattcatatatgaaatttgacataatgttgcctttgggtatcaattatgaatatgaagcatgagagtcaaacatgctgtcgtttttcacctaagtctcaaacacacctgtatcaagatgaaagcaacctactaacggaaataaatggatatctgagggatgtcgatgtcattatcctcatcatcctcgcatgccacaacaacgtccaaatggcgacggtacgcaagaatttcaaacttggctacttcccttgccagatctgcaacctttttgtccattcgatctttatgccgagggaacatgctattatagagcaggcaactcccacaagaaatactgtaagcattcaagccctttgccttcagccactctagaagttccctgagggtaagattgtctncgagaatccatctttcccaaccggtcaactcatatcttgat

SEQ ID NO: 214960 - DNA, 403 bp, Glycine max
gatgtaagcgattactgcttttttgaatttggatgtgtgttggtttatgggagcgaaatggttgtggctgacattgatgattgaacttagagtaggttccttgctatcaagatttggcgtgctaaaggaagtgtcagatgatgcgtgactgcggtcactatgcttgtaagctgctctgctgtgatggcgattgccctgcctgctctgagatatgcagtacgaagcttctatgtaagaaccatcaatgcccttctacatgccatagagggccttgtgctccttgcccaataatggtgacaattgtatgtgcatgtggagagacacgtttagaggttccttgtggaaccgaaatggacaataagccgccttgatgttctaaaccatgtcctatcactcctttatg

SEQ ID NO: 214961 - DNA, 471 bp, Glycine max
atattattatataaagatagtctataatcactagaatttctatatatttatacttagtatataataattctagtgattatagctaagccaatatatatcataatataatatacccttttcttattcaaagaatttatggctatgccttatcatttttagtcaaagaaaagaaattatggaattgaaataactcactcagaacgccctttaaaagattacgcggtacgattgaatcaaataagcccttatggaataaatattcagctgcttgtgaaccttcaggtactgccttattcaatgtttgttcaattactcttttaccagcaaatgcaatataagcatttggttcggcaataatgatatcccccaacatgccaaaactagcagttacccccccagtagtgggagatgtaagtatggatacatagaataacgttttattttcttgataatcatataaagcagaagaga

SEQ ID NO: 214962 - DNA, 507 bp, Glycine max
  unsure (1)..(507): unsure at all n locations
tgatcattacatgtatgagactcaatttagttttaacaataatatcacctaaattgaaactctcaatgcaactatcaatgaaactagtaatattattgttagttgcattgagagtttcaatttaggtgatattgacaaatacaatgatatttatttttatagttacatttttttgaagggcagaaattgtagtgaaagcgataattctagtactagtataataactagtacgaatgatacanatgatagtgaatccactttaggagaaagttctaataatctcaatgaaagtcaaaattttaagcttttgtggcttgaatgcgaaaattgttatggattaaattataaaaaattttttaaatcaaaaatgaatatttgtgaatactgtggatatcatttgaaaatgggcagttcagatagaatcgaacttttgattgattcgggtacttggaatcctatggatgaagacatggtttctctcgaatctattgaatttcattccgaaga

SEQ ID NO: 214963 - DNA, 389 bp, Glycine max
aaaaagtcaaatttcaatactttttttagtgtaaaacaacaaacttaagacctcatataaattacttaaactcgtctctagactgaccttagtagattcaaaattaatacaataattcccagcagaaattaatggagacatatatttccctttttgctgattgccatccgatactcagcgttgctagtaataagcatcaattaagaatctttgcagcagcaatttgagacgtgaattgcacaggtcccccaaaaaattgaaaatatcgataggatattatttttcatgaacgagaggagaatacacaggataccacatattgcttcgcacatactccacagcctgatcttttgacatatgggaaagttccttgggccccacatcaccat

SEQ ID NO: 214964 - DNA, 528 bp, Glycine max
accaaaaaaaaccttcccacatttgactcctcctttataacaaagtcataggacagcatagaaaaccagaaaaaatgtgatatagtttctgtgaccacatccataaacaccattgttaagactagtctgactagaatctataagccataagccaggtcttgaacaaaccaatataaaggcttacaaaaggatctttgcttaaatagaaacaacaggctgccagcaccaaaagctagttctttggcccaatatccttcagggcgcaaatctgttcctcacccatagcagacatgacagacacaacaagatccttgccctcagcaaatccatcctttatctgagtgagcagactctcatcagtgggaagcttgaggtcatccttggtgttcccattttcagtaagcagactcaaaaatccatcctcagcaatatcaatgagctggtaatcagtacgattcacatgaggaacatcacagttgtgagaagagggcacaatatcctcaagtttcttggcagtgaaaatatcaa

SEQ ID NO: 214965 - DNA, 517 bp, Glycine max
aagatttaccgctatgctttccacaatattgttaccacttgttctatgtcttactctgcttgtgcttctcttgttcttcatccgcaatctcagaaccttcaagaacccaccccttcctccaggtcctaaaggccttccaataataggaaatttacatcaatttgatagttccattctttatctgcagctatggcaactctcaaagaaatatggccctatattttctcttcaattagggttaaggccagccatagttgtttcctctcctaaactagccaaagaggtactgaaaaaccatgacctagagtttagtggacgacctaaattacttggccaacagaaattgtcctataatgggtcagagattgcattttccccatacaatgaatattggagaccaattagaaaaatttgtgttgtccatatctttagctccaagcgtgtctctagcttttcctctattataaattgtgaggtgaagcaaatgcataaaaaaatatcttggcatgccctcttc

SEQ ID NO: 214966 - DNA, 610 bp, Glycine max
  unsure (1)..(610): unsure at all n locations
cttgatagaacattataacatgcattattttattattttgatcacaaagtccatctagtagttatatatggctcctagtcttggcacaaagacaaagatcgttcttcttgtgttgggtgagtcctggcaatacttgaacatcaatgtcttcctttatcatcccttgtggcaattcccaatcaaaggaatgaagaagattagcaagaacaagttctaatatcacaactgccataggtaaacctgggcaacttctgcgacctgatccaaaaggaattagttggaaatcttgtccacgaaaatctacgtcgctatccaagaatctttcgggaataaactcttgaggatttttccaagattcgggatctctatgaataacccaagcattcacgtataatattgtcttagctggaattcgatagccatgtataatgcactcttcatttgattctcttggtacaagtagtgtggctggtgggtacaatctaaatgtctcctttatcattgccttgaaatacgaaagttnttgaacatcatcttcatctaagaaatcttttgtgccntccacatttctaatttcttcttgaactttcttcattactctaggggtttt

SEQ ID NO: 214967 - DNA, 472 bp, Glycine max
aatatatgttgttatatactgatatttgtatatattcaactgtaaatgatagaatacagatagatctatctatatagataagaaaaatagatcattttacatgttaagttctttggttcgaagggtaacacacaagcgatcaatttgatctatttctttatttctgcgtgaattgtatgtttgcaacaacggggacaaaattttctcaattccaatcgactaggcgtattctgtcgattctttttagttatatatctagaaatacccgttgattccttattaacactctttttatcacaaccggtacattccaaaataacaattactcggatatctttacctttggccatgaacctcccttgggtttttaattcacttaactctttcgttttcggattataatctaagaaaaagaaaagaacgaaaaaacgaaaatataaattaagaattagaaatccaattttgaaagatt

SEQ ID NO: 214968 - DNA, 527 bp, Glycine max
caccaacaccaatttgatttacacgaaccggttctcgggcccaccgaggcccaattgcgcttgctcaacgggcctgtccatgataaccgtcgaggacgatatcgagtctcttttctccgagacgaactcggaggatgagcggcgcgtgaggaagcaacctagcattggggcgtcggggatttcctccggggtgaagctcgaaaacgtggggaaagcctacaagggcgtgacggtgctgaaggacgtgagctgggaggtgaagaagggggagaaggtgggcctggtcggcgtgaacggcgccgggaagacgacgcagatgaggataatcgcgggccttgaggagccggatttcgggaacgtggtgaaggcgaaggcgaacatgaaaatcgcgtttctgaaccaggagttcgaggtggcgccgagcaagacggtgagggaggagttcatgaacgcattcaatgaggagatggaagtggcagggaagctggagaaggtgcgaaagcgctcgaaggtgccgttatgatttg

SEQ ID NO: 214969 - DNA, 443 bp, Glycine max
ggtagtaatcatccttttatatttccgtaaatgagttagtgaatagatacatgattatacaaaggctgtgtagcttaacccaatatgctagctacatcaccttctggcggtaaattagtgtaacaatgaaatggttcactcaattccatctcttggcatttttcacgccgttggacttctgttttgctgcctgaaaggcctgcatcttatggtacttccgtgcctattacttagccttggacatcttaaatttggctttcactttaggagctttgctatcaacctcagccttgcgtacaagttctctttccctagcatcaaaatgttttggtaaataataatcgtaatcacctgcataatcctgtatggtgccatctttaatttcgatcactctattaactattcgctatataaaatatcgtgcatgagatactgtgataaca

SEQ ID NO: 214970 - DNA, 506 bp, Glycine max
caactggagagtggcaatggatgtgatctacccagctctggtgaggtctttacaatacctgttgccccaggagatgttgtcgttgctggaacagatggattgtttgacaatctgtacaatgatgaggtcactgaagttgttttacattcagttagagctggactagaaccccaagtaactgctcagaagatagcagtactggctcgtcaacgagcactggacaggaataggccgacaccattttctacggctgctcaatgaggctgggttccgttattatggtggcaaacttgatgacataacagttgttgtgtcatacataaccggctcaacatgtgtgagtttttcgccatcttagctttgctacattttgtatattcatatttgtctacagggactgggttgccagccttgtctgtcatttttgacctgaatgcactactgcttcaaaattttatctcaaacttgaggtgcttacttgctatagtgatatattagatacaaaa

SEQ ID NO: 214971 - DNA, 535 bp, Glycine max
  unsure (1)..(535): unsure at all n locations
gaagatgaaggcatcttcgtggcccaggattttggatacaaatatatcactatagcaagtaagcacctcaagtttgagataaaattttgaagcagtagtgcattcaggtcaaaaatgacagacaaggctggcaacccagtccctgtagacaaatatgaatatacaaaatgtagcaaagctaagatggcgaaaaactcacacatgttgagccggttatgtatgacacaacaactgttatgtcatcaagtttgccaccataataacggaacccagcctcttgagcagccgtagaaaatggtgtcggcctattcctgtccagtgctcgttgacgagccagtactgctatcttctgagcagttacttggggttctagtccagctctaactgaatgtaaaacaacttcagtgacctcatcattgtacagattgtcaaacaatccatctgttccagcaacgacaacatctcctgcggcaacaggtattgtaaagacctcaccagagctgggtagatcacctncattggcactctccagttg

SEQ ID NO: 214972 - DNA, 440 bp, Glycine max
attaaaaaaaatagtcattaattccttcatagatggatgtcttctataacgatttataaacatacattaataaaggaagagtaaaaagtaattctaatcagcggttacaaatttctacagtatattagttaattacacctttagccttttttcactggttcataagacgtatccctcaaccaaaaaaatacaaaggttgtgggggaactcttctttggttgccttttgtattttttaatgaaaactaaaagcctaattataataacaatatcaatcaacatgctgcagaaggattggcgaaggggttgaagaagtgaggcttatgggccatggagaatgatgtcttgggggaaccgtcggcaccgttgacagcgctgacgacgagcctctctcaagaggggcacatggcgagtgttgccgcaggcataggcatgtacaac

SEQ ID NO: 214973 - DNA, 472 bp, Glycine max
ggccaggcatgccccactcatccaccacacctctcctcgttcacgctaccccttggggctcttcttctacctttcaagttttaaaagtataaagatggcagagacattcctatttacctcagagtcggtgaacgagggacaccctgacaagctctgcgaccaaatctccgatgctgacctcgacgcttgcctcgagcaggacccagacagcaaagttgcctgcgaaacatgcaccaaaaccaacttggtcatggtcttcggagaaatcacgaccaaggccaacgttgactacgagaagatagtgcgtgacacctgcaggaacatcggcttcgtctcaaatgatgtgggactggatgccgacaactgcaaggtcctcgtcaacattgagcagcagagccctgatattgctcacggtgtacacggccaccttaccaaaaaacctgaagaaattggtgctggtgaccagtgtcac

SEQ ID NO: 214974 - DNA, 492 bp, Glycine max
aacttgaacactctctttttgatattgatattaagagacacattggtagggcatacatacaaacagagagtacatgtttttagttgatcacgtaaaaaattacaaaagaacatacaaataacaaaataggaggaagaggagagaaacacacagagtaagagacgtggaaagttatggatattagacatattataagggcaacgctcaaaaaacttccagcatagagcagtggaatgaattacttaggccttctaccacttgaggggtttgaccacttaccatgtgaagtcagggtcttctcttccaaagtgtccataggcagcagtcttcaaaaacctgttatttccacccctcttgagatcaaggttgatggagatcataccaggcctgaaatcaaagttttacttcacaatgttgagaatctccttattatggatcttcccagtgccataggtgtcaacaaacacagacaaaggctcaggcacaccaatg

SEQ ID NO: 214975 - DNA, 571 bp, Glycine max
  unsure (1)..(571): unsure at all n locations
tcgcgatctaggaacttaatttctaattaagttcaattctcatcagtaaaaaagtggtacacccaaaaatacagataattcgccagctttatgtgcaatttgtgtcccattcaaattatcttcaatacgagtcaagggaataaacccctgttctatggtttccagataaacgatactctcaaaagtactggtacgagtaaaaataccctcttctttaacttctgttattattctgatggagtgaagctcgttcataggtatttcgagaataatacgacgattttttccaggaaatccccaacgaacaaaacgtacctttttcccttttttattgaagatatcaaaaccaccacctatatcccaaaaaataatcgacccaaaataaaaactactaaagagacccgcgattccataaaaagccatcgtggccccttgtggaataaatggaaaataaataaagtccggaataaaagataaatcactaattntctcagaataaagaacanatccataccaagataactgggaaattgcacgaacaatatccccccatgaacctacatagtgaaaa

SEQ ID NO: 214976 - DNA, 340 bp, Glycine max
ctatctttatataataatataaataagaataaaaaaaataaaaaaaaaaaaagaatctatataaatataaaaataatatatataaggtacaaatagtaaatcgaggtacccattttatgataaactttccttccatttttgttcctctagtaggcctagtatttccggcaattgcaatggcttctttatttctttatgttcaaaaaaacaagattttttagatacagaaaacaaagtaaaattctggggtttttttattccccaattataatactaaattcaaaaaaaggagagtaatgagtataatctttcgctcagacgatgtactgatatattctat

SEQ ID NO: 214977 - DNA, 505 bp, Glycine max
aatattaaacaataattttggcatcataaattcttccggaataattatacaaaagtgaccagggaaaacccgatctgccagttgcccactgaataaaaacacacatcatattactatgtgttgtcatacatgcattgtaatgagtggatattccaaagcaattggtccctttatccctccttaatccttatgccgtaaatggcaccatcccttgtaaattgtaattgcttcttcagaaatagaattatacaaaggtagttgcaatatctatttgccaaactataaatgtaaagacccttcttcccaatcctagtagtgtcccaattgtatttacaaaggtgggacaagatatgtatatacaagtacaaccatgtaacataatgtaacaataatcatactttggtctttactagtgcacattacagggagttattatgcactgaaacccctttgcagagaactccagggattggaaggaatactgacacaagcttgtgctgaagcc

SEQ ID NO: 214978 - DNA, 535 bp, Glycine max
gttgcaataaaagtgtcgtttaaaagggctattgttaatacatgtgcttcatcacaaaactgaaatgagaaacattgattcataacctgcctcaaaattaagatactatcccagaaagatagttgacaaaactgataaaaacactcccctgaaatgaactcagtctaactaaacaatcgcctgagacttgttaaggatcactccctcatatttcacctggaaccacttcatagcatcctcctttgtgacacggtgctggattccaacacgggacttgcaccttcggcgacgtcccacacgatagccaggacgctccagaacaacaaagaagtccattccataaataccagttgaaggatcatacttgattcccaaatcgatatgctcctgaatgccaaagccaaagcaaccagtatcactgaagttccttctgagaagttcatattccttcaccttcaaaccactctccaaaagttgcattgccttgtcacctctgacagtgacatagcatgcaatcttctcatttcttctaatc

SEQ ID NO: 214979 - DNA, 552 bp, Glycine max
aaacgaaaagccattgttacaagcatttcacacttaacatatcaaaaaaacaaaggtttctactttctacgatgagagacatgaaagacgcaggtgccttgggaggcaagacagcaagagcctgcgacagctgcgtaagcagaagagcaaggtggttctgtgcagctgatgatgctttcctctgccatggctgcgacactttggttcattccgcgaaccagttagcaagcaggcacgaaagggttcggcttcaaactgcttcctcaaaagtaaccaccacgcacgcatggcacagtggattcacacgcaaggcaagaaccccgcgtcacaacagcaagcactttgcgctgcaacagcgtctcaaagacgaagttctcttcaacaacaccagtgttcttcccctcgtgccggagctcggaggggaagaacatgaaccggtggttgtggataacgatgagactgaagagcagatgctgtgtcaggtgctcgtgttcgacccttatgatgtgagaaccgatgacttggatacgttctctgacatggaattcgctg

SEQ ID NO: 214980 - DNA, 566 bp, Glycine max
ccaaaaggcttaaacctgccaataaagatgatcattaattagtactaattactaaacctgtctagagatatatatagacagaaatatcccaagcaacaattctagtaaaattaacctggcccagtaatattatttactagtatttatataatacaggctatatatacgtacatatatatagccaaaccaagtattaacccaaatttgcagaaaaagcaaagatggatccgttaattgattgatgtcagtggtaagcaggaaaagcattggctccaacaaagcatgtcctcttcacaaaacgacctttcattctaggccttttctctgcgttcaacttccttacttcatatcttatcttctttgcaaacaaacgagtccttctcttctctctataccttgacactcttgcttctcttccaccatctaggtgccctcttaagcttcttacttccccacctacaccactcaaacccaaggagaagtcataatcagagttgaacttaggtgggtttgagttgtccatggagaagaccttggtagaccgagtaataccctatatagttagc

SEQ ID NO: 214981 - DNA, 528 bp, Glycine max
agctccttctacaatattttttgacttggtgctttccttttggatcttacaatgggaaacagtgaggaagagaaatctactaagactgaaaagccttcttcacctgtaacaatggatcaggcgaatcagaccaaccagaccaatattcatgtctatcctgattgggcagccatgcaggcatattatgggccaagagtcaccatgccaccatactacaactcagctgttgcttctggtcacgctcctcacccgtacatgtgggggccaccacagcctatgatgccaccttatgggcctccttatgcagcaatttatccacatggaggggtttatactcaccctgcagttcctattgggccacttacacatagtcaaggagttccgtcttcacctgctgctgggactcctttgagcatagagacaccacccaaatcatctgggaatactgatcatggttaatgaagaaattgaaagagtttgatggacttgcaatgtcaattggcatggccatgctgaaagtgcagagcg

SEQ ID NO: 214982 - DNA, 393 bp, Glycine max
aaaaaggcaaaataactgggtaaatatcattagaaagtctccacaccaatcgttaattcatacccaattatgtagcgtttaaacaaacccccttcaatttgaaatctctagttcttttcattttacaaacttggtcatccatttttggcaaatttaataaaatacagagtttagggcctaggtaaactgataagcaatgaattagttctgattttgatgggtttggattctaaaattcaactggcccatccctaaggaaattgttagccattattttgggcttggaatatgccaaaactacctgatcagccagtacaattactggttttctggatcaaccagctgccacagcatcaactctaggacttgggtccagcagttgatgccattttg

SEQ ID NO: 214983 - DNA, 561 bp, Glycine max
catttgttcaagaaactaccaagtagcaagcttgattattattattattattatcattatcccattgagcttctaaaaatgtgcaaaggtgcagaaggagaaaagcaacatggtttctgcagcagctatctacataaagaatgtgcaaccagaagtgctacatgttgtgagctatgtgggttacaggcttcattgtattgtcaagctgatgatgcatacttgtgtagaaaatgtgataaaagggttcatgaagctaattttttggcccttaggcacattaggtgctttctgtgcaacacatgtcaaaaccttacgcgaagatatctcattggagcatcaatagaggtggttcttccagccaacattaactggaccattggaaatctgcctagcaacagaggaatccacagaaagtgctcaagaatgcataacaacctttccctcttgatataacttccatctttctttttttctgcttagaatatcttttgtaatagaaaaggttagtgagtaccatctcaagtacatatggaagtgctaaatgttcttaaggcatgattt

SEQ ID NO: 214984 - DNA, 508 bp, Glycine max
gacaaacttgttgttcacattaccaagaacttcatgaccctgcccaacgtcaaggttcctctcattcttggtatctggggaggcaagggacaaggaaaatctttccaatgtgagcttgtctttgccaagatgggaatcaaccccatcatgatgagtgctggagagttggaaagtggaaatgcaggagagccagcaaaactgatcaggcagagataccgtgaagccgcagacttgatcaagaagggaaagatgtgtgctctcttcatcaacgatcttgatgcaggagctggtcgtcttggtggaaccacccaatacactgtcaacaaccagatggtgaatgccaccctcatgaacattgctgataaccccaccaatgtgcagcttcctggtatgtataacaaggaagagaatccccgtgtgcccatcatcgtcaccggtaacgatttcttcacactctatgcgcctatcattcgtgattggcgtattgagaagttctactgggcaccaa

SEQ ID NO: 214985 - DNA, 542 bp, Glycine max; identical to SEQ ID NO: 213242
  unsure (1)..(542): unsure at all n locations

SEQ ID NO: 214986 - DNA, 540 bp, Glycine max
ttgcaattgaagttgaagtcttgcccttctctcttcaactccaaacacaagacatgatcatccatggctgcctccgtctccactgtcggagctgtcaacagagctcttttgaacctgaatgggtctggacctggggtttcagctcccagttcatccttctttgggagcagcttgaagaaggttattggctcaagggtccccaacacaaagatttcctctggaagcttcaagattgttgctgtagaagagaagaaagagattgaagagacccagcagaccgacaaggacagatggaagggtcttgcctatgatatctcagacgaccaacaggacatcacaagaggaaagggtttggttgactcccttttccaagctccacaggatgctggaactcactatgctgtcatgagctcctacgagtaccttagcactggacttcgccagtacttggacaacaacatggatggattttacattgctccagcttttatggacaaactctgtgttcacattaccaagaacttcatgaccctgccaaca

SEQ ID NO: 214987 - DNA, 558 bp, Glycine max
ggcaatactttatgcacagatacatgcatcacaacaagttcctttacaaacatatgcactctctacatcacagactcattgtaccctattcatatggagctctgtacaatcaccccgtcgaggggcttctgaatgacactgttggtggggctttatctttcctactctccgggatgagtcctcgagccttcatcttcttcttctcctttgccaccattaaaacagtggatgatcactgcgggttattgctccctgggaaccttttccacatctttttcaaaaacaactcagcctaccacgatgtacaccaccagctctatggcaacaagtacaacttctcgcagccattcttcgttatgtgggacaaaatcttaggtacctacatgccttacacgttggaggagatggaaggtggtggttttgaaactagaccttgcaaagactacaaggatgatcaaactctttcgcttgacgagtcttctttatctgtactaatattgttttccctttttatgagcagcttctccttttcatgtgatgcctgctatatacatatga

SEQ ID NO: 214988 - DNA, 486 bp, Glycine max
cttctgtttcaacctcatcgtcatcgtactactactacccacgttctgctcctttgcggatcgtgtccacaaaagatggcagacaatgaggatggaagggataagactactcgtgggaatgaatgggaggttgtatctctgacagcattgacatatgcaactgctcctggtcctgatgaagttgagatgaaggatgatgggaacgaagatgtatatggacaagatgaatgagaaacgtcacatgctttatttatgtctcgtcactttgtctttgcttccagccagcatgaaaacttgcctgtggaacctgactatggtgagattcatgatgattctggagacaaagatgttgcctctgaagagactcctgaagaagtgaccataccaagtggaaaggatgaataaaacttgacattaccaggattggcaagtttagaggagtttgagggcatgcagcattttgacgagataataacagattatctg

SEQ ID NO: 214989 - DNA, 497 bp, Glycine max
cacacaatcagaatacataagttgaataacttcaagagctatacattgctaatcaatacaaagaagaaaatccataacataaaatgtttgaacattggcattcataattgggaaaggtcaaccaatcctagtaccaaacctgcatttcacaattgtagcacttttcattctcaacctctctctgacatacattttttcgtcatcatcttcacttttaccacaaggataggagcccatacgcactgagccacctttcccttaactttcaccagaggagcttcccctgatcaaggagccacgacggttgccaccaacaatcacatctttgagtcgatatatgggagcaagcaccctgctcctcgcctcatcatttatactgatttgccatttaagttgtaaagctctttcctgctgccagcgttgaccaagcattacaagacccatcacagcagctgcaatgaagacagaccagaatgcatttgcctcttttgcatgag

SEQ ID NO: 214990 - DNA, 536 bp, Glycine max
aagtacgtaaaaaaatgatactaggaaacccatatttgaacatccccaaccgtaagatctatcaaatatccccaaagcaagataagaaccacatcaacaacattggcccaagctatatccacacaatacagtgacaatttacaggaaaaaaacaaatacattttaaagcagaacattggttctgaaactatcaaatttactggggtcttccactgtatcaaaaccagacggaccaaccttagttgtcatcatttatccaactgttttcatcttctactagcttgtagatgctgaaatggctgaccctgatcttccactctcctttagtgggatcatatgataaaaattcagcaccttggtcctcagcctttctcttgagcatctccttggatttctcaatcttcgggccttctgtatactgatggccagtttttttgtcgaaacattttatgttgagtagtgtcacctcagcaggcttattcagcccttgtccaacaggaggtttctttaaatcatccatgtatacaatcaccttc

SEQ ID NO: 214991 - DNA, 470 bp, Glycine max
aatgatctttaccttttacaaggctcagggttattcagttgggtcatctgttgtggaggaagacaagcttagccttgcaactacacttcttgaaaaggccaaggctaaaggggtttctttgttgcttacaactgatgttgtcatagcagacaagtttgctgctgatgctaacagcaagactgtgccggcatcaagcatcccagatgggtggatggagttggatattggtcctgattccatcaagacatttggtgaagcattggatacgactgataccattatttggaatggaccaatgggtgtttatgagttcgataagtttgccacaagaacagatgctatagccaagaaactggcatagctgaatgggaatggagtgacaaccatcattggaggaggtgacttccgtgccgctgtggaaaaggttggacttgcatacatgatgaaccacatctgcactggtggtggtg

SEQ ID NO: 214992 - DNA, 498 bp, Glycine max
  unsure (1)..(498): unsure at all n locations
gaggaccatataccaaatcactatagctttggaaattaacacgaaaattagccgctaagaaaaccaaacttaaccaacaaagtaaactcatttggaaatgaacattgttcaagaacaattagatcaaagctcaatgcaacaccaaggatgccacaaaaccctcttattttgaaacctatcctatattaagcctctacaggagcaagagctcgcagctctcattgtaccttaatccactgttggctgaaacccaaccataataataatataaagcacaaacttcaaaggaacgaatgatttttgctcaagcatcatcaagagcaaggacaccagggagttgctttccctcaagaagctctaagctggcaccaccaccagtggagatgtggctcatcttgtctgcaagtccaaccttctccacagcggcaacggagtcacctnctccaatgatggttgtcactcccttcccactcagctctgccagtttcttggctatag

SEQ ID NO: 214993 - DNA, 520 bp, Glycine max
gaggaatcttatgtaaatacttcagaataaggtttggtcctattcatggggattctgtaaatattccattccaaaaagagaaaaaattcgaaacaattgggattttttggagattggatgcagttactaattcatgatctgaccttgtcagattgaaaacttcattctctattctacaagaatttttatgaaagcctttcatttgcctctcttcgatggaagttttattttcccagaatgtatcctaatttttggcctaattcttcttctgatgattgattcaacctctgatcaaaaagatatatcttggctctattctatctcttcaacaagtttagttatgagcataacggccctattgttccgatggatagaagaacctatgattagcttttcgggaaatttccaaacgaacaatttcaacgaaatctttcaattccttattttactatgttcaactctatggattcctttatccgtagagtacattgaatgttcagaaatggctataacagagttc

SEQ ID NO: 214994 - DNA, 524 bp, Glycine max
aaaataataatatgaaaagaaaacattaactataacaatagtactagttaaaaaacaataaataaaaaaacttaaaattataaatataattttaaattaattatgaatttatttacataatttattaaaataatatataatttatattaaatatagaatatcttttatatataatttatttacattattattaatttttatatttaaaaaattatttcaaatatttgataataaaaatagttttgttttctttgttgttaaattaattaaattttttaatttttttttaaataaattgactgaatttttatttaatttttaaaaatactagattaattaattttatcttaatattttgattaattttaatattgaattaaattattaaaaaattaaatatttttaaatttagttggttatttttaatttttataataattgaaatatttttttttatttgataataattaatttattcattttattcatattttccatttattatttgctcaacaattctatac

SEQ ID NO: 214995 - DNA, 607 bp, Glycine max
tttaggaagtattttaataattggggtagttgcattatatttttattatggatctaattcaggagataataattctgatttatgtaattgtattatggatactactattaatcatacaattacaggaacaaataaatcaactttatctagaatatcggaaaaagatattaattttatacaagaatttttagtaggtggtatgccagatatgggtgattcatttttaactaaagtatctgaagaaaatattaaaactatgaaagattctatagcagaaggtattaaatcaaattataatatatctaaacatttactacaaattcaacgtcaagtaggagatatagatactaaacaaactctgttaggttctttattgaaattttggccagaacttaaaaaagttaatcaatctttaattaaaatgtatagaattgttgagcaaataataaatggaaaatatgaataaaaataataaattaattattatcaaataaaaaaaaatatttcaattattataaaaattaaaataaacaactagatttaaaaatatttaatttttaagtaaataatcaatattaaaataatcaaaatttatgataaaattatt

SEQ ID NO: 214996 - DNA, 563 bp, Glycine max
  unsure (1)..(563): unsure at all n locations
cagaaattcagtacagtattattcagtgcagagaacaaatagggttatatattaaactcaacaaaaacaaataatatgagatgtttatgagaatttcatccacccaagaccgttgtgttccttaattaatggacaaaagctaaacttagctcaatttcttctatcccaagcatttgagtttcaagcacaggcaaatttccatcttatgaagtttattttgcacacatgtatcggagaatatactacctgttagcaacatatgaagaaaaagcgtgctatcagctatagctacagccatagcatcatattaatttttgggaccgatgtccttcagtgaacagatctgttcttctcccattgcagacataacagagaccacangatcttttccttcagaaaatccatctttaatctgagcaagcaatgcctcatcagtaggaagcttcagatcatccttggtatttccattatcagtcaacagactcacaaagccgtcttcagagatatcaatangctgatagtcagtgcgattcacatgtggaacatcacagttgtgggatgat

SEQ ID NO: 214997 - DNA, 522 bp, Glycine max
gcgatacaaagccaaaatgcttttactagatcacggggtggtcttccaattggaggtggaatatctttgaattctggtgtgcatcctgttgcagatattccactacatgatcagttttcttgtggaaatgactatgccttgaaggtaaggaaaccatatactatcacaaagcagagagagaggtggacagatgaagaacataagaagttccttgaagccttaaaggtatatggcagggcctggcgacggattgaagattcttcgagagtctagtagaaacagtacaaccttggaggagtcaattgaaatcccccctccacgaccgaaacggaagccaattcatgcttaccctcgtaaactagttgagattccaaagacagaaatttgcaacttagaacttccactgaggtcgaattctcttaagccatcagactttggtcatgaaaacaattcttccaagtcagtgttatctacagttgtttcagaaacccttggtttcttcgattcagatacacctactag

SEQ ID NO: 214998 - DNA, 470 bp, Glycine max
aaaataaaatcaacatactatctaaagattttatccaattgaaatttaaaaaacgactggcataaacttaagaattcaattcttgaaattgaataagtaaacaattgaattggattggtcgaatggtatcaaaaaaatggactactaactcccatttcttattaattattgaattaaccgatcaacttgctttgttatcgaacatatctttttgattgcaaaaattttccggaaaaaatttgaatctatttctatatgcgaatcaatcctactactactggtcctgaggtttctgcgcttgaaaaaaaaaatctgggacgtatcgcccaaataattggaccggtactagatgtatctttttctccaggttagatgcctaatatttacaacgctctgatatgtaagggtcgagatactgttggtcaactaattaatgtgacttgtgaagtacagcaattattaggaaataa

SEQ ID NO: 214999 - DNA, 254 bp, Glycine max
aggtattccgatattcggacgcatcaacttgttatgaaatcccattgatagcctctactcgtgtcctagctcgtcttagagctacattagcctcaagtggtggtctcttgcctttcgccttattcaaattagctcctgctatttcaagagtttgctgcgctgcttgcggatcaatgtgactacccttttccgcatcatttactaaaacagtgatctcattattggtgattctagcgtaaccgcccatcagagcc

SEQ ID NO: 215000 - DNA, 359 bp, Glycine max
cgcaatggataaaagcaccaaaatgcaattatagaagcacaaattttttagggtaatgaattacagaaaatgtcatgctgtgtattttgaccaaaaattgtgcgtgctcctacaaatcattttactatttagtcatataagggagaaagggaaacagtatgtggtggataatatcagggccatcataacctacacaactctgaacaactcttcataaatatcactgacttaaaatgcaattaggccttcgatttcttccctttggcttcattagatggttggctcttgaaaggcaggaaagtctttccacccatgaatggtctgaggacttctggtatctctaccccatctttcttctg

SEQ ID NO: 215001 - DNA, 520 bp, Glycine max
agaacactgaagctaaccgccaggcataccgtaccctcctcgtgacagttccaggccttggtcagtacatctctggtgccattctctttgaggaaacactctaccaatccacaactgatggcaggaagattgttgacgtgctgcttgagcaaaacattgttcctggtattaaagtcgacaagggtttggtgccccttgcaggttccaacgacgagtcatggtgccaaggtttggatggtctagcctctcgctcagctgcatactacgagcaaggtgcccgtttcgccaaatggcgtactgttgtgagcatccccaacggtccctctgctctggcagttaaggaagcagcctgcggtctggctcgctatgctgcaattgctcatgacaatgggttggtcccaattgtggagccagagatcttgcttgatggggagcatggtattgatagaacttttgaagtagcccaaaaggtctgggcagatgttttcttctaccttgctgagaacaatgtcctttttga

SEQ ID NO: 215002 - DNA, 379 bp, Glycine max
attaagctgtaaaggggcatttaaccataaacaaaaatagtctccaagactataaaaacattacattttagacaaattagtcttgcacttcatgggccgtcaacacctactggaactgctgggggtgctgcctaacaaggatcatattcactggaaacatcttagtaggagtagcttttgacgaacaactccttcttggcttcctcggattcaccctcaccagggtacttcccaagctgagcgagtgagttggacttggcacggaatgcgagtgcatcttgggctgccttcacgttctctgggcgggctccccatgtcttcaaggcaatgttttggagggctttggcatacgagaatgacacgtgccacgggtttggag

SEQ ID NO: 215003 - DNA, 479 bp, Glycine max
gcatgtaataaaggtatcatagcatatagcatagcataggtatttcatacattgttcttttgaggagcacatgcagcaattcagtcttactacatgattctctttatttagaaaacaaagttttaccaattaaacaaacttatcagctaggctttgcaccttagacaaactgattaaggtactcatccacagtgatgtatttcacatcaggatatagagctgaagcttccactccaaaagaagactcaatttcaaagttagtatgatccccctttacataagaagagtggttaattgacaggatcacattcacgggtggtgcggactcttcaatttgcttcaggagttgttcttctggaacatagattctttcaagagttttaccaatctttccctcccagagagtaacaagctcattaaacgacaaggtattagctggtggtctaatgtagagaattttgttcaaggttcttggatca

SEQ ID NO: 215004 - DNA, 569 bp, Glycine max
ctcgagccgaatcggctcgagctctattacaataaaaacactcaaaagaggagaaggaaagaagaaaagaatggtaacaatagctggtggtgtgagtctttcaagccctagcagggtatttgctaatgctaagggaatagactcagcacaaaaggcccaggccgtgaggtttccagctctgtcgaggcccattcaaaagtggcctggtttggtgaagacccggcccgttcgggcgacgccggagaagatatcggagaaggtagaggagagcataaagagcgcggaggaggcgtgctcgggaggcggcggtgacgcggaatgcgcggcggcctgggacgaggtggaggagctgagcgcggcggcgagccacgccagggagaagcagaagcagtctgacccgctcgaaaattactgcaaggacaatccagagactgatgagtgccgcacctatgataattgatgactgaactcagtcattccaaagttacatgcatgcatctattacttttaccttctgttacgtacattagacaccatgtattatctattaattcttattattataaaca

SEQ ID NO: 215005 - DNA, 489 bp, Glycine max
gaattgtgtttattataaataagaattaattaataatacatggtgtctgatgtacgtaacagaaggtaaaagtaatagatgcatgcatgtaactttggaatgactgagttcagtcatcaattatcataggtgcggcactcatcagtctctggattgtccttgcagtaattttcgagcgggtcagactgcttctgcttctccctggcgtggctcgccgccgcgctcagctcctccacctcgtcccaggccgccgcgcattccgcgtcaccgccgcctcccgagcacgcctccttcgcgctctttatgctctcctctaccttctccgatatcttctccggcgtcgcccgaacgggccgggtcttcaccaaaccaggccacttttgaatgggcctcgacagagctggaaaccttacggcctgggccttttgtgctgagtctattcccttagcattagcaaataccctgctagggcttgaaagactcacacca

SEQ ID NO: 215006 - DNA, 505 bp, Glycine max
attgaagttaaaagccttagccttccctacaactccaaacacaaagacatcatcatgcatggctgcctccgtctccactgtcggagctgtcaacagagctcttttgaacctgaatggctctggagctggagcttcagctcccagttcagccttctttgggaccagcttgaagaaggttattgcctcaagggtccccaacagcaaggtttccggtggaagcttcaagattgttgctgtagaagagaagaaagagattgaagagacccagcagaccgacaaggacagatggaagggtcttgcctatgatatctcagacgaccaacaagacatcacaagacgaaagggtttggttgactcccttttccaagctccacaggatgctggaactcactatgcagtcatgagctcctacgagtacctcagcactggacttcgccagtacttggacaacacaatggatggattctacattgcttcagcttttatggacaagcttgttgttaca

SEQ ID NO: 215007 - DNA, 543 bp, Glycine max
aaaaggaaaaggcaccaaattcaatttaagtggacactgtaactcaaaattatagaggaagacggtccaatatgaaaaatatagtaagatcatctcaaacttagcatcttctctttgcacctaagacattgagaatgctaagaatgttacacgcaagttccatcacaacttctagcacttggattagtacaacaaccttcacgaacagaaatatttacttgccaagtttgctttgcctccaattcaagactggaagaaagttcccctctgaatagcatcctcgttagcatttccaagagcagcctcgttcaagtacttgtcagccaattggactctcttgacattctcttgttcttggacaagcatgttaccatacagcaagagcttctccagagtcatcttgggctgctcaaaggttggaggtccatcttttgagttcacaagcttctttccaacactgtcaacaccaacaccagaaatccacttcctcacttcatcatcatatactctggccctcagtgcaccaaagaaatcaatggattg

SEQ ID NO: 215008 - DNA, 335 bp, Glycine max
attggggggtcatgttctttatctcattcctgaattgttattcattgatttgtaaactgccttagatttatgatactgtcccggcaagatagatgacaaaactgggaccagcactcaagagcaggaaaccacccaagcgaaccaataccccgccacttgctaaggagcactccctcaaaaatcacctggaaccaatgaaaagatgctgcattaggacacggcgctggatacgaacactgaaattgtaccttcagagacgcgccacacgattgcctggaggcacctaaacaactcagaaggccaaaccataaataccatttgaaggagcaaacatg

SEQ ID NO: 215009 - DNA, 533 bp, Glycine max
  unsure (1)..(533): unsure at all n locations
cattcccaaggatatgtttctattggctgtgagccatgcacaaggccggttttacccggacaacatgaaagagaaggaaggtggtggtgggaggatgccaaagccaaggagtgtggtcttcacaaaggtaatttgaaacaggaagatgctgcccagcttaatggaaatgggaccttccaaggaaatggctctgccactgttgctgacattttcatctcccagaatgtggtcagcttgagcaggtccgggattgagaatttggcaaaattagagaaccgaaaagaacactggcttgttgtgctctatgcaccatggtgccgcttctgtcaggctatggaggagtcgtatgttgatctggcagagaagttagcaaggtcaggagtgaaggttgcaaaattcagagccgatggagagcagaaggaatatgcaaagagtgaactgcagttgggaagctttcccacaatacttctctcncccagcactcttttcaccaattaagtacccttcagaaaagagagatgttgattcattga

SEQ ID NO: 215010 - DNA, 504 bp, Glycine max
  unsure (1)..(504): unsure at all n locations
ggcaaaatctaaaaaagtagattatgatagtgaagaaacaacataatacaaccataactctactcatctaacaaaacaggaaatcacatcctcctcatagaatgactactacaattatatttgtgaggaaggttatctaaatctatacagggatactgctagctgagaatcttcgttttgctatcaaaaactgccattcccattttcagtgaattgcccaaatctgtgaagaaatttattgccggtatggtacgacggaacattgagcaagatactcaattgaccatcaccgtaaggcattcacgaatgccgtcaatgaatcaacatctctcttttctgaagggtacttaattggttgagaagagtgcttggggaagagaagtattgtggggaagcttcccaactgcagttcactctttgcatattccttctgctctccatcggctctgaatnttgcaaccttcacttctgaccttgctaacttctctgccagatcaacatacg

SEQ ID NO: 215011 - DNA, 556 bp, Glycine max
ggcccagttctcacagttacgactgattcaatgcttgagcatgtgaataagttgcttgagataccaggatcaaagttgctattcgggggtagtcctctagagaaccattcaattccacctatttatggtgctattaaaccaacagctgtctatgttcctctcgaagaaattatgaaggataagaattttgagcttgtaacaaaagaaatatttggaccatttcaggttatcacggactatcaaaacagtcagctagcagttgtattggatgctttggaaagaatgcataaccatttaacagctgctgtagtttcaaatgatcctttgtttttacaggaagtcattggcaaatcagtaaatggtactacttatgctggtttaagagcaaggacgaccggagctccacagaatcactggtttggacccgctggtgatgctagaagtgcaggaattggaacaccagaggctataaaacttgtatggtcttgccacagagaaataatctatgattttgggcctgtgccaaagaattgggaagttcctccttctacttgag

SEQ ID NO: 215012 - DNA, 376 bp, Glycine max
ggcccagacataacagttccgattgtgtcaatgctggagcatgagaattactctctggtgatcccacgatcggtcttgctgtaccgggacactgctctagatatccacttgattgcatctatttatgtcgcaatcaagccaaccgaggtgtaagatgctcatccagaaactatgaacgctcatgttcatgaggttgtgccctatgatacaattggaccatatcatggtagtacgcactgacataacagatcgtcagcacacgattgggatgctaccaaaagaacgcgtaagattatgacagctgccgtagtattacatgatgctatgtcagtacaggaatctgttgatggatcacctaatgatcctacgtgtgctc

SEQ ID NO: 215013 - DNA, 524 bp, Glycine max
ttttttttttttttttttttttttttttttattttgtttttttttttttttttttttattgtttttgttttagttttttgttttttaatgtgttaagggtgtatgtatctaaaacggacatatgggtttgtgagcctggcggcaaaaaaaaagaaagaaagggggggggcgctccaacgagggaaaaggccaggggggggggggggggcccccccccccttttataaaccggggggggaaaaagacaccagggggatcaattgatgggggccccccgggggggaaactgggggggggggaaaaaaaaagggtcccttcttttttttttgggaaaaaaaaaagacccgggggaggaggacacccaaccccggggggggggggaaagacaggtggtccccacaaaaaagggccaaggggggggggctcacgcccaaaagaaggaggggggggggggatttggaggggggggcaccgccgccccaatgagggaaaaaaaaagcggggggggggaccttttcgtgccc

SEQ ID NO: 215014 - DNA, 580 bp, Glycine max
ctagcctaaccccttcttaaagcaaccctctttgtcacttcctcttgttggtaaagggcgattaacacaataaacctttacagcaatatcacatcaacttgtcatcttataattgaactgtatgtaaaaaaaaaatttcagaagaggttacgtaccctcctttcttgtcatggaggtggagaatcagaagcaaagaagatatcaaaagctacgcaattggttcaatagcaagcaaaaggaagataggccatcttcattcagtttgaacgaaatacaagatggagcagaagatgagagtgatgactatgagggcaatctctccctgcggtcattggaattagatccatgcatttcaacaaataaactaagggtctttgttggtacttggaatgttgctggaagatctcctgtaggaagtttggctgttgacttggatgagtggttgaatctcaagaatgctgcagatgtatatgttctggggtttcaagagattgtacctttgaagaccttaactgtgataggagcagaggatccagcttgtgcaacaagctggaaccagctaataggaaaacactgaatg

SEQ ID NO: 215015 - DNA, 566 bp, Glycine max
gatcaatgatatttgtataattcacaaaatttatattgtaaattttttcttagttggacttagacctttcaacaatagacctaacatccaccttgattatcaacaccaattgtatttaccatgccttgtcatctaacaataaccttccaaatcctgctatccaaaaaaatgtggggttttaggaaaagcaattatgtgtcatttttgtgatgaccatgacctggctgaaaatttgtgtcacccctttaacgaaagttttaatttgctagtgttagcagccttgtacattcttggttaacgacgataataaggaagattttccgtcttcatctcctttgttcatcccattcttgggattcaacattgttggggggatattatgcaaccccataagtcctctgttagatgatttaatttcaatctgtgtagagaaaagtgctgaaacggggcgatgatcagagaacttgctttcactccgaaaatagtgaagttgctccactcctttaccataccatagaattctatcacaccatgctggagttcttttgtttttcccggatctacta

SEQ ID NO: 215016 - DNA, 285 bp, Glycine max
agtactttggctgcagcccaagaccacatttgtaagacattgggaggccaagatgtccatatatgaattggaagtgtatgttttcttattaggcctatcctggacccaaaggatgtgaccatcggctctctttctgaattccaattccacatttcctcgagatctcgaggcagatatgatcatatatgaattgatctcatttgtattattacttaggcctatgctgatgccaaaggaaatgctatcggaattacttggcgtatcacaatcacacattaccgagac

SEQ ID NO: 215017 - DNA, 574 bp, Glycine max
  unsure (1)..(574): unsure at all n locations
gaaccatggacacaatagaacaagaaaacatgcaatttctcgggttcttgggcatctacaaagaatcctacaagctcatattttcatggaggaagatcttcacccagatcaccttcaccctaatcctccctctctccttcatcttcctcatccacatccaagtatccgatctcctcttcgggaaaatcacacacgacgccaaggacttaaccgaaaccctacccggcacaccccaacaccaaaagctccttgacacattctcttccgattgggccactttctttctcttcaaactcctttacttcatttccctactcatcttctccctcctctccacctccgcaattgtttacaccgtcgcttccttctacaccggcaaagaagtaaccttcaagaaggtcctaagcgttgtccctaaggtatggaagaggctcatggtaacatttttgtgcaccgttgttgctntcttcgtttacaatgttatggcagtgttggttctaggcatatgggcactcacaantggtgtgagaaatggtggtggtgcaattttgtcggtcttagcgatattatatct

SEQ ID NO: 215018 - DNA, 469 bp, Glycine max
ttcttctttttttttttttttttttttttttttttttttttttttttttttttttttttttttttttttaaaagaaaaatccgatagatatatgcggggggctttatatctaaccattaaaaaaaacatgggaatcccggcagacatctttagccctaaaaggctcatagcgctcatactcttccaagggatatcacaaagcatgcttgttaacactctcccggggggggggcttgcaaaccaaatacattacaggttgggtaccccgcgtccgctaaaacaaatgggaccctagcgagaaacccccaatcccaaacccttttctttccccccaccccaaaccgaacacctttttttggtttaccacccccgttgaaaacaaaaactgggttaaaaaaaacaaaaagtttggcttcaaaaaaattttgaggggcgggcccgttttcccctttaacaaccccccggtttt

SEQ ID NO: 215019 - DNA, 441 bp, Glycine max
  unsure (1)..(441): unsure at all n locations
ggtgaatccctggctcaagtcttgtggatgattggtgtggaaccagtggctgatacctttggcagggtaaaccgggtggaacctgtaagtcttgaagagcttggaaggcctaggattgatgttgttgttaattgctcatgagtgtttagagaccttttcatcaatcagatgaatcttctggatagagcagtgaagatggttgctgaattagatgaaccagcagagcaaaactatgtaaaaaagcatgcatcagaacaagctcaagcccttggagttgcagttcgagaggcagcatcaaggatcttctccaatgcttgtggctcctactcctcagacatatacttggctgtggagaattcttcatggaatgatgagaagcagctncaagacatgtatcttagcagaaagtcttttgctattgattctgatgcccctggtgct

SEQ ID NO: 215020 - DNA, 339 bp, Glycine max
aagaaagcaattttgaacttgaccctttatttggtcaccggggttggagttcaaaactgcacaaggggcacttggtctctaaaaatgacaaacggaaagctaaactcgcctttaaaggacgctcttgtgttcactggagggggctcttgttaataatagctattaacttcagcgatcaacgccttcaattttggcttccacttctgaatacaaccgcctgagcttgtaaaaattatgttccgaagggtgccaataaccccgtcacttggcttccaagaatggcgggcccattttcccaagggggtctggattagggcttatgagcgtgactgccatttg

SEQ ID NO: 215021 - DNA, 543 bp, Glycine max
gtccttcccgaaggggaccacctcttgtggtgagtggctctgatgacggaactgctaaattatgggatatgcgtcagaggggttccatccaaacattcccagataaataccagattacggctgttggcttctctgatgcatcggataagatcttcactggtggtattgataatgatgtaaagatttgggatttgcgtaaaggtgaagttaccatgacactacaaggtcatcaagatatgattactgctatgcaattgagtcctgatgggtcctaccttcttacaaatggcatggattgcaagctttgcatttgggatatgcgtccgtatgctccacaaaatcggtgtgtgaaggtgttggaagggcaccaacacaactttgaaaagaacttgttgaagtgtggttggtctcctgatggaagcaaggtaacagctggtagttctgatcgaatggattacatctgggataccacgtctcgccgcatcttgtataagcttcccggtcacaatggatctgttaatgagtgtgtttttcatgccaatg

SEQ ID NO: 215022 - DNA, 462 bp, Glycine max
aaatcacaaaagcaccagcattatataatatttttgcaagaacattatatagtcactgaattgatcgaccaggaaacaacagaaggaattcagcatttctaaagtttaccactccctaatggtggtcaaaagcaccaacatgctcatttgatttcctaaacgtggtgcttcatatctccccaagataaatctgcttgtcactgctgcaagatccaataataggcttcttggggatgaaaaacaccctctttaacagatccattgtgacacggtaagcttatacaagatgcggcgagaagtggtctcccagatgtaaaccattcgatcagaactaccaggtgttaccttgcttccatcaagagaccaaccacacttcaacaagttcttttcaaagttgtgttggtgccctttcaacaccttcacacacagattttgtggagcatacggacgcatatcccaaat

SEQ ID NO: 215023 - DNA, 393 bp, Glycine max
ctcccaattatcacagctacgactggtataatgctagagcctgtgaataagttgcttgtgattccaataacaaagctgctattacgcgttagtccttgactgaaccatgtacttcaacctattgatggtgcatttaaacctaccgctgtcgatattcctgtggaagatcttatgatggatctgaatttggggctagtcacacaagaagtgttcgtactatttgctgttatcacggactattacaacaagcagcttgcacttgtaatgaatgctctgctgataatgcatatccataaggcagctggtgttgtatgaaatcatcctatgttcttactggaaggcattgtcgaatcagtcactggttctacttatgctggattaagaccgatgacg

SEQ ID NO: 215024 - DNA, 593 bp, Glycine max
  unsure (1)..(593): unsure at all n locations
gccgcaactcactgtcttccttctctagggtttttagctcccccaatttcttcgctcaacatggttcttcaaaatgatattgatttgctaaatcctccggttgagcttgagaagaggaaacacaagctcaagcgtcttgttcagtcaccaaactctttcttcatggatgttaagtgccagggttgcttcaacataaccactgtctttagccactctcagactgttgttgtatgcggaaactgccagactgtcttgtgtcaaccaaccggtggccgggcaaggctaaccgagggatgctcctttaggaagaagggagactgagtggattgccatctttttttgtttgtgattggagagtttcagtaatgccttcttttgttttggttatgatgatatgttaattttgttaaatttgtaagacttgagtctacaagcttatccaagacattagggattacacctaattttgcatttctctntactgcaattgggttcatgtggctatgttagatgcttactttttaaaataaatagagtggcatgtattggtaaatgtatctttgcttcttcagatggtagatattttctgataa

SEQ ID NO: 215025 - DNA, 444 bp, Glycine max
atcagaaaaatatctaccatactgaagaaacaaagatacatttaccataacatgcactttaatttaatttaaaagtaagcatctaacatagccacatgaacccaattgcagtaaagagaaatgcaaaattaggggtaatccctaatgtcttggataagcttgtagactcaagtcttacaaatttaacaaaattaacatatcatcataaccaaaacaaaaaagggtttttctgaaactctccaatcacaaacaaaaaaagatggcaatccactcagtctccctttttcctaaaggagcatccctcggttagcccttgcccggccagggttggttgacacaagacagtctggcagtttccgcatacaacaacagtttgagagtggctaaagacagtggttatgttgaagcaaccctggcacttaacattcatgaagaaagagtttg

SEQ ID NO: 215026 - DNA, 516 bp, Glycine max
ccctaatctgaaggctcccgccatctgcgatcggatttcatggctccaaagaaggacaaggctcccccaccttcatccaagcctgccaagtctggcggtggcaagcagaagaagaagaagtggagcaagggtaagcaaaaggaaaaggtgaataacatggtgctcttcgatcagggtacctatgacaagctcctctctgaggcacccaaatacaagctcattactccttccattctctctgaccgtttgaggattaatggatcacttgcaaggaaggctattagggaattgatggctataggttcaatcaagatggtgtctgcccatgcaagtcagcagatttacactagagctacaaacacctagatgtactggttataatttatgtagcattgatgcacctctgaagtgaaattttggattttctgtttgagacgtacctcatgctagattgcatcagttcgacagttgctaaattcatggttgatttccttttacatccttcttggtaatata

SEQ ID NO: 215027 - DNA, 547 bp, Glycine max
caaggtaagaattttattgcacaatgagaaggcagagaaaattgatggttctgtttctcagtacaagttttagaatgaaaaatgaagcaacaagtgtttgtagtggtagtagtagtagtagtaagcatacaaatctacaatggcatggtacatacatataatacttgaataaccaattaaaaattggtgggctctcactcccacttgtgggcaacaatgtcagccaaatccacaaccctttgggagtagccccactcattgtcataccaagcaatcaccttaaccatgtcatctcccatgaccatggtcaacgatgagtcaacggttgaggacacatcagtgcacctgaaggcaacagacacaagtggctgatcacacacagagaggattccctggagctcattgtctgcactctctctgaatgctgcattcacttcttctgcaaaggtcttctttgagacctgaacaacgaggtccaccactgagacgtttggtgttggcacacggagtgcaatgccattgagtttgcccttgagggttgggagga

SEQ ID NO: 215028 - DNA, 520 bp, Glycine max
ccatagttggtgttagtcttggtgtagtgtagctagggagggatatatatctgagtaagatggcatcagagcttgaattgcccccaggcttcagattccatccaacggacgaggagctggtgttgcactatctctgccgcaaatgcgcgtcgcagccaatcgccgttcccatcatcgccgaaatcgacctctacaaatatgacccctgggacttacccggattggctacttatggagagaaagagtggtacttcttttcaccacgggaccggaaatacccaaacggttcgaggccgaaccgggcggctggcaccggttactggaaggcaaccggggcggataagcccattggtcagcccaaaccggttgggattaaaaaagctttggtggtttacgcagggaaagctcctaaaggggacaaaagcaattggatcatgcacgagtatcgtctcgcagacgtagatcgctccgttcgcaaaagaacaccctagggtggatgattgggtgctttgccgattac

SEQ ID NO: 215029 - DNA, 473 bp, Glycine max
ggaagaggctgtggaagaaggtgaagtaccagctggtggagtaccactccttgcccggttatttgagagacaacgagtacattctcggtcactatcgatccgaatggcccatcaggcaggttttgttgagcgcattcaccatccacaacgaaactctcaacgtttggacgcatttgatcgggttcttcatatttctggcattgaccatatacactgccatgaatcttaattcgctacagcagtttcctgacatgctcaagaaggccgacctgcacaaattacaatcagaaatcttgacgtgtctcccttccatgcctgatttgcacatactcagggagggaatctcaagttggcatattaaagaatatctgtacaattgtttgccacatagtgtaaaagatgacttggcgaacataatagcaccactcatgattagaccaattacaaggtggccttttttcgcattttagggg

SEQ ID NO: 215030 - DNA, 518 bp, Glycine max
gaagaattacgggaaggggccattgaacagctggaaaaagcccaagcccgcttaaggaaagtcgaaacggaagcagatcgttttcgggtgaatggctattctgagatcgaacgagaaaaattgaatttaattaattcaatttatacgactttggaacaattagaaaattacaaaaacgaagccattcattttgaacaacaaagagtgattaatcaagtccgacaacgggttttacaacaagccttacagggagctctaggaactctaaagagttgcttgaacaacgagttacatttacgtactgtcagtgctaatattggcatgtttgggacgatgaaagaaaaaataactgattagtctttctattataaaatagagtataggcattatttttttcttctaaaaaaataaaattaagaaattttcatggtaaccattcgtgcagatgaaattagtaaaattatccgtgaacgcattgagcaatataatacggaagtaaaaatttgtaatacgggtac

SEQ ID NO: 215031 - DNA, 467 bp, Glycine max
cattcgaattcattttatttatatattaatattatattcaaatgaaataaaaagatattaaaagatactaattataagaatttgaaagtgaaattataaagttattaaatgattaatcaatttttttctacctgttcctgtagtaaaaagagttccatctgttcttgaatagcttccttcaaaaggacttttgcttccccagtgaatgtcttggtagaagatatgatttctttgaattgaggtttattcgtgtttaagtaagcacgtagctcaacaagaaatttccttacctgtccaatttctaatgaatcaagataaccattcgttccagggtaaatagttattatctgttcttccacggtaagaggagctgattgggattgtttaagcaactcgcgcaatcgttgacctcttgctaattgattttgagtagctatatcgagatcagaagcgaatcgggcaaaagc

SEQ ID NO: 215032 - DNA, 469 bp, Glycine max
ggaccattgatctagcagcacgtaaacaccatgtcattctggacacccttcgctgctgtcactgtctctattggcgacgctcgtgttttcactgctcctaagtgctctcctaccactcactctcctcatcgaaatttgattgcgaccagagcgtcgatcatcactggttccccactgttgagcagaagaaatcacggacggaacggtgcatgcaacgcagtgcctgtgtcaatagaacgtgagcacagcacccaggacgggaacagcttagatgacgtggctaggcactgttgccatggacgagcacgcagaaaccatcactggtaaaagtgctaccgagaaggtactcctagagaactttggactcacaagtccactgtctacagttagcccttgcagtgaccgcaatcgcgggagtcttgacggatgtcgacatcttccaggcaggctcaaagatctaatcacatat

SEQ ID NO: 215033 - DNA, 439 bp, Glycine max
agcccactgatatcacagactttacacaacagatcatcattcatggctgacatgggggcaactgtttgcacggctatctcatccccatcctcggttaacaaggacgctactctgagcccagctcccacagaattgttaacggagagcatgatgaagaccgttaccgatcaagtgttctcaggcagacaaagctactgtccaaacggagacatcgacgcggtcccatactctagcgagattgagtactacctaactggcgagaacgccggatactacggttgagacactgctgatcttagcgaacacccagacacctgaacacagaaccgcgatctcgaactgattcactccacttcatccgatgtcggaacctagtactgtgtcatgaactagtaccagtcccttaacgctgtgctgctcgaagactccggcagcatca

SEQ ID NO: 215034 - DNA, 475 bp, Glycine max
ttcgtttttttttttttttggtataaattgggggtggtcatgcatagaatttatgtgttgtttagctacaaaaactcacaagacagaattgaccattcatgcttcagagtaacatgggatctgcccttatctgtacatttttgactcccattttacagctagtgacaccggtggttttttctacaaactgcctgggttcccaagggacaaccaaaaaaatggccccccaaaaacataggagggattcccccccttttcccgggggccaaggggggtaatttaacttatttgaccctgttgctcctttatttgactcacactccgggagaagttgctgcttgcacatgacatggagtcttctttcatgaggcgtatttgcttaatcctcaatataccctgcgaaacctcaccaatggaggggcgtttcctacgtgattagtgcatacatttgtgtgcaattttagcaagctgtctc

SEQ ID NO: 215035 - DNA, 420 bp, Glycine max
atgtaaaatgtaaccatacaataaacttataaattatcacatactatcattctcgatgataaaaaaataataataataataatactatcatcatcctaaccggtcaaaaacaaaattaataacaaatattaattaattaattaactaattaattaactaactaactaaaagcttgctctctttagggaagtgatagtaacggaagaacccaagggagaagttccctttgtatctcggaaggaatcatagcgaagaaagaactccccaacgaaaagcctcgaaaccaaggtgacgaagtcttttccggcgcattgcttgttcccaagtgttggagactcagtctcaggcccattggaccacagcacgtgcttgaggagcttctcccgttcctccccgacgaacctgttcccgacaaactcc

SEQ ID NO: 215036 - DNA, 495 bp, Glycine max
  unsure (1)..(495): unsure at all n locations
ctccagcgtccgattctctcaccgatctcgcgccaaatacaaattcgtgtcaacccaacccagggttccggcgagcatggccgacggtccggctagcccaggcggcggcagccacgagagcggcgaccacagccctcgctctaacgtgcgcgagcaggacaggtacctccctatcgctaacataagccgcatcatgaagaaggcacttcctgccaacggtaaaatcgcaaaggacgccaaagagaccgttcaggaatgcgtctccgagttcatcagcttcatcaccagcgaggcctctgataagtgtcagagagaaaagagaaagactattaacggcgatgatttgctctgggcgatggccactctcggtttcgaggattatatggatcctcttaaatttacctcactagataccgagagatgganggtgatacgaaaggctctgncaggggtggagactcatctgctaagagagatgttcagccaagtcctaat

SEQ ID NO: 215037 - DNA, 431 bp, Glycine max
acaatataataataactttcaaataataattcgaatccaaagataatatacaaaccttaatttaaaaaaaaaaaacggacacaagaaccaacatctcctgtcagtattcacataacataaaaagacattcaatatgccgtgagcacttggtaactggcgtagaaaacatacgttacaacaagagggtcaataataacttggatacctactccgggcctggcatgggaaccatcatatgtggaccctgagaattcgggtaagtaacattttgtgagaaagaaccttgatgagcaagctgagcattaggacttggctgaacatctctcttagcagatgagtcttcacccttggcagagcccttcgtatcaccctccatctctcggtatctagtgaggtaaatcttaagaggatccatataatcctcgaaaccg

SEQ ID NO: 215038 - DNA, 478 bp, Glycine max
ggaggtccagttgaaggtggatttagtgtcgcatttgatccccttgatggctccagcattgtggacacaaatttcacagtaggcaccatctttggtgtgtggcctggagataagttgactgggatcaccggaagagatcaagttgctgcagccatgggggttttgggtcctagaacaacatatgtgcttgctctaaaagacttccctggcacccatgaatttcttctgcttgatgaaggaaaatggcagcatgtcaaagagaccacagaaattggtgaaggaaaactgttctccccaggaaatttgagagccacatctgacaaccccgattatgctaagttgatcgattactatgtcaatgaaaagtacacattgagatacactggaggaatggtgccagacgtcaaccagattattgtaaaagaaaaaggaatcttcaccaacgtgtcatcaccatcagccaaagccaaactgagac

SEQ ID NO: 215039 - DNA, 450 bp, Glycine max
accaacataatttaccttgttattatagggataaacagaaatgtgactaaattgcaggttcttgtctgaagatagcatatatctttttctaaaagcggataaaaatagacaatgaatggcaggtttaacagattaagcaggtggtccaacagctacaccacccttgagcctggatttaccatacagggttttttcaaaccggattatcttatttttggacccataagcaacttgagttctgtcatcaatggtactgatgactttgtctaacacagactgatgaccatcactgctgtaacctccagctttttgaatcaagaaccccagaggagctacctcaaacaacagtctcagtttggctttggctgatggtgatgacacgttggtgaagattcctttttcttttacaataatctgggtgacgtttggcaccattcctccaggggatct

SEQ ID NO: 215040 - DNA, 525 bp, Glycine max
ctgtggtgttgatgagctgggtagggtttactccttttctcgccaacccagttgcgagcttgaacgagaagatccttgccgaggtcaacgagtataaggccgtgaaggcctttctgctcgcttacagcacccttgctgaggattgggctaagatttcgccacctatctgatctatcactctgcatggccttctggttaactctgccattaagggagcgtccattaaggtgattagtgacgccaccgtcttctttaccggcaagtggatccctgaaatgttattgtaggctgcctctaaatgaatgatgtatgacatgaagggtgaacacgtatctgagatgtgctatgcgagatgtatgatgtgtgaatcttgaagtaatgtcttaagggcaagaagttgttagttaagattattagaggtagctctatgaacgaggcataataataaatgctgctttatggaccactatggaagaagattgtgtcaaataatggagctagcttgctagccttatgtgctatacg

SEQ ID NO: 215041 - DNA, 482 bp, Glycine max
cgaacaagaagatggctttacgtgttcctgctcttccgttgacatacgtggctcacgttctggcagttgttgccagcgtcttgttcgtggtctgggtcgccaatttcaggggtggcttggcttgggattctgatcacaagtgcctcatcttcaacattcatccagggcttattggtattggcttactagttcatgggggtgaacgctattataagctacacagcttttcccctaaggaacgaagtgaagaaattgatacaccttgttttccatgccatcgcattaatactaggaatagttggaactcatactgccttcaagtttcacagtgaaagtgggattgccaatctctacagctcgcattcatggatcggaattggggttattgtcctttatggcatccagaggatatatcggtttgcgatctttgtcttccctggtgggacttcagacattagacgcgcctcacttgcttggcacgc

SEQ ID NO: 215042 - DNA, 397 bp, Glycine max
acttacaacaaattattttcttcctccaactccaaatacacccttggatagcccacatgatattattggataccctaaaatgttgacacaagacctacaagcgtctatatgggttaagggacaactgctgcaagagctgggggagcatctactataggggctccctcaccaaaggcaccgaattagaatgtgataatggccttgaacaaggcgtgcgggggctcacaaccgtatttgttcaaacccgaattatcaaggagagcgagctttttcctaaacccaagagcaacagtgcccacagccaaggcatattcaaacagcccatattgcgcctgccacggaagtgcccctcgaataatgtctggagttccagcagcgaataaaaagaccaccaacc

SEQ ID NO: 215043 - DNA, 561 bp, Glycine max
cttcgatgacaccctcgtatctgccatcaaaacctaccaaaagaattacaacctcaacgtcaccggcaagttcgacatcaacactcttaaacaaatcatgacaccccggtgtggcgtccccgacataataatcaacacaaacaaaaccacatcgttaggcatgatctcggactataccttcttcaaagacatgccgcggtggcaagctggaaccacacaactcacctacgctttctccccggagccaagacttgatgacactttcaaaagcgcgattgcaagggccttcagcaagtggaccccagtggtgaacatcgcgttccaggagacgacgtcgtatgaaacagccaacattaagattcttttcgcgagtaagaaccacggtgatccgtatccttttgatggtccaggtgggatattgggccatgcattcgctcccactgatgggaggtgccactttgacgccgacgaatattgcgtggcgtctggcgatgtcaccaaatcgccggtgacaagtgcgtttgaccttgaatctgtggcagtgcacgagatcgggcactt

SEQ ID NO: 215044 - DNA, 459 bp, Glycine max
  unsure (1)..(459): unsure at all n locations
gggagtntnttggntacgatccgagtcnagntctgcgaacggcattaatttcccggtgtcgacgacgctcacttagtcggcaggcccgccgcttctttctctttttttttaatggtgaagattgtgttcacaatttaattcacttatacaatataatgcgatcacgcgtagctatcaggcgtggtattatttccttacattgaagaggaaaaactacaaatacgaatatctttacagtgctagtttttgttgtctcttggaattagaaaacatttcacactcgatagactttcaatatcctttaatgcagattaccgaaataaaactctagttctagtacaaacaacacctagctataataattaggggttgataccatagagctttcgaatcccgtctatatcatgttgcgctagattcaccttcctagttcgagggggtatacaaggatacatgatg

SEQ ID NO: 215045 - DNA, 548 bp, Glycine max
tatagggatgctccctcgcacaaagcaatgcctgccatcacctgaattctatgctccttttccctttatccgcattgctctcttctctttcaccgttttttgtctctgaatatccaagatcttcaaggacaatgttatctctgagaaacatttttctgaatagcgcttgatccggcgtgaaacattcaatcgctgataatttactgcttcactttgggctgtgcgagtggagcagcctattttactattaaaggcatattctcttacaaggttgatctgcacagagcatggcgtcttgcgatcaaatgggggaacttgcaaatgtggcacagctgactggtgtagacgctgtgcggttgattgggatgattgtgagagctgcaagcactgcacggatgcataagaaaaactgtaggcagtttgcacagcatctgaagttgattgggaacttgctggagcagctcaagatctcggagctgaagaagtaccccgaaactagggaacctctggagcagctcgaagatgctctaagaagggtctacatattg

SEQ ID NO: 215046 - DNA, 418 bp, Glycine max
gccaagaaattaattcaaactattttaaaccagggaaacaaaaaaaaaaaaaggtttatgatacaccatcaactatttttaaaagcaacctttttcgagtccaacaaaataaaattactattcatagttaaaacgaggtcaggtgcgggaagaataaaaatacataattcctgccttcctgggaaaattttaatagccaaatacccttttttttaatatgatcttaagggaaccttgaacccccaacacccaaatgataatctcatttgttagtaaaaattccatgtcctgagagggtggagggcttgttttggtcttaaaaccactaagcccacggatctccacttctttccattcttgcacaagggcacagctgcaacacattaaatgagagaggaaatcttcaataaatccccct

SEQ ID NO: 215047 - DNA, 419 bp, Glycine max
atggtaagaagaaaaacactgtaatgtatggctgaaaatccaatattaagatttgattctgtatgaaaatgaaaatgaaaatgaaaataaagcggcacacagggctagctagctaggcaataggcaataggcatgtagaaggatccatcatactaggagggaagaggccttggcggaggagggagtacctgatggaggtttggaggaccctatttgggttggcccggcggcggcacaaagaaggggttttcggcaaccttggaagcaaaccagcggcgagagggatcgcgctgaagacagcgcaagatgaagtccttgaactgagggaagcataacgaggagcctcgggaggctgacacatacaaatggcgcacatgagactggcccaatcgccctgcctctcaaccgcgaaggggaac

SEQ ID NO: 215048 - DNA, 485 bp, Glycine max
gcgtcttctctttccaccaaaccattctcagccgacgctctctccgccttcgcttctctcaattccgatctcggatccctctcccccgcctacctccgactctcactccgtcctcgtcttcccaagagacttcgcatacaggcggctgggagtacctatggaaatcactttcgtgttacaacatatggggaatcacatggaggaggtgttggttgagttattgatggatgtgctcctcgccttcctctctctgaagctgatatgcaagtggatcttgacagaaggaggccaggtcagagccgaattacaactcctagaaaggagactgatacatgtcaaacattttcaggagtttacgaaggaatcactactggaactgcaatgcatgtatctgtacccaatactgatcaaagaggacatgactatagcgagatggcagtagcttataagcccttccatgcagatgctacctatgacatggagta

SEQ ID NO: 215049 - DNA, 434 bp, Glycine max
atacttgatgcgcttcttggcggggacacggcagcagtggcgtcttcgccggacagcactacttctacagtgatctgcttccaattgatgcccatctggcagatctacttcgacgagagcatagataccgattagctcgttatgatagagttctcactgatgaggtgcgtaacttgcaaattcatacagccagccactcacgccatggccgactagtctaacgacgtcgacttggtcaagatcgacgtctacgaatgacctgatgtggcgcaggagtgtcacgtgcaggcgatgccgactgtcgtgatgaggtataacgggatggaagtcgacgaggttgctggcgcagagtaggacgagctcgagaagatgattgagatacatggatcgtgagcttagctctgtaatactattcatgcagctagatatctttc

SEQ ID NO: 215050 - DNA, 319 bp, Glycine max
cgccgtagatccagtgagcgttaaccttgtctgacttggttgaacagtacgcttatgagctcatcgagcatgccatgctcatcgtcgcaccggggaagggcatgctggcagcacatgagagctctggcacccttggtaagcacctgttaaacattctcgtagagagcattgctgcctctctccatgctctgcgcgtgctgctatccaccgattcagatgccatgcaatacctgagtggtgtcgtcctcttagtggaaacgctttgccatgaaaatggcctgtgggtaaccatgcgttacggtcctgatagagaacaatg

SEQ ID NO: 215051 - DNA, 579 bp, Glycine max
accaatcttctctccacgcccttcttgggtaaccgtctgaagtgcagcaatggcagatggattgcattcgcagcatccatcggtagttcagaagttatctggacagtcttatcttgtgtccaggcttgctcctaatcactccagaaactgttctaccactggtagttacttcaatggaggtttgcagtcttcaggtttggttccagtcacggcacacgcgccggctgagaaaggggtgtctggatttttgttggatttcctgatgggcggagtgtcggcggctgtgtccaagacagctgcggctccaatcgaacgagttaagttgctcatccaaaaccaggatgaaatgatcaagagtggtcggttgtctgaaccatacaaaggaattggcgattgtttcactcgaaccatgaaggatgaaggggtgattgctctttggagaggaaacactgctaatgttatcagatactttcctactcaggctctgaattttgcttttaggattatttcaagaggcttttcaacttcaaaaaggataaagatggctactgtaaatggtttgcttggaatttagcatct

SEQ ID NO: 215052 - DNA, 577 bp, Glycine max
  unsure (1)..(577): unsure at all n locations
ccttggtaagcttcggtattttcttggtatcaaagttgctcaatccaaggatggtgtggtgatctcacagaggaaatatgcccttgacatcctggaagaaacaggcctgttaaattccaagccagtaggcactcctatggatcctagtgtaaaactgtcaccagatcaggtggaaccattctcagaccctggaagatatagaagattggttgggaaactgaactacctcgcagtcactcttcctgatattgcctttgcagtgagcgtggtgagtcagttcctgaactctccctgccaggatcgttggaatgcagtcagttgaatcctgaaataaactaagagtgctcctggaaaaggtctcatttacgaagataagggacattctcaaattattggctattcagatgcagattgagtggagtcacctagtgatagacatcaggatattgtgtattgattggaggaaactcgatatcttggaaaagtaagaagcaaagtgttgtagccaaatcaagtgctgaagcagaatacagggccatgggcttagtgactngtgagctcatatggctgaaacaac

SEQ ID NO: 215053 - DNA, 553 bp, Glycine max
gttagtctagcagaaacaattagagggtttaaattgattctttctggagaattagatggtcttcctgaacaagccttttatttggtaggtaatatcgatgaagctactgcgaaagctacgaacttagaaatggagagcaatttgaagaaatgactttaaatctttgtgtactgacccccaatcgaattgtttgggattcggaagtgaaggaaatcattttatctactaatagcggacaaattggagtattaccaaatcatgcgcctattgccacagccgtagatataggtattttgagaatacgtcttcttaaagaccaatggttaacgatggctctgatgggcggttttgctagaataaacaataatgagatcactgttttagtaaatgatgcggaaaagggtagtgacattgatccacaagaagcacagcaaactcttgaaatagcagaagctaatttgaataaggcgggaggcaagagacaaacaattgatgcaaatctagctcttagacgagctaggacacgagtagaggctatcaatgtgatttcata

SEQ ID NO: 215054 - DNA, 528 bp, Glycine max
gttagtctagcagaaacaattagagggtttaaattgattctttctggagaattagatggtcttcctgaacaagccttttatttggtaggtaatatcgatgaagctactgcgaaagctacgaacttagaaatggagagcaatttgaagaaatgactttaaatctttgtgtactgacccccaatcgaattgtttgggattcggaagtgaaggaaatcattttatctactaatagcggacaaattggagtattaccaaatcatgcgcctattgccacagccgtagatataggtattttgagaatacgtcttcttaaagaccaatggttaacgatggctctgatgggcggttttgctagaataaacaataatgagatcactgttttagtaaatgatgcggaaaagggtagtgacattgatccacaagaagcacagcaaactcttgaaatagcagaagctaatttgaataaggcggaaggcaagagacaaacaattgaggcatatctagctcttagacgagctaggacacgag

SEQ ID NO: 215055 - DNA, 526 bp, Glycine max
ttatcggaggtgtatttggtgtgttgatgttttattaaacttttgtactcttgctttgaaactagttggttagatttgaaattcttctaagatggatacttcttataggactggtggagtcaagtacgagtgcttgctttttgatatggatgacactctttacccattgagcttaggtctcaatttgttttgtcgcaagaacatacaagagtatatgttagaactcttgcatattgaagagagtgaagtgccaaaaatgtgtttggatttgtatagggaatacgggacaactatggcaggattaaaggtccttggttatgagtttgacaatgacgagtttcatgcttacgtgcatggaaggttaccatacgagaaactgaagcctgatccagtattaaggaaccttctgctttccatgcctcagcgtaaaataatattcaccaatgcagatcatgcacatgcagttaaagttctcaacagattgggtttggaagattggtttgagggcatcatatgctttgaaacg

SEQ ID NO: 215056 - DNA, 548 bp, Glycine max
ctctcaaatttttagttctgcgatttacacttaataatttcacatccgtttcgtgatgccaaattgcaagatttatatattcaagcatcaccatgccgtggagacaatttcaaacttattgtaaatttagatagaaacatactgcagaggtagaaactcttgatttgcttgataagtctgctaaaaacattttatcgatgtaaaacttaagctaggaccatggtttcaactgttgggggttgaatcttttgctgttggttgccatcttcaatctcccaaatttcaggtaacgcttctttgatattatgaatgctgttcagggcatgatcagctccagggaccaaatctgaatggcccactaaaacagtgttaagtccagttatttttgcactttcaacatttctaacactgtcatcaaagaaaattgttttctttggatccacattagcaatccgaatagcagcttcaaaggcttccacagatggtttacagaggatttgtgggtgggaattgaaacatccattttctgttaaatctgtgagcacatg

SEQ ID NO: 215057 - DNA, 464 bp, Glycine max
  unsure (1)..(464): unsure at all n locations
gcagcaaggtgatccaacggtcctaagcttgaggcctggtggtggtcgtggcggtggaagcaggcttttcgctcactcgtcctcctcttcctctctctccgccgatctccctctctcgcgccctcatgcctctttctctctcaagactggagattcacggtttgagggtcatgagcgtgtgcgatataccagagatcagcttttacagcttaaagaggctgttgaggtccctgatgatattcttaagattaaacaagatatagaagctgaactttttggtgaagatccaagttggggccgtgctgaaagcaatcttcctcatcaattacaaaatcggtattctgagccagataaccgtgattggcgtggtcgttctggacaacctnctgctagtacagatgagagatcttgggaaaacctcagagataaccgagagnttggtaatagacagcaggatgctagtc

SEQ ID NO: 215058 - DNA, 536 bp, Glycine max
ctctcttttgttgaattccttgaaagatgcaacgatgccgaaccctaaggtctacttcgacatgaccatcggaggccaaccggccggtcgcatagtgatggagctgtacgccgacacgacccctcgcaccgccgagaatttccgcgccctttgcaccggcgagaagggcgtgggccgcagcggcaagcccctccactacaagggctccgccttccaccgcgtcattcccaacttcatgtgccagggcggtgacttcaccgtcggaaacgggaccggtggcgagtccatctacggatcgaagttcgcggacgagaacttcataaagaagcacacgggtcccggcattctatcgatggcgaacgcgggacctggcacgaacgggtctcagttcttcatctgcaccgttaagacggagtggctcgacggaaagcacgtggttctcgggcaggtggtggatggccttgacgtcgagaaggacatcgagaaagtgggttccagcttcggtgagaccttccagcccgttgtagtgctgactt

SEQ ID NO: 215059 - DNA, 561 bp, Glycine max
gcacataacaatggaaacgcatttttacgtgttttctctctagattctgctcttaaacgccgtcgttttcaaactctttttttccccttcgcttctctgtctttgtaaccgaaaggggggaaaatataattaacaccgatttcgcgaccaattcttcttctgcgttgaattgggacaacgagaaattggatctcagtttttggcaggaaataaaaattgcatttgagtgtaaaataacagagtatagtgtagggccttgttcttgatactgtgctaaatttgttggatggcggagaaatcatgcatcaagcgccttcagaaggaatatagagccctttgtaaagagccagtttctcatgttgtggctcgtccttctccaagtgatattcttgagtggcattatgtgttggagggaagtgaatgaacaccttttgcaggtggatattactatggaaaaatcatgtttcctcctgaatatccatataaacctcctggaatcagcatgactacacctaatggactgttcatgacacagaaaaagatctgtttgtctattagtga

SEQ ID NO: 215060 - DNA, 429 bp, Glycine max
cgaatattgacggcatcggcttgcaccatggggtgttccgtccttagcgagcttcctagactgctaagggctatgtgcgtgcagcgactaaggtgatgcctacagagatgatgatcaagaccgtgaggtctacgaaggctattgccggtgaacacgagccattgtgaggtacgactgggacgtttccgttgatggcaaatcggtcaatcacactgatgggatgtggcattgtccccagtgttgatgcatatcaggatggcaactgtgatgaggaagacgctattgatgaaggctactttggtacacttagtgcaagaagccatgctcctatggtgagtggtctagatggagctcaaatctgtaagggctaatgtgctgatgcagagtctgtgacgcaatgtgacaatgtatggactctagagatgcgca

SEQ ID NO: 215061 - DNA, 515 bp, Glycine max
gaatgaaacacccaaattggtgaaatttgcaatttaggtacacaattgttcaagtatccatcagacaagaggaggctgaaccagccacattattctatgagtcctattaaaattaagcacttgactaagataatgacaaaagaagcacagtgcatacaaaaaccaaggggtgaaatattgatcatgaaactaagcagtttgagaaggttggtgctcttcctggactacttcatgttgctcttgctcttgctgtggtttttctccttgccaggtccaaacaatgtacttaagcgctggtcttatatcctgtttaaaaagcttgtggtactccatggtgtcaccattggactttctaagttccaccatatggaaggtggggtaatcttaaaaatctcagcatcaacacccaaagatcctttcctgccttccttggaaccttccaatttgagcaagcctccatctttcttctttactttcaagcaaagccgcttacaaatttattgcaacttcaagac

SEQ ID NO: 215062 - DNA, 446 bp, Glycine max
gttagtctagcagaaacaattagagggtttaaattgattctttctggagaattagatggtcttcctgaacaagccttttatttggtaggtaatatcgatgaagctactgcgaaagctacgaacttagaaatggagagcaatttgaagaaatgactttaaatctttgtgtactgacccccaatcgaattgtttgggattcggaagtgaaggaaatcattttatctactaatagcggacaaattggagtattaccaaatcatgcgcctattgccacagccgtagatataggtattttgagaatacgtcttcttaaagaccaatggttaacgatggctctgatgggcggctttgctagaataaacaataatgagatcactgttttagtaaatgatgcggaaaagggtagtgacattgatccacaagaagcacagtggactcttgaaata

SEQ ID NO: 215063 - DNA, 532 bp, Glycine max
ggggcgtataattgaatttgctgaaaagccaaaaggagaacagttgaaagctatgaaggttgatactacaattttgggtcttgatgacgagagagcaaaagaaatgccttatattgctagcatgggtatatatgttgttagcaaaaatgtgatgttagacctgctccgtgagaagtttcctggtgcaaatgactttgggagtgaagtgattcctggtgctacttctattggaatgagagtgcaagcttacttgtatgatggctactgggaagacattggtacaatcgaggctttctataatgcaaatctgggaatcaccaaaaagcctgtgcctgacttcagtttctatgatcgttcatctccaatctacacccaaccacgatatttgcctccctctaagatgcttgatgctgatgtcactgatagtgttattggtgaaggatgtgtgattaagaactggcaaattcaccattctgaggttgggctgcgatcttgcatatcagaaggttgcaatattgaagacacgttatta

SEQ ID NO: 215064 - DNA, 506 bp, Glycine max
acgaaataaagaaacttgttttattgaattgattaacgaactttacagcgtgattgctcatagcgggccttctcttccgctattatttacaagccactgcccaaaaatatatatcatgaaacacaaaagcctatcttagacgtggaagcagagcttgataaactctcctgcggtagtaatgagcttcgcagtcaccattaggatttggggtacaagaaatttttgggggagggggttgtgttaaaatgactgttccactaggaattaaagcatccttgattactgtgacaatcccactttttatgaaatacccatctgtttcccttgcagcttcttggacattgtcactgttaataatcttgacattttccccaattcgagcattcttgtcaataattgcccttttgatatgagagttcctgcctataccaattggaacactgcctttggcagccagaaacctcttatcagcctccgtctcgtaataatctgcccccattaataac

SEQ ID NO: 215065 - DNA, 517 bp, Glycine max
  unsure (1)..(517): unsure at all n locations
ggggcgtataattgaatttgctgaaaagccaaaaggagaacagttgaaagctatgaaggttgatactacaattttgggtcttgatgacgagagagcaaaagaaatgccttatattgctagcatgggtatatatgttgttagcaaaaatgtgatgttagacctgctccgtgagaagtttcctggtgcaaatgactttgggagtgaagtgattcctggtgctacttctattggaatgagagtgcaagcttacttgtatgatggctactgggaagacattggtacaatcgaggctttctataatgcaaatctgggaatcaccaaaaagcctgtgcctgacttcagtttctatgatcgttcatctccaatctacacgcaaccacgatatttgccttcctctaagatgcttgatgctgatgatactgatagtgttattggtgaacgatgtgtgattaagaactgcanaatttaccattctgtggttgcgctgcgatcttgcatatcagaaggtgcaattatt

SEQ ID NO: 215066 - DNA, 527 bp, Glycine max
  unsure (1)..(527): unsure at all n locations
acgaaataaagaaacttgttttattgaattgattaacgaactttacagcgtgattgctcatagcgggccttctcttccgctattatttacaagccactgcccaaaaatatatatcatgaaacacaaaagcctatcttagacgtggaagcagagcttgataaactctcctgcggtagtaatgagcttcgcagtcaccattaggatttggggtacaagaaattttttggggaggtggttgtgtttagatgactgttccactangaattaaagcatccttgattactgtgacaatcccaacttttatggaatacccatctggtttccttgtgcacttatttgccatggcaatggtaataatcttgacattttccccaattcgagcattcttgtcaataattgcccttttgatatgagagttcctgcctataccaattggaacactgcctttggcagccagaaacctcttatcagcctccgtctcgtaataatctgcccncattaataacgtgtcttcaataattgcacct

SEQ ID NO: 215067 - DNA, 429 bp, Glycine max
gcgacgaggagacccaacgggactaagcttgaggcctggcggtggacgagacggtggaagcacgctgtgcggtcactcgtactcctcttgctctctgtgcggcgatctgcctatgtcgcgcactcatgcctatttgtgtctcaagactggagatgcacgggttgagggtcatgagcatgtgcgatataccagagatcagcttttacagctgagagaggctggtgaggtccctgatgatatgcttaagatgaaacaagagatcgaagctgaactttttggtgaagatccaatgcggtgccgtgctggaagcagtcttcctcatcatatacaagatcggaattctgagccagataaccgtgattggcgtggacgctctggacaacctcctgctagtacagatgagagatcttgagaggacctcacagatta

SEQ ID NO: 215068 - DNA, 535 bp, Glycine max
ctgttctagaaatgcaaatgggaaatatcaggagagcaagagagttgtttgatgctgccacagttgctgacaagaggcatgttgctgcttggcatggatgggcaaatctagaattaaagcagggaaatctaaagaaggcaaggattctacttggtaaaggtcttcaatattgtggacagaatgagtacatataccaaacacttgcacggcttgaagctagagcaaatagatatctgcaggctcgatatttattcaatcaggccactaagtgtaatcctaataggtgtgctagttggcttagttgggcgcaaatggaggtggagcatgaaaactaccgtgctgctaggaaattgtttgagaaagcagtacaggctagtcctaaaaataggtatgcttggcatgtatggagcgtttttgaagctaacatgggcaacattgacatgggaagaaaacttttaaagataggtcataatctaaacccaagggatgctgttctacttcaatctcttgctttattagaataccaatactcaac

SEQ ID NO: 215069 - DNA, 553 bp, Glycine max
ctgttctagaaatgcaaatgggaaatatcaggagagcaagagagttgtttgatgctgccacagttgctgacaagaggcatgttgctgcttggcatggatgggcaaatctagaattaaagcagggaaatctaaagaaggcaaggattctacttggtaaaggtcttcaatattgtggacagaatgagtacatataccaaacacttgcacggcttgaagctagagcaaatagatatctgcaggctcgatatttattcaatcaggccactaagtgtaatcctaatagttgtgctagttggcttagttgggcgcaaatggaggtggagcaggaaaactaccgtgctgctaggaaattgtttgagaaagcagtacaggctagtcctaaaaataggtatgcttggcatgtatggggcgtttttgaagctaacatgggcaacattgacatgggaagaaaacttttaaagataggtcataatctaaacccaagggatgctgttctacttcaatctctggcttattagaataccaatactcaactgcaaacgttgcccgggtt

SEQ ID NO: 215070 - DNA, 544 bp, Glycine max
gtctttgaggagatgtcttcctttgtcaccaatggcgatgattctctcactggccacatcatatctacaactattggaggcaaaaatggggaacccaaacagactattagttacatggctgaacgggttgtaggaactggatcatttggaattgttttccaggcacaatgtttggaaactggggaagcagtggccattaaaaaggttttacaagacagaagatacaagaatcgtgaactacagttaatgcgtgttttggatcatccaaatgtcatctctctgaagcattgattcttttcaactacaagtacagatgagctttctcttaatttggtgatggaatatgttccagagtccatgtatagagtcattaagcactataccattgctaatcaaagaatgccaatcatctatgtaaaactttacatgtaccagattttcaggtgattggcttatatccacactggtaccaaagtttgccacagagacttgaagccttaaaatatacttgaggatcctcttaacaccaagtgaagctatgtga

SEQ ID NO: 215071 - DNA, 341 bp, Glycine max
gtctttgaggagatgtcttcctttgtcaccaatggcaatgattctctcactgtccacgttatatctacaactatcgtgggcacatatggggatgccaagcagactattagggacaaggctgaacgggccgtaggaactgcagcattcggtattgcggtgcaggcaatacgtctggaaactgtggaagcactggccagtgaaatggttacactggagagaagagaccagaatcgagaactgcacttactgcgtgagttggatcatactactgtgataactgttaagcatggccacttgggaactacggggacagatcagctttatgctaatacggtgatgga

SEQ ID NO: 215072 - DNA, 526 bp, Glycine max
gctgtgctaattgttttttctccttgaatttgataaaataattatggattcttacagtgtacaagtcagagcgtattttatagtacaaacataattctgtgacttgcgtgtatgattatgcaacatatcattcggatgttccatcaatgaatagactcatgaactcttcaccatacacagtttctttttctatgaaaagttgagcaagcttgtgaaggatatcaatgtgagttgagagaatatgtgttgccctagaatatgctgtctctaccagttccctcacttccggattcactacatccgcagttgccatggagtaatccttttgcgatgacatgtgttgacccaagaatggatttccaccaggtccaccaatggcaacttgtccaattttttggttgaatccaaatctctcaaccatctgccttgccactcgtgaaacttgcatgaagtagtttgatgctccggtggtgacattttcctggccaaaaataacctcttcagcaacccttccacccagggcaac

SEQ ID NO: 215073 - DNA, 468 bp, Glycine max
  unsure (1)..(468): unsure at all n locations
gaggatgagttcagtttcacgaccgatcctacaatggcgacagtcacgttgtccttttccgctaaaaccctaactctaccttatcaccccaaaaccccaatctccaactttaccccggtaacgaatcttcgcctccctgcttctatcgtgacccgaacccgcaattgtaaccggattcgggcggcgctggatggggatttctcggcgaaaaggagcagcagcagcaacaacaacgaccagagggagacgataatgttacctggttgtgactacaaccattggctgattgtgatggagtttccaaaggaccctgcacccacccgtgaacagatgattgacacgtacctcgacactcttgccactgtcttgggaagcatggaggaagctaaaaagaacatgtatgcctttagcaccaccacttacactggatttcagtgcactgttgatgaagcaacctncgagaaattc

SEQ ID NO: 215074 - DNA, 439 bp, Glycine max
gggagggagatccaaaaagagagagtggaaaagatggcgcggttgatcacagcggtgtggtgcgcggtggcggtgctattatgcgccgcggacggtgcgtcgtgggtggaggaggcggcgaacccgatacgaatggcgtctggcgtgtaggcagaagtggatcgggtgatcggggagtgccggcgtgcgttgaagtttgctaggttcgtgagcaggttcgggaagagttaccaaagcgaggaagagatgaacgagaggtactagatattcgcgcaaaatcttaggtgcatccgataccacaacaagaagcgtttgcgcctatactctatatgttaatcattttgctgattggacttgagaggagctcaaaagacacagactaggagctgcccaaaattgctctgccactcttaacggcaaccacaagctcaccgatgct

SEQ ID NO: 215075 - DNA, 445 bp, Glycine max
agcaaagacaatgctatcttataactgatatttgaagcgggagcatcaatacaatacaatatgtaactatgaactatcaatatatgatcgttattatgtctgtgatacacacaattaaggccataatatacttatgtgatttacaacaacttctagcttattttatacatcatgccaacccaactaggagcaattttcatcatacaattacacttatctttaatcatcattcatcaatactggcatcagcaatacgctctaaactctgaagcatgacaaggtggtagtcaccagggaccatattgttatgcaatttatgccacaattggataagatgcacaagttgcaacaccacacatgttcttccccaattccatcttgaagtagccattttcaccccagctttctacccatgaattttttatgagccaatatgggacaccat

SEQ ID NO: 215076 - DNA, 490 bp, Glycine max
tctcaaactcaaacacacttctataatggatcggaaaagcctcctctgcctcgcaatcatcgccattgtcgtcgccgccgtcggaggacagtctccagcggcgtcgcccaccacttctcctccggctgccaccaccactccctttgcatccccagccacagccccttctaagccaaaatcaccggcgccagttgcttctcccacgtcatcatctccaccagcttcgtcccccaatgctgcaaccgcaaccccacccgcttcatctcccacagtagcatctcctacgtctaaagctgccgctccagctccggtggctacacctcccgcagccactcctcctgcggctacaccaccggcagccacacctgctgccgtgactccagtgagttcgccgacagcgccagttccggtgagttctccacctgctcctgttccggtgagctctgcacctgcactcgcaccgacaactcccggacccgtggtagcaccc

SEQ ID NO: 215077 - DNA, 444 bp, Glycine max
  unsure (1)..(444): unsure at all n locations
ggagcaaggagtactaaaataataatagtgtcaacaaacatcatcaattataaagtaataagagattgaagaaaacaatggtaataaatttaattttagccccccgacagggtccaaaaaagacaataaatgatacaataatactatgtaacagcagcaatgaagcctcagcctcttctctagaagaacaaaacaagggtagcccagctcaaggctaagcatccaatgaccttcttcaagcacctgatggtttcagctccactctcgtcctcagatacagctggaccaggagacatggaatcctggcttgatcccggagctcctaccggaggagcgggagggccaagcaatgacggcgacggtgctggtgcagtgtgcttcttactcttctttgncttcttctttgacttgggagcgggtgccggaacctcagcgctgggtgct

SEQ ID NO: 215078 - DNA, 475 bp, Glycine max
ctgttctagaaatgcaaatgggaaatatcaggagagcaagagagttgtttgatgctgccacagttgctgacaagaggcatgttgctgcttggcatggatgggcaaatctagaattaaagcagggaaatctaaagaaggcaaggattctacttggtaaaggtcttcaatattgtggacagaatgagtacatataccaaacacttgcacggcttgaagctagagcaaatagatatctgcaggctcgatatttattcaatcaggccactaagtgtaatcctaatagttgtgctagttggcttagttgggcgcaaatggaggtggagcatgaaaactaccgtgctgctaggaaattgtttgagaaagcagtacaggctagtgctaaaaataggtatgcttggcatgtatggggcgtttttgaagctaacatgggcaacattgacatgggaagaaaacttttaaagataggtcataatct

SEQ ID NO: 215079 - DNA, 468 bp, Glycine max
gtccatgcgctcatgtgatgttctgtgaccaatggagacgattttctcactgttgggcatagctatgcaaccatgggatgctatatggcacctcacaccaagactacaccttgcctaccagttagcgcaaagcgggacacgaaacactgcgttattgatactccagaataacacgtgcggaaacagatgacgcaactctcaatccaaaggtcataacctttgtacgaatcaatgttccttacgttgatggaattccttatgatgcagaaaccacttgagatgttccctactcttgttcccactcaatgacaatgacatagacctgacagagaaaaacattgaacttctactccttgatctcaaaccacacatagttttggtagatttttccacatattggctaccaaacctggctcgtagaataagaattaagtctcttcagtactggattaattgccctgtaacaat

SEQ ID NO: 215080 - DNA, 295 bp, Glycine max
ctttaacttggggtgcgacattttagacagataactatgaggacaatactggatcagggctcgctttccgaccacaggactgtctaagctattacctattcagaggctgattatatgaccatatgtatatacaccattgatcgttctgtatgtggatgtatgactgctgtgattggaaactacttccgcgacgctggtttatctggactatcgattatcaagaagtgctcgatagccattggcatgctttctgactcctggaatgaacatatgtcttgctggagaggctaatgat

SEQ ID NO: 215081 - DNA, 508 bp, Glycine max
gaacggtagaacgacgaagcaggtgctgcttaccgaggcggaaattcgtcaactctgtgtttcctccaaagagatctttctcagccaacctaatcttctcgaactcgaggctcctattaagatttgtggagatgttcatggccaatactcagatcttttaaggctgttcgaatatgggggatacccgcctgaagcaaattatttatttctcggagattatgttgatcgtggtaagcagagcatagagacaatatgcttactcctcgcatacaagatcaaatacaaggagaatctctttcttctcaggggcaaccatgagtgtgcatccatcaatcgtatatatggtttctatgatgagtgtaagaggaggtttaatattcgcctctggaagacatttactgattgttctaattgcctacctggtgctgctctggtagatgagaagatcctttgcatgcatggcggactatcgcctgatcttaagcacttggatcagattcggagtatt

SEQ ID NO: 215082 - DNA, 402 bp, Glycine max
cgaaaatatgaatttaatctaaattaaaattctggcgacaaaataagatattcaggattcctccatatggaagtttgaatttgcattgtacattaaaaaaaaaaaaaaaaaactttcataaaggaaaaagggatacataaagggaacgggtcaatcaaagtcgcacaacgaagtgccttgttccttgccagcctttaatttcgttgccaaggggaaagcgcccctcctttaaattgtggtgaatgccagccaacataacgataagccttttgcctaatacaaataatgaatgcctccattcagcttactgaccttggatacctcgggaatgttaattcttcccacccttatgtggcggagttcccggtcttgaagtgttgtagccaaatccacatttccctt

SEQ ID NO: 215083 - DNA, 499 bp, Glycine max
caaaaatggagaaatagaataactgaatatcgtatagctcaaaataaagatttaaccaaatgcaattcatatgaaaaaagccaattaattctttacaaagaacaacaagtaaacgcattaaaaaaaaaaattagaaaacaatatagatacgatcttttatcctataattttatcaattatgcagataagaaagactcatatatttatggatatagatccctatttcaagtaaaaaaaaaaccaagtgatttcttctaattacaacacgtataaaaaagaattattggatatcatagataatctctttatcaagaattatatatcggaagatgcgattctagatatggaaaaaaatatgtatagaaagtattatgattggatgggaatcaatagagaaatactaaatcgttccatatcgaatccagaattttggttcttttcaaaatgtgtgatattttatgacgcatataggggtaactcgcaggttataccaatcaaa

SEQ ID NO: 215084 - DNA, 519 bp, Glycine max
gatctcttgttcttgtaatatatttataaaaatttttcttattaacatgaattttttctgggtatttgtgataaatttttcggttattcttttgaattaatgaaagacctatggtgtgatacatataaaattgtttattgttttttctagacaggcgaactggttcgataacaaatatttcttttttcataaatttgttatttttctttttccttaagcctagaagaattaaattcttctgattttgaatcatcataatatctacacctagctctcctctttgaatagaggctattgtaatttctcttaaattttttaatctaatccggagacaatatactgtgacagtgccaaatattctttgacctacgaaattattccaatttaaatgtaaaatcgaaaaatctcttagtaagaaattaagttctgcctccatcttgaccttgtgtttctttttccttatacccttactagtcttttcctgtctgatcctacataatcggtttcaatatctttttc

SEQ ID NO: 215085 - DNA, 586 bp, Glycine max
tggatctcttagttgttgcgagggttgcccaaaggcaatatataaggcatacccagtaaaacttacaagtaaaccagatatagagatggcaattagggttgctgtttccattattagaattctaaagtttcaagatcacaatagatctataggataagatccttatatttacagcgaaatggtatacaaagtcaacagatctaaatgaataaaaaatagtatttatggctacgcaaaccgttgaggataattctagatctggtccaagacgaactgttgtaggggatttattgaaaccattaaattcagaatatggtaaagtagctccggggtggggaactactcctttgatgggtgttgcaatggctctatttgcgatatttctatctattattttggagatttataattcgtccattgtactcgacggaatttctatgaattagattcacaagaatcgggtaattagttgttcaatagaaaggaaagttaagcattttggtttcttattgtctggtagtctatttcatttggacttggtagtttgatcgtggaatttctttggttctggatattccggattatg

SEQ ID NO: 215086 - DNA, 484 bp, Glycine max
tctttttttttttttttttttttttttttttttttttttttttttacattagcaaacaaatttattgcataaaaagattcgtgcgtgtttggaaaaaaattcaatttttgtttagttgaagggaaatatcccaatacatgtcttattcttttaaataacccatatttggagcaatgaaatcaattcctccccaaaataaaaaatgattgggattacaaatatgtatgatccatattccctttaaaggaccagaaatgccttgcttacgtattattaaaaagtgcattaacataaataccgcactaagaaaagggaatccaaaagtttgctaactttaaaaacgagtttaggttgattgtcccacactggaacttccgcgtaataactctaccaaagacgatcctattacaggaatagcgtcgggtacgcctgttacaattttgactgcccaataacccatttgatcccaaggtaaggaataacc

SEQ ID NO: 215087 - DNA, 363 bp, Glycine max
ggctcgagattctctgaacaatggcgtatctctctcacctcgacaaactcctgtgcgtgcccccgctcaagtcttcaccctctatttcgccaccacgcagcagcgtcggaatttggaccaaacctgacggaaggccgaggctactggtgcgtgtccgagcggtcacgagcgacgacgagtgggggccgagcatggaagaggcgtacggcagccgtggactcgggaggagaaaccgacgaaggcagagacggagacggataagctgaagaaggccttggcggattcgagctaaggcaccgatcgtggactgtaagcagcaagcgaaacgagagccgagatcgatggactcatcacacagctcga

SEQ ID NO: 215088 - DNA, 543 bp, Glycine max
  unsure (1)..(543): unsure at all n locations
atttaaattaataaaattagtcgtgttttattcgattttttgaattggtttttttttacagtagctaatgctagtcaccgaacttagtcaatgagctagaatgggttataaagatatctatagatatatatagatatatttatctatagatatctttagaaaaaaaaaaaagaaaataaacaaataagacgtatcattttatgtatagtagtggggaattatgggacaaaaaataaatccgcttggtttcagacttggtacaactcaaagtcatgattctatttggtttgctcaaccaacaaattattccgagaatatacaagaagataaaaaaatacgagattgtatcaaaaattatatacaaaaaaatataagaatatcctctggtgttgagggaattggacagantaagattcaaaaaagaattgatcttattcaagtataatatatatgggaattccaagtttttaatagagggtaagtcttaaatatcgaagattacagacgaatatgcaaaaaaactgaatgtgtgaatcgaaacta

SEQ ID NO: 215089 - DNA, 389 bp, Glycine max
acatatataactaaagaatcttgttttgttctattatttgttattttataatattctaatgaatctttattttcctttttattattagttattagaatattttgtattattagaaagaataaatagaattggcaaaaataaaaaaaaaattcaataaaatcaaggttatcgcgggcgaatgtttactcttttattatcaatcaaattcagatgtaatgtagggcacaactcctaaaaaaaggattgctttttggtttcttccgccatcccacctaatgaatcattaagatttgtttttaataaaatcttaagtatttgcaggtttcgtcgttcccatcacttctcgattaatggttaggtctgaattcgacaatggagcctttctcata

SEQ ID NO: 215090 - DNA, 537 bp, Glycine max
  unsure (1)..(537): unsure at all n locations
gccacacaacctcatcaatttgtgtggcaaagaatttagatagtctagctctcaaatcctcttcttctcttccatccaatcctctcagactgatcttagacgcaaacacatcctaatcacaaaagcggtgaccatggcaaacatgattatggcttccacaaaacctctggttccagtctgcaccagttcccgttcccccacaccaaaactccccattctccaaatttcactccccaaagccccaaccttgaaactgaaactcccaatttcaaagccccagatgctgtccctcctgggagggatagcaccactggtcttggccagaccctccctagcagaagaatttgagaaagcagcactctttgacttcaacctcaccctgcccataataatggtggagtttctgctgctgatgggtgccttggacaagatatggttcaccccacttgggaaattcatggacgagagggacgcggcgatcagggagaagctgagcagcgtgaacgacacgtcngacgaggtgaagcagctggagga

SEQ ID NO: 215091 - DNA, 384 bp, Glycine max
caaaaaaattactacgtaaatagcatataacgagaagagatgcacatagctggggtggggaattttcctacgttttctatattctttaagaaaaaaaacaatgggagcccaattcataacctgaatctctgattttacattgaaaattattacgattacacaattgacacatccaaaagtagaaactgatcaatcctttggtgaggggattgaaatgaaaattacatagacttattaagcagtgggaagaaccttattaacaatctcctggctaagagctgcaatctgggaatcaagggacttgatggtttcttccttttgattctccaagctagacagagcctcctgcagctcagcctcgactttcttcctcccctcagcaat

SEQ ID NO: 215092 - DNA, 473 bp, Glycine max
tttttttttttttttttttttttttttttttttttttttttttttttttttttttttttttttttttttttttttttttttttttttttcaaaaaaaaacggcccccaacgggcggcgggggaaccctttgaatgtttttgcatttgtgtgagttcgcccaaggcaaaaatgggggcccccctggggggccccacccccccccagtttggagccagggcccggggtcctctgggggggaaaaccaaaccaacggggggggaaagaacccctttggggtcaaagcccaacaaaaacaaccccgggaaaggcccattgccccccccccaaaaatccgggggaaaaatgggggatggcccccccaatttaaaaccccgggccctaaaggggatggcccaagttaaacgttgtccccaaatagttctaaaagcccaaacccggggtttcccccggaccgggctatttttataacccc

SEQ ID NO: 215093 - DNA, 449 bp, Glycine max
  unsure (1)..(449): unsure at all n locations
gcttggtttttggggtttcaagttcttgaaggaggtgaaacacaattaaatgcagaatctctttcatcccaagatatcatgacacaatcatggaagacttctctaagagaattgaatggctctttgaaggatgtaccatggaaggcttttttccaaaatcgtgctgtgtgggctatgatatatgctcatttctgtggcagttggggtcactataactgtctatcatggcttcccacattttttagtgaggagctgaatctaaatctgactgaagctgcatgggtctctattcttccgccactggcttcaatatttgtgactagtcttgcagcgcaattagctgacaacttgatttcaagaggagttgaaaccactgtggttcgaaagatctgccaatcaattgcatttttgtcccctgcaatctgcatgactctntcctcgctggatct

SEQ ID NO: 215094 - DNA, 550 bp, Glycine max
ctttctctcttcgcctggtcttggcatctccgcagcaccaccacccaccaccctgcttagaccaggtcctctctctctctagagagaaagagaaaaaagaaaaaaaaaaacaactaacattaagcttttaatagtaagacatggctcaacccagttccaacggggatctgaataataaccagcagcagggtcaggttcagcaacaacagcagcagggtcagtgggcggcggcggcgcagccgcatcagtatcagcagcaatggatggctatgcagtacccggccaccgccatggccatgatgcagcaacagatgttgatgtacccgcagcattatatgccctatgctcaccctcattacccgccgacgacgccgcctgcctcctactaccaccaccaccaccaccacaaacaggccgcggcctcctccgacgagatcaggaccgtctggctcggcgacctccaccattggatggacgagaactacctgcacaactgctttgctcacaccggcgagggtggttcggccaaggtcattcggaatagccaact

SEQ ID NO: 215095 - DNA, 554 bp, Glycine max
ggcttccgtcgaccagcgtccgtaccccggcctccacaatggcgtcgttcggcccctcaaaccaggcccggatatcccgcgtcccaagaagctaccccagccgccgacgccactctcggattcctcaagcgacgaagaagaagacaccaccttgaacttgaaggacctgattcgcacgggaacaacggaagttgaatcctccattttcgacccgcgcgacgatggaacctctgaccactggatccaacggaactcttcccttgtccgtttaacgggaaagcacccgtttaactcggagccacccctccctcgcctcatgcaccacggcttcatcaccccggtccccctccactacgtccgcaaccacgggccagtcccccgggcccgctgggaggactggaccgtggaagtcacgggcctggtcaccaggcccacatgcttcaccatggagcaactgctacacgatttccccagtcgcgagttcccagccacactcgtctgcgctgggaaccgggcgaaggaacagaacatggtgaaacagagcatcggcttca

SEQ ID NO: 215096 - DNA, 537 bp, Glycine max
cccacatggctctcctcacaagctcgcacctttcacctctctctacaccaataccccccattccccaccaccccgccgccacgtcatcatctccttctccgtctcacccttcaccgagaagcactccacagagcgctaccagagggaccaatgggtctaccagagcaccactcaagagggtcaacctcaaacgacgccgtttcctcctctcccgtgcgattcagcgtccttaagagacgacgacatagcgttgcagctgccagagctgaagaagctgcttcaggttctgagggagaagagggagtgtatcaatggagagggttgtgagccggggaatgtgttcttggtgggaacgggacctggggaccctgagcttctcactctcaaggctgtgagagtcatcaagagtgctgatcttttgctctatgacaggttggtgtccaatgatgtgctggatttggttggccccggtgctaggcttctctatgtgggcaagactgctgggtatcatagcagaacacatgaggaaatacatga

SEQ ID NO: 215097 - DNA, 517 bp, Glycine max
gttgtgagatataaattgtttgacattgaatctaatttgcaaaatcaattgttctatggcgtaattgagttctatcaattacatctgaatcaaaaaaatgaaaattagggtacaaaattaacagaaggaaaatgatcccataacatgggcagatgagaaatcctgcttactaaatgtaaatctgatgccgcccctaaaccttaatgatacaattctgctacaaaaccttatctttccttctcccctaactgattttttcttcttttcttttcctgttcttcgggcatatacagatacatcgatgagtaaaatatcccagtgttggtggactttatactgtgtcaaaaaacacatccttggcaagttcaatatatcacaacacgaagtaggcctggctgagttctcgcgaagtcaatgccctcttcaagaagaactcgctgtacagctattggaagtcttgcaggagtgcgagaacccctggtatgatgacctgtgcccacaagaatataaacctgca

SEQ ID NO: 215098 - DNA, 511 bp, Glycine max
cagtatataaatgataactgtattataaatccctctttgcagtaattaattaaactggggatgcacccctagttctaatttgccaggagctaatggctttacaatgattagtatccataccatctccactaaaaccaagtgtatgtttggattaccgttccaatccttccaaagttattaactcaaaagtaacaaaagcatgcttctccctacgtactttcaatatagattcaccacctgcaaacggtaatccaaacattatgagagcttcattttagaactgatgcagaattcccgttgacaatgtggtttgagagcttcccatcagatccccaaaatgctgcacacttcaaatcatcctgaaccattaatctggagaactcctcatggttataactcattatgctttttccacctagttctttgggcagattttcctcatcaaaataggacttcatgacctgcacactatctttattattcgggtagacaaacttcaccttctgaaatg

SEQ ID NO: 215099 - DNA, 450 bp, Glycine max
gttctaaatcgtgagcagcccgacctttttattgcatgatatttcttttttactgtcaggtcttagataccgtgaagccgtatacttgatcaataagggaaagatgtgtgctctcttcatcaactatcttgatgcatgaactggtcgtcttggtaggaaccacccaatacactgtcaacaaccagatggtgaatgccaccctcatgaacattgctgataaccccaccaatgtgcagcttcctggtatgtataacaaggaagagaatccccgtgtgcccatcatctgtaccggtcacgatttctccacactctatgcgcctctcatccgtgatgggcgtatggagaagttctactgggcaccaaccagggatgaccgcattggtgtctgcactggaatttatcgcaccgattcaatttctgaacaagacgttgtcatagattgttgacacc

SEQ ID NO: 215100 - DNA, 456 bp, Glycine max
aaagggaaagtcgtgtttataatcaagtacaaaatttcatcgctaatctactatttatgaacaacttttgacaataatccattgtatactagacacctagcaacagagcaagccccaaagatatactacttgacaagaatttggtttcggaacccactctcgtcccccacaaaaaacaaataatgtgcaggcaaggaacggaattgcatatgacacaatgatctaactatcagcggctctgaaaatagtgagcagagacaggaagaggttaatgatgtccagatacaaggagatcgaagcccaaatgtattcatcgtacgagtatctcttgatcaggttgtctgtgtcatagatgatgtagccgcaaaatataatggctgccaagcaaccatagatcatcacggacaatttacccagtggaaacagaacctgaatcagagcaaagaccataagaac

SEQ ID NO: 215101 - DNA, 639 bp, Glycine max
ctggaactgagcaccaagatcgtcgctgatggcagaaactacgctgctcacgcctaggaattaggcaacgccgatcccaaggagccggcgttgtttctgaaaccgacgtcgtcttacttgaaaaacggcgggaaccattcaaatgccacactaacgagggctctctgcattacgaggttgatctcgctgaggtcatcgccaagaaagcacgtgacgtctccgaatcctctgcgatggattatgtcgccggttatgcactggctctggatatgactgctagggaccttcaagctgctgctaagtctgcaggtcttccatggagtttggcaaaaggccaggacactttcaccccaattagttctattttgccaaagactgcagtgccaaatcctgatgatctagaattatggttaaaggtagatgaagaaatacggcaaaagggctcaaccaaggacatgatctttaagatcccattctaattagctacattagctctggcatgacattgttgaaggggatgtcatactaatggtacttctccggtgttggccctgcaagagggtcaacaatacttgtgggtacaagcctgtgacgtcagttaagttgaaaagacttggctgttttctgtaaaacctttga

SEQ ID NO: 215102 - DNA, 609 bp, Glycine max
gatgaataacatgaatcacttttcttgttgaattgttacaaaattgatgtgttggtatgaaaataatatttacaagtatgattttaaactaagcaaccactatgatcttcccaccaaaaatgggagaaaaaacagaagcatgagagtagaatcatctaaaccttttcccttgataaaaacatcagggactaaattatgccagttcatttttcacggacacattgccatccctctgatctatgctcaatgctcctctatccacaaaatttaccattctgtgggaaagtacgcgagacttatctatacatgtggcatgacaagtaccaatgatcaatgaaagtaagttattccaagaccttttcaccagttgaaaaaagattaaacaccacagttccaaccaaatacaacacaactgaaaccttgaaaacatcatcccaggagccatgttgtagaatgtaacctgttgctgctgttccaaagacaccagccaatacttcagcggtattagatagaccaagcaatatgccagaatatcgaggggcgatatcttgatggtttgaatacaatccggactgagagaaagctcagttccctggctgacgtcataca

SEQ ID NO: 215103 - DNA, 532 bp, Glycine max
gaaattttaaaaatgactgggataaacttaagaattcaattattgaaattgaataagtaaacaatttaattggattggtcgaatggtatcaaaaaaatggagtactaactcccatttcttatttattattgaattaaccgatcaacttgctttgttatcgaacatttctttttgatttcaaaaattttccggaaaaaatttgaatctatttttatatgcgaatcaatcctactacttctggtcctgaggtttctgcgcttgaaaaaaaaaatctgggacgtatcgcccaaataattggtccggtactagatgtagcttttcccccaggtaagatgcctaatatttacaacgctctgatagttaagggtcgagatactgttggtcaacaaattaatgtgacttgtgaagtacagcaattattaggaaataatcgaattagagctgtagctatgagtgcgacagaaagtctaatgagaggaatggaagtgattgacacaagagcttgcctaagtgttccagtaggtggagcaac

SEQ ID NO: 215104 - DNA, 595 bp, Glycine max
  unsure (1)..(595): unsure at all n locations
tggcaatggagatggttaaagaactggagattagtgacttgggaccaaagctgatatctcctcctcaatcattttagcaatctccaatggttccgtgcagaagagcgtcgcagtcgcaaccctaatcagaaggaagcgcagcttcaagcgagtgacagccaccagccatgggtcgtatgcacagccgcggtaagggtatatcctcttctgctttgccctacaaaaggacacctcctagctggctcaagatctcttcgcaagatgtcgaagaaaatatctgcaagtttgcgaagaaaggtttgaccccgtctcagattggtgtcattctcagagattctcacggtattgctcaggtcaatagcgtcactggcagcaaaatccttcgcatcctcaaagctcacggacttgcgcctganattccagaggacctgtaccatttgattaagaaggcagtttcaattaggaagcatcttgagaggaacaggaaggacaaggactncaagttcaggttgattcttgttgagagcagaatccaccgacttgctcgctattacaagaagactaagaatgctccaccagtctggaagtacgaatc

SEQ ID NO: 215105 - DNA, 597 bp, Glycine max
cacgttttcatctcatctttctaacaaaatgggaaacacttaacaaaaagagggcaagctacatctataatgattgaagaggtgtatagatgaatgtttctgggtaagaggctagtaattggaagaatgtttctcaagttttggggcttcagccattccaagcacacaagttcctctcagagaaagtatccaacaataatagaagagctgtgtcatcaattttctctggccgatcttaggaaatcaacgaacaactttgatccaaagagacaaattgaccttagagcatttggtatcaaagtatacaaaggttgtcttcaacatgatgatggttctgattatacagtcgccgtaaagcgatttaatgtgaaagacagtcaagcacgggaagagttcaagaacgaaatagagttgctctgccagcttcatcaccctaattgtgtctctcttataggattctgcaaccacaaagatgagaagattatcgtgtacgagtacatgtccaatggatctctatatgaacggctaccaggtggggaactgtcatggaagaaaagactagagatctgcatatgaattgcacgtggactacactac

SEQ ID NO: 215106 - DNA, 414 bp, Glycine max
aggaggaggtgagccgtgcttacttcaagatgtggtttgttggacatggttatagtgatgggagcattgcttgacagggaaacacaaaacctgacatggagattgtaacaagggttatgggacctgaagttggatatctgaccacaccaataattcttattcagtgtgctattgttcttctctgccaacgtgacaacctttcaaaaggaggagtttacccttctgggatcatctttggtccaactgatctccaggaaagacttcaacaaaatggaatatccttagatgtcatctcaaaaagcaccatttcttgacttttgcagtttagtagaaacaagtactggtcataaaactgaattattataaatgagtggggatagactatttcttttgtttaaaaacaataatgcaaaa

SEQ ID NO: 215107 - DNA, 499 bp, Glycine max
  unsure (1)..(499): unsure at all n locations
gctctcttggactcagttcagttatttcaaaacattttaatctcaacaccaagacgacaatgatcaagtccaaggagttaaaaatcgaagacaccaaccttgctggaatcggatctgagactgacaagaagcttagagaggaggctgctaagactgaacaagcctacaaagatgctggaaagcaagttggtcttcaaatctggagaattgagcaattccatatcaaaagcgttcctaaggatacttacggtagcttctattctggagactcctacgtcgttttgaacacatacaaaaagaagggaagcgaggctctcgcctgggatgttcatttctggttgggaaaatacactactcaagatgaagctgcaactgctgcttacgcgaccgtcatgcttgacgatctcttgggaggagctcctgttcaacatagagaggttcaagagaatgaatctgctcttnttctctcctactntaagaactaccttagaantttaga

SEQ ID NO: 215108 - DNA, 661 bp, Glycine max
  unsure (1)..(661): unsure at all n locations
gaaaaaggtataggtgtatatggtggattatttaatgttacaacatttacacaatctttcaacatatttatattcttaattagtgccgttatactggtattaactgctttttatcctagaaaagtctttataaaagaacaatcatctttttataaattgttaactagcaaattaacatacaataaaaactctatttcaaacaaaacagcagaacagtttcgtataatagaatacgcacttataatagtatttatattatgtggagcggtatttttaatgagtacagcagacttaatttctgtattcttatctatagagttacaaagttatggtttatacatactgtctactttatatagagattcagaatcagcaactgctagtgggttaacttatttcttattaggaggattatcatcttgttttatcttattaggttcagccttattatacgttaactctggtactactaacttagacaatatatatgtgatatgcagtataagtgaaatagaggacttaaatactcttacatactgataccaaccatattatctacacttatctntaataatattatcagtgtgattcttattcaagtaagtgctgctcccttccattttgatctccgatgttatgatgaatactacatagtactact

SEQ ID NO: 215109 - DNA, 541 bp, Glycine max
  unsure (1)..(541): unsure at all n locations
agagggaatatttcatatcaatgtcatggtaactaaaaaaacaacatagagaaagttaataaatttctcaaaattaagaatatacaatgagtgaattaatgcagcagcagcagtagtcacacaagtatcatcatataatgcttaaaagaaattaagcatagagttttccaaatacaaccttaaatgagttctccaaaaaggaaaagaaaggaggttcatgaaacacatatagaactgtttcctccattgttctgcaccacattatacaaacttggctcaaatgaggagcaaatttttcataatcttggcaatgcgcggggaagaatgcgaggttggtcccaatcagtgacaatgtgatcacgagtgatatccttgagtgaggtgcaaccactcaaggccatggttagctcaaactcctcacgtagcatccgcagcacgtttcttacaccagcctattcttgagcagccaaggagaacaccacanggcgttcaataaatatgccagaggcacctagtgctaatgccttgaagacatcagttc

SEQ ID NO: 215110 - DNA, 439 bp, Glycine max
aggtattccgaaattcgggcccctcaacttggtatgaaaacacattggtagcctctactcggggcctagctcgggtaaaagctagaattgccccaattggtgggcttttgccttccgccttaataaaaataagttttggtatttcaaaagtttgctgggcttcttggggaggaatggcactacccttttccggatgatttactaaaacagggaactcattattggttattctagcaaaaccgcccattagagccctgggtaaccattgggctttaaaaaaacgtattctcaaaaaacctatatctacgggtgggggaataggcccctgatgggggaatacccccattgggccggtattaggcgggaaaacgattttcttcactttcgaatcccaaacaattcggttgggggtgcagacccaaagatttaaaggcatttt

SEQ ID NO: 215111 - DNA, 520 bp, Glycine max
  unsure (1)..(520): unsure at all n locations
ttcacatagctatcgtataagatttttccactctgcttccttccaatcttaattgaaggacagcttcagacaaattgtgaaatttaataaagagccaaagatgcccttgtacagaatctgaactgcttttgtctcaaggtctttctgcccttgcaatttgcaaaagtttcaagaaagcttataaaaggagagaacatctgtttttatcaagctctgatggcagggttaaattttgaagccacatatactgacaaccatgatattctgaagatatttgcagctgaaggtgttgaattccttttatcttgtgaaggaaaggtacccgtatcagaatgcaatgggaaaattatatgcctatttttcactgcaaactggtgtagaccttgcagagctttcattccccgtcttgttgaactttatgaaacactgagaaagaggggaataaatctagagatcatcttcatctcctttgaccgtgatgaggatggattttaagaacacttcangaacatgccatggc

SEQ ID NO: 215112 - DNA, 526 bp, Glycine max
  unsure (1)..(526): unsure at all n locations
gtatattctttttttttgatttctacttcataggatctcatgtctcaattaagaggagtcatggaaagaactggttcaaaatctcgatcaattcctttttcaaatcctgcggcagctgcgcgagctcttcccgcgtgccataaatggcctacaaataggaagaatcctagaacaaaatgagaagtagctaaccaacttctaggagaaacataattgactgcattaatctctgtagctacgccacccacggaatttaaggaacctaaaggagcatgagtcatatattccgcagaacggcgttcttgccaaggctgtatatcttttttcagtctactcaagtctaaaccattcggaccccttaaaggttctaaccaaggagcacgcaaatcccaaaaacgcatagtttctcccccaaaaataacttctcctgtcggggaacgcattagatatttacctanacctgtaggtccttgagcagatcctacattagccccacgacgttggtctctaactagaaaagtaaatg

SEQ ID NO: 215113 - DNA, 561 bp, Glycine max
  unsure (1)..(561): unsure at all n locations
cggctcgagcccaaattcattttaatcctaattctgcacttcttgatcattcgatttttctcctcaagatgcagatattcgtaaaaactttgaccggcaagaccatcacccttgaggtggaatcctccgacaccattgacaacgtaaaagctaagattcaagacaaggaagggatcccacctgaccagcagagacttatctttgcgggtaaacaacttgaggatggtcgcacccttgccgattacaacatccaaaaggaatcaaccctccatctcgtgcttcgcctcaggggtggcatgcaaatctttgtcaagactttgaccgggaagaccatcacccttgaggtggaatcctcggacaccattgataatgttaaggccaagatccaggacaaagagggcatccccccagatcagcagaggctgattnttgccggtaaacaacttgaggatggaagaacccttgctgattacaacattcagaaggaatccaccctttacttggtgcttcgtttgagaggtggtatgcagatttcgttaaaactttgaccggaaagaccat

SEQ ID NO: 215114 - DNA, 605 bp, Glycine max
ctcgagccgctcgagccgattcggctcgaggaacacccttcacaagccacttctatttgcggagtttggtatttccacaaagagttatggtggcaactcaacaccaagggatcggttattcaacacggtatattcagcaatatactcatcagcaagcagtggcggggctgctgttggtggcctgttttggcaacttatggctcaaggaatggattcttatcgagacggttacgaggtggtcttagatgagagcccttcaacggctaatttgattgctcaagagtctcaaaaactaaaccgaattcgcaagatgtacgccagactcagaaacattgagaaatggaatgaagctaagcaaattagaggatgaaactgaatatatatatatatatatagagagagagagagagagagaagggtgagttagaaactttaatttataacttaatcgtagtggcaagaattgcctgttattacaagtgaagtgtactacatatgccataaacataactattatagagatatatcgagagaaaccttgtaatgtccgagctagcatttcatctactattatgtcagaagtgatgtactatgtaaaactatat

SEQ ID NO: 215115 - DNA, 566 bp, Glycine max
  unsure (1)..(566): unsure at all n locations
aaaaaagaattattggatatcatagataatctctttatcaagaattatatatcggaagatgcgattctagatatggaaaaaaatatgtatagaaagtattttgattggatgggaatcaatagagaaatactaaatcgttccatatcgaatccagaattttggttcttttcaaaatttgtgatattttatgacgcatataggggtaactcgcaggttataccaatcaaattactttttttttcttctaatgtaaatcaaaatgttagtgaaaataaaaagaacattactagaaagaaaaaaaatgaatctcttgaattggagttagagactcgaaatcgggcaaaagcagaataccctgatcaacgaaatcttgaatcatctatctcaaaccaagaaaaagatattgaaaacgattatgtaggatcagacagtgaaaagaatagtaagggtataaagaaaaagaaagacaggaacaagatggaggcagaacttaatttcttactaagaaattntgtgattttacatttaaattggaataatttcttacgtcaagaataattaacaat

SEQ ID NO: 215116 - DNA, 528 bp, Glycine max
cttccttgcctactacacattcttcatcacttcattcaacatttctccccttagcttgtttcaccaatggctgctgcggttagtgctgcagtctcttttccatccaccaagtctacctctcttccaagcaggacctccctcattgccccagagagagttgtgttcaagaaggcttcattgcaaaacagagatgtttctagcagtggacgggtagtttccatcagagctcaagtcaccactgaggcaccagccaaggttgaaaaagagtccaagaaacaggatgaaggtgtggttgtgaacaagtttaaacccaagaccccttacattggtagatgcctgctcaacacaaagatcactggggatgatgctccaggagaaacttggcacatggtcttcagcaccgagggagagattccttacagagaaggacaatcaattggggtaattccagatggtattgacaagaatggcaaacctcataaactgagattgtattctattgctagcagtgccattggtgattttgga

SEQ ID NO: 215117 - DNA, 518 bp, Glycine max
atttatcttctacaaccaccgataatgaacctatagaagttgggccagaagatatagcagcagttgcttccctctggtcaggaattcctgtacagaagctcacagctgatcaaagaattcttctgttagatcttgagaatcaacttcggaagcgtgtgattggacaagaggaggctgttgctgccatttctagagctgtgaagagatcccgggttggcctaaaggatcctgatagacccatagctgctatgttattctgtggcccaaccggtgttgggaaaacagaactcgcaaaatctttggcggcgtgttactttggatcggaggcagccatggtacgattagacatgagcgaatatatggaacggcatacagtgagcaaattgataggatctcccccaggttatgttggttatggagagggtggcgttttaacagaagcaattagaagaaaaccattcacactgttattggtggatgaaatagaaaaagctcatccagatttattcaacattctt

SEQ ID NO: 215118 - DNA, 466 bp, Glycine max
ctttgtctctgttctgtgtgtgcgagaaatggcgatggcaatggcgcttcgcaggctttcatcttcaattgacaagcctctgcgccctctcttcaatgccggttccctctactacaagtcgtctttgcctgatgaagctgtttacgacaaggagcgacccggagttacatggccgaagcagttgaatgctccacttgaggtcgtggatcctgagattgctgatattattgagcttgagaaagctaggcaatggaaggggctagaattgataccgtcagagaatttcacctctgtgtctgtgatgcaagcggttggatcggttatgaccaacaaatacagtgaggggtaccctggtgcaagatattatggtggaaatgagtatattgacatggctgaaacactgtgccaaaagcgtgccctagaagcttttagattggatcccgctaaatggggagtgaacgtgcag

SEQ ID NO: 215119 - DNA, 533 bp, Glycine max
  unsure (1)..(533): unsure at all n locations
aaataaaaaaagaataataaatagaaaaaggagcatgttgattatatagaaagtaaagggcaacaatcatttttgtttaccatgggtaaggacaccatcgctgacataataacctatataagaaatgctgacatgaataaaaaaggaatggttcaaataccatttactaacataacagaaaacattgtaaaaatacttttacgcgagggttttgttgaaaacgtcagaaaacatagagaaaacgacaaatattttttagttttaactctacggtatagaagaaatagaaaaggatcatataaaagttttttaaatttaaaacggatcagtacacccggtctacgaatatattctaattatcaacgaatccctcgaattttagggggcatggggattgtaattctttcaacttctagaggtataatgacagatcgagaggctcgattagaaagaattggcggagatgttttatgttatatatggtaatncttctaacacccgaattatatgagaaacttcgatccattnttggt

SEQ ID NO: 215120 - DNA, 418 bp, Glycine max
ccttatcgtatacccataaaaagaacgttgaatctttttggaaacatatcctataatcaaaatccaatttgcattaattatataagggaacttgaaacataccccggggaaatgattaatgggtaagttattcatttagtaattaaatcttcgtgaatcccccctttttttaattccaggtaaaacccttattacatttaccaatattccttaagggggaaggtctattaaaaacttggggtttctctttctttttttttttaccaaaaatggatcgaagtttctcatataattcgggtgttagaaagattaccattttttacataaaacttttcccgcaattctttttaatcgagcctctcgatctgcattaaacccttagaagttgaaagaaatacaatccccatgccccctaaaa

SEQ ID NO: 215121 - DNA, 519 bp, Glycine max
cggagccctctcttcaggtcaccatctagactgcaatcatggctgatggaccacagcatccatcagttgttcagaagctagctggacagtcttacctggtgtccaggcttagccccaactttaactctaggaattattctgcaactggttcttacgtcaatggcggaatgcactcgcctgggttggctgttgtgtcacctgtatctccagttactgtgcatgctccagcagagaaaggagtgagtggatttctagtggattttctgatgggtggagtatccgctgctgtatcgaagacagctgctgctccaattgaacgagtcaaattgcttatccaaaatcaggatgaaatgataaaaagtggtcggctatctgagccatacaagggaattggtgattgttttgctcgaacaatgaacgatgagggtgtgattgctctttggagaggaaatactgctaatgttatcagatatttgcctactgaggctctgaactttgcctattaggattactttaaga

SEQ ID NO: 215122 - DNA, 575 bp, Glycine max
gtaaactgaatcagttggattttccaagctctcactaactgggtacacttgaaaatagttcagggcccctaattcaacttaaagttttcatttttagcttatttattatatgtgtctccaattcagcttagatttttatatatgttccaagttccatctttgttcatttatggaagcatagtaatagtatctcttaagctttgattatcaatttaagaatgatacttagagttgtttctattgattattgcctgaccaaaccctagtgacacaggttatagttttttgtttgttttaaacgttatttatttatatgaactgatattttgctatataagatttgtgaatatgcttaaaacatatgcattgatgtcatttatgtgaactattattattttgctatgtaagatttgtgagcatgaataaaacataagcattgatgtcagctatctgtgggcttccaatccttgagtgtgtttattgtctggcttgcgctcgttgggtttggaagaagtgtttgtacactgcatgctatgagagtgaaaattggggcctggctacggcacaagaatttg

SEQ ID NO: 215123 - DNA, 500 bp, Glycine max
aacatatagaacactaccctgaacatagtaaagaagccagtgctaggatttgttagtgaagcaatggctcaaaccatgttgctcatgtctagtgtctctagcagttattccgtggatttgaagaaagaccttttcctccaattgcagagtcaaagtttaaggcctaagttctctcagctctcattcaacccacttccatcatcaacttcttccttttcttcaccccgtacattcacaactctggccctcttcaaatctaagaccaaagccgctcctgctaagactaaggttacaaagccaaagcaaaaggttgaagatggtatctttggcacttctggaggatttggttttactaagcagaacgagctctttgtgggtcgtgttgctatgcttggttttgcagcatcactgttgggtgaaggaataactgggaaaggaattctagcacaattgaatctggaaactggaattcccctttatgaagcggagcctcttcttct

SEQ ID NO: 215124 - DNA, 527 bp, Glycine max
gaatatccaatatatactaatatatgctaatatatgctaatcgaatatctatctatatctatctacctatatctatatagatatagggagatagatatagatgtttactaagtggattatattgagccgcaatatatgtgcggcaagctaaacgaaaaggactattttgtagaaaactggtcaatgatggccttccatggattcacctatataagccgcagctaaagtagcaaaaatgagagcttgaataccgcttgtgaataatccaaggaacatgacaggtataggaactactaaaggtactaaagaaacaagaacaacacctactaattcatcagctaatatatttccgaaaagtcgaaaactaagagataagggttttgtgaaatcttctaagatgttaatcggtaaaaggattggggttggttggatgtatttattaaaataagctaatcctttttttgaaagacccgcatagaaatatgcaattgatgtaagtaaagctcaagcaacggcagtatttatat

SEQ ID NO: 215125 - DNA, 606 bp, Glycine max
gttttcacacgcatgacacacttcacttctctcctcactttcgggtcagtcttctgaagatcttttggggggttgtgaatttgtgtcttcttggctcccaacccacacgcaacgcaaccatagaatggaatgaatgaaggcaaagcttatacttataaaagagagatagaaattggttgtgaaaaacagaagcactttgtttctaagtaaaaggaatcttcagctgccatgtttcatcgctggagcaattctcatcaacaggatcagggaagcagcgagctttatgctgaatccaagattaaagagctgaagggtgttatcggacccttatctggacgcagtttgacgtattgcactgatgcatgttttaagagatatttggaagctcgaaactggaacgtagacaagttcaagaagatgttggaggagacactcaggtggagatcaacctataagccagaggaaattcgctggcatgaggttgcaatggaaggagagactgggaaattgtatagagcaagttttcatgatagacaaggaacgactggtcttaatttgagacctcgaatgcaaaacacttactcaattgagaatcagttgcggatc

SEQ ID NO: 215126 - DNA, 553 bp, Glycine max
  unsure (1)..(553): unsure at all n locations
aacaaactgttctacacatgtatcttcaaaatcattgtataaaattcagaccctttacttatttataaacataagcctgatattgaccaccaaagtaaactagtttgttttgtttatcttgtcaaaagagagcttccttctttgataagaacaaacacactgccaccatcgccccttgagatacgcaattcttcgtcgaggtatgtggtgagtaaccaggactgagcattgctgttggaaattgggatcttcaagggaggcctacttgaaattgttttcactaccgatgtggctgtgtcttggacagaggtaaggatgcctttgaaaagtgtaaggtcaatcttttgacccagaaattccacattttccggtatctctaatgagtccgtaagctgtggagtgccaattatgccttcctcaaactttatctgcacacgttttggacttcgaacatcaaatttggcattagtactaattgaggtggtggccaaaggaccagcgaactgaacagagttttggacggtnaaaatcagcgagtcaataatctgggata

SEQ ID NO: 215127 - DNA, 588 bp, Glycine max
cggctcgagtttgaaattttgataaaccgcgatcacaggttgccgcaccttaaaaccggaaacaaaagcaatcgttacttgatttcaagaatctctcaatttcttcctacttctttgtgtacggtttcttaagggaaagaaaatcactctctgtgctggccacagacttcgtgaatcattttcttttccactattagtttatttgctgaacactctcctatttgatataggacttcgtgtcagatttaaacttcttctgtctctttctcagttctctgtttaatttcaagttcaagctggtgaaatcttggattagtgctcccactctcctatctggtataggacttcgtgggtagacttttctatttctctcctttctttcactctcttcttctcactgatccgcattgccgttcaaagtggtcttatttgaaaaacacttgggcgttggtgcaaatgtttgcttcgttaattttctctggggacaacaggctcactgagaaaaccaattttacttgcagagatttggacatctttggtgttattatacaatagcaactcaatttagaaaattctaccgcattacat

SEQ ID NO: 215128 - DNA, 510 bp, Glycine max
ggataaataacattttattacaaagtcctccatagcatacaataacaaagttacatggaaattcattaactaccactaacaataccgttatagccgggtcaaaatgctgaatttaaacaaaactaaagagatgaagcacatgtacatttatttttatttttatgaaacttagattgaaacaatacaacttaactatatgttgatgctttgccaagtgattctgcaatcttactggcaatacagtaagatgtagactgaatggttaccatggggttgacaccaactgcactaggcaaaacactcccatcacacacatacaagccttctgcttcccaagtctcaccattctcatcgagtgcaccttcttcttcagaggcacccattctacaacttgacatctgatgtgcaagtggtaaacactgtccacacttcattccttgaccttggacccccaactattgtcacagtgtcaagaaactcctccaaatcttcctccttcatccccttaca

SEQ ID NO: 215129 - DNA, 553 bp, Glycine max
ctcgatattttttgagacaatgccatatcgattgaatgaaagtacaggatacatcgactatgaccagatggagaaatctgctacactcttcaggccaaaattaattgttgctggagctagcgcttatgcacgtctctatgattatgaacgtgtacgcaaggtttgcgataaacagaaagctatactattggcagatatggcacacatcagtggattggttgcagctggtgtcatcccatcaccttttgattatgctgatgtagttactaccacaactcacaagtcacttcgaggaccacgtggagctatgatattctacagaaaaggggttaaagaaattaacaaacaaggaaaagaggtattgtatgactacgaagacaaaatcaaccaagctgttttccctggactgcaaggtggccctcacaaccacactattactggtttagctggtgcgttgaagcaggccactactcccgaatatagagcatatcaagagcaagttctcagcaacagctttaaattgcacaggctctgaatgagagaagctatgagc

SEQ ID NO: 215130 - DNA, 610 bp, Glycine max
cagcctgtcaatagtccagtgactgtttgtggtgatattcatggtcaattccatgatctaatgaaacttttccagactgggggtcatgtgcctgagacaaattatatttttatgggagactttgttgatcgaggttacaatagtcttgaagtttttaccatccttttacttctaaaagctagatacccagctaatattactcttttacgtggaaatcatgaaagtagacaattaacccaggtctatggattttatgatgaatgccagaggaagtatggcaatgccaatgcttggcggtattgtacagatgtgtttgactatttaacactttctgcaattattgatggaactgtgctttgtgttcatggaggcctttctcctgacattcgaacaattgatcagataagggtcattgaccggaactgtgaaattcctcatgagggtcctttctgtgatctaatgtggagtgatcctgaagatattgaaacatgggcagtcagtcctcgtggagcaggttggcttttgggatcagggtcacttcggagttcaatcacataaataaccttgatctagttgtcgagcgcaccaactcgttcaggagggcttaagt

SEQ ID NO: 215131 - DNA, 311 bp, Glycine max
cactcttgtacatgatattgtatgggcatatctacactcatgacttgctcctatccgggtgcattgcactgcgaacagagtgagggaacagggtcttattagcgcgtcggagcttatacattccggggaatacaatcctcgatgtatacgcatatgtcctggatagaaggtgtcacatatgcttcgctgctggctgggctataccaagtgtgaaggctgctaggggcatcttgcaaggatgcatgaacatccatggattgcgtattatggcgggtgaatgcaatgctactttggtagtcgcctctggtgac

SEQ ID NO: 215132 - DNA, 426 bp, Glycine max
aggggatgcacacctaggtacactacgcaaccggaataaggtcccgggaccacgcgctcactaggcgcgggccgcccttttttttttttttgtttttttttctttttttatttgtttttttttttttttttcttttgcttttttttttctttttttttttttatttaaaaaaaaaaaggggggccttaccaatggggggggggaaaaagggccccggagttgctttttaatttagcccacaacaacccggtttttaaacaaccacagaaaaagccgggaggccccccacggactccccgaagggcgatgttctcttaaaaacttgaaaaagggggaacacggggtaaaaccacccctggagggaagattaaaatatatccccgccgtcaaaaagagggccctcgataacaaaaaacccccccgcca

SEQ ID NO: 215133 - DNA, 597 bp, Glycine max
gcaaaagtgaggggtagtggtagaaggataaggtgactataaaccgtggaaacggtggtgtagtgtgtgagtgtcattgtgaagttggaaacaatgctagcttcttcgctctccttcctccattcttgcacatccccctcttcctcttccttattgtcaatttcacctccaaaccccaaaccctctcacttcctacctttcgtggtcgaagccaaagacaggacccgcagggaagacaggaccgctcgccacactcgcatcagaaagaaggtcgaagggacgcccgagaggccgaggctgtccgtgttccggtcgaacaagcatctctctgtgcaggtgattgatgacaccgcaatgcgcacgcttgcttcggtgtcgacaatgcagaagacggttgctgatgagttcaactactccgctggccctacagttgaagtagcaaagaggatgggtgagatcattgcaaaatcctgtttggagaaggtgatcacaaaggttgcctttgatcgaggtggatacccataccatggccgtgttcagcacttgctgaaccacccgtgaacatgcctagattctaactaagtagcccttcctttt

SEQ ID NO: 215134 - DNA, 370 bp, Glycine max
atgggaaattctcgatattaacgacgaaattattcttaaccatacacatggcacatggtggctcaaaaagaccacttaaaaattcctaactaagcatcaccttgccaatttttattcttagatcaaatgactattgaacacaatttttagtggtccaaatctagagactatctgactgattttcatggcttccaaaggatgggagtctctgcgatcatggaggggactacctatggatccatattagaagctggccttctgtcctcaaagcaacctttgccatttttctctgtgtctcttccaactctaatggagcttccacggtgtgccacaccccaacagaaggcgcagatgtctgcagtttcatgtt

SEQ ID NO: 215135 - DNA, 567 bp, Glycine max
gaaattttaaaaatgactgggataaacttaagaattcaattattgaaattgaataagtaaacaatttaattggattggtcgaatggtatcaaaaaaatggagtactaactcccatttcttatttattattgaattaaccgatcaacttgctttgttatcgaacatttctttttgatttcaaaaattttccggaaaaaatttgaatctatttttatatgcgaatcaatcctactacttctggtcctgaggtttctgcgcttgaaaaaaaaaatctgggacgtatcgcccaaataattggtccggtactagatgtagcttttcccccaggtaagatgcctaatatttacaacgctctgatagttaagggtcgagatactgttggtcaacaaattaatgtgacttgtgaagtacagcaattattaggaaataatcgaattagagctgtagctatgagtgcgacagaaggtctaatgagaggaatggaagtgattgacacaggagctgccctaagtgttccagtaggtggagcaactctaggacgaattttcaacgtgcttggagagccca

SEQ ID NO: 215136 - DNA, 556 bp, Glycine max
gcaagcagtaacattgtactgtaaagataagtatttaaataatcttagctgtctgctaccaatatgttttgagggtttaaaaaaaaaacaaaaatacccgaatcatatattatatggtcgggttcaatccaaaatttcagacattttaatacaatcttaagaacctggcataccttaacccagctacaaatttaaaaataatactacagtttaggggagagcaataaaatccatcctacttcaacacacagttctgctaataagccccgttaggaagcaccttgaattgcagcagcaggttgcatggctatatcctgattctgtctcacagcaaatccatggccaccataaccctgatgaccaccataatggcctccattggaatcagatctccaatgcttatttcctggactgcgaccccaagaaagacgcactgtctgcttcccaattactgtcccattcaatccctgaattgcttcctcagcattctttctgtcagcaaaatgaacaaatccacaccctttaccaactgggattttcacagagacaacctcac

SEQ ID NO: 215137 - DNA, 542 bp, Glycine max
ctttctcagcttgctcagactccaaggtaaatggctgtcagtgcccggttgggtttcgtggggatggcactaataaatgcgaagacgttgatgaatgtaaggaacgaagtgcttgtcagtgtgatggctgcagctgcaagaacacttggggtagttacgattgtaaatgcaagggaaatcttctatatataaaggagcaagatgtttgtattgaaagaagtggatcaaaatttggacggttccttgcctttgtggtcatagcagttgttgttggtgctggtctagccggttacgtgttctacaaatataggctccggtcttacatggactctgagatcatggctatcatgtcacaatacatgccactggaccagcaaaataatgtagttcatgctgaagctcagcctttacgacaacaaggcgccgtgtaagacatacataatgagctaaaaatagtcaaaggaacccggtgcactgcataatccacttgagagaaggattataaatagaactggctatatggatctgaatccatttgacag

SEQ ID NO: 215138 - DNA, 505 bp, Glycine max
  unsure (1)..(505): unsure at all n locations
aaataaattgaaaaagtgatagttgcacactgatttatttatttatttatacatgcaaaagtagtcaaaataattgacatacttgtctacatcaaaagttgacgaggaaaagtaaacctgcgtagctagctagctgtcccatgtacacttttatttaaaaattgaaacataaaaaaatcttgaaacgaagcagctaatagaatccattatttatatataacaataaactactatatacacatacaatgtattctagtgtagtcccctaaaacacgagcaagttattctgggtgtcgtagcccaacttctccaaattcggctggactgcaaattgaatcataggtggtggtccacaagtcaatgcccaggtatcaggagatgcatttggaatatgctccgtcaggatactttcagtgatgaatcccacactgtattcccacccttctcttatgctntcttggatgaggtaccacaccttcaacctatcatacttgttagcccactc

SEQ ID NO: 215139 - DNA, 585 bp, Glycine max
ctcaccagcagattacgtcaatgcacacaacgctgcaagatcagaggtgggtgttcaaaacttggcttgggatgacacggttgctgcttttgcacagaactatgctaatcaacgtaaaggtgattgtcaactgatccactctggtggtggtggccaatacggggagaatcttgctatgagcactggtgacctaagtggcacagatgcagtgaaattgtgggttgatgagaagtctaactatgactacaattctaattcctgtgttggtggagagtgtctgcattacactcaggttgtttggagagactctgtgcgtcttggatgtgccaaagtagcatgtgataatggaggcactttcatcacttgcaactatgcttctcctggcaactatgttggccaaagaccctactaggttgttacatttgtagcagcgagatggctaccatttaagatgatgagttatataccatacatattaagaattaataatagcatcatgaatttatatagattcatgttatgatattttccatcgtattggaatacatgtgagctcattaattactcacacaaatcaataattat

SEQ ID NO: 215140 - DNA, 574 bp, Glycine max
gttttgaaacagagaacaaagaaccatcgccatgcttgatccgagaacacaccaccccaccaattctttcgaattgtacgacgcaacacgacacaaaccccacacatgggatgttacgaactccggtttgtggccttcgaaaccggctttggaggaggcagaggtagatgattccgggatttgttcaccttccatgaggaccacgagccccccacgccgaaaaaacaaccaccgaagcctctcgccaacgtcgaggacgcaagccatagtgagagggcagagggagctcatggaaatggtgaagaacatgcccgagtccaactacgagctctccttgaaggacctcgttgagcaccacatggttggtgatgctactagacatgaaaaaaacgcggtggaagagagaaacttgagcagcgtgtacaacaagagagaaaaaaatggtggtagtagaaaggctgataataataataataacataaatatggcacaggtgaagaggaacgggaacattgatcgttgaggttctaccttaaaatgtggctccttttcttttgatctagggaccagagag

SEQ ID NO: 215141 - DNA, 315 bp, Glycine max
gacacaagttatgaatatataaggcccacttttttttacagtgaaaacagccgaaacgaagttgttaattatacattgccgagagaaatgggtaaaagatattgtcacccaagatttaataattggtctattcttagcctaagcaaaggccatcttgttgcgatagaaaggaatgagaataaatacgttttatctggtgacataaagagaccaactatcgctgcagaaactccatatgtttgatgtattgcaaaaaagccttaactgaacttgtttggtactgagatatttgtacgcccttagttcagaactgac

SEQ ID NO: 215142 - DNA, 527 bp, Glycine max
caaagacaatgttggattttttctcttccactagaactacatactacccttctatagttctgttgttataggagctaattaactgctccaacaaccacaaagagactgaaagaacagcaatggaagctgcattatgcagtgcacttgctctttcacccaatcaagtattcaatgcagcaaatcctggagataaaaatgttcctttgaaatatagcaaagatcggagtgttgtaatgacagtggcagccactggaatattagggaaaggtggtgggttgttggagaggccaaccatagagacaacatcacctggtcgggaatctgaatttgacttaaggaaatcgcggaaaacatccccaccttaccgagttttgctgcacaatgacaacttcaacaagcgagaatatgttgtgcaagtgttgatgaaggtgatacctggaatgacaattgatagtgcggttaacatcatgcaggaggcacattataatggactagcagtggtgatagtatgtgctcaagtggatgct

SEQ ID NO: 215143 - DNA, 438 bp, Glycine max
  unsure (1)..(438): unsure at all n locations
cattcgaattcattttatttatatattaatattatattcaaatgaaataaaaagatattaaaagatactaattataagaatttgaaagtgaaattataaagttattaaatgattaatcaatttttttctacctgttcctgtagtaaaaagagttccatctgttcttgaatagcttccttcaaaaggacttctgcttccccagtgaatgtcttggtagaagatatgatttctttgaattgaggtttattcgtgtttaagtaagcacgtaactgaacaagaaatttccttacctgtccaatttctaatgaatcaagataaccattcgttccagtataaatagttattatctgttcttccacggnaagaggagctgattgggattgtttaagcaactcgcgcaatcgttgacctcttgctaattgattttgagcagcttta

SEQ ID NO: 215144 - DNA, 557 bp, Glycine max
tgatacgataccttggtagagagggagtgaattaggaattaggaaacgttcggaattgggtagtaaattaatgggttgagccgagttggttcgtggaaggaagaaataaagaaatcaacataagcagacaaagagcttaggaaaagaagaataagaatggtgtggtgagaaagatgaaggtccgttcggaaagggaaaagacgaaagttgtgattaggcatttgcccccttctctcactcaatccgatctcttccaacacatcgattctcacttcgcttctcgctacaattggttctccttccgttccggcaacaacagtcacaagcgtcagaggcattcccgagcgtatatagacttcaagtgtcccgatgacgttttcgagttcgccgagttctttgatggacacgtttttgttaacgagcgatgtgcccagcataaagtgatagttgagtatgcaccttctcagcgtgttccaaagccaagtgcccaaaaagatggacgtgaagggactatattcaaagatccagattatcttgagttcctcaaactaattgca

SEQ ID NO: 215145 - DNA, 546 bp, Glycine max
  unsure (1)..(546): unsure at all n locations
ctattcctcactaggagctcctctccactggttcttcatctgcatgcacacagttgcatagttttggaaaccaagaattcctgaagaagggtagcatcaacaagcagttctgaaaatggagatcaccaatgtcagtgagtatgaggctattgctaagcagaagatgccaaagatggcgtttgactactacgcatctggtgcagaggaccagtggactctgcaagagaacagaaatgccttttccagaattttgtttcggccacgtattcttattgatgtgagcaagatagacttgacaactactgttctaggcttcaaaatatccatgccaatcatgattgccccaacagcctttcagaaaatggctcatcctgagggagaatatgcaacagcaagagctgcatctgctgctggaacaatcatgactttgtacttatgggctacttccagtgttgaagaggtggctttaacaggacctggcattcgctntgttcagctatatgtgtacaatgacaggaatgntgttgctcagcttgtgagaagagc

SEQ ID NO: 215146 - DNA, 534 bp, Glycine max
aatatatctgtatatcttcagtatcttagtcagaaaacatagaccatgtcgaatttgagtttccttcaatttcatagtagcagccctttggggcactcctcttctcaacccaaaagtccaaccccaaacagcaacaacttcaaatcatcaaaacatacatcaaatgtagggtgcaatattcaaccaaaatcggaggaaatgaaattggtgttcgacaagtttgacaccaacaaagatggcaagattacccttgaagagtacaaagcagctatgaggacaatggggtggggaatcgaaggcactgaggctgatgagtcttttcaggtcatggactctgatggagatggcttcattgacttcaaagagttcatggacatgttcaacgtggaggagacggtgaaagagacggagatcaagagtgcttttcaagtgtttgatttgaatggcgacgggaaaatcagtgctgaggaattatcacaagttctcaaagcctaggggagagttgcagccttagtgcttgcaagaaaatggtga

SEQ ID NO: 215147 - DNA, 517 bp, Glycine max
  unsure (1)..(517): unsure at all n locations
atggcaacatactgataggatagaaagatatatatagtgtttaaagtttcttaggtattacaactttatttccatcaccacaaaaatagctagttgatgtaattggtagcaaacttgtgtgtttctgttctctatcaactttagtccttgttgaccttttctagacaacttgggtgaaggtcatagtcacagacatcacaagagaatgtccaaaacttgccttgctttttacatgaatcacatacatatgctttggccatatccaatttcagtacatgttcatgcttcacatcctcaacctgctgaggcaaagcctctccttcctttctaagagctgcttcgaggtctcttatccgtgattcggtgaacgggaaagcttctgcaccgtatgaggagaccattaacttcccattcacactaatgactntgccatctggtccaatgagaaccaaagcaggaatgccctttacataaagattcttcgaggtcatgccttgtcctgtcctcgtatgggaca

SEQ ID NO: 215148 - DNA, 533 bp, Glycine max
  unsure (1)..(533): unsure at all n locations
atattccctgaggaggttctaccacgtggaaacgctctttaatggaactttagctttaactggtcgtgaccaggaaactaccggtttcgcttggtgggccgggaatgcccgacttatcaatttatccggcaaactactaggagcccatgtagcccatgctggattaatagtattctgggccggagcaatgaacctttttgaagtggctcatttcgtacccgagaagcccatgtatgaacaaggtttaattttacttccccatctagctactctaggttggggggtaggtcctgggggggaagttatagacacctttccatactttgtgtctggagtacttcacttaatttcctctgcagtattgggctttggcggtatttatcatgcacttttgggacctgagactcttgaagaatcttttccattcttcggntatgtatggaaagatagaaataaaatgactacaatnttgggtattcacttaatcttttaggtataggtgcgtatcttctagtattcaaggctctttattt

SEQ ID NO: 215149 - DNA, 411 bp, Glycine max
aaaccaaaacagcaaacaagttcaagggagaaattgaacataacagacatgacatacaagaacacttgaaaaaagacacgcttaaaacaagaacacttgaaaaaaaaacacgcttaaaaaccaccgcgaaggcgaaggacgagatgcaagggggattccttctgaatattgtaatctgccaaggtacgaccattttccagttgcttcccagcaaaaataaacctttgctgatcagggggaatgccctccttgtcctgaatctttgccttcacattatcaagggggtcagaactttcaacctccaaagttatggtttttccagtcaaagtcttaacaaagatttggatgccaccacgaagccgcaacaccaagtgcagggtagattccttctggatgttatagtcagcaaag

SEQ ID NO: 215150 - DNA, 606 bp, Glycine max
  unsure (1)..(606): unsure at all n locations
actgcaccagcactgaaaatttggggaaaggaatattgttgaggaagcacttgggggttgtggcattcaacaacataaccaggttggcatttgggaaaagatttgtgaactcagaaggtgtgatggatgagcaaggagtagaattcaaggccattgtggaaaatgggttaaagctaggagcatctctagccatggcagaacacatcccttggcttcgctggatgttcccactggaagaaggagcttttgccaagcatggagcccgccgcgaccgactcaccagagccatcatggcagagcacactgaagcacgcaagaaatctggtggtgccaagcaacattttgttgatgccctactcacattgcaagacaaatatgaccttagtgaagacaccatcattggtctactttgggatatgatcacagcagggatggacacaactgcaatttcagttgagtgggccatggctgagttgataagaaacccaagggtgcaacaaaaggtccaagaggagctagacagggtaattgggcttgaaagggtgattgactgagcagacttctcaaatctcccttacctacaatgtgngaccaaagaagcaatga

SEQ ID NO: 215151 - DNA, 557 bp, Glycine max
  unsure (1)..(557): unsure at all n locations
atgagcttatccacaattctaggagtgcattttccgcagttgtttgtttaacaagaatttacacaaacaaacataactggctagaatggccctggagaactgtttgcgagtgaccacagtaggcacagccacaccccaatgcttttctccattttttccatcttcaagggataaacttgtcttcccaactcacagaggtttcaagaaatccttgcaaaactcaacactgtcatacccttatctttactccaccggtgctgcctatagaaaatcccgttttgtttgcaatgctcgtgaagcagtaaatgaagttaaagtggtgactgactcaagctggaacaaccttgtcattgcaagtgagacccctgtgctggtagagttttgggcaccatggtgtggtccatgcaggatgatagcacctgctatcgatgagctagcgaaggaatatgctggaaaaattgcatgctttaagcttaacacagatgattctncaacatagcaacacagtacgcattcagagcataccacaagtctgtcttcaagaatgagagaaaaag

SEQ ID NO: 215152 - DNA, 515 bp, Glycine max
ctgcagcaacaagatgtggaaccaaccattgggaaaaaccgatttggaaagcggttctcgcccgctgtatccgatgatgcttgagagccccgaactgcgctggtctttcatcagaaaagtatactccataatcgccatacagttgctcgtaaccatcgacgtcggcgccgtcgtcgtcaccgtccgcccaatcagcgtcttcttcgccaccaccggcgccggattggctctctacatcgtcctcatctttgtccccttcatcacattgtgtccactttactactactcccagaagcatcccgtcaattacttgctcctagcagttttcaccgtgtctcttggttttgtcgttggattgagttgcgcctttactagcgagaaagttattctggaagctgtcatattgactgctgtggtggtgattgctctaacactctacacattttgggctgcaaggagaggccatgatttcacttccttggacccttttgtttggtgcagtgctagttcttatg

SEQ ID NO: 215153 - DNA, 570 bp, Glycine max
cctcactcagattgctggtggaatatgggcagacacagtgggaggaaagcaggtattgggatttggtgtggtttggtggtctgttgcgacagccctcactcctatagctgccaaacttggattgcctttcctactagttgctcgtgcattcatggggattggtgaatgtgttgctatgccagccatgaataatattttgtcaaaatgggttcctgtgtcagagcgaagtagatcactagcgctggtctacagtggcatgtatcttggatcagtcactggactggccttttctcccttcctaattcatcagtttggatggccatcagtattttactcctttggttctctagggacagtctggttttctgtgtggcttagcaaggcacatagttcacctcttgaagatcctgaactgcggcccgaggaaaagaagctcattactaccaactgttcctacaaggaacctgtgaaaacaataccttggagattaattttgtcaaagcccgcagtctgggctctgatagtgctccatttttgccacaactggtgaactttcattctacttacatg

SEQ ID NO: 215154 - DNA, 433 bp, Glycine max
aggtattccgatgttcgggcgcatcaacttgttatgaaatcacattgatggccttttctggggtcctagcttgtctaagagctagatttgcctcaattggtgggtttttggcttccgccttatttaaattagcttctgctctttcaagagtttggggcgcttcttggggatcaaaggaactacccttttccggatctttttctaaaacagggagctgattattgtttattctagcaaaaccgccctttagagccatcgttaacccttggtctttaagaagacgtattctgaaaatacctatatttacggctgtggccataggcgcgtgatttggttatactccaatttggccgctatgggtagataaaatgagttccgtcgcttccggataccaaacaattcgattgggggtggggtcacatagatttaaagg

SEQ ID NO: 215155 - DNA, 600 bp, Glycine max
  unsure (1)..(600): unsure at all n locations
cacgaaggaggactcggcgggggagtggcagcttgccaagatggcactggacgcgacggaatttaactatcaacagatataccacttcgtgcacacgcacggagtgtcgatcccgatccaggtcgagatgatgcgtagcatggcgaaggaccacccgatctacgctctactagactaccatttctttggcaactttgatttcgaattcctgagcggaatagtcctttttgcggctaatacaccgtacgacgagtcgatggcgttcggggcgagcggctctattcgctgcctctacgacgagtactcaaaaacgtcgctagctgaagactttcccgctgaaattgcaaataacggtctccagtatctgccaaaccaccgctacgtcaaatatggcgcgatgtactactccatcatcaagaccttcgttactgcgtacgtgaaagcgtactacgtctcagaggataccattaaaaacgattcggagctacagacttgagcagctcgagcgactatcgtctggggcgtcaacgacttgccttcttncttcaagggctatgatgatctcatcaaactacgtaccaatctggtgtttcaaacgcg

SEQ ID NO: 215156 - DNA, 513 bp, Glycine max
atgaaaaagagaatatggtatcaataagtttaagattaattataaaaaaatatacagattagtgacaaatttaacatcactagattaactacacttcttaattcttgtgcagatgccctacatataggacccagagggagtacataactatgatgcgcgatgctttttaggcgagaaattcagcttcaaccactttgatctgatcttatctattagtagacatactcatatattagccactttttgatagagcaccagccgcaaaaagaagattccttcgagaaaaccgcagtgagtaaactggagtagatttggttggtagagttttcagcgatctaagtctgttagcactcccacctttttcttcagccctagaaaccttggtgctcgtatttacatcccacaattttacagtgcaatcagcagatccagatgctatcacagaaccttcagaactgaaagcgagggaccagacacatgatgtgtgcccaaatcaaggtgtgagacagcggc

SEQ ID NO: 215157 - DNA, 378 bp, Glycine max
ccttatcgtatacccataaaaagtacgttgaatctttttggaaacatatcctataatcaaaatccaatttgcattaattatataagggaacttgaaacataccccggggaaatgattcatgggtaagttattcatttagtaattaaatcttcgtgaatcccccctttttttaattccagttaaatcccttatcacattcacaaatatacataaagggggaagttctattagaaacttgcgttttctctttctttttttttttaccaaaaatggatcgaagtttctcatataattcgggtgttagaaagattaccatatataacataaaacttctccgccaattctttctaatcgagcctctcgatctgtcattatacc

SEQ ID NO: 215158 - DNA, 509 bp, Glycine max
gggattgtccaccaggcctgacatctgcccgccggagtatttggaggagctctctgagcttcaagatggtttgcctacatttcctgatgaggaggcctttgcatgcattgagcgggaattaggactatctcttgactccatcttctcttctatatcgccatcagccgtggcagcagccagtttgggacaagtttataaagctcagttgaagtattctgggaaacttgtggctgtgaaggtgcaacgtcctggtattgaggaagctataggattggacttctacctgataagaggtcttgggatttttattaataaatacattgacataatcaccagtgatgttgttgcacttattgatgaatttgcacgtagagtttttcaagagctcaattatgtgcatgagggacataatgcaatgagattcaaaaaattgtatgctgacaaggaagatatttgtgtccctgatgttttctgggactatactagtgctaaagtactgacaatggagt

SEQ ID NO: 215159 - DNA, 549 bp, Glycine max
  unsure (1)..(549): unsure at all n locations
aatcaagatttgcataaccattaaaatagcttaaatataacaaaactttcactagacaatcaaatttcaaccacgcatgagcaatccaaacgagtcttaattatttcaaccaaaaggggggggctcaaactccaggattataagctgatggcatgaaacaacaaaaatgaaaattcttgatcgcaagactatgggttctaagtatcaaggtcctaaatttgggaaaatatcaataccaatatttctcatccataattattcaaatgacaaggcaatcggcatgattatcccaggaaattgtcgtcatcatttttagccgccgccagatccatatttctttccaaacaaaatgagctgcagcttgtcataaccagcaagcacaccagcacctgcaacagcacgcaatatgttcgcaccagcacctttgaagagtgacttggcaccctcatttgcgacgattgtttggaatgcatgcaaagagctcttgtacttcacagcnttctcagaagtcatcatcattcttcttcgaacagtgtcaatgggataaga

SEQ ID NO: 215160 - DNA, 581 bp, Glycine max
cgttctcaaaagcctcatgttgtttgtgtgccattcccagcacaaggccacgtgaacccttttatgcaactaagcaaactccttctttgcaccggtttccacataacctttgtgaacaccgagttcaaccacaagcgtttggtgaagtctcttggacaagaatttgtcaagggacaacctcattttcgatttgagaccataccagatgggttgcctccatctgacaaagatgcaacacaaagcattgcagcattgtgtgatgcaactagaaaacattgttatgagccactcaaagagcttgtgaagaagctcaatgcttcacatgaagtgcctttggttacctctatcatctatgatgggctaatgggctttgcagggaaagtggcaagggatttggacatttctgaacaacaattttggacagccttagcttgtggttttatgggatacttgcaatttgatgagcttgtcaaagaggcatattcccttccagatgaaagatcactactgatgggtattggatcaaatctagactggatatctgaatgaaaattgcgaatagagattgccaagttcggaga

SEQ ID NO: 215161 - DNA, 451 bp, Glycine max
gaagaacaagcaaatattgctttattaagcattgctagaaagaaatatcttatggagatgtctttttgaacaccatatgaccagaatcatccacatcaaacaggcgtccaacaaattcattccaattttgtgctcgttttttgtgagacaaggaggaacctaggacacttgatcttccagaatcctccccaacatcaatttgattaaatgttccatataatgaaggtgaatatgcttgtggaatatccaaagcaactgccctcttaagggctgcatggtactcttcactgtgttctcgggctatagattcatgcctctccatcttctgctcttctgggatctccatatgctgctcatctttatctcgcattaaatcgagagcccgtcgggattctctctctatccaaatgatggcatggtcagaagttgcattgcaagaaagaactaaatg

SEQ ID NO: 215162 - DNA, 551 bp, Glycine max
gctacctagagcttgcacctattggtatcttctacaatatcctctcatagtgctcttcttcttcttcattttcattatcaagatgtctttgctttcggatctcatcaacctcaatctctcagaatccacagaaaagatcgttgctgagtacatatgggttggtggatctggtatggacctcagaagcaaagccaggactcttcctgggccagtgagtgaccctgcaaagcttccaaagtggaactacgatggctctagcacagaccaagctccaggggatgacagtgaagtcatcctatacccacaagctattttcaaggacccctttaggagaggcaacaatattcttgtgatttgtgatgtttacacccccgctggtgagccacttccaaccaacaagaggtatgatgctgcccaaaatttcagccaccctgacgttgctgctgaggaaccatggtatggtattgagcaagaatataccttgttgcagaaagatgtaaattggccacttgggtggccatttggtgggtttcctggaccacagggcccat

SEQ ID NO: 215163 - DNA, 572 bp, Glycine max
  unsure (1)..(572): unsure at all n locations
gcagcgtgtcatacaacaacaacaacaacaagaacaacaagcacctccgcccgtgtctcttagcctggacgacgtgaaccccgtaggactgggtcgaagatcgcggcagttgttcgatgaggtttggagaaagttctcgggattgggtcagatttctaggacaatacggtcggatgatcaggaggctctggatgcccttctggtccgagaaggtccgatgtgcgagttcgcaatccctggcgctcagaatactactgtactcgttgttggtgccaccagccgcatcggtcgcatcgttgtgagaaagctcatgctcaggggctacgctgtcaaggctctggtaaggagggcagaccaggaggtgcttgagctccttccaaggtctgtagagatagtcattgtggatgttggtgatcccgccactgtcaaggctgctggtgaaggttgcaacaaaattatatattgtgccactgctcgctctgctataactggngatctcttccgcgttgatcatcgaggcgtttataatcttacttaagcattntaggatcacagtaacaaattggcacaat

SEQ ID NO: 215164 - DNA, 305 bp, Glycine max
aagaagaaccccaggccttttttgatagaagagccaaccagtttttgtttaaacacaaacaaacaaagggggtaggggttaaacatccccccccctatttggaacaaaattgcccgttccgggatttaaagcctccttgaaaaaaaaaagaacattggacaacccttggggctcgatttctttgatggggccccccggcccaatggggaggggggctaaagctccctttccgggtataaattctcccaacaacgggaaaaccaaacccatttgggccaatcttcccacaaaaaggtgggttggtt

SEQ ID NO: 215165 - DNA, 554 bp, Glycine max
tcgaacagttaccaaaatccgatgcaacggatgcagcaggctcctctgcttctgcatctgcttctaaggagggggcgagtgtgcctggggcattgttcgaggagaagcctcagtctgccaatgatgcttggaggaagcttcattctgaccctttgctcatgattcgccagcgcgagcaggaggcacttgccaagatcaaaaacaaccctgtcaagatggctatgatcaagaaatcgattgaaggaactgaaaacaaggagaaagctcataaaaaggaaaagcggaagaagcaccggtctagtaaatcaaagcataaaaaactgtctgattcagaagatgacactactgagaggagaaaaagaaagaccggtaatgaagattctgacaggaagcatcacaaggctcaatcagattcagagtatcaatcaagtgaaggagaaatgagaagaaggaaggatcgcattgaggaccaaaaatacagggaaagatcgcccaatcaccaacagagacaaagaaatggcaaagactacaaagaagatgctggtgacagaaat

SEQ ID NO: 215166 - DNA, 569 bp, Glycine max
  unsure (1)..(569): unsure at all n locations
cggctcgagcggctcgagtaatgatttggtgaacactgcacgccaatgggcactggatatgttgggccaccgacgaccatggattgctagtctttataagaccgaaaaattagaaccccttggggaagcaagagagattttgaaatttgcacgagctcaggctcgaaagagggctcctaacctccagcatcctttggtttgcattgatgttattgaagcaggaatagtagctggtcctcgtgcaggactttggaaggaagctgaagcatttgaaggacttgtaaggtcagatacttgcaaaagcttagttcacgtattttttgctcaaagaggaacatccaaggtacctggggttacggattgtggtctggctccaagacaagtcaagaaggttgccatcattggtggaggactaatgggctctggaatagcaacagctttaattcttagcaactatccagtcatcttgaaagaagtaaatgagaagttcttagatgctggtatcaataggattaaagcaaacttacagagccgtgtaaagaaaggtaaattgaccaanggaaattttg

SEQ ID NO: 215167 - DNA, 487 bp, Glycine max
ggcagatagaaaaaagagctgagttttgagttcaaaagatgactaacttcccagtgatcaacttggagaagctcaatggtgaggagagaaacgacaccatggagaaaataaaggatgcttgtgaaaactggggattctttgagctggtgaatcatggcataccccatgacttattggacactgtggagaggttgaccaaagagcactacaggaaatgcatggaagagaggttcaaggaatttatggcaagcaaaggtctagatgctgtccaaactgaggtcaaggacatggattgggagagcaccttccacttgcgtcacctacctgaatcaaacatctcagagatccctgatctcattgatgagtacaggaaggtgatgaaggattttgctatgaggttagagaaactagcagagcagctgttggactagctgtgtgagaatcttggcctagagaaagggtacctgaagaaggctttctatggatc

SEQ ID NO: 215168 - DNA, 606 bp, Glycine max
ctgattccatcctcccgctcctcctcttctcccaccaactcgccgccacactctccctctcccccaaacaccgcaaaaacaaacgcaaacgcgattttcaacaccccaatcccctcacccgcaccccggactccttccgcaacaccttcctcatgtcctcctcctccttcgagtggctctccggcctcctggagcccctcctcgagtgccgcgaccccgcccccctcttccactccctccacctctcctccggcgcccgcctcgccatcggcctctcccgtctcgccgagggccaggactaccaacaaatctccgcccgcttcgccgtctccgaccccgtcgctaaattctgcgtcaagcaactctgccgcgtgctctgcaccaacttccgcttctgggtctccttcccctccccttccgacctcccctccatctcccaatccttccaatccctctccggcctccccaattgctgtggcgccgtcctatgcacccgctttaatatagtagtcaacgccaatagcaccaccaccaccaccaccaccaacgacatagtctcagtttctcaaggtcgccgccaaatagtcgtcgatcctctttccggat

SEQ ID NO: 215169 - DNA, 564 bp, Glycine max
gcttgttcaaattttaggagcggagaatccagagaaagagagatgtctggtatcgcccgtggacgtcttgccgaggagcgaaagtcatggcgcaaaaaccaccctcatggtttcgttgccaagcccgagactctccctgatgccaccgttaatttgatggtctggcattgcactattcctggcaaggctgggactgattgggagggtggatatttcccactgacaatgcacttcagtgaagattaccctagcaagcctcccaagtgcaaattccctcaaggtttctttcaccccaatgtgtatccatctggaactgtttgcttgtctatacttaatgaagatagtggatggagaccagctataacagtgaagcaaattcttgtgggcatccaggacctgcttgatcaaccaaatcctgctgaccctgcccagactgagggttatcatctattcatccaggatgcggctgagtacatgagaagggtccgacagcagtcaaagcaatatccacctcttgtctagtggtatatctgctcaatataggaactattatagtatggtagt

SEQ ID NO: 215170 - DNA, 418 bp, Glycine max
aaaggaaatggctccaatttcaatttttgtggtcacttatagctcaaaacgatggaggaacacagtccattatgaaaaatatcggaaaatcgggtgaaacttggcatcccctttttgcacctattacattgagaaatataagaatgttacacgcaggtcccacccaacgtcttctcttcggatcggacaaccttgaggaacaggaaatatccactggccaagttagctgtggcgccaagtcgaaattggaagaaagttcccctgcgaatagcatcctcgttagcatttccaagtgcagactagttcacgttctcgccagccaattggactctatggacattctctagttcgtgaacaagcatgttagcatacttcaagagcttctccatagtcatcgggggctgagaaaaggacggag

SEQ ID NO: 215171 - DNA, 526 bp, Glycine max
  unsure (1)..(526): unsure at all n locations
gacacagggaagttggattcatctatattgcatcatccctcaaaaatagtactagtaaaactggcaatgaagttgttcatgaacagtataaaaatcgtcaaagaaaaattacagggtcgtcatatatctacacaacgcaggagggttgatagacttgctgcagcataaagtaggagatgatatttgtgcaagtgaacagaaattaatagacttcgacattccattgctctgctttcttcaattgcctcttgtactcagtccaatcaatgccatctttggcagccaatgacaccataatgtcatcaattcccttttccattccttttagtccacacatgtacacaaaagtgttatccttcttcagtaattcccaaagctcttctgcgtattgagccattcgggtttggatgtacatcttctcccctctctcgtttgtttgctctcgactcacagcgaagtcaagcctgaagttntcaggacttttctcttgcatcttctcaaactcctccttgtaaagcaatgagct

SEQ ID NO: 215172 - DNA, 498 bp, Glycine max
gtcgcttgaaggatctgatcaagaagcattctgagttcattagctacccaatttctctttggattgagaaaactactgagaaggagatctctgatgatgaggatgaggaagagaagaaggatgaggagggttaggtggaggatgttgacgaagagaaggagaaggaagaaaaatagaaaaagaagattaaggaagtgtcacatgaatggtccttggtaacaagcagaagcccatttggatgagaaagcctgaggagatcacataggaggagtattctgctttctacaagagtctcaccaatgactgggaagagcatttggctgtcaagcacttctcagttgagggacagttggaagttaaggctatcctctttgttcctaagagggcaccttttgacctctttgcacaaggaagaagcctaacaatattaagctttatgtccgccgtgtctttatcatggacaactgtgaggagttgattcctagtatttgggctttg

SEQ ID NO: 215173 - DNA, 540 bp, Glycine max
tggtaaattaaaattggaattagcacaattcgcagaattagaagcttttgcccaattcgcttctgatctcgataaagctactcaaaatcaattagcaagaggtcaacgattgcgcgagttgcttaaacaatcccaatcagcttctcttaccgtggaagaacagataataactatttatactggaacgaatggttatcttgattcattagaaattggacaggtaaggaaattacttgttgagttacgtgcttacttaaacacgaataaacctcaattcaaagaaatcatatcttctaccaagacattcactggggaagcagaagtccttttgaaggaagctattcaagaacagatggaactctttttactacaggaacaggtagaaaaaaattgattaatcatttaataactttataatttcactttcatattcttataattagtatcttttaatatctttttatctcatttgaatataatattaatatataaataaaatgaatttcaatgataatagacaaaacaaataaaaacaaaggc

SEQ ID NO: 215174 - DNA, 558 bp, Glycine max
  unsure (1)..(558): unsure at all n locations
tctgagcctgaagagttacaccctccccctggcagacaaagggaactgggttttacattctcatttccagtgaagcaaacatccatagcatctgggactctaataaagtggactaaaggtttcaatattgaggatgcggttggagaagatgtggtgggtggactaaccaagtccttagaaaaaattggtctggatatgcgtgttgcagctctagttaatgacacagttggaactgtggctagagctagattcagcaatcaggatgtcattgctggagtgattcttggtacagggacaaatgcagcttatgtagagtgtgcacatgcaattccaaaatggcaaggtcttctaccaaaatcaggagagatggttattaacatggagtggggtaatttctgttcctcacatcttcctctaacagaatatgatcaagctctagatgcggagagcttataccctggagaacagnattttgagaagatagtttctggtatgtatttaggtgacattgtaggagaagtttgttgaagatggcggaagacgttgacttctttggag

SEQ ID NO: 215175 - DNA, 381 bp, Glycine max
acgggaaaaaaggaaatgcctttttaaaaaattggtgaagcctcacattacaaatttaaacatggaataaaaaggaaagaaacttcttagtttaaaaatctaggccatgttcacgggctgttttaacaagtgcttgaacacggccatggtttgggtatccacctcgatcaaaggcaacctttgggatccccttttccaaacaggattttgcaatgatctcacccatcctttttgttacttaaactggggggccaggggagtatttgaacttattagcaaccgttttttgcattgtcgacaccaaaacaagcgtgcgcattggggggtcatcaatcacctgcacaaaaagatgtttgtttgaccggaacacggacagccttg

SEQ ID NO: 215176 - DNA, 569 bp, Glycine max
  unsure (1)..(569): unsure at all n locations
caaaattacaaaacccagtgaaggaagcgcaaaattttccaacagttggcgaaactggtttatgggttgaagtctggttcaggatttgtgggggaagagaagagcactcacaccatatccattatcaatggacttggccgcgaagcttcaccacttagacctgaccggcgtggtcattttggacgcccgaaagccctccgcactccgccaccttccgccacgcgttctcagcagaacaaacaccaacaccaatttgatttacacgaaccggttctcgggcccaccgaggcccaattccgcttcctcaacgggcctgtccatgataaccgtcgaggacgatatcgagtctcttttctccgagacgaactcggaggaggagcggcgcgtgaggaagcaacctagcattggggcgtcggggatttcctccggggtgaagctcgaaaacgtggggaaagcctacaagggcgtgacggtgcttgaggacgtgagctgtgaggtgaagaaggtggagaaggtgggcctggtncgcgtgaactgcgccgggaagacgacgcagatgatgataatcg

SEQ ID NO: 215177 - DNA, 555 bp, Glycine max
  unsure (1)..(555): unsure at all n locations
atttagttggaggggttcatagatttagggaatcgattactatactagtaataaattgtacaaaaaataaaaatataaataatataaatataaaaagaacaaacacaaattttatgtgattagtcgcggtatttaaaatataaaatgaaagtagacaaataaaaaaggaaaggagatgtttgaataaaaataattccccttcaagttcttattttttgagaggacaggacaatatgaatgttttattatgctctatcaacacattaaaaagattatatgatatatctgctgtggaagtaggtcaacatttctattggcaaatagggagtttccaagtacatgcccaagtacttattacttcttgggttgtaattgctctcttattggtttcagccattctaattattcgaaatctgcaaaccattcccgctatcggtcagaatttctttgaatatgttcttgaattcattcgagacgtgagcaaaactcagattggagatgaatatggtccgtgggttccttctattggaaacttgantctatttaattttggtt

SEQ ID NO: 215178 - DNA, 596 bp, Glycine max
ctctgaacaatggcgtctctctctcacctcaacaaactcctctgcatgcccccgctcaactcttcaccctctatttcgccaccacgcagcagcgtcggaatttggaccaaacctgtcggaaggccgaggctactggtgcgtgtccgagcggtcacgagcgacgacgagtgggggccggagaaggaggaggcgtacggcggcggcgtagcggtggaggagaaaccgacgaagtcggagacggagacggagaagctgaagaaggccttggtggattcgttttatggcaccgatcgtggactgaaagcaacgagcgaaacgagagcggagatcgttgaactcatcacacagctcgaggccaagaaccctaaccctgttcccaccgacgccttgactcttctcaacggaaaatggattctcgcgtatacatcctttgcaggtttattcccattgttgtcaagtggaacactaccattggtcaaggtagaggaaatatcccagattattgactcgctgaattttaccgtccacaactctgttcagttcgctgggtccttggccaccaccttattagtactaatgccaaatttgatgttcga

SEQ ID NO: 215179 - DNA, 583 bp, Glycine max
  unsure (1)..(583): unsure at all n locations
ggaaagcaattggataccaagtggacaccaaggagaagttgatcagaaaggagaggcctttggaaaagggattaatagaaacaatgtatgaaactgattctactttgatccaatccctcactgaaaaaggccttgaagtcactgaagataaaaggcagaacctgtacaaggtcaaatgtgatgttgtgattgtggggtctggttgtggtggaggagttgcagctgcagttcttgcaaattctggtcataaagtagtagtccttgagaaaggagagtattttgtttcacatgattattcttcccttgaaggtccatccatggatgaacaatacgaatccggcggcattatgccgagtcttgatgggaagatgatgatcctggctggctcaacagttggtggaggctctgctgtaaactggtctgcaagcatcagaacacctgattctgttctgagggaatggtctaaaaaatataaaattccactctntggtagctccgattaccaatctgcgatggactcggtgtgcacaaggattggtgtaacagagaagtgcatgaaggaatgctttcagaaccaaattct

SEQ ID NO: 215180 - DNA, 565 bp, Glycine max
tgatgggcgtatggagaagttctactgggcaccaacaagggaagaccgcattggtgtttgcaccggaattttccgcactgatggtattcctgaacaggacattgtcaagcttgttgacaccttccctggccaatccattgatttctttggtgcactgagggccagagtatatgatgatgaagtgaggaagtggatttctggtgttggtgttgacagtgttgggaagaagcttgtgaactcaaaagatggacctccaacctttgagcagcccaagatgactctggagaagctcttgctgtatggtaacatgcttgtccaagaacaagagaatgtcaagagagtccaattggctgacaagtacttgaacgaggctgctcttggaaatgctaacgaggatgctattcaaaggggaactttcttccagtcttgaattggaggcaaagcaaacttggcaagttaatatttctgttcgtgaaggttgttgtactaatccaagtgctagaagtcgtgatggaacttgcgtgtaacattcttagcattcttaatgtcttacgtgcaaagagaa

SEQ ID NO: 215181 - DNA, 500 bp, Glycine max
gaagaatatagtgttaaagagagcaagttctgtttaacacagacgagctgtggtagcagctagcgggtgaaggtttttgcgccgcgccttatatcacaccgtcgtccgaaagcgtcgttgccgtgaaaccctagaaagaaacgacgacgtaaatggaggtggagcccgtggagccgcagtcgctgaagaagctaagcttcaagtctctgaagcgcgctctcgatctcttctctcccatccacggacacctcgctactcccgatgccgaaagcaagaaaatacgcactagccacaaggtgagcgtggagtatggtggaatcaaaagcactgccaatcaacctcctcctcgtcaagttagttctgccacccaggatccagggtcctctaacactctggctcttccaggtcccggagattccaaggattctcagaaaggaggaccccaaaagccttggttgttggtccaactatcccatccacaacaccgaatgatactggtt

SEQ ID NO: 215182 - DNA, 533 bp, Glycine max
  unsure (1)..(533): unsure at all n locations
tcgagttaagccagaactccctttgcccgtaatcccagctgaggcggaacagtccgtccttgaggatttaaggaaccgtgtacagcttagcagtgatgcattgccatcagttagcttttacacatttatcaatactcataatggtttaagctgttcttcaatatcccatgacggatcattgattgctggaggatattctgactcatcactgaaggtttgggatatggcaaagcttggacaacaacagaccagttctctttcgcagggtgagaatgaacaaatatttgggcaaggtggtgggaaaagacagtatacattgtttcaaggtcattcaggccctgtttatgcagcctcttttagtcctgtcggagattttatcctttcatcctcagcagactcgacaattcgattatggagcacaaaacttaatgccaatcttgtatgtnataagggtcacaattaccctgtctgggatgttcagttaggcctgtggggcattaaattgccagctcggtacatgacagaactgctag

SEQ ID NO: 215183 - DNA, 526 bp, Glycine max
ctgccactcatactcattttgcgaaaccggctgaagtatgctctgacataccgtgaagtcattgctattctgatgcagcgacatgtccttgttgatggcaaagtcaggacagacaagacatatcctgctggtttcatggatgttgtatcaatccctaaaacaaatgagaactttcgcctgctgtatgacaccaaaggccgattccgtcttcactcagtcatagatgacgaggctaagttcaagctttgcaaagttcgctcagtgcagtttgggcaaaaaggtatcccatacttgaacacctacgatggtcgcactatccgctacccagaccctctcatcagagctaatgacaccattaagttggatttggaggagaacaagattgtcgatttcatcaagtttgatgttgggaatgtagtcatggtgacaggtggaaggaataggggtcgtgttggagtgatcaggaacagatagaagcataacggaagctgtgagactattcatgttcatgatgccactggccacg

SEQ ID NO: 215184 - DNA, 408 bp, Glycine max
gaaaaagaaaaaaaagattctaaagaaatataactaatattctttagaataatcaaaaagaatattaaattcaaataaattttagatagaaaaaagacttaaaaaggaggatttgaaatgcgagatctaaaaacatatctttccgtggcaccagtagtaagtactctatggttcggggctttggcgggtctcttgatagagatcaatcgtttttttccagatgcattgatattcccttttttttcattctagttattgacacggaaaggggtgaagaagattatagatccaattaagtattaaatatatgtaattaatatgtaattaatctcctcttctttatttcgtcttttatttcttcttttttttacaattgtaatagaataagttaggaaaaaaaaataaaaa

SEQ ID NO: 215185 - DNA, 546 bp, Glycine max
caagagtttttttctttggcagaagaagctttgaaaatatggtctgagaaggccaaaaccttcagccctccacttttaatagtcatcagtgatgaaaattgcgaccctaaggcacttaaatatgctctgggcaaaggagccattgaatatgaggattttcttcaaagtggtgatcctgagtatgcatggaaacccccagaggatgagtggcagagcattgcattgggttacacatccggtaccactgctagtccgaagggtgtggttttacatcaccgtggagcttatctcatgtctctgagtggagctcttatttggggaatgactgaaggtgctgtgtatctttggacacttcccatgttccattgcaatggttggtgctacacttggacacttgcagctctgtgtggtactaacatatgccttcgccaggtaacagcgaaggcagtgtatggagccattgccaagtataaagtgactcatttttgtgcagcaccagtggttcttaacacactaattaatgccccagctgaggacaccattctt

SEQ ID NO: 215186 - DNA, 434 bp, Glycine max
tttgtgtaccttttgaaatattgtgacagatataaaacgtgttccacctgtccaaaatattgccatgtttatcgatgaatgcgacactttgatttcgaagtccgcttattatatccctaacccgaagtgctacttggagcatgcatcacaagaaatggctcttcttcagatcttagcacttgatgtcctttcggatcaccatggtttccttgatatgatttgacagaggatccgtatgatcacttattccatgaatgggtgatttcatatacatgcttcacggacagggcttactatcgagctgaccgtttacaaggtgacagagtagaagatccatctatctataagctctatgacttgtcatataacttatgcttgatcgaaaggttattatcatctagagttgacgaacgatatgaagcatgggtcattgc

SEQ ID NO: 215187 - DNA, 505 bp, Glycine max
acagcgtcgccgatgacggttcaggcgggtcgggttcggaccctgaaagaaggttctcgcggagaatcgggtttgggtccggtcgtgtactggatgttcagagaccaacgtgtgacagacaattgggctctgatccacgctgctgctgatgccaacaaagccaacgttcccgttgccgttgttttcaatctcttccacacctttcttggcgccaaatcccgtcatttagggttcatgctcaggggcttgcgccaattgtgccaccgtatgcaacactctcttcaaatcccctttttcttgttccagggagaggcagaggagacagtgccaaagtttcttagagaatgtggagcttcacttttggtgacggatttctcacctttgcgggaagtacggaggtgttaagaagagatatgcaagagggtaagcgattcggttgctgtgcatgaagtggatgctcacaacgttgtgcccctttgggtgcctctgataaattggagtacag

SEQ ID NO: 215188 - DNA, 490 bp, Glycine max
agaagctaccaatggctttgagaaagtgctaggaaagggagcttttggtattgtgtacgaaggagtcatcaacatgggttcccttactctcgtggcagtaaaaaggttgaacacttttctcttggaagaggttcaaaaggaattcaagaatgaactgaatgccattggcctcactcatcataagaacttggtccgtttacttggattttgtgagactcacgacgaaaggttgctggtttatgagtacatgagcaatggaactttagcaagccttgttttcaatgtggagaaaccaagttggaaactgaggctacaaattgcaactggggttgctagaggacttctatatctgcatgaagagtgcagcacacagatcatccattgtgacataaagcctcagaacatactccgtgatgattactataatgcaagaatttcagactttggattggccaagatcttgaacatgaatcagagcagaaccaacact

SEQ ID NO: 215189 - DNA, 492 bp, Glycine max
gaagaattcacatactgattcgccctctttcttctcttttttagtccaatgaccccccctttttttaagataatttttctcaagtgttaaaacttgagagattttgcaatggatataagaactggtatctaattcgaataagtatcattcttttagggaatcttccaattgattgaccaatccagataatatatggatatatatatatagatagatctatctatatatatatctaactaatataggaatcttagaaagataattagtctattcataagaggagatgagatcatatgaaaaatataaccgattctttcctttgtttgggctactggccatccgccggaagtttcgggtgtaataccgatattttagcaccaaatctaataaatcttagtgtaatgttaggcgtattggttttttttggaaagggagtgttacgtgatttattagatgatcgaaaacagagaatcttgagaactattcgaaact

SEQ ID NO: 215190 - DNA, 463 bp, Glycine max
cattcgaattcattttatttatatattaatattatattcaaatgaaataaaaagatattaaaagatactaattataagaatttgaaagtgaaattataaagttattaaatgattaatcaatttttttctacctgttcctgtagtaaaaagagttccatctgttcttgaatagcttccttcaaaaggacttctgcttccccagtgaatgtcttggtagaagatatgatttctttgaattgaggattatgtctgtttaagtaagcacgtaactcaacaagaaatttccttacctgtccaatttgtaatgaatcaagataaccattcgttccagtataaatagttattatctggtcttccacggttagaggagctgattgggattgtttaagcaactcgcgcaatcgttgacgcttgacaattgattctgagtagctttattgagatcagaagcgaattgggcaaa

SEQ ID NO: 215191 - DNA, 512 bp, Glycine max
tgcaaaactggtgggttgggagatgttcttggaggtctaccaccggcattggcaggttttgggcatcgagtaatgactattgtgccgcgctatgaccagtacaaagatgcatgggatacaagtgttgtaattgaggtgaaagtaggagatagaacagaaaaggttcgcttcttccattgttataagaggggagttgatcgtgtctttgtggatcacccttggtttcttgaaaaggtatgggggaaaactggacaaaaactttatggaccaacctactggaaatgattacgaagacaaccaactgcgttttagcctcttttgccaggctgctttggaagccccaagggttctgagtcttaattccagtaaatatttctctggaccatatggtgaagatgtcatttttgttgccaatgattggcacactgcccttatcccctgctacttgaaaagtatgtaccagtcaaggggcatctatacgaatgcccgggttggtttttgtatccacaaca

SEQ ID NO: 215192 - DNA, 506 bp, Glycine max
atctagactattaagaaacgctttaatttatgctaatcttgaaagacctgcactcattacactgattcgaatagtgtaatttccgtgtccatgtacatttctataatctatttagaagaaaacaaaaatttggaagaaggatataaaacataatattaataacaagcaaggggctgggagaacttcacgagactcagactaggagaggcttccctcacatctttgttcttattattatggggttgccacattttcctttgcctgtggagcaatttcttctccatcacttccaggttcactgccaggaactcccaagcttagcagcacttcctcccactccttagcaggccccttccatgaaagatcttgagcatgcagttcttgataatttctgtaaaagctggagttccataaactgcaagggcccttttgacagtctttgatatagcatccacattagccggatccacagcatcacattcaacatttgaggcacccatctgaaa

SEQ ID NO: 215193 - DNA, 556 bp, Glycine max
cagagatttaaccttctttgttcgtagatatgcgcggttactgattagttgatgatagctgtcgacaaatttcacatggaaagagaacgaacacggaaacgcactcatgttggatgggaccgtgcccctccctcagtgtcccgggcacaccggactgtgccagtgcccggcgacgattaattcgagaggaggcacgtttcggcttctaaaagggaccacgatcgacagggccagtatgtcttcaatcttggcgaaaatctcactgctacatataaaatcctcagcaagatgggtgaaggcacatgaggtcgggttttggaatgttgggaccgccaaaccagagaatatgtggctatcaaggtagttagaagcatacggaaataccgagatgcagcgatgcttgagattgatgtgcttcaacaactagccaagaataatagaggaagctcccgatgtgtgcagatcagaaatcggtttgattaccgaagccacgtatgcattgtctttgagaggcttggaccaagcttatttgattttctaaagagaaataaatact

SEQ ID NO: 215194 - DNA, 433 bp, Glycine max
caacgcgactgagccactgctataaataataaagaaatggatacattcaaagttgtaacctgtgcaaccgacaatctttaaaatggaagccattcccaataatctggtttcttaagctcggattcctaaagaagatatgatcgagggcttggcaagctgtaaggcgtttggtcggatcatatgttaataaaccatgtaacaagttaatcgaggaggaccttgaagagaccacatttggcgagacaatagccttaagaggaccaagcttcttgactgcactaatgctgtcccttggaacaacttcttctggccatcttagacgctatccacgcttggaatatttatctgcgcccttgttagacctgcgaatgatgagctctgggatagatcccaaaacattttccatcattgccaggtgctccaagatttcatg

SEQ ID NO: 215195 - DNA, 531 bp, Glycine max
cacaagtacataaattccgattttctccctggaaaaatggcagcctctgccggcggccagataactctctcgtcaaccgtccagttacatggagtgacttgtaataggaattggaagcttgtgaagttctgtaatggggaagtcatgggacgtaagcttttgttaaaaaatggtggtggcagcactaaggattttaagcgccaacaacaacatatatgcatgtctctcaccgctgatgtgtccactgaatctaagttgagagacctagatatggaaagaaggaacccaaggacagtgttggcagttatactaggtggaggagctggaacccgtctcttccctcttactaagcgacgagccaaacctgctgttcctattggaggagcttacaagctcattgatgtgccaatgagtaactgcatcaacagtggtatcaacaaggtgtatatccttacccagtttaactctgcctcactcaacaggcacattgcacgcgcttacaactctggtaatggagtcacctttggagat

SEQ ID NO: 215196 - DNA, 595 bp, Glycine max
tacaaagcagatcctgaaagtataactgatgaagagagatttatgtttcgcaaattaggattgaggatgaaagctttcttacttattgggagacgtggggtttttgatggtactattgagaacatgcacttgcattggaagtaccgggaactggtcaagataattgtgaaggctaaaacctttgaacaagtaaaaaaaattgcactagcacttgaagctgagagtggaggtgttctggtctcagttgacaaagtttcaaaaggatattctgtaattgtttatcggggtaaggattaccagcgtccttcaacattgagacccaaaaatctattgacaaagagaaaggctttggcacgctcaattgagctccaacgacatgaggcactcatgaatcatatttcaactttgcaaagtaaagtggggaggataagatccgaaatagagcaaatggagaaggtaaaggacaaaggagatgaagcattgtatgacaaattggattctgcctatcctagtgatgatgagaactcagaggtggaggatggtgagcagggtgatgaggcatatctcaagacctataatagcgaaaatgatagtg

SEQ ID NO: 215197 - DNA, 570 bp, Glycine max
  unsure (1)..(570): unsure at all n locations
acaggatagaaaatttgaatggagagtggtgaagactattccctgtttgagactaggaaagacaaaggaaggcacattcgaaggatctatgcaatctctttgtttgtggccatatgcttcatctgggcttacagattgagccacatacccgcatatggcaaatgggcttggcttggtttgtttgctgcagaactctggtccggtttctattggctctttggtcaagccctccgctggaacatgctgttcagaaaaaccttcatcaatagactctctgaaagatatgagaatagcttgccgagagtggacatgtttgtgttcacggcagacccaatcattgagccacccatgatggtgattaatacagtgttatctgtgatggcttatgactatccagcagagaagctcagtgtgtatctctcggatgatgcaggctcagacataactttntatgctcttttagaggcttctacctttgccaagcattgggtgccattctgcaagagatttaaggtggaaccgatgtcacctgctgctttatttaatacccttgatcaacaaactcacacg

SEQ ID NO: 215198 - DNA, 506 bp, Glycine max
gacaacaactcctcgatgtccatttcggttcattactgcattcgccttttcaacaattcccctttctgggtaaaagacgacacaccccagaggccaaaacataacaaagaagcaagcaaataactaaaatatctcagtcctgaaacaagaattaacaaaaacaactacaaaggaacgacaattagcatgggagtcttggttgttcttcaagcgagtgtaggattctctgcaggagaagtcctccacacgatatctttaagagctggacgaagctccttgctacagaactggttatactccaaggtgtcaccgttgtccttcttaacctccaccaccaaaaacgacggcgtcacggcgtacaagttcgcagcaatagcgagtttaccttttcgccctttttcttgaccctgcaacctcaccttagtctcgctcttcttcacgtcgaacttcaccgccttcgccaaatcttccaatctcgaaatcacgctgctcgcggagcgcgtggt

SEQ ID NO: 215199 - DNA, 461 bp, Glycine max
gagcataaatcggaaaaaaattttattgacactttattttctccctttacaaactacaaaatttagaactatactgaaaaaaagagaaaaaatacatttaaaatctggcatcctcgaagccatgcaagtcactgactctgttcatagactttctcataatagccactttagccagtctctcagctactctccaagccgacatcggcgtaagtggctcccccttttcatcgaagcaattattattacaactacttcttaacttttggctcctcagctcggcttgttcggattcgagccagcgcaagcactcatcaccctgttcgcggctcacagatgctcgagccgaggatagcaactcaagcgcgccagacacgtcgttacgagccatcaaccttctcgactcggctacggcgcgagcgctgacctggcaacgtctcaaccgttcgatctggggtcgcatg

SEQ ID NO: 215200 - DNA, 625 bp, Glycine max
gtttcgttttgccctttcttcaagccaacctcttcacaactcttctttgttcctttcttcctctcactaccaccatgatcacagtaagcgtaagatggcaaaaggagattttcaaagatgtagaacttgacactacccagtctgcttatgtttttaaatgccaattgtatgatttgactggtgtgcctcctgaaagacaaaaaattatggtcaagggtggtcttttgaaggatgatgctgattggtcaacagtaggggtgaaagagggtcaaaagctaatgatgatgggtacagctgatgaagttgtgaagactcctgagaagggaactgtttttgttgaagatcttccagaagaagaacaagtagttgctgttggacatactgctggtcttttcaacttgggaaacacatgttatatgaattcaacattgcaatgcctccattccgacctgagttaaagtcagctttgactaattattcacattcaggacgaaacaacgatgtcgatcaatcttctcatttggtgaccattgcaacccgtgacttgttcaacgagcttgataaaagtgtgaagcctgtggcgccaatgcaattttgatggtatgcggaaaaatatcctcatttg

SEQ ID NO: 215201 - DNA, 542 bp, Glycine max
acagaaatgtaacttgatattcaagtgcctcttggaccctgtagatggaaggaaggagattcagggtaccgtgcttcaattcaaatccttatacatcctttaaaaaaaatgcaaaaactaaaataaataaacacttttttttgctcggcaaaataaataaacactgactaatgagagcatcaaacctcaggagtacaatacaaataatgacccggataaaccatttctcactcaatccttgaatctctgaagtaaacaccaaatcagctcctcttcctagcaattacacagatacaacacgagccttgtacatgattatatacgccatgtgccaatcacctcctccggataggctagctatgtcttcttctacttttggtttgggattgtcatcgccaaactctatccatttgccattttcttgcttgacccaaccaacataatgtcctgaatcagcacttctggccttgtgggttaatacagcaaccaaatcataaattccaatcatctgtgtttccttttcaccctcctccatgggaact

SEQ ID NO: 215202 - DNA, 619 bp, Glycine max
ctgagttcaattacaacctaggaactctcacatcttcttactcttaattttctcttcagaccactcagataatggcaagcactcctagcattccatcacacataaaagcttgggcttattctgaatatgggaacacagaagagattctcaaatttgaatctaacatacctataccagacatcaaggaagaccaagtgctcatcaaggttgtggctgcagcccttaacccagtagattataagagggctcatgggtttttgaagaacactgattctccctttcctactgttccggggtacgatgttgctggtgtggtggtcaaagtgggaagtcaagtgagtaaattcaaggttggggatggggtttatggtgacatcaatgaagatcctgtgaataatccaaaggccattgggtctttggcagagtacactgctgttgaagagaaagtgttggctcacaaacccttcaatttgagctttgttgaagctgctagccttcctttggccatcataactgcttatcaaggatttgaaaaggttgagttttctgctggcaaatctatactagttcctgggggtgctggtggagttggatccctagtgattagctcgcgaagcac

SEQ ID NO: 215203 - DNA, 411 bp, Glycine max
ggaccaattgagtcttattatttatattgcaaccaaaccacaagccaagtatctaattttcaccaccacaattctgaaagagatattcacgtttgatcacgcaaacataaattatggaatgggatgtatgaccactttcccaatggctttattagtcttcaagtgtgcaaatgcctccacggtctgagaaaatggatagggacttttagggtccaatattggcttcaccttcccactctctaagtaaggttttagtttctccaacacagtgccatctgaaattcggctgaagaatatagcttcaggatgtccaaatctcactattggcacaactttgccactttgtttaacagccttcaatgccttctcagtctcactttctctactgcgtcgtacactacatcaaacttc

SEQ ID NO: 215204 - DNA, 593 bp, Glycine max
  unsure (1)..(593): unsure at all n locations
ataagctccagaccttctaattctctactctctcacttctttctatcacattttacttgcaagatggcagcgtcatcagcatgccttgtagggaatggtttatctacacggggtaatagaataactctcaagaaggacttcaatggaagatatctctactcaccttggagactttcatcattgaacaataaggcatcagaagcattttccataaagtcttccttggagcagaggcagcagcaagaagggagaagggggtttctaaaactgttgctaggaaatgtgggagttggtttgcctgcactattggcaagtggcaaagcttatgctgatgaacaaggggtttcctcctgcagaatgtcttactccaggtttctggagtatttggacaaggacagagttaaaaaagtggatctgtatgacaatggaaacactgctgatgctgaggctgtttctcccgagttggggaatcggttgcagtatgttagagttcaactccctggacttaaccaagagctccttcagaaattcaggganaagaatattgactttgcagctcatagtccccaagaagagtaagttctcttttagct

SEQ ID NO: 215205 - DNA, 576 bp, Glycine max
cccttatgctgttgatggactagagatatggagtgctatccagacatgggttaaggactacgtctccttgtactatgccacggatgatgcagttaagaaagactcagaactccaagcttggtggaaggaagctgttgagaagggtcacggtgacttgaaagacaagccatggtggcctaagttgaacactcttcaagatctgattcacatttgctgcattattatatggactgcttcagcactccatgcagctgtgaatttcggacaatacccttatggcggtttcatcctaaatcgtccaactctaaccagaagattgctcccagagccaggaaccaaagaatatggtgaacttaccagtaatcatcaaaaggcttatttgagaacaattacaggaaagactgaggcccttgtggacctaacagtgatagagatattgtcaaggcatgcttctgatgaggtctaccttggacagagggacaatccaaatgggactgatgacacaaaggcaattcaagcctttaagagtttggaaacaagctgaagggaatgaggacaaatctcaggaggaacaga

SEQ ID NO: 215206 - DNA, 536 bp, Glycine max
  unsure (1)..(536): unsure at all n locations
atttcttaattttcttgattgcgagagtcagtagcgaaatccccccgaaatgatgaagggtctttctttacattgattgtcagtttgccactttctactttccatcatcgccttgggacttatccttcttaaacccatttccttcacttccatttcatgcgaaaaagccttacttgattcttcgaaaaggaaggaacttgggacttgtttctctcagagatggcgttgcctaaggttgatttcgaggttggagctgatggggttgctgtcatcactatgtgcaacccacccgtcaatgctttggccattccaattatcatggggttgaagaacagatttgatgaggcagctaggaggaatgatgtgaaagctatagttttgactggcaaaggtgggagattttctggtggatttgatatcagtgttatgcagaaggttcaccggactggggattcctcgcatctncctgatgtctcagtggaactagtagttaattcaattgaagattcgaagaagcctgttngtgcagcagtagc

SEQ ID NO: 215207 - DNA, 507 bp, Glycine max
atttagaaaagttgaagaatatgttaccactattcatcaaatgttgtgatgatctgattagcaaatgggagggaatgttgtcttcagatggaacgagtgaaacagacatatggcctttctttcagaatttggctagtgatgttatttctcgaacagcatttggaagtagttatgaagagggaagaagaattttaaaacttttaaaagagcactgtgctctcacaacacacttttctgtagaggtaccatcctggatggaggtttgtacctactactacaccttgaagggtgaaagggaaatcacccccagattatagaaggcttcgcttatggatatgattaacatgagagacacagttttaagggcgggatgccccactaataacctcgtgagagatacacttgtggtgtcaacccacggggaaattcaagaccagggaaataagaatgttggaatgaatcttgaggaagttattgaggaatgcaagctattctactttgcagggc

SEQ ID NO: 215208 - DNA, 455 bp, Glycine max
gcttaaaggaaatcatatgcatttctcattaatactaaagaaaataaactgataatagtgatatgaaaaggtttgaatctctattgttgaaatgttattacattataaactttcaatatgagctaataattattttttcatatttccaccttatgtagaatgagatgagcaccatgttggggttgaagagtaataacggaagttggagcatgagtataggttggagaaagttcaaacgagaaacgttgtaagatcattgacaaagcagtctttgctttcaaaaaggaaaagttttgtccgatgcatattctaggaccccctccaaaggcaaaaaatgaaacccttacatttgtggcctttagaagtccttcagaaaatctctccggtttgaactctttagcatcattaccccaaagctcacaatcatggtgaaccaaatctattggcaaggaaat

SEQ ID NO: 215209 - DNA, 418 bp, Glycine max
gttaagtctgcgaattacaccaggggaagtttcattttccccagtgctcagccatatccccatcgcaacttttctgaggaagttgctattcttgatggctactacggccaactcgttgctggaagcaatgcttatattttgtgtggccaagacacagcacagaactggcatgactactctgcttccgcagattctgcatctcaatgtgacaatgtttacactcttaaaatgtgcatgactgtcctggatagacagaacgcacagtatttctacacaaaacattgtgttagatctcatggcgactgttaattcgcgcattagaaaaattcttacagattccgagactttgtgactttgactttgaaccatgtggttattcaatgaacttctgtgaacgcgcctgtgtttctacgattgt

SEQ ID NO: 215210 - DNA, 628 bp, Glycine max
ggttccttaaagatccaacttggtcggagtaaacatggcggctagtggaagttccttttgcaacatcactagcttccttcgcaaccaacaaccctcttcccaacctctcgattcttctctcttcctctctgctccttcaatttttgtttcatgttcgagatccatggtgagttttgaagcagaaggagggaaggggtgtaacggctccttcttccgcgcgtttgacatggacgacaatggggacgagtgcatggatgagtactttcataaacccgagaagaagcgtcgtctctccatgaaccaggttcagtttctggagaagagtttcgaggaggagaacaagcttgaaccggagagaaagaccaagcttgccaaagaccttggtttgcggccacggcaagttgctatttggttccagaaccgtcgagctcgctggaagaccaagacgctggagaaggattacgaggctctgcatgcaagttttgagaatcttaagttcaactatgacagcctcctcaggagaaagacaacttaaaagctgaggtggcgagcctcaatgagaaggtgcttgcaagagggaaacacgaggggcacatgaagcagcaggctgaaagtgaagaagaaacaa

SEQ ID NO: 215211 - DNA, 536 bp, Glycine max
aaatgaaatccatagttacattctcaacgagaagacattatttaattacattggaaccaacagtttgattacaagtactaacaaaatgaggcaaaaagaaaacaaacatttctttcctgataaagctaaagctatagccatttttgaagcctggacaaaaagtgcaaatactaaatactaattactaaaaaaacatatgacacaaacacacacatgaacatggaagaaaacttagtatgcccaggtccaaagggcgtgatcttcctcagaaaatccaaaattacaagaactttcaggcgggtcggagtaatccacatcttcttcaagtttgggaaagaggtacgaagggtagagacttttgctgaggttatcttcttcatcttgagacatatccgattgatcatgctcaaacacataagaagaatcaccatgctctagcagtgcggagttaactcatcggtgtaatgaggactatctgaatccaaaatatcactcctggctgaactgatatcttcctgtatacaacccccgacaac

SEQ ID NO: 215212 - DNA, 552 bp, Glycine max
  unsure (1)..(552): unsure at all n locations
cttcaacttcacccattcatacgtggtgttgttactgctgctcttttctcttttcttttctctttagttctctcttcccctttctttttctttttcttcttcttctgagcttgtttaagcttttcttccattaacatattatcacaatgtgtggtattcttgctgttcttggttgttctgatgactctcgagccaaaagggtccgcgtgcttgagctctctcgcagattgaagcaccgtggccctgactggagtgggctccatcaacatggtgactgctttttggcacatcaacggttagccatagttgatcctgcttctggggatcaacctctctttaacgaggacaaatccgtcattgttacggtaaatggagagatttacaccatgaagagctcangaaacaagctgcctaatcacaacttccgaactggaagtgatggtgatgatattgcacacctgtacgaggaacatggagaagactttgcggacatgctggagggattcttctaattggtctactggacacccgtgacaacagttttatagtggc

SEQ ID NO: 215213 - DNA, 536 bp, Glycine max
gaactgataaaggaaacacttttattaagacttcaaatcacagcattcaagataatacaatacgcaacactttttagaaagccttataactataaactataaaagctttgcccagatgaaattacactgcaggcaaatttttcattcacctttagcttagttatcttcattggcgcccaaattattctttgtcacatctttgtattagccctggatggcaacaccaaggggagcagcatccataggtattatcttctcaatttctacacccttgttgttctggttttcataggctgaaatgtgcactccaagtgctgctctaccagagggatcaagggttgttagaccaagcagcatcccactcaacagctttggctgtgctacatgcaacacttgctcctccagaacagtgagcctagctgagttctgggggaagaacctctaaagatcattctgtagtaatatgcttcttggtttttggggtgttggggggggtaatggttaccagcattaagcatcattttttcagtcacatg

SEQ ID NO: 215214 - DNA, 495 bp, Glycine max
atttttcttcctcagtagtgtcatttacgcttctcttctctgcagcaactatgcctaaccctaaggtcttcttcgacatgaccatcggcggtcaatctgctggccgcatcgtgatggagctctacgccgacgtcactccgcgcaccgtcgagaactatcgcgcgctttgcaccggcgagaagggcgtatggcggagcggcaagcccctccactacaagggctcgtccttccaccgcgtgatcccgagtttcatgtgtcagggtggcgacttcaccgacggaaacggaaccggcggcgagtcgatatatggcgccaagttcggcgacgagaacttcgtgaagaagcacaccggtcccggcatcctctccatggcgaacgccggtcccggaaccaacggatctcagttcttcatttgcacggagaagacagagtggctcgacggaaagcatgtcgtgctccgacaggtcatcgaaggattgaacgttgtcaaggaca

SEQ ID NO: 215215 - DNA, 541 bp, Glycine max
agaaagagaagcattagcaaaagcaagaagaactagtctaagcagaaatggcctcttcagtgatggcatctgtggccctcaaacctgcccctttcactgttgagaagtcctcagttagaggccttccctccctctcaaggaactcctcttcattcagagttgtggccagtggtggcaagaagatcaagactgacaagccttatggaattaatggtggcatggctttgagggaaggagttgatgcatctggcaggaaaggaaagggaaagggcgtttaccagtttgtagacaaatacggtgctaatgtcgatggttacagtcctatctacgacaccaaggactggtctccaaccggtgatgtctacgctggcggtacgactggcttggctatctgggctgtgactctacttggtcttcttgctggtggtgcactttttgtctacaacacaagtgctttggcgcaatatactttgcacatcgatgttttaagctcaaacttagtccatgttactatctaaaaatgaagaattattcatgaagt

SEQ ID NO: 215216 - DNA, 496 bp, Glycine max
gcacgttccgagttttctgatcgctcatagagagttcgacgcggcggttgcagaagaagattgcaagatgaagttcaacatcgcgagtcccaccactggatgccagaagaagctcgagatcgacgacgatcagaaactacgagcattttgggacaagaggatctcacaggaggtcagcggagatgcacttggtgaggaatttaagggctatgtcttcaaaattactggaggttgtgacaaacaaggattcccgatgaaacagggagtgcttactcctggtcgtgttcgacttttgcttcacaggggaactccttgcttccgtggatatggaaggcgtaatggagaacgtatgagaaagtctgttcgtgggtgcattgtcagcccagacctctctggtttgaacttggtaattgtgaagaagggtgagaatgatttaccaggattgactgatgctgagaagccaatgatgagagggcccaagagagcttccaaaatc

SEQ ID NO: 215217 - DNA, 547 bp, Glycine max
  unsure (1)..(547): unsure at all n locations
gaaagccttagggctacagaaaaatgtggggtggcctaaggagattcaaagggaggaaaatcttcccccgttggcctactatgttattagggacattctaaggaaaggtttgagtgaaaatcctaatgcaaagtttatcattacgggtcatagtttgggtggagcactcgcaatcttgtaccctacgatcatgttcttgcatgatgagaagttgctgattgagaggttggaagggatctacacgtttgggcaaccaagagttggagatgaagcatatgcacagtatatgagacaaaaattgagggaaaattctatcaggtattgcaggtttgtttattgcaatgacatagttccgaggttgccctatgatgataaggacttgctcttcaagcactttgggatctgccttttctttaacaagcgctatgaactcaggattctcgaagaagagccgaataagaactatttctcgccatggtgtgtgatacccatgatgttcaatgcttgtntggaactaataaagagctttaccatagcgtacaaaaat

SEQ ID NO: 215218 - DNA, 599 bp, Glycine max
aattgaagttgaagtcttgcccttctctcttcaactccaaacacaagacatcatcatccatggctgcctccgtctccactgtcggagctgtcaacagagctcttttgaacctgaatgggtctggacctggggtttcagctcccagttcatccttctttgggagcagcttgaagaaggttattggctcaagggtccccaacacaaagatttcctctggaagcttcaagattgttgctgtagaagagaagaaagagattgaagagacccagcagaccgacaaggacagatggaagggtcttgcctatgatatctcagacgaccaacaggacatcacaagaggaaagggtttggttgactcccttttccaagctccacaggatgctggaactcactatgctgtcatgagctcctacgagtaccttagcactggacttcgccagtacttggacaacaacatggatggattttacattgctccagcttttatggacaaacttgttgttcacattaccaagaacttcatgaccctgcccaacatcaaggttcctctcatctttgtatctgggaggcaagggacagggaaatctttccatgtgagc

SEQ ID NO: 215219 - DNA, 436 bp, Glycine max
ttgttcttttttttttttttttttttttaaattttttttttttttttttttttttttttttttttttttttttgggccaaaaggaaatggcccccaatgtaaattcagtggaccttttaacttaaaaatgtgggggaacaccaccccatgttaaaaatatgccaaaaacttttcaaaatggggcttttttttttgcgcctaagacattggtaattttaagaatgttacgcccaagatccacaataactttttttgtttgggacagggcaacctttgggaacggaaattttttcttgcccaggttggtttgtcccctagtccatagtgtaaaaaaaatgcccatgcaaaaacccatttgctaagatttaccaaggtgccctgggcaaaattcttttacccccattggaccttcctgacattttattggacttggaaa

SEQ ID NO: 215220 - DNA, 355 bp, Glycine max
gccaaggttgaaaaagagtccaagaaacaggatgaaggtgtggttgtgaacaagtttaaacccaagaccccttacattggtagatgcctgctcaacacaaagatcactggggatgatgctccaggagaaacttggcacatggtcttcagcaccgagggagagattccttacagagaaggacaatcaattggggtaattccagatggtattgacaagaatggcaaacctcataaactgagattgtattctattgctagcagtgccattggtgattttggagattccaaaactgtttctctatgcgtgaaacggctggtgtacacaaatgaaaatggagaaattgtcaagggagtct

SEQ ID NO: 215221 - DNA, 398 bp, Glycine max
gacacagtgaagttggattcatctatattgcatcatccctcaaaaatagtactagtaaaactggcaatgaagttgttcatgaacagtttaaaaatcgtcaaagaaaaattacagggtcgtcatatatctacacaacgcaggagggttgatagacttgctgcagcataaagtaggagatgatatttgcgcacgtgaacagaaattaatagacttcgacattccattgctctgctttcttcaattgccttttgtactcagtccaatcaatgccatgtttggcagccaatgacaccataatgtcatcaattcccttttccattccttttagtccacacatgtacacacaaagtgttatccttcttcagtaattcccaaagctcttatgcgtattgagccat

SEQ ID NO: 215222 - DNA, 544 bp, Glycine max
cgattttatatcacctttcaattcgaattagcaaaagcaatgtctccttgcataatatggattccaaacatccatgatctggatgtgaatgagtcgaattacttatccctcggtcttttagtgaactatctctccagggattgtgaaagatgttctactagaaatattcttgttattgcttcgactcatattccccaaaaagtagatccggctctaatagctccgaataaattaaatacatgcattaagatacgaaggcttcttatttcacaacaacgaaaacactttttcactctttcatatactaggggatttcacttggaaaagaaaatgtcccatactaatggattcgggtccacaacgatgggttcaaatgtacgagatcttgtagcacttaccaacgaggccctatcgattagtattatacaaaaaaaatccatcatagacactaatataattagatctgttcttcatagacaaacttgggatttccgatctcaggtaagatcggttcaggatcatgggatccttttctatcagatag

SEQ ID NO: 215223 - DNA, 603 bp, Glycine max
  unsure (1)..(603): unsure at all n locations
gaagtcgtctagtagtaagtcccttttgtacgaagctcctctcgattacaccattgaagacgttcgaccacacggtggaattaagaagttcagatctgctgcttactccaactgcatccgcaagccatcctgagattccctaggttgtgtgacgacatagcccccgtagtcttgcatctgctatattattctagtctcttcttttcccttttcttgttctcttccttgcccttttgttctctctacctatacagcaagactttgtttctttttgagtcaagatggctggctcagctattggtttcgaaggctacgaaaaaagacttgagatatcattttttgaaaatggtgtgtttgctgaccccggaggattaggcctccgagcattgtccaaagaccaattggacgagattcttaaaccagcagagtgcactattggtgcatcactttcaaatgattatgttgactcttatgttctgtcagagtcaagcctgttcgtctatccttataaaattatcatcaaaacttgtgggactaccaaattgcttctgtccatccctgtcattctcaagttggctgatgctctngacatagctgtgaaat

SEQ ID NO: 215224 - DNA, 447 bp, Glycine max
ctcaaacacacacagtgtgcagcagcatgagctacatcatgagaagaagatggctctgcaactatgggagacattgaaggaggccatagttgcctacacggggctctccccgcccaccttcttcacccttctggccctgatcctagccctatactacgtcgcttctgggctcttcccctcttccgaccaccgtcacaacaccgcctcgcgcgacttggagccccagatggagcctctgcgaccccccgttcagatcggcgaggtcaccgaggacgacctcaaggcctacgacggcaccgatcccgagaagcctatcctcatggccatcaagggccagatctatgatgtttcccagagcacaatgtcttatggacctggtggaccctatgctctatttgctggcaaggatgctagcagagctttagcaaacatgtcttttgaagagaa

SEQ ID NO: 215225 - DNA, 517 bp, Glycine max
tgacaaagtaaggtttgtttcatcaaaaagatggtggcacccattgctgtttcttctccaaagtccacacttttgcagaaccccatctgttttggtgactcaagttcaagttttgttggggggtctttgaagggtctttgcttcaatctgaaacgaaggcaacaaagaagagaattgaccaatttggttgttgcttcatccacctcaagtgttacaaatagcaatgctagtggcaggttttacttcaacatcactggttttcctttcccacttggtccttttctcaacaggcgcactattaggactgaggctgtgaaggattgtatatggctattcgaacaagagcaggcattaggcttcagcagtgtttccacaaacattagaatgacagttatcaaactcaaatctgggggcttatggatccatgcacccattgctccaactgatgagtgtattcagcttattaaagaattgtgggctccagttgaatatattggtctccctacttttgcttatg

SEQ ID NO: 215226 - DNA, 464 bp, Glycine max
gcaatgcaggatatgcccctccaagcaatacaggcgggtaccctcctagcaatgcaggatatgcccctccaagcaatgcaggcgggtaccctccgagcaatgcaggctatgcccctccgagcaatgcaggctatgcccctccaaatacagctggatattcttctccgaacgccgcaggaggttaccctcctaatgcaggtggtggctatggtcctggcggtggtgtgcctcagaataactacgcagggaacatgggagggccaccatcaaaccagaacatgggagggtttcaacaaaattcaggatggtcgaacaatgctcccagtagagatgtgccaagcagggatatgggaagaccacctggtgggaacccatattctgggtgagatcactgcagatttttctagcccatgtagataacgaagaattgtgcccaagaaagcagagtttatgctatgtttctc

SEQ ID NO: 215227 - DNA, 592 bp, Glycine max
aacaaaaactcccgttttctctctctgtttttccatggccatctgatcaaacttttcttgattctctctctcagtttttgctattctgagtgatgggtatgccctgccgctgttcccacacctcccacatcactgaaatcatcatcaccagcttcttccgccacaagtcttaaattacaacaatttccctcaattattcatcaaccaaccaccttaatagccttttccaatggttccttaaagatccaacttggtcggagtaaacatggcggctagtggaagttccttttccaacatcactagcttccttcgcaaccaacaaccctcttcccaacctctcgattcttctctcttcctctctgctccttcaatttttgtttcaggttcgagatccatggtgagttttgaagcagaaggagggaaggggtgtaacggctccttcttccgcgcgtttgacatggacgacaatggggacgagtgcatggatgagtactttcataaacccgagaagaagcgtcgtctctccatgaaccaggttcagcttctggagaagagtttccgagaggagaacaagcttgaacccgagagaaag

SEQ ID NO: 215228 - DNA, 465 bp, Glycine max
ctcgacccgaatcagcactgcactagtcctacaccgcctgcgctatacctgatcaacgtctggtgtgtcgctcctgaaggactgatacgtgattttaatgaaatcctcagcgccctggaacttaatattgacagacttcaaagggcaagcctgccactgatggaagggtgttagacgtgttctatatcactgtcgggatggtactgctgtacactaagaagaggccagatgatggatgtgaatacgccatcgacgcttatggagcaatgtgcattgacggactacttcaggtgtctggtcctgaatacggacatgtgcaaggcttatactcgcttgcaccatattatgctgatgagtaatctaagtctgaactgccagacgagtagtctgcgcatcctgatagtctagatgtgacagctctgaagacacctactaggactgtgagcaactgactgcgcccatatc

SEQ ID NO: 215229 - DNA, 597 bp, Glycine max
  unsure (1)..(597): unsure at all n locations
caagaattgaagcatattgatcttcagccatggctacacccttggcctaccaagagcaccttccggcggcacccgaatggctgaacaaaggtgacaacgcatggcagctaacagcagccaccctcgtcggtcttaaaggcatgccggtctcgtgatcctctacgccagcatagtgaagaaaaaatgggcagtgaactcagctttcatggctctctacgcctttgcggcggttctaatatgttgggtgcttgtgtgttaccgaatggcctttggagaagaacttttccccttctggggaaagggtgctccagcactaggccagaagttcctcacgaaaagagccatagtcattgaaaccatccaccactttgataatggcactggtgaatcaccttctgaggaacccttttaccctatggcctcgcttgtgtatttccaattcacttttgctgctattactcttattttgttggctggctctgtccttggccgaatgaacatcaaggcttggatggcttttgtgcctctttggntgatcttttcctacacagtcggngcttttaagtcttggngtggtggctttctctaccatggggc

SEQ ID NO: 215230 - DNA, 522 bp, Glycine max
  unsure (1)..(522): unsure at all n locations
catgacaaaatcaaatatctacttataccactcacggattcatcacatttgttaatcatataaataaatacacatgcatgtgtgagcaaggcacagcctaatttcttgactcataagtttatagtcacccctcttgcaccattaacataaggcgagacagtagtgttgccactttgcaaggaaccatgcctagttgggtcatatttttctccatcaccccaaagggcataagcttcctcaccgaggacggcgtcgtcaccgatttccagctgctcgaccggcatcctcaagggtatgaacaattttatgacagggagaataatggcggtggacaccaagttccatgcaataacaaacatggtcgacaccaattgcttgaagaactgcacaccaccacctncaccatagaatgcaccccttgaaattgctactggcaatagaagtctacaaagggctggttctgctaatagacctgtgaggagaccacccaaaaggccagccacagcatgtgtgtgaaacaca

SEQ ID NO: 215231 - DNA, 605 bp, Glycine max
  unsure (1)..(605): unsure at all n locations
attccctggagtgtgtggtgtggtgttgctgttgcaaattgcaacactcagtcagcactgcaccactgcatttcatttcccagcttagctacaactacaagcccacgtcgctttcataaaaccacacccacctgccaccatcactttccccaaaacgcaacatcatcaaaacttaaactcagagaatcagagagagagagagagagaaatgagtgaagaagccaaaaagaacttcgccggagctctaacggcgaggcccaactccgatgagccgaaaccggcaccggtgccagctgttcccccgaagaaggtcatcatcaagagcgctgatgagacccgacatgcagaatgagggccgttgaatatcgccgtcgccgcgtttgagaagtacaatgtggagaaagacgttgcggagcagataaagaaggagttcgataagaggcatggccccacgtggcattgtattcgtggacgtaattgtgcttatggggcgactcatgaaccaaaccactttggttatttctactgggatcagaaagcgggtttactctntaaatctggctaagcctaatgggtagcaaagaagtgagatctatgggaattgc

SEQ ID NO: 215232 - DNA, 460 bp, Glycine max
cagtgcatgcttcagcaagcttttttttaagatataatatttcctttttagaaaactcttctaaggtaatccttagattcatatccaaaccgataactagtttacatatcatccaatatacaaggacaagatcacaagaatgtcttgcaaagattttgagtgtcagtggaattaatacatgggggactgcatacagcagcataatcacaagacaattcccatagatctcaacttctttgctaccacaataaggctagccagatttaaagagtaaaaccgctttctgatccaagtagaaataaacaaagtggtttgtttcatgagtcacatatgagccaaaattacgttcaacgatacaatgtcacgtggggccatgcctcttatcgaactgcttctttatctgctccgcaacgtctttctccacattgtacttgtcaaacgcggcgacggcgatatcaac

SEQ ID NO: 215233 - DNA, 618 bp, Glycine max
tgacgagtcagatgcagaacatcacagctgcgagcacgcgtgcgcacgctcggaagctgggtcgaggaatcggattctgtagatttattgcccctcgttcccgtcttctttgtcacccttctcttctctccgaattcatcaatcacccaccgagttccgaccatggccgaatcggtggagcttccgaggcgatgggcgattcgcccgtgcaggaacaagggcctattgcccggcgccatcatcagaatccgctgcacttcccccaccagtgtgaagttggcggaacaagaactttggcagcgagaagagaaggggttgactggcatgcttccagtgcgtgatgccgatgaaattaagccagtgggtcccactgtatctgaaggagctgatgcaacaaaccagaactcaaaagttcagagcggttcatcggagtctcataagctcgatgcaccgaagcagaatgatgctcattggcataacaggggggtagctgctcgaccattacattgatcaaggggagtggagaaaccgagcgggagggtcacatacacaagttgacgctgaggcctgcgcagatatagtgtccaggaactgagcatgagacgaatataccatact

SEQ ID NO: 215234 - DNA, 274 bp, Glycine max
aaaaaacaaatcctttatagtatttcttgtaataaatgttgttattttttctaatgcagacattttcagaccggtggtagtgtgcctgagacaaattatcttcttaagggacacttctttgatcgatggttactttagtttttcagtttttaccattctgctcctctatacatagctagttctccaggttatattgctctatttcacggatatcatgacagtagacgatcaacccatcgcctatggattctatgatgagatgccactggaagta

SEQ ID NO: 215235 - DNA, 542 bp, Glycine max
  unsure (1)..(542): unsure at all n locations
atggcatcggatctcactctctcaagtctcaacacgccaccctcttcttcttattcagattgtcataacgaggaagcttgtttgcatatataatagagaaaatggtattgttgttagtttattacaggtttgagtggttggttagtacttcgtagaagttagctggtaacaacaaataagtaaatcttgactctatggaagactacaatttttctgttggtcaagagttccctgatgtgaaagcattccggaatgctattaaagaagctgccattgcacagcattttgagcttcgtactattaaaagtgacctgattcgctactttgctaagtgtgcctcagatgggtgtccatggcggattcgtgcagtcaagctccctaatgccccaacatttactattagaagtattgatgggactcatacttgtgggagaaatgcanacaatgggcaccatcaggcttctgttgattggattgtgagtttcatagaagaaaggttgcgagnatacatcaattataaaccaaaagatatttacatgaca

SEQ ID NO: 215236 - DNA, 462 bp, Glycine max
ccgacaaggaggattacaatggtgtctggaagcatgccaagagtgatgggcatgatgattatggacttcttgttagtgaacaagccaggaaatatgctatagtcaaagaacttgccgagtctgtcagtcttaaagatggaacagctgttcttcagtttgagactcgccttcagaatggcctcgaatgtggtggtgcatatattaaatatcttcgaccccaggagagcggatggaaaccaaaggaatttgacaacgaatctccatattctatcatgattggtcctgataagtgtggtgctacaaacaaggttcacttgattatcaagcataagaacccatagagtggggagtatgttgagcatcatctcaagtatccaccttctgtcccatctgacaaactaactcatgtgtacactgcaattctgaagcctgatcatgaatttgcaatcttgattgatgggg

SEQ ID NO: 215237 - DNA, 534 bp, Glycine max
aaaaaaggactcaatcacgaagcagaagaaacccaataagtatttctcatttttatggctcttgccctgaagtcaagttgcttattgcaattgaagaaacctgaggctggtttcaatgtttgtttttcatctaagaaagctataatctccgtgaaaagatacactccggtggccgctatcaggatcatggacgcagtgggactctctgcaacattcaccagattgaaaaaagaaggaaaagtggctttcatcccatatatcactgctggtgatcctgacctttcaaccactgcagaagcactgaaattgcttgattcatgcgggtctgacataattgagctaggcattccatactctgatcctttggcagatggtcctgttatccaggctgctgctacaagatctttagcaaaggggaccaattttaatgtgattattgatatgttgaaggaggttgttccgcaactgtcatgtccaattgcactgtttacatattacaatccaatactgaagcgtggtactgagaaatttatg

SEQ ID NO: 215238 - DNA, 514 bp, Glycine max
  unsure (1)..(514): unsure at all n locations
aattgaaccacattttattgaatccaatatctatgatgacaacaactattataagttcgagctcttaaaagcttatttttcaaggaagtgctgcttttaaggagcgggttaaaacttccagttctttcagtccctcttgaggagatttggcctcaccaagcaccttcactatagcactgccaacaatcacaccatcagctccccatcccgctacctgtttcacatgctcaggttttgatattccaaaaccaactgcgacaggtttagtagttgcctctttaatttcctgtagaagggactgaacagaaccactaacagatgcgcgggctccagtgacccccactgagctcacaagatacacaaatccttctgccacatcaacaatggctttcatttcgtctggtggagtgggggctggttgtgagggagtanccanttcaattccatgtttcttagcttctggccttaaagtttccgtctcctccagagggacatctggcactacaagcccatg

SEQ ID NO: 215239 - DNA, 525 bp, Glycine max
ttgggatgctgtagaagggatgcaaatgccaccatatttcgcaaaccctaactcgtcgctctatcacaaactccgaaaccccaagcacttgccaccgcaagtggttgacctgaactatgatccatttgctttatgatgaatcactttttatcaacaagcttcgtataatctagccttcatgtgcaagcaaatggtgctagcaagtaccaaagaattgttcatgggaagcccttttcgactcggcgataaccctactccgggtattggctctatagaggctgctcctcataacacggttcataaatgggttggtgctgctgataagccacaccaggaggacatgggaacgttctacacagctgctagagatcccgttttctatccgcatcacacgaactcggatcgactgtgggggatatggaaaaaattgggagaaggaagaaaggactatagtgatgatccagattgggtagattctgatttttacttctatgatgagaatgccaattttgttcgcgtgaaagt

SEQ ID NO: 215240 - DNA, 530 bp, Glycine max
caagaatctacttgccctcctggtactgttgacctcaccaaagatgatgatggtttggatacagtgggctcttgtgatattgtagaaagaaaacctaccccggcatctattcatagtcagtttgtcaccccaaatttaatctttccttgagtattgacctcttactggtgttaattacgaatgttgccactcaaatagatgacttttggcctggagttagatttgtccgtagtaagtctgataccccaacagttggtaattctgagctacctgttctgcctgatactgtttctcctacattcagtcagtaatctgctggtcatgacaataaccctgttgttaactctgccatgcataatcaatttttgggaccaaacaacttgcagatgcagatgaatcatatgaattcagttaacgagtatggcagatcatcctcagcaccaagacatattcataggactccggtagctgttcaggccctaccagtccaatctcaggcattgggaccacagcataattcaataactaat

SEQ ID NO: 215241 - DNA, 345 bp, Glycine max
  unsure (1)..(345): unsure at all n locations
nagggacagctgctcggtactctacgcgataatatcaggtcacgagctactactactcggccggcgctcgtccttttttttttttttttgggattctgatgttattaagggagcaaaaaactctaaaaaacgcatggccggttatcaccaaaattaatgttggcgcaagatctctggacacacatcttgtccaaagagtaagctcctgagagtgattattgaacaactccaatgagagagtggaacgttgcaaacacctatttttatggcaccttaattgtcagtactgccaacacatacgcagcaaggatgatcatactcgtgtggaaacccgggaaccataat

SEQ ID NO: 215242 - DNA, 543 bp, Glycine max
gcaatggccgtttctttggcagtgaaccgtcctctgcttggtcttcacgagaatgtaccattagctgttgctcatccccaattcctcccgttcaaatggccacccaagtccaaactcccctccgtcgtcggaattcgatgctcctcctcccctttcaacgacaaaaccctcatttccatcacacctaacacttcccacctcaatcccaaccctctcgcttgtcgctttcacgcttcccagtttggagaacaggagagcaacaaatacgtggaagcctatgctgtaggacgaaatattcgtatgtctgctaataaagctcggagagtgatcgatcagattcgtggacgtaaatatgacgaaacacttatggtattagaactcatgccttatcgagcctgtgaagccattctcaaaatagtgttttcggctggagctaatgctagcaataatctgggtttaagcaaaggaagtttagttatcagtaaagcagaggttaatgaagggaaaacaatgaaaagggtaaaacctgtagctcgagggcgt

SEQ ID NO: 215243 - DNA, 421 bp, Glycine max
ggaagactcaatcagtggagctagagtgctactctcagtggaagtcatctcgcgccagtatcaagaccactacagtatgcgattccttcaccaagtttagatgccttaatttctggtacgtcatcgtgtcagaaatacgccttgtcagaaagctgaagcaaggcatcaagagacggtacatgatgttgcaatggattactatggcaagaggatggccacgggttcatcagagcacacactttagataacaggcgtgagtaatacggcctctcagtattttacaacattgacaggtcatcaatgaccatgacggcaagtggcagctggctcaccctaatgttggttctctacttgcatcacgacactatgatggacgtgccaatgctcgacatgagggcaaacaaggactatggactccagc

SEQ ID NO: 215244 - DNA, 504 bp, Glycine max
gtgaacatgacgccctttctttgttctgtcaccatgcttttggacagaaatcaattcctatgggtgctaatgtgagtttgttgaagcaggttgtggctgagtgtggaaggcttccactggctctgaaggtgattggagcttctttgcgagaccagaacgaaatgttttggttgagtgttaaaagcaggctctcccaaggccaaagcattggtgaaacctatgaaaccaatctgattgatagaatggcaattagtactaactacctgccagaaaagatcaaggagtgcttcttggacctgtgttcttttcctgaggatagaaagattcctctagaagttttaatcaatatgtgggttgaaatctatgacatcgatgaagctgaagcatatgccattgaggttgagctttcaaacaagaatcttctcaccttagtacaagaggcacgtgtcgggggcatgtatagcagttgctttgagatttctgtcactcaacatgatatattga

SEQ ID NO: 215245 - DNA, 534 bp, Glycine max
gttccctttgatttcatgtgggaataatcgtttagcttccaataatgtgcaagatatagccaagcctgttagactaaatggatcctcccatgagttgcagaatggcttagattcagcaatgcgtcatactcacagaattttagcaattttagaggcattattttcattgaagccatcttctgttggcacgccttggagttacagctcaaatgagatagttgcagcagctatggttgctgcacatgtttctgaactatttagaaggtcaaaaacttgcatgcatgctctgtctgttcttattcgttgcaaatgggacaatgaaattcattccagggcgtcatcattgtataatctcatagatattcacagcaaagctgttgcatctatagtgaacaaggcagaaccattagaagcaaccttaattcatgtaccgatttggaaggattccctcgtttgtgttggtggtaaaaggcagaatcagtgtgaaagtagtagctgctttgcccctgagcagacatattgtgtaccttcaga

SEQ ID NO: 215246 - DNA, 150 bp, Glycine max
gagaaacagaaccatcaattttctctgccttctcattgtgcaataaaattcttaccttgaaaaaaaaaaaaaaaaaaaaaaaaaaaaaaaaaaaaaaaaaaaaaaaaaaaaaaacaaaaaaaaaaaaaaaaacaaagggccgccccccta

SEQ ID NO: 215247 - DNA, 548 bp, Glycine max
  unsure (1)..(548): unsure at all n locations
ctcaatctctctctctccaatggccaaagacctcgaaacggagattcaaagtgggttgcctcacaaggactaccacgacccaccccccgccccattctacgaccccgccgagctccgaaagtggtccttcttccgagccctcatcgccgagttcgtcgccaccctcctgttcctctacgtcaccatcctcaccgtcatcggctacaaccaccagacagccaccgccgccgagccctgcagcggcgtcggcgtcctcggcatcgcttgggcctttggaggcatgatttttgtcctcgtctattgcaccgccggcatatcagggggacacataaacccggcggtgacgttcgggttgtttttggcgaggaaggtgtcgctgacaagagctgttgggtacatggtggctcangtgttgggggccataagtggggtggggcttgtgaaggctttgcagaagagctactacaacaggtacaaaggtggcgtgaacatgctcgctgatggttacagcaaaggaaccgggttgggcgctgagattattggcacct

SEQ ID NO: 215248 - DNA, 518 bp, Glycine max
  unsure (1)..(518): unsure at all n locations
aacgcacatgtacgtaacacttaaaaatacatacacaaattaacatgggcatgtctgttgagatggacgtcaccacaaatatagtaaacataaattaaataaacatagtgacgaggatatacagattattccaatccaccatgtataagcaaattaattaagaacacaattaaatgaagcatgtctctcgtagctcaaatagcttggccagaattacaggtttgaggagctcctgaaagaccctagagcctttgctgcttgggccctcaacacggactggtggtagaatgcagcaagagcagcaccgatgaagggtccaacccagaagatccactggtcatcccaagccttctcgttgttgaatatgacagcaggcccaaggcttctagctgggttgatgccagtgccggtgatagggatggtggccaagtgaaccatgaacaccgtaaacccaattggaagtggtgccaacacggggacatgggagtctcttgctactctcttgngatcggtagcag

SEQ ID NO: 215249 - DNA, 599 bp, Glycine max
ccaaaccctaacacacacccatttgattcagtttccatggctagcctcaaggttgcatttttggctgcagtgctctgcatggttgtggtgagtgcacccatggcacatgcagctatcacgtgcgggcaggtgacgaatagcctgatcaattgcatcggttacctccagaacggaggaacgccgccgtcgggatgctgcaacggagtgaagagcctcaatgccgccgccaagaccaccgccgaccgccagacggcgtgcaactgcctcaagtcggccgccagccaaatctccggcttcaaagccaacaacgccgcctcgctccccggcaaatgcggagtctccatcccctacaagatcagcacctccaccaactgcgctaccatcaaggtttgaagagaaagtcatggacgcaggaaaccggaaactactcactagtatatgagtagcattattaatattaagaataagatcgagggtgatgagggctccacttatatgcccctctcctctcggatgagagattcgcattggatagctctaaattgtgttgcgtcgttatttctctgtatgagttacacatagttatatctactttaata

SEQ ID NO: 215250 - DNA, 586 bp, Glycine max
  unsure (1)..(586): unsure at all n locations
atcgggaacatcggcgacgcggcggagattctcgaaaacggcgccgtccagagcgtgacacacatcctctccgtcctcagctccgcctccatctccttcttctccgaatggaaaaccactctctccatccccgccaagggagatcaccaaagtccacgcggcggacgccgccgncaaatcggcgctcccgccggagaagctcctctactctctcgagtacgccggccgcgacctcaagctcgtgcgcatggccgtgcctctcagagacaccgagaaggaggacctgctcgattacttggaagcctgcatcgatttcattgatcgcggtcggaaggaaggttccgttctcgttcactgttttgccggagtttccagaagtgcggcggttattacggcgtatttgatgagaaccgaacgtctatctgtagaagatgcccttgaatcgttgaggcagagctgtgaatntgattgtcccaatgatggttttttagagcagttgaaaatgttcgaggggatgggtattaaggttgatcactccagccctatatacaagcgctttcgtctaaaattactatatgagaatcat

SEQ ID NO: 215251 - DNA, 507 bp, Glycine max
  unsure (1)..(507): unsure at all n locations
ggaagacgaaaagagagttgagagagagtgagagggagtgagagggagcagagggagcgaagagaagaaacaaagatggagactcctcctccccaacaaggcgtcgtgaagaagaaggagacaaggggccgaaaaccccaaaccaaaggacgaacacgggaagggtttgaaggaaggtaggaaaacacaacaacaacaacaacatcatcatcagcagcagcaacagcaacaagatcaaccttcggtggacgagaaatacacgcagtggaagtcccttgttcctgtcctctacgactggctcgccaaccacaacctcgtctggccctctctctcttgcaggtggggcccccagcttgaacaagccacttacaagaatcgccagagactctacctttctgagcagactgatggtagtgtgccgaatactctggtgattgcgaattgcgaggttgtgaagcctanggttgctgctgctgaacacatttcgcaggttaatgaagaggcgcg

SEQ ID NO: 215252 - DNA, 479 bp, Glycine max
gccaaccgtaaaaagcatgtctaaagtttcataaagatcataatgaattaacaatgtatgttccgctcagtgattggagaaatgagccacatgaaccacggatcatgatcttcaaacagaaaatagaattgtatcaattaagtaacactaaccacaaatcatcggcagatctacggtaatctagggtttccctactccagccccatacatgaatggttttaaaatgccctgaaacatccaccgcaaatgttaaattaaatgcaaccgcaatcataatataactcatttttgcctacgacgtatgtcatttttcagtctttgaagcacacgccacaacatgagatttgaatttctccagctcggccaaaaccttatcttctggtctggagatcaaatcactcatgcgccatatctgcaacgttccccctcctccagtactttcacaggcatgagacacactaacaatcgcccatggatca

SEQ ID NO: 215253 - DNA, 606 bp, Glycine max
  unsure (1)..(606): unsure at all n locations
aaagctttacgtgatcgagcaccataccctgccaatcgtgttgtatgccatctcagtgggagctttgctttcatagtttttgacaagtccacttctaccctttttgtggcttctgatcaagctggtaaggttcctctttattggggaatcacagctgatggatatgtagcatttgctgatgatgcagatttgcttaaaggttcttgtggcaagtcacttgcttctttccctcaagggtgtttctactctacagcagttggaggattgagatgctatgagaatccaaagaataagattactgcaatacctgctgaggaagaggaaatctggggtgcattcttcaaggtggaagggtcagcagtccttgcaggcacagagtaaaagattcattttcaaataaagtaccgtgtgatgtattaatggagtaatgtgtttatgtgcttgtgacggtaaggcttgcatgcggngccatgtaaatacctttaatgataactatgagaagaatgtgactggtagtagagtttatcatggtgttcattagctaggattttctctgtttctcttgacagttgcgctttctatgtaataaagatatgctttgggttg

SEQ ID NO: 215254 - DNA, 550 bp, Glycine max
caacaagttcatctgccatcagctcttccagagcatgatttcttgaatgatttggagcctttaggatggatgcatactcaaccaaatgaacttcctcagttgtcgcctcaggatctcacttcacatgccaagatcctagagaacaataagcaatgggatggggagaagtgtattatcttgacttgcagctttactcctggttcttgttctttaactgcatataagctcactccatctggttatgaatgggggcgtgttaataaggatacgggaagcaatccacatggttaccttcccacccattatgagaaggttcagatgctccttagtgatcgcttccttggtttctacatggttcctgataatggtccatggaattacaacttcatgggggtgagacacgcatcagggatgaaatatggagtgaagcttgggactcctagggaatattaccacgaggaccatagaccaacccatttcttagagttcagcaatatggaggaagtggagataactgctgagggagatcgagaggatacattctcttgag

SEQ ID NO: 215255 - DNA, 580 bp, Glycine max
gcaatggccgtttctttggcagtgaaccgtcctctgcttggtcttcacgagaatgtaccattagctgttgctcatccccaattcctcccgttcaaatggccacccaagtccaaactcccctccgtcgacggaattcgatgctcctcctgccctttcaacgacaaaaccctcatttccatcacacctaacacttcccacctcaatcccaaccctctcgcttgtcgctttcacgcttcccagtttggagaacaggagagcaacaaatacgtggaagcctatgctgtaggacgaaatattcgtatgtctgctaataaagctcggagagtgatcgatcagattcgtggacgtaaatatgacgaaacacttatggtattagaactcatgccttatcgagcctgtgaagccattctcaaaatagtgttttcggctggagctaatgctagcaataatctgggtttaagcaaaggaagtttagttatcagtaaagcagaggttaatgaagggaaaacaatgaacagggtaaaacctgtagctcgagggcgtgcccatccaattaaaagcgcactagcatataccatca

SEQ ID NO: 215256 - DNA, 506 bp, Glycine max
atttagttggaggggatcatagatttagggaatcgattactatactagtaataaattgtacaaaaaataaaaatataaataatataaatataaaaagaacaaacacaaattttatgtgaatagtcgcggtatttaaaatacagaatgaaaggagacaaataacaaaggaaaggagatgtttgaataaaaataattccccttcaagttcttattctttgagaggacaggacaatatgagatgatgattatgctctatcaacacattaaaaagattatatgatatatctgctgcggaagcatgtcaacatttctattggcaaatagggagtttccaagtacatgcccaagtacttattacttcttgggttgagattgctctcttattggttacagacattctaattattcgaaatctgcaaaccatttccgctatcggtcagaatgtctttgaatatgatcttgaattcattcgagacgtgagcaaaactcataatggagaagaatat

SEQ ID NO: 215257 - DNA, 532 bp, Glycine max
  unsure (1)..(532): unsure at all n locations
ctgtttctcaatcgttagatctcatcttatactcaccggcgagtccatctcgcgccagcgtcgacgccgctccggcaaccgctccggccaccgcctttggttccctcactttctcgtccttcttcttctcagaaatatgccttctcagaaagttgaaacgggtcatcaagacacggtccatgatgttgcaatggattactatggtaagaggctggccacggcttcatcagatcacacaattaagataattggggtgagtaatacggcctctcagcatctcgcaacattgactggtcaccaaggacctgtttggcaagtggcgtgggctcaccctaagtttggttctctacttgcatcgtgttcctatgatggtcgtgtcattgtttggaaggagggcaaccaaaatgaatggactcaagctcatgtgtttgatgaccacaagtcatctgtgaattcggttgcttgggcgcctcacgagttgggtctntgcttggcttgtggctcgtctgatgggaatatatctgttctgact

SEQ ID NO: 215258 - DNA, 505 bp, Glycine max
tttggaggtatatatgatacgtgggctccggggggcggagatgtaagaaaaataaccaatttgacccttagtccaagtattatatttggatatttattaaaatcaccttttgggggagaagggtggattgttagtgtggacgatttggaagatataattggggggcatgtatggttgggttccatttgtatactgggaggaatctggcatatcttaaccaaaccttttgcatgggctcggcgtgcacttgtatggtctggagaagcttacttatcttatagtttaggtgctatatctgattttggttctattgcttgttgctttgtctggtttaataataccgcttatcctagtgagttttacgggcccactgggccagaagcttttcaagctcaagcatttacttttctagttagagaccaacgtcttggggctaatgtaggatctgctcaaggacctacaggtttaagtaaatatctaatgcgttccccgacaggagaagtta

SEQ ID NO: 215259 - DNA, 547 bp, Glycine max
ggtttcaataactccaaaccatgctagttccatcaaactgaaccaactcaccccatcacagatgtttcaaattcaagcccgaatccaggttccacgaggccagtttctgagcccaaagcccattcccatgaagcacgtgcgggcttctccttcttcaaagcccacgaagctgtaccgtggggtgaggcagagacactggggcaagtgggtcgctgagatcagactccccaagaaccgaacacgtctctggctaggtacatttgacaccgcagaggaagcagcgttggcttacgacaacgcagcgtttaagctaagaggagaaaacgcgaggctcaacttgcctcacctgcgtcaccatggagcacgcgcgtacggtgagtgtgggaactacaagcctctcccctctgcggacgatgcgaagcttcaagccattagtcaaagcttggggaccaattcgcagaaacttaaaactcataaccctattggtctagatgcacacaacgcatagactgatacatcggagtttcatgatattagataggttgag

SEQ ID NO: 215260 - DNA, 633 bp, Glycine max
  unsure (1)..(633): unsure at all n locations
tggcaatggagaagctcgcttcttcttctactgcaactgttgttcccactcaacacttcctttttcaatttcaccaacattctcttttcttcttccccaaaactgcgttttccaccttccaccggaaccgcacccgaccgctctcactgccatgttgcaaaagcagacaccgtcgcctagaagcattatccagcaaacaggatcaactctgggtcagcgaagaagaattggagctagaattggaagaaggagaagattcgtatttggacggtgatgatgacgacgacgactcgtcgtttttgtcgctcagcgacaagcccgacaggaacatggccatgctcgacgattacgagggcgaggagctcgactttgattacggtcccgaccaccgaagcgggtatgtggcgttacttgggaagccaaatgttgggaagagtacactggcgaaccaaatgctagggcaaaagttgtcaatagttacagataaacctcaaacgacgaggcatcggattctgtgtatatgttctggcacggattatcagatgatactttatgacacacctggtgttctacagaaggaaatgcactngttagactcantgatgatgaanaacgttcgcagtgctgcagtta

SEQ ID NO: 215261 - DNA, 387 bp, Glycine max
ttgttttttttttttccatcttcacattatataacacgtatttggcccccataaccatagggattaagaagcccttcatcttgtcgccaatttgctctaaccttcacttcaatctcaagataaactttcttctgtaaaaaatcttcaacatcaaggcgggcagctgttgcaagcagtttcaaagcctttccttctcttccaataaggataatcttctgagggtttttctcaaccaaaatctctacttgtatgtattcttttgcatttggccgagctttatagtttacaacatttacctgacatgcatatggaatttcatttcgatactggataaaaatcttttctctaacaatttcagctacaaaaaatctctctggatgctcactt

SEQ ID NO: 215262 - DNA, 564 bp, Glycine max
aacaaacaactggcacattcttccactacttgggaattacaacatattatgttagcacattacagcatattgtgttatagcatattacaatttcatagttgctaatcagcagcttcactagaaaaatatcctaacaacatcagtttaatatgggtatatataagcctggcttatttttcttccaatacaataccgatgaacttagtaggataattttatgtttcactcagttaaaattacaaactattaggccactttgaattgattagacagccaatactattgtacctgttaattgtaggtctatttggaggttttaatccaaagatagaaaaatctacagacattggagctgattcattcttgccagtattatcatcagttgtctgtctgaaatcaccaaaactggcatcaaccttatctgcttgcagagaatttccttcaaacccatcacgtcctggcatcactctcctagacttcctaggaggtgataatatagtaggaccctcctgtgaattgaaatcagaaaccctagattccctcttgggagcaggtctagggagc

SEQ ID NO: 215263 - DNA, 549 bp, Glycine max
tgtaattgaagagggaactagattaggtggcgagtgaagagaagatcggtgaaggagtgaggtagcaacagcactgccactgccactaccaatagcagaatgggaaccttgggcagagctttctacgccgtcggattttgggatccgcgagaccggccaagccatcgatcgcctcggctctcgtctccaaggcaactacctctttcaagaacagctatctaggcatcgacctctgatgaatctgttcgacaaagctccctcggttcacagggatgcatttgtggcccccagtgcctccctcctcggcgatgtccacgttggcccagcttcctccatttggtatggatgcgttctcagaggtgatgttaacagcattactattggatctggaactaatatacaagacaattctcttgttcatgttgccaagtctaatttaagtggaaaagtcttgccaactatcattggagataatgtcactgtaggtcatagtgctgtgttacaaggatgtactgttgatgatgaggcatttattggcatgggtgcaac

SEQ ID NO: 215264 - DNA, 432 bp, Glycine max
  unsure (1)..(432): unsure at all n locations
gtgtaatgctgactcacttccaaatcttaatcaattgtcgagagagactgtgcaatgatatatccagaatctgcttcatatagtcaaggtagcataagtaggacaacaactagactaactggtgcaattaagacaactatcagtttattacattcacatgagtatcagttatgccttgaaaacctcataagaatgcggataataccttgatgaagctactgcagcagaccactcacactacatcacattgaggtatagtcatgaagtttaacacattttgtctgatattactaaaagngtctgcctgacagatacgttggtcccctcaagacagtatgagtatattgagtggactacctgatctggcatcatggatcatgaagaagctcggataaagaatgttggtgggaaagtgcagggtttgtattacta

SEQ ID NO: 215265 - DNA, 547 bp, Glycine max
  unsure (1)..(547): unsure at all n locations
cttaattgccttaaggaacgttcgagaccacagaggtttctctagtcttcttctgtggagagcttgttttctcttgttcattcatctcacttccaattaaggaacaagctttccaccaatttgaatcaccaatggctcgctctttctccaacctcaaggttctctctgctcttgtcgccgacggattctccaacactctcaccaggcgtgggtacgcagtagcgacacaaagcgcaacaagaggaggagcagcctccatcagcggcaagtcaggggaagacaaggtactaggaggaggtgctgaaaaggtttcgtgggtcccagaccctgtcactggttactacaaaccggagaacatcaaagagattgatgttgctgagctgagagccacggttttgggcaaaaaattcaaccactaggctctacttaatttcaataattaacctttttggtttcacgtgaatatgttatatgatatatgaagttcacagaacccttcgngattattcagcatggggtttttttcttggatttctctcttgagaat

SEQ ID NO: 215266 - DNA, 474 bp, Glycine max
caacgggagatccaatcacactagtaaacattaatttggtcatatgctagtccaaattctcaagagagaaatacaagaaaaaaaccccatgctgaataatccccgaaggttctgtgaacttcatatatcatataacatattcacgtgagaccaaaaaggttaattattgaaattaagtagagcctaggggttgaattttttgcccaaaaccgtggctctcagctcagcaacatcaatctttttgatgttctccggtttgtagtaaccagtgacagggtctgggacccacgaaaccttttcagcacctcctcctagtaccttgtcttcccctgacttgccgctgatggaggctgctcctcctcttggtgcgcctttgtgtcgctactgcgtacccacgcctggtgagagtgttggagaatccgtcggcgacaagagcagagagaacctttgggttggagaaagagcgagccattg

SEQ ID NO: 215267 - DNA, 533 bp, Glycine max
  unsure (1)..(533): unsure at all n locations
ctcggactataccttcttcaaagacatgccgcggtggcaagctggaaccacacaactcacctacgctttctccccggagccaagacttgatgacactttcaaaagcgcgattgcaagggccttcagcaagtggaccccagtggtgaacatcgcgttccaggagacgacgtcgtatgaaacagccaacattaagattcttttcgcgagtaagaaccacggtgatccgtatccttttgatggtccaggtgggatattgggccatgcattcgctcccactgatgggaggtgccactttgacgccgacgaatattgggtggcgtctggcgatgtcaccaaatcgccggtgacaagtgcgtttgaccttgaatctgtggcagtgcacgagatcgggcacttgctcggattaggccactcgtcggacctaagagccatcatgtatccttctataccacctcgaactaggaaggtgaatctagcgcangatgatatagacgggattcgaaagctctatggtatcaaccccctaattatat

SEQ ID NO: 215268 - DNA, 505 bp, Glycine max
gttcttgaattagaataatttcacctcgataactttcaaaatcctttaatgcaaattaccgaaataaaactctagttctagtacaaacaacacctagctataataattaggggttgataccatagagctttcgaatcccgtctatatcatcttgcgctagattcaccttcctagttcgaggtggtatagaaggatacatgatggctcttaggtccgacgagtggcctaatccgagcaagtgcccgatctcgtgcactgccacagattcaaggtcaaacgcacttgtcaccggcgatttggtgacatcgccagacgccacccaatattcgtcggcgtcaaagtggcacctcccatcagtgggagcgaatgcatggcccaatatcccacctggaccatcaaaaggatacggatcaccgtggttcttactcgcgaaaagaatcttaatgttggctgtttcatacgacgtcgtctcctggaacgcgatgttcaccactggggtccactt

SEQ ID NO: 215269 - DNA, 555 bp, Glycine max
  unsure (1)..(555): unsure at all n locations
agcaggaggagttttgcgtttaagggaattgtggcctctggcgtttcggtcgcggcttctactctcacagccgaagcagaaccatcttccaaaggttttgaaagattgccgtacaagccggaagggtacaattattggacatggaggggtcataaaatacattatgtagtgcaaggagaaggctctcccattgttcttattcatggttttggggcctctgcattccactggaggtacaacattccagaattggctaagaaacacaaggtatatgccttagacttgctcggttttgggtggagtgacaaagcacttatagattatgatgctatggtgtggagagatcaagttgttgactttgtgaaggaaatagtaaaagaaccaaccgttttagttggaaacagccttggaggatttactgctttggttgcagcaactgggttgcctgatcttgtcaatggtgttgctcttctaaattctgccggacaatttggcgatgggaaaagggaaagtgaaacttctgaagaaacagctttacaaaagtntctcctaaag

SEQ ID NO: 215270 - DNA, 500 bp, Glycine max
gatcaatgaaaaggatttttatgtaagaaatgaatgcatacattaggtcgaaaaaaatgtacaggtgtgcagaagaagtagaacaatgatcataaagtattcttgctgtgatttttctctattctgagtatcctttacccaattctttgtacacaacgtatactgataactactattaactatttgaaactcaaaacttaatcaagaacttgttttcaattggctttacaaaatcatacgcgttcaaactgtttggagagtcacttcaggagtgagggtggtcaaccaatccaataaagccttgttcacaagctctggtgtctcatcatgtggacaatgcccagcctgcaagttacaagagtagtttttggatagaactctttgattcgattcgctttggctggaccaacccatgggtcaaggtcaccccaaagcagcaacaacgggcatgagagttcacttaagacagcatctagagtgtacttgctctgattcatcat

SEQ ID NO: 215271 - DNA, 556 bp, Glycine max
gttcatcgtgatatttcaagcaagaacgttcttttggattccgatgatgtagctcatgtcgcagacttcggaacagctaagtttcttaatccagattcatccaattggacctcatttgcaggaacctatggatatgctgcttctgaacttgcatacacaatggatgcagatgagaaatgcgatgtgtatagtcttggggtctctgcgttggaaatattgtttggagagcaccctggtgatgttacatctactctattgctagtatctacggacactatgacctcaacacttgatcatatgtcaattatggttgaaattgaacgaacgtcttccagacccaacaagccctatcgataaggatgtgatatcaattgtgatgatagcaattgcttgcttgactgaatgcccacgatctcgccctaccatggaacaggttgccaaggagcttgcgatgacatcgaggtcatcttcaatgtcaccacagacacgcacagagatgaaagactgaacatactaaagcataaacatgctccagttctacttagttcttgtttat

SEQ ID NO: 215272 - DNA, 558 bp, Glycine max
ctttggacgaaaatgatgtgtgttacaagaccattgaaaaagttgatagggccattgatgggcttaacgtgtacaacatactagagccatgctaccatttccccgatgctgccacagccaaagaaaatggaaccttaccaaggagtttcaagcaattaggagttactgagaggcctctcccagtgagaaagagaatgtttggtagagcttggccttttagagcaccagtcaaacctggtcttgttccattatggccccaattggctcaaactaggcacgtcgcatgtgttagtgatgaagtagcaagttcatggctaaacaacgttgcagtcaggaaagccatccatgctgaatcggaaaaagtggcgggtccgtgggaattatgttcgagtaggatagagtaccatcacaatgctggaagcatgattccttaccacatgaacctaaccaggcttggctatagggcacttattttcagtggcgaccatgatatgtgtgtaccgattactggaagtgaggcttggacacgatctttgggttacaagattgtggatgaat

SEQ ID NO: 215273 - DNA, 549 bp, Glycine max
ctcgagccgaatcggctcgagagattgttgacgtgctgcttgagcaaaacattgttcctggtattaaagtcgacaagggtttggtgccccttgcaggttccaacgacgagtcatggtgccaaggtttggatggtctagcctctcgctcagctgcatactacgagcaaggtgcccgtttcgccaaatggcgtactgttgtgagcatccccaacggtccctctgctctggcagttaaggaagcagcctggggtctggctcgctatgctgcaattgctcaggacaatgggttggtcccaattgtggagccagagatcttgcttgatggggagcatggtattgatagaacttttgaagtagcccaaaaggtctgggcagaggttttcttctaccttgctgagaacaatgtcctttttgagggtattcttcttaagcctagcatggttacacctggagccgagtccaaggacatagccagtcctcagacagttgctgattacaccctcaagctcctttacaggagaattcccctgctgtccctggaatatgttt

SEQ ID NO: 215274 - DNA, 589 bp, Glycine max
gaattggactctgaaaatgaccatgtagatactaataaaattgagtctacaagggctgaggaagaagcatttgctaatggattgcagactattaacaatgatgatttggaggagatccgtgagcttggttctggaacctatggagctgtttatcatgggaaatggaaaggttctgacgttgccattaagagaataaaagccagttgttttgctggaaggccatctgaaagagcaagattgatcacagatttctggaaggaggcgttgatgttgagttcattgcatcatccaaatgttgtctccttttatggcattgttcgtgatggccccgatggttctttagcaacagtcacagagttcatgattaatggatctttgaaacagttcttgcataagaaagatagaacaatagatcgtcgtaagaggctcattatagccatggatgctgcatttgggatggagtatttgcatggaaaaaacattgttcattttgatttgaaatgtgagaatctattggtcaatatgagagatcctcaacgggctatctgcaagattggtgatttgtgtttatcaaaggtaaacagcacac

SEQ ID NO: 215275 - DNA, 561 bp, Glycine max
ctgactcctatagtttcctctgctaattccatatccccgttttccttcactcttgaaccccgattcatttccaccagcacaagaagcatggctgcaatatcaataccttctcacatgaaagcttggacatactctgagtatggaaaatccaaggaagttctcaagtttaatcagagtgtggctttgcctgaggtgaaggaagaccaggtcctcatcaaggtcgctgctgcttcccttaaccccattgatcataagagaatggaaggctatttcaagaacagcgactcccctttacctactgctccgggttatgatgttgctggagtggtggttaaagtgggaagtgaagtgaagaaatttaaggttggggatgaagtttatggtgatatcaatgtgaaagctctggaatatccaaaggtgattggttctttggctgagtacactgctgcagaagagaggctattggctcacaagccacagaatctgagctttgctgaagctgctagccttactttaacacttgagactgcttatgaaggccttgtacgaaccgggttttct

SEQ ID NO: 215276 - DNA, 429 bp, Glycine max
gaaatggccaccacttctgcttcattcgcgagcttctacggcatcttgcgaccttgttcgtccaatccccaattcttcctcttcaacgtcgctccccgaaccggaacctctcattcccgaacccgttcgactcggatcaagtgctcggacggtcagaccgggttcttcacgaaactagggcggttgataaaggagaaggcgaagagcgacgtggagaagcttatgtcgggattgtccaagacccgcagcatcctagccgtcatcgactagctgatcctatattggaacctagccgacaccgatcgggtcctcgacgaactcgaagaggctgttctagcgcacgatggtggagctagactcactattcaaatagtggagaatttgcgcgaggatatattatcagggaagcctacttgacggaatgagatc

SEQ ID NO: 215277 - DNA, 537 bp, Glycine max
cctgaacaggacattgtcaagcttgttgacaccttccctggccaatccattgatttctttggtgcactgagggccagagtatatgatgatgaagtgaggaagtggatttctggtgttggtgttgacagtgttgggaagaagcttgtgaactcaaaagatggacctccaacctttgagcagcccaagatgactctggagaagctcttgctgtatggtaacatgcttgtccaagaacaagagaatgtcaagagagtccaattggctgacaagtacttgaacgaggctgctcttggaaatgctaacgaggatgctattcagaggggaactttcttccagtcttgaattggaggcaaagcaaacttggcaagtaaatatttctgttcgtgaaggttgttgtactaatccaagtgctagaagttgtgatggaacttgcgtgtaacattcttagcattctcaatgtcttatgtgcaaagagaagatgctaagtttgagatgatcttactatatttttcatattggaccgtcttcctctataat

SEQ ID NO: 215278 - DNA, 614 bp, Glycine max
  unsure (1)..(614): unsure at all n locations
ctctctcaaaaccaaataaaatctttcacaactcaaaactcaagctccaaattttcactttacacctttgaattcattttttcacacatggacgagatcgacgtgcctccgttcttcgtgtgccctatttcattagagctcatgaaggaccccgtgacggtctccaccggcatcacctacgaccgcgacagcatcgagaagtggctcttcgccgaggtgaagaacgacacgtgtcccgtcacgaagcagcccctcctcccggacctcactccgaaccacacgctccgcagactcatccaagcctggtgcaccgtcaacgccttccacggcgtccagagaatccccacaccaaaaccaccggtcgacaaaaccctcatcgagaaactccttcgcaacacctcggcttcggactccccgagccttcagctccggtccctccgaaccctcaagtccattgcctcggaatcccaatcaaacaaacgctgcatcgaatctgcagaagggcgcagttaattcctagcaacaattataaccaccaccaccaccaccaccaccaacctactcgatgatgacatcgagttggaaaatanaacaagttcagnccacgaagcatt

SEQ ID NO: 215279 - DNA, 348 bp, Glycine max
tttttttttttttttttttttttttttttttttttttttttttttttttttttttttttttttttttttttttttttttttttttttttttaaaatcgaggggggaaccccaccccccctttttaggggggaaaaaaaaaacaccccccaaaaaaaaaactttttaatgggaaaggggggggttttcctaaaggtggtcccccccagtctttttttttttattgaaaaaaggggatgttaaaaagggaaaattttctaaccaaaaaggcccctccccccagaaaaaacccccaaaaaacgcgaaaatgttgggccaaacaaaatcccaaagttcggaggattatttgg

SEQ ID NO: 215280 - DNA, 539 bp, Glycine max
  unsure (1)..(539): unsure at all n locations
cctcagcaaaacattccaagttccatagttggaaccctgaaagcaaaacattaggtcattttgatcgagttgcaaacatgagaaagttgtgttttaacccccaaacagagtcgtttgcgttggcccgcagttctccttcttcaccactatccttaacctcaagcccaactcctccgaggctgagcttttccgaagctgaggcactgatactgaaatggaaccctgacacttccgcttacgccaaagtcacttccctcttctacgaggacaaaaccgaagccaaacactacattgactccgttaaccagcttcagaaatccatgcattccttgctctctcagaacccttcctctgagaaactcattctcgctcataacctaatgcagatggctatgaagaggctcaagaaagagttctaccagatcttatccatgaaccgcgcacaccttgatccagaatccgtctccgncagatcctctcgcaccttcgncaactccagcgccttcgattacgacgacgacttcgctgctgaggacgac

SEQ ID NO: 215281 - DNA, 563 bp, Glycine max
gaaaaagacgttatcgcttttgttggctatgtcaaaactattactacaaccaagaaaaataacggcgtagaaaactcgccgttcaaactgtgcacttagctccaacgccggagaggcgaggacgatacagcactggatgaggttccaaaaaagaagaggttaaccaggtaattttcaatatcctcaggggtaaaggtcacgtactccgtcgccgtcaaatccctcactgttcccaccgtagcaagaacaacattataccactcgcgatatcttggcactatgcttctcgcgatcgaaccttttatttcgtctcgtaattcgcggtcagctacgacgaatgagttctgtttccgatacccttcctcgaatttgcggttgaagctctcgaacacctccctcgcctccgccgcggctggattttccggcaatgacgaaaccacttctccccacgccaccttctcgtagttcgcgacgaacctcttcgctttagcttcgtgcttaaggatccaatcgtcgacaagcacgtactgcaggttcgagcttcgcactctgtcgacaacgta

SEQ ID NO: 215282 - DNA, 558 bp, Glycine max
  unsure (1)..(558): unsure at all n locations
tttaagttcatttcctcctctcctctctcttcattttatttttcttccatctgctaggaaaatgtctgtcagcgttgagggctctgcctttggggcactatttgaagaaaaaaatgtccattctgaagacagcaaccaacttgtgttgcatggtgcatttccattggctaaacatgagagacagaatggatttaatgccacagacatgaatgcatttggaaactccttcaggaactatgatgcagaaagtgaaaggcaaagaatggtggaggaattatataggatgcaacacatcaaccagacatatgactatgggaagagaatgagggaggagtatgggaaattggacaaattagaaatgggtatatgggagntgttgtgagctgctcaatgaagtgacggatgatagcgatcctgatttggatgaaccacaaatacaacatttgttgcagtccgctgaagccattagagaagactatcctaatgaagattgggtacatttaactgctcttattcatgatcttggaaagatccttatgcttccagctttggtggcct

SEQ ID NO: 215283 - DNA, 382 bp, Glycine max
ctcgagccgcttccttttcttcaccccgtacattcacaaccctgactctcttcaaatctaagacaaaagccgatcctgctaagactaaggttacaaagccaaagcaaaaggttgaagatggtatctttggcacttatggacgaatttgatttactaagcacaacgagctctttgtggctcgcgtcgctatgcttggtttacgtatcatcattgctgcgtgaaggaactactgctaaaggaatgctagcacacttaaacctggacactggagttgacattgtatgaagccgagcctgttcttatggatttcattctctgcaccctgctaggaggcatcggaggtgtacgctaccgtggcaaatttgtcgatgacgaacctact

SEQ ID NO: 215284 - DNA, 376 bp, Glycine max
acgacgaactcaatgcattttatgatagatgaggaaacgagttttttaaacacaagcaaacaaaagggttaggggctaatcatcctccccggcatctgtaacgaatttgccagttccaggattcaaagcagcaatgaagaaaaaaagaacgttgaacaacactaggggctcgatttcgttgattggtacccccgtctcaatgttgagttgggctagagctccctttccaggaataatttctccaatcaatgagaaaacgaaacccaattgagccaatcttcccacaaatagctcgttcgctttcgtgaatccgaataaaggacctgaaccgagcccaagggcttccctgaagcctttgcctgaaggaataacacct

SEQ ID NO: 215285 - DNA, 484 bp, Glycine max
ttgaaggatttgaagctcaaggaagtgaagaatggaaggttggctatgttggcaatcttgggttactttgttcaagctcttgtcacaggtgttggcccataccaaaaccttctagatcatttggctgaccccgtgcacaacaacatcttgaccagtctcaagttccactaaatgtattatatcatattctttaccctcttggtcttggttcttgttcgcttcgcagttaccaaagctcaaccacctttctatatcctctctttgctctttgggactctaccatcatctggacattttgttccttggtgtgccgctgtaagaattgacatgtaaaacaactagaaacattcgacatctttatctttttgctcgttagattaaccgtacccaagtttttatttatttgaattgcacaagtctgaataatgttacaattttataaactgtatatgttgtgagagaattttaaaaaataaaataataa

SEQ ID NO: 215286 - DNA, 450 bp, Glycine max
taagatcttcgttgggaacttgcctttcgacatcgacagcgagaatttggcgtcactcttcgggcaggctggcaccgttgaggttgctgaggttatttataatagggccactgaccggagtcgtgggtttggatttgttaccatgagtacacttggagagcttaagaaagctgtcgatatgatcagtggttacgaactatatggaagagtgttgactgctaataaggctgctccaaaaggagcacagactgaacgctcaccacgcccaccaggttcctttagttctggattgagagtctatgttggtgacttgccatgggaagttgacgatgctcggctggagcaaatcttcagtgaacatgtgaatggcgatgatgcttctgtggcctatgacagagagactgggcgatcacgtggcctatgctgactcacaatgtctagcgagactga

SEQ ID NO: 215287 - DNA, 609 bp, Glycine max
cagcaatgctcgggctcatagattatcaagcagccattcatttgtggaaaatcgacaaatttgatttcttagtgtgcttcactgcttatgttggcgtagtctttggcagtgttgaaattggcctagtcatagcagttgcagtatctctgcttcgagtacttctatttattgcaaggccaaggacatttctcttaggcaacattccaaattctgcagtatacagaaatgtggaacaatatccaaatgcaaatcatattcctggaatcctaattcttgaaattgatgcacccatttactttgccaatgcaagctatttaagggaaaggatcacaaggtggattgatgaagaggaagatagaatcaaagctacagagcaaaccagtttgcaatatgttataatggacatgaccgctgttgctaacattgatacaagtggaataagcatgcttgaagagtgcaagaagactgttgacagaagagggttacaagtaattatttctttctcctctttctgctaagaggagtgtcagcaataatactttctaacaccattcttcaaacatactttctattattaattaaaattattaaatggtacaaaatcatgag

SEQ ID NO: 215288 - DNA, 542 bp, Glycine max
caggcctgaacaagcgaagaagatacacgatttgtggctgaacgaacacgtagattttgagaaagtgttcctcgccggtgacagcgccggcgccaacattgcgagctatttgggtattcgggttggaacagaagggttgcttggtgtgaagcttgaaggggttgttttggtgcatccctttttctggggagaggaaccgtttgggtgtgaagcaaacaggcctgaacaagcgaagaagatacacgatttgtggcggtttgcgtgccctagtgagagtggatccgatgacccgattattaacccgagtaaggatccgaagctggggaagttagcttgtgaaagattgcttctttgtgttgcggagaaggatttggtgagggacaagggtttgtactataaggagttgcttgagaagaatgggtggtctggtgttgcggaagtggtggagacgaaggatgaggtaccatgttttcatttgttcaaaccgattgtgagaatgctcatgttttgaacgaccagattgtttcctttcttaaacagga

SEQ ID NO: 215289 - DNA, 557 bp, Glycine max
actcccaacacttccatatcttatcttctcctcctccatctttgaggttctcacggaaacttctgaagatggctggcatagcattcggaagcttcaatgattctttcagtttggcctccatcaaggcctacattgctgagttcatctcaacccttctctttgtttttgctggtgttggttcagccatagcctatgctaagttgacatcagatgcagctcttgatccaactgggttggtagctgttgccatttgccatggttttgctctcttcgttgctgtttctgttggagccaacatttctggtggccatgtcaaccctgctgtgaccttcgggttggttctggggggccacttcaccttcctaaggggcctttttaccggattggccaattttttggcttcattgtggcattcttacatctcaagtgtgtcactgtgtatgacactctcctatacacagtgttgctgctggagttggagctggtgaaggagttgttacagagatcataatcacatttggattagtgtacacggtgtatgccacagcagcagaccc

SEQ ID NO: 215290 - DNA, 541 bp, Glycine max
  unsure (1)..(541): unsure at all n locations
gttgttgtaaagccttgttgctgccatggccacccacgcggctcttgcttctacaaggatcccttcaaacacaaggttcccatccaaggcctctcactctttcccaacccaatgcgccttaaagagacttgaggtgacagaattctctgggcttagatccacttcatgtgtcacatatgctaacagtgctagagaatcttccttttttgatcttgtagcttcccaactcactcccaagaccaatggatcaactcctgtgaggggagagacagtggccaagttgaaggtggcaatcaatggtttcggacgcattggtagaaacttccttcgctgctggcacggccgaaaagactcaccccttgaagtcgttgttgtcaacgacagtggtggtgtcaagaatgcttcgcacctgctgaaatatgattctatgctgggaacctttaagcagatgtgaaaatactagacaatgaaaccatcactggtgatggtaagttcatcaaggttgtttcaagcanggaccctcttaagctttcatgggctg

SEQ ID NO: 215291 - DNA, 560 bp, Glycine max
  unsure (1)..(560): unsure at all n locations
cagttacaagaattcagaaattcaatatcaatcaatatatgggtgatattcattcagtcacgccaaaacttattattggctgcaaataaatataaactttgaaaatctctcctcagatagactgtctgaacaatttccttctttttcacatgatacgttagaaaaggagctctcctctattcataaactttgcattcctcatcagcagggtttgtctcgcagaaatcctccaatgggtctccactccccgctttaggtgcccctggccacttgcttgctactagatgtgccaaatcgaccactctttggctgtaaccccattcattgtcataccaagcaaccactttaaccatatcatctcccatgaccatagtcaaggaggagtcaatagtagaggaaacatcagagcagcggaagtcgatagacacaagtggaacatcacacacgtccaatacacctttgagcggcccctcagctgcctttctgaatgctgcattcacatcttcagcagtaagacccttcttctaacattcacaacanggtcaacaactgaaacattg

SEQ ID NO: 215292 - DNA, 487 bp, Glycine max
cactactacacactatcttatggcgagtgacaataaaaccactctcagattacagcgtctgctgaatgaatagctctggaatttgagaaggccatggaagcattctaagaacaaacatgatctctttgaatgtcttgctgacgatcaccgtgcacttattctatcgaagctcatctccaccgctacatctccttccgatttcataaccattatcttagcatgcacgaggctaaaccgttcaggcctgcactgtcttgtgttagataaatctgtgcccagagtattctgcatacatcctaagaaatggtcacaatatgctcactctcttcataaacactggatgcatgctcagaacgatgatgcctgctacactatcggaacgatcccattttaccgagagaaaaaccgagggaacggtctctcgtcaatggcaaatgcagatatgaagctgctctcaccggagatagtctcactggcagtgatacag

SEQ ID NO: 215293 - DNA, 397 bp, Glycine max
aataaagaacttttaatcttagttggccataaatatatatacatatatataaaaggtactacctcatctgtacatagtacataccaactgattgacatttttttttgaatttatagaatcgcttcttttcctctctattttcttatttttcaaccttagaaattgattctgtcgctgaaacactttttaaaacggcatcgtttgggaccacaaagtcattgttcacatcaacaccaccgttaccgtacattttcaccggcgaacactcaatcttatgccgcaacttccaatccagcgcctgacatccacgtgaacagtaattcactttgccggaaaccgaacaccggcaaactcgtgtggccgggtttccggtcgaccgcacccaatgtgcgcgcaa

SEQ ID NO: 215294 - DNA, 540 bp, Glycine max
acaaattcatacaacttcattaattcaactcatccttcaatgtaagtggttcctctgacaatcatatgcaagaacaatctaatcttccttattgtggctaaagtgatatctcaaaaaacaagtcatgtaacagtaacccaaagccacaagtgaaaaccacaagttctagatgagataaaagaaactcaacaaatatatctacgaaagttctttggcagcagcaataacagcttccttggtgataccaaactccttgtatatttttccagctggagcacttgctccaaatcgatcaatgcctatggcctttcctttgcttacaacaatcttgtgccaaccaaatgttgatcctgcctcaatgctaactctagctgttactgaagcaggtagaacactctccttgtattcatctgactgctcatcaaaaagctcccagctcacaaaagaaacaactctaacagcttttccttgcttacttagatcctcagcagcagcagcagcaatttccaactcagaaccaggtccaatcaaaataacatc

SEQ ID NO: 215295 - DNA, 619 bp, Glycine max
  unsure (1)..(619): unsure at all n locations
ggaaagggcaaaagaaagttcgaaaaaagaggaggaaaaaaaaaaggaaaatgaggaaagaaaacgtatagaaatagcagaagcctgggatagcattatatttgctcaagtaataagaggtattttattaataacccaatccattcttagaaaatatattctattaccttcattgataataactaaaaatattgctcgtatactattttttcaatttcccgaatggtcggaagattttagggattggaagagagaaatgtatattaaatgcacatataatggtgttcaattatccgaaagagaatttccaaaaaaatggctaacagatggtattcagataaagatcttatttccttttcgtctcaaaccttggcacaaatctaagctacgatccaatgaaaagaaaaaggatctaatgaaaaaaaagaacttttgttttctaacagtttgggggatggaagtcgacttgcccttttctggttctccccaaaaaatagattttcatcattttttgaccccatttttaaagaactaaataaaaaaacgaaacatattcaatttttcacttttcgagttcctaaagtttaagtgaaaaattgaaantgtttctaactatctt

SEQ ID NO: 215296 - DNA, 482 bp, Glycine max
gaagaattgctcagacacctgttagtgaggcttattcgggtccgtgctataactgccctggctaaaccaatggatggaccacgagaaatttcagcttccgaatctacgagtaatcgactctcctgctcccggtagtatctcgagacgttccgtatatgagcctgtgcaaacaggacttattgctattgcttccgagatccccatacgacttggtccatgagaattaacttataggcgacagacaaacgggtgaaacagctgtagccacagacactatgcttaattcccagggacaaagtgcaatatgtgtttatgtagctattggtcaaaaagcatcttctgaggctcaagtggtgaataccttacaagagacaggagcattgggctacactattgtagtagctggaacagcagagtccccagctacgttacaatacctcatgccttatacaggggcacttgtggctgaatatcttatgcac

SEQ ID NO: 215297 - DNA, 512 bp, Glycine max
tgatggccctgaagagtgcaggggttgaaggtgtaatggtggatgcttggtggggtttggtggagaaagaagggcctttgaagtacaactgggaaccctatgctgaacttgtgcagatgctgcaaatgcatggcttgaagcttcaagttgttatgtctttccatcagtgtgggggaaatgttggagacaattgcagcattcctctaccaccatgggtgttggaagaaatcagcaagaaccctgagctggtttacacagacagatcagggaggaggaatcctgagtacatctccttgggctgtgattcggttcctgttctaaatggaagaactcctcttcaagtgtactctgactacatgagaagctttcgtgacaaattcagagattacttgagcagtgttatcgtggaaatacaattgggaatgggtccttgtggagagcttagatattcattctattcagaaaccaatggaacttggaggtttcccggaatggagaattcaatgtatgac

SEQ ID NO: 215298 - DNA, 552 bp, Glycine max
gaagggctatatagcataaacatttgagtcttcattgcacaatgtcgacctcttccattaacgggtggtgcctctcttccatctccccagccaaaacctctctcaagaaggccacattaggcccttttgtcttcgcaaccgttagcactccttcttctccttcttcttcttcttcttcttccttcccttctctcattcaagacaggcctgtctttgctgcccctgcccccatcatcaccccaactgtgagagaggatatggcaaaggaatacgagcaagctattgaagaactccagaaattgttgagggagaagagtgaactcaaagccacagctgctgagaaagtggagcagataacagcttctctgggaacatcatcatctgatggcatcccatcatcagaagcctcagacaggatcaaagctggtttcattcacttcaagaaggagaaatatgacaagaatccagctttgtatggtgaacttgccaaggccaaagccccaagttatggtgtttgcttgctcagactcagggtgtgcccatctcatgtgc

SEQ ID NO: 215299 - DNA, 576 bp, Glycine max
gcacgttccgagttttctgatcgctcatagagagttcgacgcggcggttgcagaagaagattgcaagatgaagttcaacatcgcgagtcccaccactggatgccagaagaagctcgagatcgacgacgatcagaaactacgagcattttgggacaagaggatctcacaggaggtcagcggagatgcacttggtgaggaatttaagggctatgtcttcaaaattactggaggttgtgacaaacaaggattcccgatgaaacagggagtgcttactcctggtcgtgttcgacttttgcttcacaggggaactccttgcttccgtggatatggaaggcgtaatggagaacgtaggagaaagtctgttcgtgggtgcattgtcagcccagacctctctgttttgaacttggtaattgtgaagaagggtgagaatgatttaccaggattgactgatgctgagaagccaaggatgagaggcccaaagagagcatccaaaatccgtaaactgttcaacctgtccaaggaggatgatgttaggaagtatgtcaacacctaccgtcgtacatttacgacataagc

SEQ ID NO: 215300 - DNA, 459 bp, Glycine max
ggattcaatgagtaacactgcataagaaatacttcaataactcaatgtaatcaaaaatagcaaaaccagagtttatcacaacagccggttataaaataacaaacaaaaactgaatatgatgattaaaacttcaccatatctctttatatctgaaagcagcttacacagctgccttggcagcactggaaagcttggatctccttttagccaaactctcactggggcggtctttttgttccttcaacctggaggcaaggagtttctggtactctgctgcctccgatttggccttggcaattctcttctttttatcagcaatacttgcccgctttcgttggaacgtaagaggggtgaccagtctttgtatcttaggagctttgctcacctttttcccagcttttgtcgtaaatgtcgacggaaggtgttgacatacttcctaacatcatcctccttggacag

SEQ ID NO: 215301 - DNA, 529 bp, Glycine max
caacacactcagatctctcaactcagatctctcaactcagatctctctctgctgccattaatttcacaatggtcactctcttcgactccctcgccgtcgtgcgtctccccaccgccgccttctccccggctgccaccagccggacctacgttttgctcccgcactgcgccggcctcaggctcagacccgccgccggcacgcgcttagttgcgtcccccgctcgcagaatcgcttcacgcgccgtgcgcgttgtatgtgaggctcacgataccggcgtcgaagtggctcctattactgatgcaaattggcaatcccttgtccttgaatctgaatctgctgctttggctgaattctgggcgccatggtgtggtccctgccgaatgattcaccctataatagatgaactggcaaagcactatgctgggaagctcaagtgttacaaactcaacacggatgagagccctataaccgctactcggtatggaattcgaagcatccctactgttatgatcttcaagaatggtgagaa

SEQ ID NO: 215302 - DNA, 399 bp, Glycine max
aattggcaactcgaataagcctaaaaacaaaagacctgctctcattacactgattcaaatagtgtaatttccgtgtccatgtacatttctataatctatttagaagaaaacaaaaatttggaagaaggatataaaacataatattaataacatgccaggggctgggagaactctaccaaactcagactaggagaggtttccttgcaatctatgttgtcttgatcacagcaccaacaactgtatctttcttgtgaccattcttgaagatcataacagtaaggatgcttggaattccataccgagtatcggatgaatggctctcattcgtgacgagcttgttacacttgagctttccagcatatcgctttgccagtacatctattataggcgtgaattatt

SEQ ID NO: 215303 - DNA, 418 bp, Glycine max
tagtgctcgagggaggggaaggagcaggatgtgtggatgtgagcgaacaagtttgccaagagacaggcatttggtactgactatcgtacccagctctaaccagtgcactgatgcatgccatacaagtgtccgatgtgaggcgaaacgtagagatcgaacagaaaaggttacacttcttgcattggcataagaggggagcagattcgtgtttctctacatcacccttgtaaccttgaaaaggagtcgccgaagcttggactaagactttatggaccaacttctagggaatgactcgaacactaccaagtgtgatctaggctctcgtgtactgctgctctggaatctcaaggggacacatgtactcagcggtgacatttgggctgggaccatctagggaatatgtcatgcccagtgccaa

SEQ ID NO: 215304 - DNA, 487 bp, Glycine max
atatgactctggtgttatttttgattttgcaaattaaattacacaatcacagccgtacatcacacatgagttgggcctcttccaacttaaaagcagaggataacattggcccatgacgcgacacatgcaccacctaataatcataattttacatctttacatacaaaatacaaagactttaaattttaaaaagaagaaaagagataaacagatcatcttaatgaaatgaaaccaaaacccacaaacattggcttgatttttgttgttgttgttgttcccaacttgattaagcatgaaccgtttgattgaatcacttggacttgaagggaatggccctgattacacctggtggtagagtgctgcaagagctgcaccgatgaatggtcccaccagaaatccagtgttcatccaaccaagggccttgttgaagatgatagcagcaccaagactacgagcagggttgataccagttccggtgatggggatg

SEQ ID NO: 215305 - DNA, 573 bp, Glycine max
gtttttctgtagtttcactgctatggcacaagctgattgcatctcctgaaacacaaccttgtgcagaaagcacttctgcccaacagggctggagacaggttgttgatgcattatgcaacgttgtatcagcctcaccaacaaaagcagctacagcagttgtacttcaggcggagcgggaattgcagccctggattgccaaggatgatgattcaggtcagaagatgtggagaatcaatcagcggattgtaaaattgattgtggaacttatgaggaatcatgagactgcagaatcattggtaattgtggcaagttcatcagatttactactgcgagccacagatgggatgctggttgatggagaagcttgcactttaccacagctggagctattggaagcaacagctagagcagttcagccagtgctcgagtttggagaatctggattggctgtggcagatggcctttcaaaccttgtaaagtgtcgcctctcaactacaattagatgtctttctcatccaagtgcacatgtccgagctctgagtatatcagttcttcgtgacattttgcatactg

SEQ ID NO: 215306 - DNA, 547 bp, Glycine max
ccgaggaattcattccagaatgcaaatcaaaagctgttcttttcaggcacatcaagaccggggctcaagtcatgtctgtttccaacgacgacgacaataaagtctttggaattgttttccgcactcctccgaaagactccactggtatccctcacattctggagcatagcgtattatgcggctcacgaaaataccctctcaaagagccttttgttgaattgttgaaaggaagcttgcacactttccttaatgcgttcacctatcccgataggacatgttacccagttgcttccacaaatgccaaggatttctataatttggttgatgtctacctggatgcggttttctttcccagatgtgtcgaggactttcagatttttcaacaggaaggctggcactttgagctcaacgatccttccgaagacatcacttataaaggtgtcgtgttcaatgagatgaagggtgtctactctcaaccggataatatacttgggcgagctgctcaacaggctcttttcccagacaccacctatggtgttgacagtgg

SEQ ID NO: 215307 - DNA, 573 bp, Glycine max
  unsure (1)..(573): unsure at all n locations
ctcgagccgattcggctcgagcggctcgagcggctcgagctcgagccgcttctgctctagaaaattcagtggtgatacatggcttcggctactctctctgtagccaaaccagcccttcaggcaaatgggaaaggcttctctgaattctctggcctccgcagctcatcaggcttccttcccttttctagaaaatcttcagaggatttccattctgtcattgccttccagacctatgcagttggaagcagtggaggatacaagaagggtgtgacagaagcaaaactgaaggttgccataaacggatttggaaggattggaaggaacttcttgaggtgctggcacggtcgcaaagactcccctcttgatgtcattgccatcaacgacaccggtggcgtgaaacaagcctctcaccttctcaagtacgattcgatcctcggaaccttcgatgctgatgtcaagcctgttggcagcgacatcatctctgtcgatggaaaggaaatcaaagttgtctctgaccgcaaccctgccaaccttccttggaaggattctgngatagacttggtgattgaggaa

SEQ ID NO: 215308 - DNA, 536 bp, Glycine max
gcactgtgttcgacttcgtcaaaagcatcatgagccgctacgacagccgctccggcgacccagcttcctatcgtgatcggaggagtgattctgggctaggtgcacctacagggtttggtggttctgtacaacactcttcatcaaacaggagggattatgatgatggtgggtcaccaaagaggaacctcagtttggatggtttacctcattttgagaaaaacttctacattgagtcaccagctgtaagggcaatgacagatgctgaagttaatgagtatcggcagcagagggaaataactgttgaagggcgagatatcccgaaacctgtcaagacctttcacgatgctggttttccagaatatgtactgcaagaaattacaaaagctggctttactgaacctacacccattcaatctcaaggttggcccatggctctgaaggggcgtgatctgataggaattgcagaaacaggatcagggaagacacttgcttacttgctgcctgccattgtgcatgttaatgcttaggcaatacta

SEQ ID NO: 215309 - DNA, 542 bp, Glycine max
  unsure (1)..(542): unsure at all n locations
ctcgagccgctcgagccgtttccctgtttttcttcacaagcagagctctgtttttaactggtctttgatcaaggatggccataaaggcaattgagttgttgaaaggaagcggaaaccatgaagagatatttgaagttcttgcagcagtggctgcatctttgggggatgtaatagatgatgtgaacactttgcaggtaacacctttaaagggggcaatgaccaatgaggtttttgaggtaaattggccaaccaaaagtgatggtcatcaaagaagggttcttgttcgattatatggtgaaggtgttgaggttttcttcaacagggtggatgaaatccaaacctttgagtgcatgtcaaagcatggacagggtccacgccttcttgngaggttcaccactggcagagttgaagagttcattcatgccaaaacactctcagctgcggacctccgtgaccctgaaatatctgctntgatagcatctaagatgagggagtttcacaatcttcatatgcctggtgcaaagaaggctcagctttggcag

SEQ ID NO: 215310 - DNA, 417 bp, Glycine max
ctcttatattgtttgggggcccgcttgcacctggtcttgcaagtcttggaatgactccacttctagctgctgtatatgtgggtgctttgcagaacatatttagcaagagtgccaagtacagcttatttgatccctgcaaagaaatggcctacattccattggacgaggataccaaggttaaagggaaggcagccattgatgttgtgtgcaatccattggggaagtctggaggtgcccttatccagcaatttatgatcttgacttttgggtcactagctaattcaaccccatacttgggaggaatacttctgctgattgtttctgcctggctagctgcggcgaaatccttggatacccagtttactgcattgcgtatagaggaagaactcaagaaaatggaaagagcagccactgtca

SEQ ID NO: 215311 - DNA, 454 bp, Glycine max
ggaaaccactaaccaataatttatttctatacacactcaaaatacacaacttttgcacagaccaaacttaacgccatttacaaagatgctgaccttttcatcaatgcaatggcatcactcattctaatccaaaaaactgacctataaaaagaaaagaaacgccatgaagtaaaaagaaaaacaaaatgaaacggacaaacatttcagactcaataatttttctacctcctgaccacatgctaccattgtgaacatcattgacctcactcacatgacaatctccggcttcagaatatttgacttgatcttcttgggtgggaaaacaacaccaccattggtgtgaatgtcatcacatacatggacatcttctccaaggatgggcatattatccactcgagcccattgcccaacagtggaatgccacccaacaatactgatggatacacaagcatgc

SEQ ID NO: 215312 - DNA, 436 bp, Glycine max
gactgaatgaaggatcattaaattacttaaatgatcaatgctaaaacagtacttaatgtttcttgtctaggtccattttaacagagttttcaaatgcagtagcctcagtccaagaaagtaaaaagagtgtaatgtaataatttaatatggtacacacacctacacgacaagtttcgtgagctgcagaattagaaaataagctcttcagacaatgaacagggaaactaagaaatattttttgcaaaactagagattttctttgcgtggttgcatggatatatcaagcatcaagttgaagcctccccattcaagcgtattctcttaggacctttttcttcaccttggttgcaggctgtaccgatcctgttttcattggcctctaccgaacatcttttgtaaggtttaaaccctgttggacgagtctttagctttcctg

SEQ ID NO: 215313 - DNA, 520 bp, Glycine max
aaagattttatccaattgaaattttaaaaatgactgggataaacttaagaattcaattattgaaattgaataagtaaacaatttaattggattggtcgaatggtatcaaaaaaatggagtactaactcccatttcttatttattattgaattaaccgatcaacttgctttgttatcgaacatttctttttgatttcaaaaattttccggaaaaaatttgaatctatttttatatgcgaatcaatcctactacttctggtcctgaggtttctgcgcttgaaaaaaaaaatctgggacgtatcgcccaaataattggtccggtactagatgtagcttttcccccaggtaagatgcctaatatttacaacgctctgatagttaagggtcgagatactgttggtcaacaaattaatgtgacttgtgaagtacagcaattattaggaaataatcgaattagagctgtagctatgagtgcgacagaaggtctaatgagaggaatggaagtgattgacacaggagct

SEQ ID NO: 215314 - DNA, 333 bp, Glycine max
gaaatatgcatcggacgaagatgccttcttcgctgattacgctgaggctcaccaaaagctttctgagcttgggtttgctgaagcctaagcaacgttttggggattgttggagaggcacggtgcccataatatttctctcataaattctatggtcatggtttctaatgcgccactgtgggttcctcaaatttttagatagcttttgaatgtattttgctggacgtggtgatgatgattggagttgggttgtttttatttgtggtcgatccttttgttaaataacattgttcagcgattgcgataaaaaaaaaataaataaacataatatattat

SEQ ID NO: 215315 - DNA, 564 bp, Glycine max
ctcgagccgaatcagcactccactagtccttcaccgcctccgatttacctgttgaaggtttggtgtgttgatcaaaaaggattgctacatgatattaatgaaatcctgtgcaaccttgaacttattattcagagagtcatagcgatgccaaccccagatggaagggtgttagacatgttctttatcactgatgggatggaattgcttcacaccaaatagaggcaagattatgtatgtgaatatctgatggatgctttaggagagaggtgtatctccagtgaacttcagttggctgggcctgaatacggacatttgcaggggttttcttctgttccaccagcttttgctgaagagttatttagttctgagctgttagacaagttgtctttgcatgctctcagccaagatatgacaacactgaagacacctactgctactgtggataactcactgagcccagttcataccctgcttcagatacaatgcgttgatccatacggcttgtgttatgacattatgaggatttcttaagactctgatattaaagttgcttttggacgattt

SEQ ID NO: 215316 - DNA, 493 bp, Glycine max
ctcgagccgaatcagcactccactagtccttcaccgcctccgatttacctgttgaaggtttggtgtgttgatcaaaaaggattgctacatgatattaatgaaatcctgtgcaaccttgaacttattattcagagagtcaaagcgatgccaaccccagatggaagggtgttagacatgttctttatcactgatgggatggaattgcttcacaccaaatagaggcaagattatgtatgtgaatatctgatggatgctttaggagagaggtgtatctccagtgaacttcagttggctgggcctgaatacggacatttgcaggggttttcttctcttccaccagcttttgctgaagagttatttagttctgagctgttagacaagttgtctttgcatcctctcagccaagatatgacaacactgaagacacctactgttactgtggataactcactgagcccagttcataccctgcttcagatacaatgcgttgatc

SEQ ID NO: 215317 - DNA, 570 bp, Glycine max
gtcaaagatatacgtgagtctatgcttgaagaagttgacttttacaaggaggctgcaaatattgaggcttttaggagatatttagaaacaatgggacttactgggaatgcaacagctccaaaagtgtatcgattctgcagtacaatgaaagttttaactatgcaaagactatatggagttcctcttactgacctagactccataaggtcattagtttctaatccagaaaccagccttataactgctctcaatgtgtggtttggaagtttgcttgcatgtgaatcttttcatgcagatgtacatgcaggaaatctgtggcttctacgtgatggccgtattgggtttcttgacttcggaattgttggtcgtatatcccctaaaacatgggctgctatggaagtcttcttaggatcaattgccattgaagattatgactcaatggcatcttccttaattgaaatgggtgctacataccaggatgttgatgctaaagcctctgcaagagatttggaaaaagtattctcatcaattaaggaattggacactgaaatagtagtagcaactacaact

SEQ ID NO: 215318 - DNA, 557 bp, Glycine max
aatcattaaattaaatatttattgcgcgcatctcatattcaccttaaataatgcaggtaaaatgtggtgttattgtcggttggtatacatgcccatgtcttatttgtatgggaagaaatttacgggtccaatcacaccgttagttgtaaatttgagagaagaactttttattcaaccttatgatgaaaatagttggaagaaagcacgtcataaatgtgcaaatgaagatctttactatccccatcattggatacaagatctattatgggatagtttgtatgtattcaccgagcctcttctaaattgttggcctttcaacaagttggttagagaaaaggcacttcaagtaacaatgaaacatattcattatgaagacgaaaatagtcggtatattgccatcgggtgtgtggaaaaggttctatgtatgcttgcttgttgggttgaagatccaaatggagatgctttcaagaagcatcttgcaaggatcccagattatttatgggtttctgaagatggaatgaccatgcaaggtattggtactcaatcatgggatgttg

SEQ ID NO: 215319 - DNA, 593 bp, Glycine max
  unsure (1)..(593): unsure at all n locations
cagaattctctaaaagagatctttttctgctctttgaagaaagaagggtctttgcttgattttggagatgtctctgctctcagatctcatcaaccttaacctctccgataccaccgagaaggtgatcgcagagtacatatggatcggtggatcaggaatggacctgaggagcaaagcaaggactctcccaggaccagttagcgacccttcagagcttcccaagtggaactatgatggttccagcacaggtcaagctcctggtgaagacagtgaagtgattttatacccacaagccattttcagggatccattcagaaggggtaacaatatcttggttatctgtgatgcctacactcctgctggagaacctattcccactaacaagaggcacgctgctgccaaggttttcagccatcctgatgttgttgctgaagtgccatggtacggtattgaacaagaatacaccttgttgcagaaagatatccaatggcctcttgggtggcctgttggtggtttccctggacctcanggtccatactactgtggtgttggcgctgacaagggctttggccgtgacattggtgacgcacact

SEQ ID NO: 215320 - DNA, 544 bp, Glycine max
  unsure (1)..(544): unsure at all n locations
gcaacgcagtcctttttctatttgtatgtttgtatgagactgagaaagatagagagatagtgtgtgcagaagatgtggctattcggcagaaaaggggcttctgggttttcatcatcatccactgcagagcatgtcactgaaggaattgatggaactggtttcactgccattgtcacaggggcatccagtggtattggcactgagactacgcgtgttcttgctttgcgtggtgtccatgtgattatgggtgtgagaaatatgcttgctgctaaagatgtcaaagaaacaatactcaaggagattccctccgctaaagttgatgccatggagttagatctcagttcgatgaagtctgtcaggaaatttgcatcagagtttaagtcctctggtcttccattgaacatcttaataaacaatgcaggaattatggcttgccctntcagtctctctaaagacaaaattgaactacagtttgccacacatcacataggtcattntctcttgacaaatcttttgttggacactattaaaaaaacttcacgtg

SEQ ID NO: 215321 - DNA, 528 bp, Glycine max
gattttatccaattgaaattttaaaaatgactgggataaacttaagaattcaattattgaaattgaataagtaaacaatttaattggattggtcgaatggtatcaaaaaaatggagtactaactcccatttcttatttattattgaattaaccgatcaacttgctttgttatcgaacatttctttttgatttcaaaaattttccggaaaaaatttgaatctatctttatatgcgaatcaatcctactacttctggtcctgaggtttctgcgcttgaaaaaaaaaatctgggacgtatcgcccaaataattggcccggtactagatgtagcttttcccccaggtaagatgcctaatatttacaacgctctgatagttaagggtcgagatactgttggtcaacaaattaatgtgacttgcgaagtacagcaattattaggaaataatcgaattaaagctgtagctatgagtgcgacagaaggtctaatgagaggaatggcaatgattgacacaggaagctgcctaagtgt

SEQ ID NO: 215322 - DNA, 538 bp, Glycine max
acaggtacagatgttacctcgaatatacccttgcagggaatgtcgagatcactttaaagaagttcttagagcaaatcctgtactgactggatcacatgctgaattttctcagtggctatgtcatgtgcataatgttgttaatagaagccttgccaaaccgatattcccctgtgaacgagttgatgcaaggtggggcaaactggactgtgaacagaatgcatgtgaaattattggaagtacatcaatttttgggaggatatggcagaaatctacgtaaaaatgattgccacacatactatgtgagatgtgttaaattttgacctttagaaaaatggtttagataggccaagggttatttgatggcattacaccggagtacgtgaatacatattcataactcgaattattttagaaaattaatagttaagcccggtttatattgattttttgagcatcacaatcagagatgtagttgccagagcttgtaattctatacacgattattctaaacaatgtctggttattaacagccttgctt

SEQ ID NO: 215323 - DNA, 535 bp, Glycine max
  unsure (1)..(535): unsure at all n locations
caaggcagaaagcaagctcatcctagagttttaaaaatggcagcagcctcctccatggctctctcttccccatccttggctggcaaggccgtgaagctgggcccatcagcccccgaagtcgggagggtcagcatgaggaagaccgtcaccaagcaggcctcctccggaagcccatggtacggcccagaccgcgtcaagtacttgggcccattctctggcgagcccccgtcctacctcactggcgagttcccaggtgactacggctgggacactgctgggctttcggccgacccagaaaccttcgccagaaaccgtgagctcgaagtgatccactccaggtgggccatgctcggggccttgggctgcgtcttccccgaactgttgtcccgcaacggggtcaagtttggagaagctgtgtggttcaaggccgggtcccagatcttcagcgagggtgggctggactacttgggcaacccaagccttgtccacgcccagagcattctcgccatctgggccacccaangtatcctaatgg

SEQ ID NO: 215324 - DNA, 565 bp, Glycine max
agaagattgtggtgaactgtggtattggagatgctgcgcaaaatgcaaagggtttggacgcggcaataagtgatctagcactgatcacagggcagagacctattaagactcgggccagggcttctcttgccacttttaagatcagggaaggtcaaccgcttgggattgctgtgacactaagaggaaatatgatgtattcattcctagaccgagttatcaacctgggacttcctaggacaagagatttccaaggtgtgaaccccaacagctttgatgggcatgggaactacagcattggcattaaggaccagggtgtgttcccagagatcagagccgatgttgttggtaagcctcggggaatggatatctgcatcgtgacgacggctaataccgaccaagaagcacagaaattgttagctcttatgggtatgcccttcagagagggaagtggtcctgccacgacaattcggaaatagaagcttaagtctcatcattttgatgcaaaatcaatgggaagaaggaagaggtgacatagttctgatgcaaatcatatgattaaaggaag

SEQ ID NO: 215325 - DNA, 570 bp, Glycine max
ctcaagcttcctccaacaacaagaagaccaaacgcaatcacaagaaatccctccctccccgcccgtaacggaatcacccctccggatgatggcggagaaagaaccgttaaaaagcttcggttgtcgaaggcgctcaccatccccgacggaaccaccgtctctgaggcctgcaggcgcatggctgctcgccgcatcgacgccgttttgctaactgattccaacgccctgctttccggaattctcactgacaaggatgtggctactagagtcgtcgccgaggggctgaagccggaggagacgacggtgtcgaaagtaatgacgcggaatcccatctttgtcacgtcggatacgctcgccattgatgcgcttcagaaaatgattcagggtagatttagacaccttcctgttgtggaaaatggtgaagtcattgccatgctggatatcaccaaatgtctttatgatgccatatctagaatggagagcgctactcaacaggggagtgccgttgctgcagcagttgagggagtggaacttcagcgaactactccaaatactttcattgaaacattg

SEQ ID NO: 215326 - DNA, 580 bp, Glycine max
  unsure (1)..(580): unsure at all n locations
ggaagagtcggctcctgctccgacatcactgctctcactgaacgtgatgctgttttcctttcaggaggaccagactatgagattcctttgggaagaagagatgggctaacctttgccacaagacaagtgacattggacaacctttcaccaccctcaagcaacgcttcaaccatcctaagctccctcggcaccaaaaacctagaccccaccgacgtcgtagcgctctcaggcgggcacaccataggcatcagccactgcagctccttcaccaacaggctctacccgacacaagaccccgtcatggacaagaccttcggcaacaacctcagacgcacgtgccccgccgtcaacaccgacaacaccactgtgcttgacatccgatcccccaacaccttcgacaacaagtactacgttgacctcctgaaccgccagggcctctgtacctacgaccaagacttgtacactgataaaaggactaagggcattgtcaccgactttgccgtcaaccagaacctcttctttgagaagttngtgttcgctatgctcaagatgggtcagcttaatgtgctcaccgggaaac

SEQ ID NO: 215327 - DNA, 421 bp, Glycine max
gaaaacaataaatgagaagctctcattcggatttttccattataactgaggtacaagtagctagctagggccattagacaatggttccttatcacaaaaaaaagccctctgctgggaacaagaaacaagggcttatcaattattcatcatcaccacaacatatatatacaacaaacatacactatcatgcatgcatcgacccagtcacattacatttctatcaaagtttccaccacatcttccaccacagaagtcaagagggacttgttattggcatttctaacggagcaattggcacgaatctccccttgtttcccggtgagcacattaagctgacccatcttgagcatagcgaacacaaacttctaaagaagaggttctggttgacggcaaagtacgtgacaatgcccttagtccttta

SEQ ID NO: 215328 - DNA, 550 bp, Glycine max
ctaaggtcattagattcttattttggaaaactccaagataatgcaaaattgcgtacatttgattcatcacacaaggtgatacagttgcatcacatagatcgtcaagctagatcaaaaactggactggaatctcttgaggagtatcttggcaactaaatcatgaagcaaaccaagaaccttgtgtgccatcgtatgttgagaatcatagtgaagaaaatttagcaccaaaacgatctctcagcaaagatattgaaagatcaaactttaggaaacaaaatgcttttgtggatataagaaggctaaaacgtttacatgatccaaggtctgctatagattcacagcagcaagttgaaacctccagtctctacctaattggcatattggcttctgtaaacattgcagtgtttctatttgaaatagcaagtcctataaggacttctgatttagagctggtttctattccactactatatggagcaaagataaatcatttgatcatggttggagaatggtggaggcttgtaacaccaatgtttctggtacacaattg

SEQ ID NO: 215329 - DNA, 557 bp, Glycine max
aaaaaagaggagcatcacggccatgatcgcattttgctgaggctaaaaagataagcaaagcgtgaaaaatcgcaaaataccaaatcaaaataacaagcacaattacagtgactccgcttgggtcctcttctttgatcttcggtttgattctgcgtttgttcacatcatggccaccgtttcagtggcatttaagtccagggaggaccaccgcaagcagattgagttggaggaggcgcgtaaagcggggcttgcgccagctgaactcgatgaagatggaaaggaaatcaatccttacattccccagtatatgtcctctgctccttggtatcttaatgctgagagacctagtttgaaacatcaaaggaaatggaaatctgaccccaattacaccaaatcatggtacgatagaggtgctaaaatctttcaggcagacaagtatcgtgaaggtgcttgtgagaactgtggagctatgacacatgattcttaatcatgcatgtgaagaccaccgagagtgggagcataatggacaaacaaacacattgctcctgatgaaaaga

SEQ ID NO: 215330 - DNA, 568 bp, Glycine max
ggctgctgcagcagcagaagaagctatgtgataacatgtgcagcaggtgactcacagacagtggtgattggcctggctgcagactcagggtgtgggaagagcaccttcatgaggaggctgaccagtgtgtttggaggaacagcagagccaccaaagggtggcaaccctgactccaacactctcatcagtgacaccaccactgtcatatgcttggatgattaccactctttggacagaactggaagaaaggagaagggtgtcactgcccttgaccctagagccaatgattttgatctcatgtatgaacaagttaaagctcttaaggatggaattgctgttgaaaaaccaatctacaaccatgtcactggtctcttggatccccctgagctcattaaaccccccaaaatcttagtcattgaaggtttgcacccaatgtttgattcccgtgtcagagatctcttggactttagcatctacctagacattagcaatgaggtcaaattcgcttggaaaattcagagagacatggcagagcgtggacacagtcttgaaagcatcaaggctagca

SEQ ID NO: 215331 - DNA, 554 bp, Glycine max
  unsure (1)..(554): unsure at all n locations
cgcaagtccacaacatggctgccactgccgctgcaggcatagcttccttgttttcttcttctattaacagtgtcaaatgtcttcgttcctccaagaactgctccattatagacccccttataaccacagtgccctcaaaccgtggcatgtttgtgtcacacttggtggaacctttgtccattgggggtgccattaattcgcacaagttgtgggggcctagaatttctgctgctgttgcacaagaagaggctgttgttgtggctgatgatgaggtagatgatggtgctggtttagttgaagaagagaaagtggaggagaatgaaggagaagtagttgcagaacaagactctgattcctctgccaccaagctttattttgggaatttgccttatagtgttgatagtgccaaacttgcagggctaattcaggattttggtagcgcagaactaattgaggttctttacgacagggatactggaaaaagtagaggctttgcatttgtacaatgagttgtattgaagactgntatgcagtaatagaaatcttgatggaaa

SEQ ID NO: 215332 - DNA, 579 bp, Glycine max
aaataaaagtgcccccattttcccaaaatcaccatctagagttttctcttttccactgaaaatcaaattagggtttggatttcggaattgccacagaatcatggccactctgaaagagcttcttcctcctgcaaaatcctcctccaccgtctactacgaccacaccaacgatccatggttcaagcagcgtttctcctcagaagaggaggagaaatccgccgccgccgccgccgccaagcagaagcccgttcccccctacctgaagcgcgccggcttcgttcctcggaaaatcgaggacttcggagacggcggcgccttccctgagatccacgttgcacagtatcctctcgacatgggaagagaaaagtccggcgccaaacctggatccaaaatcctccctgtcaccgtcgacgctaacggcaacgttgcctacgatgccatcgtgaggcaaaacgagaacgcatgaaaaattgtctacacgcagcagaaggatcttatccctaagtttctcaagaacgacgaagatgacgacgacgtcgtttccgacgacgaagcacatgaacagatcgaggaaacgat

SEQ ID NO: 215333 - DNA, 563 bp, Glycine max
gggacaggaatggttaaagctggatttgctggggatgatgctccaagggctgtgtttcccagcattgttggtcgtccccgtcacacgggagtgatggttggcatgggccaaaaagatgcatatgtcggggatgaagctcagtccaagagaggtatattaactctcaaatatcccattgagcatggtattgtgagtaactgggatgacatggagaagatctggcatcacaccttctacaatgaactccgtgtcgctcctgaggagcacccagttctgctcaccgaagcacctctcaacccaaaggctaatcgggagaaaatgacccaaattatgtttgagaccttcaatacccctgccatgtatgttgccatccaggctgctctatccttgtatgccagtggccgtacaactggtatcgatctagactctggagatggtgtgagccataccgtcctcatttacgaaggctacgctctccctcatgccatacttcgtcttgacttatcaagacgtgatctcactgatgccttgatgaaaatgctacagacgtggtatttctttac

SEQ ID NO: 215334 - DNA, 597 bp, Glycine max
ctgcatcagcatctcttctcaagtcttcacttgttcttgacaagtctgagtgggtgaagggacaaacacttcgccaaccttctgctgcatcagttgtgagatgcaaccccaccaccccatcaggcctcacaatcagagctggttcctatgctgatgagctcgttaagaccgcgaaaacagtggcttcaccagggaggggtattttggccatggatgagtccaatgctacctgtgggaagcgtttggcttcaattgggctagagaacactgaagctaaccgccaggcgtaccgtaccctccttgtgacagttccaggacttggtcagtacatctctggtgccattctctttgaggaaactctctaccaatccacaactgatggcaggaagattgttgacgtgctcctcgagcaaaacattgttcccggtattaaagtcgacaagggtttggtaccccttgctggttccaacgatgagtcatggtgccaaggtcttgatggtcttgcctctcgctcggctgcatactaccagcaaggtgcccgtttcgccaaatggcgtactggtgtgagcatccccaacggtccctctgttctgcagt

SEQ ID NO: 215335 - DNA, 584 bp, Glycine max
aaaaaagattctaaagaaatataactaatattctttagaataatcaaaaagaatattaaattcaaataaattttagatagaaaaaagacttaaaaaggaggatttgaaatgcgagatctaaaaacatatctttccgtggcaccagtagtaagtactctatggttcggggctttggcgggtctcttgatagagatcaatcgtttttttccagatgcattgatattcccttttttttcattctagttattgacacggaaaggggtgaagaagattatagatccaattaagtattaaatatatgtaattaatatgtaattaatctcctcttctttatttcgtcttttatttcttctcttttttacaattgtaatagaataagttaggaaagagaaagaataagggttaatttggcctaattgaaattcggagtgaaactcgggatctcgtccaggcttccatggaattgaattaataattcaattccatttctattaataaaagagtgaaagcagaaatttaaatggaatgtatagggtggtggcaacaatatcataaaaaatcttagttaaaaaacgaaatactga

SEQ ID NO: 215336 - DNA, 559 bp, Glycine max
tgctcttgcaatttgtcagaggttgacgagatacaaggattatcaagagcaaacagtccagtgtaaggaatctaacaaggacaggctctgtgttgatgtcctggagagggagatgagaagaaattctatgactgtgaatatgtctgtttcatcacagctaacagccaatgatttgcacatgagactggattaccttgaagatagagttgcatttgctcggctgttttttcctgctgaggctagggtagccattgagaatgctgaagcagattcatcgtcgatgtacgcaaactcatcggctttgaagggcacaaatggcaacctgaaacaagtagatctaaatgaatctccctctgctcataccagaaaacttcagttaagattacatgcccttatgaaaacagttgagaatggtaggcgcttctttccccattgctctgaagtgcttgataagtttctggaagatgacgatatgccagatgttttcttcctagagaagggcagtgaagacgagcagagaatcaagatagcacgcttcatggaacttaaagatgatgtg

SEQ ID NO: 215337 - DNA, 553 bp, Glycine max
  unsure (1)..(553): unsure at all n locations
tcaacttttacgatgttttcttggggcagaagattccaactctctctacggtatagcataaggccgtttggcagccaatcacaaggctccacgtcatcatcatcttcttcttctttcagctcctttggtgggtccaggcatggtgacaatagggtcagagactttgaggcctttcttagatcaatcacttctggggttgtggttgttagctccaccttaggctattggtattggtcatctttgacttctcctggtgccaattctcttcagtcatttgctgatggttatgctaatgaagaggatcagtttcaacaaaacgatgaaaacaaacccaagttcctctttaatgatggctatagaagaagagtattcttcaattatgaaaaacgaattcgcttgcagagccccccagaaaaggttttcgagtactttgcatctgttcgaagccctagtggtgagatttttatgacacctgccgatttgatgcgtgccattgntcctgtctttcctgcttctgagtcaaaccgtgttaaagagggttttctaagagggg

SEQ ID NO: 215338 - DNA, 524 bp, Glycine max
ccctaaatgatgttgtatatggttgaattcattacagtaaaaagatggatacttatgaacgtattccatcaaaattgaactgagctgatgaacagttttttacacagttcaaccaacaggatgttaaacccccgaagctgtcatgacgtgatgaattgttgctttcccttctttgtacaactctcacaaactcggctgcacttaagcttccgtcacgatttgcatcaaacacatgaaagattatgtcaaccacttcatctgtaatgcaaacaccacacacttgtgatgctgcactctgaaaatcagattttgtcaatactccattaacttttccataactgaatatggccagagagaaggatttcaatttcttgcgtaattctgcaaaatcttgaaacttcttgaatgtaattcttatgtgtcttaggttctggtcactgtttaattcttcgaccctatcaatagtttgtttatgtgattgatgtccgcagatgcaaccaaggacagggcaaaatctctggctg

SEQ ID NO: 215339 - DNA, 600 bp, Glycine max
gacgaagcatacgaggaagagcttctcgattacgaggaggaagacgaaaaggcccccgactccgccggagctaaagtcaacggcgaagctaccaagaagggctatgttggaattcacagttcgggattcagggacttcctttctgaagccagagcttcttcgggctattgtggactcgggatttgagcatccatctgaagtgcaacatgagtgcataccacaagcaattctcgggatggatgtaatttgtcaagcaaaatctggaatgggaaagactgctgtctttgttctctctactctgcagcagattgatcctgttcctggccaagtttctgcactggttctttgtcatacaagagaattggcataccagatatgccatgagtttgagaggtttagcacttacttacccgatctcaaggttgctgtctgttatggtggagtcaacatcaaagttcacaatgatctgctgaaaaatgagtgccctcatattgttgttggaacaccgggaagaatactagcattgactagggataaggacctttctttaaagaatgttagacatttcatattggatgaatgcgacaagatgctggaatc

SEQ ID NO: 215340 - DNA, 580 bp, Glycine max
cttttcagatattttcactgctcaacttaagactaagcatgagcagcagcagcagcagcagcagattgtttgagaatgggtgaagtgccggctgtgatgcaggcgacgcatggggaacagagcaacaatgcctccgctgttcattgagagcgctttctgcctcggatggtgcttcgggtcttgcttgtcgaagctgatgattctactcgacagatcattgctgcacttctccgtaaatgcggttacaaagtgatgtcttctcatgattcagtaagcatggtgtttaaatgcatgttaaaaggtgcagctgattttcttataaaacctgttcgcaagaatgagctaagaaacttgtggcagcatgtatggagaaggcacgccataagcaggccttctcaaaatttaacactgccggagattgaacttggttttgctgcagaaaaccatgctgcaagcaatgactctagtggttctgtggcttctacaccaaaagatgaaatgcagtgagaatacaagtgatgctcatagcacttgcccatcgtcatctttggaagctgagaatacctacatggaaaatatg

SEQ ID NO: 215341 - DNA, 573 bp, Glycine max
ccataataaaaaaaaaaactttgcaatttcgtaggagatgctcaggagcagcacgctaacacagagtgttacagtcacctgtgttcatcacagtcacagacaatggttccaatcaattcccgtaaattatagattctgtgacgctgctcggaactctctatcatccaacttcgccatcttcaagtggaaaagaacggctaattataatcgtaaccgttctggaatgggaaccttcaccacgcgcgcgttggcgcagccgctccagaacgccgacgaactcatcgattccgtcgagacatttattttcgattgtgacggagttatatggaaaggtgacaaattaatagaaggggtgcctgaaacgcttgacatgcttcggtcaaagggcaaaagattagtttttgtcaccaataactcaacaaagtctaggaagcaatatggaaagaagtttgaaacacttggcctgaatgtcagcgaggaggagatttttgcatcatcctttgcagctgctgcatatctgaagtccattgatttcccaaaagataaaaaggtttatgtcattggagaagatgg

SEQ ID NO: 215342 - DNA, 513 bp, Glycine max
ctctcctatgccttataactttacctttctatcctcatggagtagtaaagaagtcactaatcaaccacaaacctaaacaaccccttttgcctaaagctccttccttttctccaatggcaacctgggttttatcaaaatgtggcttaaggcctctttgaccagtgtttccacggtcaacaagacccattgcgagccaaaaaccttcaaagtctagatttttaagcacaaacaagggtgcgccagatctgaatctccaagcaagagggttaacatgctgtagttttagggatagaaagtgggaattgggagtgagtgctccactgaaagttgccaccaatgagggagaggaagaagagagaaccaatggggctaataatggggtcggtgatgaagtttcagaatttgaccctagtgcaccaccaccctttaaattggcagatattagagctgccattcctaaacactgttgggtgaacgacccttggagtccatgagttatggtgatagagatgt

SEQ ID NO: 215343 - DNA, 485 bp, Glycine max
gttcatctctgagggtggcctgcgggccatagactccctctggagggagtacagtggcgggaaattcgggtacagcgtgcagaagaagctactggagaaggccaatggggacttcaccaagttcttcatcaaggatgggtggatgaagaagcttgacactgagatggagcaatacaactacaggtccttccccactgagttcatctgggagctcaatgatgacaccccagaggggcatttgcctctcacaaacgctctcagagggacacagttgctcaacaacgttctcaaacacccagcttttgatgtagttgatgacatagaagaataagaccaagatggtgagaacaatgaaaatggaggagcaatctctggcacaggattaaaggataatggttcttcttcaaagaggatcttcaaaacggactatagcttctgagtgcatataggaatggatgtactataattaggaggtgtaaatttac

SEQ ID NO: 215344 - DNA, 573 bp, Glycine max
gtgataattatgtgtatgtgaaacaatttgatgataatagatgtgtcattttatgtatgtatcttgatgacatattgatatttggtggtaatatgcatttcataaattatgtgaagtccttattgtttagaaactttgacatacaagaccttggtcaagtacatgtgattttgggaattaagcttataaagaaaaatgatggcatgacttttacccaatcttattatgttgaaaaactattgaagaagtttaattattttgatgcgaaacatgcttttactccttatgactcatccatgaagttaaagaaaaatttgaataatggaatttcttcacataaatattctcaaagtatcggttctttgatgcatttgacaaatttctctaggtctgtctaatattgcacatgcagttggtagattgtaaagtaattgaagaatttagtgatacaagattgaagttctgattatgatgaaataaaattgacgagtgattatgtctctgctttagctggatgtgcagtatcatgaaatattactagacatatgattatttcgtatgaaagcaaaaatt

SEQ ID NO: 215345 - DNA, 563 bp, Glycine max
gtcgcaaccaatagggaaaccggagcattatgtgcaatgaaggaagtagagttatttcctgatgatccaaaatctgcagagtgtataaagcagttagagcaggaaattaaagttcttagcaatctaaaacattcaaacatcgtacagtattatggcagtgaaatagttgaggaccggttttatatttatctggaatatgttcatcctggttcaattaataaatatgtccgtgaacattgtggtgccataacagaatctgttattcggaatttcactcggcatattccctcagggttggcttatttacatagcaaaaaaaccattcatagggacatcaaaggggctaacttgcttgttgactctgctggagttgttaagctagctgattttgggatggctaagcatcttactgggtttgaagctaatctttctttgaggggaagtccatactggatggctccagagcttttgcaggctgtgatacataaggataacagccctgatcttgcttttgctattgatatttggagtttgggttgtaccatcattgaaatgttcactgg

SEQ ID NO: 215346 - DNA, 584 bp, Glycine max
  unsure (1)..(584): unsure at all n locations
aatggcaactggatctaccttgtgacaaaattcctagtgtcttgactacaactgatgagagattggtaggcacagaacatgagggatatgatccttttcttggtggaattcaaaaatatgccactcccatgatgcccctagatgaagaaattctttctaaagttgcacaagatatggttgaggaatggtttgattgtgttgatgaggaggattcctttgaggaagtttctttaagtgcagcacttaatggtgttgagggtttggactatatggaaagaattcctcttgccacatctgagggttttcctcatgtgctttcacgcaaaaatggtgaaaaaggcaaaagaagatttgtttctggggatggtgaagagatgacattgattccgggaaccagtgttgaagaggcttacaacaagctaatagttgaacttgagaaaagtgttcctacattggttggcattgaatgtcccaaggatgagaaacttcctcgtcgcanaatttttgacaaacctaagacgcgctgcttcactattctccctatgaagttaatcttgggtccgtcaaaagtttttaaaatttgg

SEQ ID NO: 215347 - DNA, 547 bp, Glycine max
cgtccatggccactttcttcacccaaacctccttcccctcccactctctctccaaaaccttcgatacccatttcgccccatccccgaaagtcaacgtatttgcgaacttcccggcgaggaggcacgtgggggttcgagtttcgaacgcgctgatcgaaccagacggagggaagctggtggagcttgtggtgagggataattcagaaagagacttgaagaagggtgaggctctttcgttgccgaggatcaagctttcaaggattgacctggagtgggtccatgtcctcagcgaaggatgggccacacccctcagaggcttcatgagagaagccgagttcctccaaacgcttcatttcaactctctccgactcgatgatgggtcggtcgtgaacatgtcagtgcccatcgtgctggctattgatgatgcccagaagcataagatcggtgataacaaaaggggttgctctttcattccaagggagaccctgtttgcattctcaatgatggtgagattataagcattctaaagatgaaagatagccccgac

SEQ ID NO: 215348 - DNA, 546 bp, Glycine max
gcagagatccttaaagatcgtccatcttggttccgtgactgtcggagcctagaagtttttactatgtttcctgctggaaatggaggaaccattgaacttgtttacacacagacatatgctccaacaacactggctcctgctcgggatttctggactctgagatataccacaagtttggaaaatggcagtcttgtggtttgtgagaggtccctgtctggttctggaactggccctaatccagctgctgctgctcagtttgtaagggctgaaacactccctagtggctacttgatccgaccatgtgaaggtggagggtcaatcattcacatagtagaccacctaaatctcgaggcatggagtgtgccagaagtgttgcggccactttatgaatcatccaaggtggttgctcagaaaatgacaattgcagcgcttcgctatatcaggcaaatagctcaagaaacaagtggtgaggttgtttatggattgggtaggcagcctgctgttctgcggactttcagccagagattgagcagaggcttcaatgac

SEQ ID NO: 215349 - DNA, 304 bp, Glycine max
ctcgagccgattcggctcgagcatggttgtacttgtatatacatatcttgtcccacctttgtaaatacaattgggacactactaggattgggaagaagggtctttacatttatagtttggcaaatagatattgcaactacctttgtataattctatttctgaagaagcaattacaatttacaagggatggtgccatttacggcataaggattaaggagggataaagggaccaattgctttggaatatccactcattacaatgcatgtatgacaacacatagtaatatgatgtgtgtttttattc

SEQ ID NO: 215350 - DNA, 532 bp, Glycine max
cagaagcttgtgatttagtttttgatgcagcaagtgagggaaaacaattcttaattgttggtacaaaaaaaaaagcagcggatttagtagcacgggctgcaataagagctcggtgtcattatgttaataaaaagtggctcggcggtatgttaacgaattggtatactacagaaacacgacttcaaaagttcagggacttgagaatgcaacaaaagacggggagactcaatagttttccaaaaagagatgccgctatattgaagagacatttagctcatttggaaacatatcttggcggcattaaatatatgacggggttacctgatattgtaataatcgtcgatcaacaagaagaatatacggctcttcgagaatgtataactttggaaattccaacaatttgtttaatcgatacaaattgtgacccggacctcgccgatatttcaattccagctaatgatgatgctatagcctcaattcgattaattcttaacaaattagtatttgcaatttgtgagggccgttctagcta

SEQ ID NO: 215351 - DNA, 577 bp, Glycine max
  unsure (1)..(577): unsure at all n locations
accgaactcaacactcgcagcaccgccatgagtgccgccacttcctccaccctctccaccgtcaccgatgccaatcttcactccagatttcattctcgtcttgttccattcactcatcatttctcactttctcaacccaaacggatttcttcaatcagatgccaatcaattaataccgataagaagaaatcaagtagaaatctgctggacaatgcaagtaacctcctcacggacttattaagtggtggaagtatagggtctatgcccatagctgaaggtgcagtctcagatctgcttggtcgacctctctttttctcactgtatgattggttcttggagcatggtgcggtgtataaacttgcctttggaccaaaagcatttgttgttgtatcagatcccatagttgctagacatattctgcgagaaaatgcattttcttatgacaagggagtacttgctgatatccctgaaccaataatgggcaaaggactcataccagcagaccttgatacttggaaagcaaggagaagagtcattgctccggcttccataactcatactnggaagctatggtaaa

SEQ ID NO: 215352 - DNA, 556 bp, Glycine max
ggctcgagggttcagttaattagtttctctctttgcactttctcttgtttccacaaagccatgaaatcacgtcctttgcacatagcaatgtatccatggctggccatgggtcaccaaaccgcattcctccacctatgcaacaagttagccattaggggccacaaaatctccttcatcaccccaccaaaagcacaagccaagttagaaccattcaacttgcacccaaattcaatcacctttgtcaccatcaatgttccacacgttgaaggccttcctccagatgcacaaacaacagcagatgtcacttaccctttgcagccacagatcatgacagccatggatctcaccaaagatgacatagaaacccttctcactggcctcaaacctgacctcgtcttctatgacttcacacattggatgccagccttagcaaagcgtttaggcatcaaggctgtgcactattgtactgctagctctgtcatggatggttacactctcacaccgtctagatttcaccaaggaacagacctaatggaaagtgatctcatggaacccc

SEQ ID NO: 215353 - DNA, 575 bp, Glycine max
acagagtgcgttgttgctccttcgccacaactccctgccaacatgggtatctccagagattctatgcacaagaggcgtgccactggtggcaagaagaaggcatggaggaagaagagaaagtatgagcttggtcgccagcctgctaacactaagctgtcaagcaacaagacagtcaggaggatccgggttagaggtggaaatgtgaagtggagggcactgagattggatactggaaattactcctggggaagtgaagctgtaactcgcaagactcgtatactagatgtggtttacaatgcctcaaacaacgagcttgtgcgtactcagactcttgtaaaaagtgctattgttcaagttgatgctgctccattcaaacagtggtaccttcagcactatggtgttgagattggtaggaagaagaagacagctgccaagaaggaaactgcagaggagggtgctgctgctgctgctgtggaagaagccaaaaagagtaatcatctgcagagaaaattggagaagcgccagaaagatcgttagcttgatgctcacattgaggagcagtttggtggtggccg

SEQ ID NO: 215354 - DNA, 507 bp, Glycine max
gttgcgctgaaatagagacaatcggttggggttggtagtgttgcgttgcgttgcgtatttgtgaaattgatgcagcgcggtgctcgctgaagtgaagtaatcccttttggttgtgttgtgggtaatgcttctcagtaattctagtccaccattttcatttgtctcaggaatcactatgagtatgactaagggaataactccaagagattctcttttgctgaagcccaaccctttatcttctcttagttcactccattctctccagcatggtaacaatacgattagagttcctgtgactataagaattcaaccagagaggttttgtcatggtgcgctaaccatcaagaatgaagtgccgcaaaatgctgattttcctcgacagtattccagaaaagagaagaaacctttttcagttcccattgtagaactgcgacgagcagctagggagaagatgatgaagatgaaagatgaacccgagaaaccaatgtcagcacctaagaatgggtt

SEQ ID NO: 215355 - DNA, 407 bp, Glycine max
ccccctgggatctaaaagattaattcatacaacagagtttaaataacctgcattacacgcttcccttacctttcccactttttactcctatcccccaagttcaaaagaatgctcaaatgcgggtaacttgcacaattattttttgaacaagctagccagttcacctttctcatacatggggggcaatatatcacaacccccaaccagttcaccatccacaaaaatctgagggaatgtgggccagttgctgtactttttaagggtttccctcaattcgtaattatactcttcgtcgagcacatttacactctcataatctactccttcattttcaagaatggctatcaccctctgtgagaatccacataagggtgcacttctagggcccttaatgaatgcaactacct

SEQ ID NO: 215356 - DNA, 509 bp, Glycine max
agttattccgatattcggacgcatcaacttgttatgaaatcacattgatagcctctactcgtgtcctagctcgtctaagagctagatttgcctcaattgtttgtctcttgccttccgccttattcaaattagcttctgctatttcaagagtttgctgtgcttcttgtggatcaatgtcactacccttttccgcatcatttactaaaacagtgatctcattattgtttattctagcaaaaccgcccatcagagccatcgttaaccattggtctttaagaagacgtattctcaaaatacctatatctacggctgtggcaataggcgcatgatttggtaatactccaatttgtccgctattagtagataaaatgatttccttcacttccgaatcccaaacaattcgattgggggtcagtacacaaagatttaaagtcatttcttcaaattgctctccatttctaagttcgtagctttcgcagtagcttcatcgatattacctaccaaataaa

SEQ ID NO: 215357 - DNA, 582 bp, Glycine max
  unsure (1)..(582): unsure at all n locations
gatacgtaaaacaacgctttgaactttccatctttacatcatgcatttacaagggttttgagggagacatttgaagaaacagaacaagatacagaggaaacctttctcgtctattgccccttgacacaacatataggaaaaactatatgaatatagtgagacaaaatgattaaaatgaactatggacagctatagggaactgaggatgtcttttattattgacaaaatagggttgccaaaaggatattcttccaatgtctgaaactttattccatccatccgggcttgaactccatcagaaaatgtcaagccctgaagcagttcctttgccgttctgtcagctccaacgagggaactccctacgcctaacaaaatctcgggtagagaagggctggctctagagatctccacaagtgtaacctgtctgtcttgaggtatatcagccttcatttttgctatggcaatagctcgagaaaggccaccaatagcatcaactaaaccacgcanagctgcatccttaccagtccaaacccttccctgtgcaaactcctccatcttttctacagtcattgatctggatga

SEQ ID NO: 215358 - DNA, 579 bp, Glycine max
gcagagatccttaaagatcgtccatcttggttccgtgactgtcggagcctagaagtttttactatgtttcctgctggaaatggaggaaccattgaacttgtttacacacagacatatgctccaacaacactggctcctgctcgggatttctggactctgagatataccacaagtttggaaaatggcagtcttgtggtttgtgagaggtccctgtctggttctggaactggccctaatccagctgctgctgctcagtttgtaagggctgaaacactccctagtggctacttgatccgaccatgtgaaggtggagggtcaatcattcacatagtagaccacctaaatctcgaggcatggagtgtgccagaagtgttgcggccactttatgaatcatccaaggtggttgcttagacaatgacaattgcagcgcttcgctatatcaggcaaatagctcatgaaacatgtggtgaggttgtttatggattgtgtaggcagcctgctgttctgcggactttcagccagagattgagcagaggctttaatgacgctgttattggattcaatgatgaatggttgact

SEQ ID NO: 215359 - DNA, 595 bp, Glycine max
gatggccagaaaatgatcagtgaccttatgtcaatctatgatacaaattttcaaagcaacaagaacctaagttccagtaaccatgtagctgcagaaaatcccagccttcctcagccaggcattcggcagcaacaggacaacttctttcgcagtcaaggaatcactatggaaggaaacttctatgaagaagccaacatgcccaacaatcatcacatgtttgcaagagaggaaagtcaatttgaccggttcaaagctttgaatgcaccaccctttgagagcaatcacaacaataacttccatttgatgtttgggtccccttgtgatttggcatcctttgatttcaaggaggatatgcaaggaggaggagggatggatgctcttcagaaacaggcagatatctctatttggtatcagtgaaaatgacagcttaaagctggaaacctcatcatcattatcatctatcatggactctttattttccttccaaaagggttggcacccctgatcatgtgaagttcctttggccaaaaaagggttcactgcaattttcttcacatggtatcctggaggcctagtagaactaaaatatttaagc

SEQ ID NO: 215360 - DNA, 594 bp, Glycine max
cacaactatttcaggatcatcaaaacaagaaagcaatgagggtagccgtcttttcaagataatggcaaaatccttttcaaaaagatggcagaatggagaaataagcaatttccagtacctcatgcatctaaacaccttggcaggacgtggatatagtgatctcacccaatatcctgtctttccatgggtccttgcagattatgagagtgaaaatcttgatttgtccaacccaaaaacatttcgtaggcttgataaaccaatgggttgccagactcctgaaggtgaagatgagtttagaaaaagatatgagagctgggatgatccggaggtcccaaagtttcactatggatctcattattctagtgctggaattgtcctattctatcttctccgcctacccccattcagtacagagaatcaaaaacttcaaggtggccagtttgaccatgctgatcgccttttcaatagcataaaggatacttggcttagtgctgctgggaagggaaacacatctgatgtgaaggaattgattccagaaattttctacatgcccgagttcttggagaatcaattcaatcttgacttgggagagaa

SEQ ID NO: 215361 - DNA, 581 bp, Glycine max
accgaactcaacactcgcagcaccgccatgagtgccgccacttcctccaccctctccaccgtcaccgatgccaatcttcactccagatttcattctcgtcttgttccattcactcatcatttctcactttctcaacccaaacggatttcttcaatcagatgccaatcaattaataccgataagaagaaatcaagtagaaatctgctggacaatgcaagtaacctcctcacggacttattaagtggtggaagtatagggtctatgcccatagctgaaggtgcagtctcagatctgcttggtcgacctctctttttctcactgtatgattggttcttggagcatggtgcggtgtataaacttgcctttggaccaaaagcatttgttgttgtatcagatcccatagttgctagacatattctgcgagaaaatgcattttcttatgacaagggagtacttgctgatatccttgaaccaataatgggcaaaggactcataccagcagaccttgatacttggaaagcaaggagaagagtcattgctcccgctttccataactcatacttggaagctatggtaaaata

SEQ ID NO: 215362 - DNA, 554 bp, Glycine max
  unsure (1)..(554): unsure at all n locations
acagaatcaaatttaactcccttttctccttcatcacgtgacctgcaagcatcagcatcaccatcatcatcatctgaatcgttgaggaaagttgccaagttgatggatagctacattgcagaaattgcttctgatgttaatttaaaaccgggaaagatacgcaggcttgcagaggccctccctgagtcatcaagattattgcatgatgggctttacagggcattggacatatatttcaaggctcacccttggctctctgatagagagaaggaagaactatgcaacatcatagactaccagaaactctcaatccatgcttgtgctcatgcttcccaaaatgacaggttacccctcagagttgttcttcaagtgctcttctttgaacaactgcatttgagaacagcattagctggatgtctcaatgcattggatggtgaaattgctccggcagctcctgttcctataactgccctgngcgacacagcangtgaaattgtacaaagggatggatgggtgactgatgtgcgtgaaaaccaggttttgaggtggatatg

SEQ ID NO: 215363 - DNA, 567 bp, Glycine max
gctcggaattcggctcgagagaaaaacaagtagttgagaactaagaagaaggaaatggcttcctcaatgatctcctccccagctgttaccaccgtcaaccgtgccggtgccggcatggttgctccattcaccggcctcaaatccatggctggcttccccacgaggaagaccaacaatgacattacctccattgctagcaacggtggaagagtacaatgcatgcaggtgtggccaccaattggcaagaagaagttcgagactctttcctacttgccagacctcgatgatgcccaattggcaaaggaagtcgaataccttctaaggaaaggatggattccttgcttggaattcgagttggaggtcaatttcttgcaaccccttttggtttaattatagtttcttagtcttagtttgtttcaacttattttgaagaaataatcgcttctcttgctggcgtgctaaaagtacctttggaaacaaataaaataaataaaaaaagagaagtggttgttttccaataattaagttatctaatggattttccatcctagacttatcaatattgat

SEQ ID NO: 215364 - DNA, 551 bp, Glycine max
atttaccgctatgctttccacaatataggtaccacttggtctatgtcttactctccttgtgcttctcttgctcttcatacgcaatctcagaaccttcaagaacccaccccttcctccaggtactaaaggccttccaataataggagatttacatcaatttgatagctccattctttatctgcagctatggcaactctcaaagaaatatggccctatattttctcttcaattagggttaaagccatccatagttgcctcctctcctaaactagccaaagaggtactgagaaaccatgacctagaggttagtggacgacctatactacttggccaacagaaattgccctataatgggtcagagattgcatttatcccatacaatgaatattggagacaaattacaaaaattggtgatgtccatatctttagctccaagcgtgtatctagctattcctctactagaaattgtgaggtgaaacagatgataataaaatatctgggcatgcctcttttacgatgtacaaacttgatgagtactcatgctctatcag

SEQ ID NO: 215365 - DNA, 536 bp, Glycine max
ctctcacgctaccgccatcgttcatcaatggccaccctcaacctctcttcgttgcaagctctctcctcccatcgtttatgctcttcttttccccaaaatacccctaccccttccttcaatttccagctaaaaccctcaattaacccgcgcccaatttctctgaaaccctacgtttccgagaagcctcgcgcgcgcgtggtggcattggccgtgaagagcctcggcgatacggaggcgctggcggtgtcgcctgaaaatgacggccccgccggagaactgccgtcgggcgccggcgtctacgccgtgtacgacacgaacggcgacgttcagttcatcggtttgtcgcggaacattgccgcgagcgttgcggcgcactggaaatcagtgccggagctgtgcggttccgttaaggctggggtagtggatgaaccagacagagaaactctaacccaagcatggaagtcttggatggaagaatacataaaagatagtggaaaagttccaccttgcaacgaatcaggaaatgccacttgggt

SEQ ID NO: 215366 - DNA, 437 bp, Glycine max
ggatatgccgaaagtggtagtagttctagcgggtgactcgcttttttcaaattggttttcattattaaaaaaagggaacgaaaataaaataccagcttgttttatagcaattggtattaatcgttgttgttttaagggcaatctatttacgcgtctggataatatttctccttggtcactaataaatcgactaattaaacccctgtttttataatcaattcggtcccccgattggatcgggggcaaacgcctaccaaaagatcgcttggatttcataaagagtcgcttagatttttccatgggttatttatccctattccaaaaatcacatttatttcaagaaatactattaaggatttcgttttttattctgacttttttaatagatgggggggagtcctttaatatatggcggaatataccgagatttggatata

SEQ ID NO: 215367 - DNA, 466 bp, Glycine max
caccatcttcatcacatggcaaacgcagcatctggtatggcagtccatgatgactgcaagttgaggtttttggagctgaaggcaaaaaggacacaccgtttcatagtttttaagattgaggagcagcagaagcaggtcattgtggagaagcttggtgagcctgcccagggctatgaagatttcactgccagccttcctgctgacgagtgccgttatgctgtttatgattttgagtatctgactgaagggaatgtccctaaaagcagaatttttttcattgcgtggtcccctgacacatcaagggtgaggagcatgatgatttatgcaagctccaaagacagattcaagagggagctggatggaattcaagtagagttgcaagcaactgatcctactgagatgggtcttgatgtgttcaaaagccgtgccaactaaaatgattatttaaaatagtaggctttctggt

SEQ ID NO: 215368 - DNA, 584 bp, Glycine max
cacacttacacacagaataaccataaccataaccataccacagccatggccactctaagcttcaaccccgttagaataaaaacctcaacgttgaaacattccaaactcaccactactccatcaaaacccatcacaatcccatgcaccactccctccaacagccatcccaaactgctccacttccgaacccgttcggtgtccgagagcacccaccagaaagaagcacccgaagcggttctcggagaacatgaagaagaagaagatgatgatgatgacccaacttcggaactgagctacgtggacccagaaactgaccctgagagcatcacggagtgggaactggacttctgctccaggcccattctcgacgtcagagggaagaagatttgggagctcgttgtgtgcgacaagacgctgtcgttgcagtacaccaagtatttcccgaacaatgtcattaacagcattacccttaaggatgctattgttgccgtcagtgaccagttgggtgttccgttgcccagaaacattcgcttctttaggtcgcagatgcagacaatattacaaatgcgtgtaatgagcttcgc

SEQ ID NO: 215369 - DNA, 535 bp, Glycine max
ctggggttgggcagcatcaaatgtgggctgcacagttttacaagtacaagagaccgaggcagtggttgacctcggggggtcttggagccatgggttttggattgcctgcggctattggcgctgctgttgctaaccccggcgctgttgtggttgacattgatggagatggtagtttcatcatgaatgttcaagaattggcaactataagagtggagaatcttcctgttaagatattgttgttgaataatcagcatttgggcatggtggttcagtgggaggatcggttctacaagtccaatagagctcacacctatcttggagacccgtctagcgagaatgagatattcccaaacatgctcaagtttgctgacgcttgtgggataccggcagcgcgtgtgacgaagaaggaagagcttagagcagaaattcagaaaatgttggacacccctggcccctaccttcttgatgtcattgtgccacatcaggagcatgtgttgccgatgattcccagtaatggatccttcaggatgtgata

SEQ ID NO: 215370 - DNA, 467 bp, Glycine max
gtatcctgcctgttcaagaaccaaaaatgatgacacaaataattgtagatgctacggagatcactgtacagaggggcatcatcaataaaggatggggaggccttgggaatatggcagaaccaaaggactctatatacttattggataattgccctcatgagtggcttttcttgcgatgcaaggctgtggttcatcacggacgtgctggcacaacagctgcggggatcaaagctgcttgcccaacatccatagttccttttttcggcgatcaaccattgtgggatgagagagtacatgctataagagttggtgcttcacctatgccagttgatgagtcctcacttgccaagttggttgatgcagtaaaacttatgctggatcccaaggttaaggaacgtgcaatcgaacttgctaaggccatggtaaatgaggatggagagacaggagctgagaaagcatttattaag

SEQ ID NO: 215371 - DNA, 518 bp, Glycine max
atatagcccaagccctatacaaccaaaccctaacacacacccatttgattcagtttccatggctagcctcaaggttgcatttttggctgcagtgctctgcatggttgtggtgagtgcacccatggcacatgcagctatcacgtgcgggcaggtgacgaatagcctgatcaattgcatcggttacctccagaacggaggaacgccgccgtcgggatgctgcaacggagtgaagagcctcaatgccgtcgccaagaccaccgtcgaccgccagacggcgtgcaactgcctcaagtcggccgccagccaaatctccggcttcaaagccaacaacgccgcctcgctccccggcaaatgcggagtctccatcccctacaagatcagcaccttcaccaactgcgctaccatcaaggtttgaagagaaagtcatggacgcaggaaaccggaactactcactagtatatgagtagcattattaatattaagaataagatcgagggtgatgagggctccacttatat

SEQ ID NO: 215372 - DNA, 579 bp, Glycine max
gcattttaaaaatgaaaaacttcttaatgctttcatttcgcaaaccccccttggacggattggagaagcagaggaagtgtcttcattggtggcattcctctgcttacctgcagcctcttacataacaggacagaccatttgtgttgatggtggattaacagtgaatggtctctatataaattagagaagtactaccaacacactctctaacacacttctcttgacacatattctaccataagttacaaataataaaaaattacaaaatcatgaaaataagatctaggacccatatatttttgtgatatctaaaaaatttcaagcaataaaaaaaatgtattgaaaagagtgtataagataatgtgttgttagcatttttatataaactatgttaagagcaaggtctgatgcatacgttgctagtttttatattagtctcgagaatcaatagctgaaagtcccttggttcaatctatatcatttgggaggtggaatttgttgggaataaatatgtatgtccacgatccaatcatcatgtcatccaatttaattttaataataaagtattatcttattttc

SEQ ID NO: 215373 - DNA, 599 bp, Glycine max
ataaagaacacttcgattgctttatacctttttcgattaaaaatgaaaaataaagaacaatacaaaacattaacacagctcttattgtaagctgtatcaaaaccttttcccaattaacacagctttgtttgacaatttttgctatggccgaactgtaagatgatgttaacaatttttgctacaacaggattgtaataactaggttgctccatgtaatgtaactccacaacaaagcttatgcatggaattaatcaactgctactggctgcatgttttcagcttcttgacgaagctcttggaacagaacagatgataggtatcgttcaccgaagcttggatgaacagtcacaataagtttgcctttgttctcaggcagctgagccaatctgagtgctgcaactgtgttagctccagatgatatccctaccatgagtccttccttcaatgccaacaccctagccatgttaactgcatcttcgctgctaacttcaagaactttttccataacatccaggtccaatatgtctggtttgaatccaaccccattgccagttatatgatgaggaccaggtttaccaccattcagcacattgctttca

SEQ ID NO: 215374 - DNA, 412 bp, Glycine max
tttgcattgcaggatggtttggcttcaactaggacattggacttagcatcaacactggaaacaggatctggtaatgcccgctcagctggtgaaagtgactcgaataactacaaccttaggtcggtcctcacaattgcattccaatttacctttgagaaccatttgcgggacaatgtggctgttatggctcgccagtatgtgcgtaatgttgtgcgatctgttcagagggttgccatggcaattgctccctctaggctcagtacacagttggggccaaagtcatttcctggtccaccagaggctcttaccttagcaagatggatctgcagaagctacaggctccacacctgcacagaagctttcagcgttgagtccacatcttgtgatgcaatcttgaacaaacttggcacca

SEQ ID NO: 215375 - DNA, 622 bp, Glycine max
attttatttattctatttttttttttttttttttctattttcattcgaattcattttatttatatattaatattatattcaaatgaaataaaaagatattaaaagatactaattataagaatttgaaagtgaaattataaagttattaaatgattaatcaatttttttctacctgttcctgtagtaaaaagagttccatctgttcttgaatagcttccttcaaaaggacttctgcttccccagtgaatgtcttggtagaagatatgatttctttgaattgaggtttattcgtgtttaagtaagcacgtaactcaacaagaaatttccttacctgtccaatttctaatgaatcaagataaccattcgttccagtataaatagttattatctgttcttccacggtaagaagagctgattgggattgtttaagcaactcgcgcaatcgttgacctcttgctaattgattttgagtagctttatcgagatcagaagcgaattgggcataagcttttaattctgcgaatagtgctaattccattttaattaccagctacttgttcatggtttaatttgagtcgccgatcaactcttgaaacggaatacctacttaatagcgggctga

SEQ ID NO: 215376 - DNA, 526 bp, Glycine max
  unsure (1)..(526): unsure at all n locations
tatcatatgatcatcataacgttctgttcccttaagttgaaaattgctgtgcaaaatgaatctataatactggctattcagaaggggcaaaaatcagaaatcaaaagaggggacattctgtgagagcatcaaatagcatcgagtaattcatgaggtttgcaatagctgacttgaaagtcgacactgaagatgggagaaactacagaaaggtatgcagctgtgacaggagcaaataaaggaattggattagagatagttagacaattagcttcagctggaatcaaggtggcgctcactgcaagacatgaagagaggggtatccaagcactgcatacactcaaggactcgggtctatctcaccttgtactgcatcatcaagttgatgtggctgatgcaacaagcgtagcttctctggcagatattatcaaatctaaatttggaaaacttgatattctggttaacaatgcanggattcttggagctgtaattaaagacactgattcatacacttcatttctcttgaagc

SEQ ID NO: 215377 - DNA, 578 bp, Glycine max
  unsure (1)..(578): unsure at all n locations
cagaatctactctctttttttctaccttagattccttctccaacaatggctctcgccgtttccactacttcttcctcttcagcagctgctgcagcttctagctccttcttctctcgtctcggatcttcctccgacgcaaaagctcctcaaatcggttcgtttcggtttccggagaggtcgcttgtttcgtctgttgttgtcaatgtaactcaacgacgctccttggtgaggccactcaacgccgaaccgcaacggaacgattctattgttcctcttgcagcaactatcgttgctcctgaggttgagaaggaagaggaagattttgagcaaatagcgaaagaccttgaaaatgcatctcctcttgaaattatggatagggccctcgagaaatttgggaacgacatcgctattgcatttagtggtgctgaagatgttgctttgattgagtatgcacatttgacgggtcgaccctacagagtggttagtcttgacactgggagacttgatccagaaacctacaaatttttggatgcgngtgagaagcattatggaattcacattgagtacatgtcccctga

SEQ ID NO: 215378 - DNA, 531 bp, Glycine max
acaaagtgaaagtgagaacacactttattatatgaaaaccgagagcatccaaatacaatagtgcagaagttcaggcaataattacgcatagacatgcataaagtctatgttattcagaagtacaacatagataaggaaaccacaaactctttttaattagatagagatactgttgggaattcctttgaaagtcaacccttcctcacttgaacgatggagcaaagtgtatggcagctgaactggcccagtccggtttctcagacttggatcactgttccttgcattgatttttccttcaattccagtcagtttgcttccaaaccttttgaaagcttctaatgccttcttatcagtagtccaatttggagtctccctctctccaaggtatatctcatcagaagcatgccttgacaatatctctatcactgaaagatcaataagggtctcaaacttgggtgtgattgttctcaaataagccttttgaggattcttcaccatctcatcatactctggggttccttcagctgggat

SEQ ID NO: 215379 - DNA, 383 bp, Glycine max
agataatcgaattagagctgtagctatgattgcgacagaagggctaatgagaggaatggaagtgattgacacaggagctgtcctaagtgttccaggatgtggagcaactatacgacgaatttgcaacgagcttggagagcccattgcttatttatgtcctgtagatactggcacaacatctgccattcatagatctgcgcctgactttatacaattagattcaaaattagccatctgtgacacaggaataaaggtagtagatcttttagctccttatcgtcgaggaggaaaaataggacttgtcggtggagctggagtggctacaacggtactgattatggaattgatcaataacattgccagagctcatggaggtgtatatg

SEQ ID NO: 215380 - DNA, 613 bp, Glycine max
  unsure (1)..(613): unsure at all n locations
ggcaatccgaaattttcttgaatgatattaaagaaaagagtattctaaaaaaattcatagaatttgaagaactgtttttcttagatgacatgttaaaggaatgtccggaaacacatctacaaaacctgcgtactggaatctataaagaaacaatccaattaatcaaaacgcacaacgaagatcgtatgaatacgattttgcacttctcgacaaatataatttgtttctttattctaagcggttattctattcttggtaatcaagaacttgatcttattaactctttggttcgagaatttatatataatttaagtgacacaataaaagctttttctattcttctattaactgatttatgtataggattccattcaacccatggttgggaactagtgattggtttcgtctataaagattttggatttgctcaaaatgatcaaattatatctggtcttgtttccacttttccagtcattttagatacaattgtaaaatattggatttttcgctatttaaatcgcgtatcttcatcactagtagtgatttatcattcaatgaatgattgactgacanaatgattcacttatcgagatttaaattaaagtttttagct

SEQ ID NO: 215381 - DNA, 551 bp, Glycine max
gagcagctgatgtatacattggtgcaaacccttctgctgacggtggaggagaagatgagggagttgatgatgcagctgctaagggtgatgacattgttgacacattcagacttcaggagcaacccgaatgcgataagaagcagatcgattccttcatgatgaggtatatcaagaatatgactcccaagctcgatgcatagcaacaggagttgattaagaagcacatatagggagcgactgaatacctgctctctaagattaaagatgtccaatgttttgtaggtgagagcatgggcgatgatgctcgcttggtctttgcctactacgaggacggatctgctgatccaacagtcctgtacttagcatatgccttaaaggaggtcaagtgctcagtgacttactgtaccgagctatctacttataatgtctagtttttcatgaccatctgtcctaagttacttgaaactttgacctggtattgcgatattaacgtgagacctgtgctactggtacatcatacttgccattgtattaattatcgctgggttaga

SEQ ID NO: 215382 - DNA, 571 bp, Glycine max
cctgtgttctttttgacaaatggtggatgtgaaatctatgaagatgtgaggaggaactcattggaggaggccatgaagctctgtttggagaatggattggaaggaattgtctcagagatcaagggaatattcagaaatcctggtgcagtaaccaagatcaaagagtccaagctttctctactttcttatggaaaattaaacaatgttccagaggcagtttacatgcaacatctaatgggaatcgatggggtaattgtggatttggttcaagaaataactgaggcagttgcggatatgataaagccaacaaagggtggtgaaggagagggtttggttgagggttgtgggaaggtgcagggaaactcaaagcctcaattttcacagcatgagttgtctttccttttgaagctcattccacagttgatacaaatttgaatagcagaagagaagacatttcttgaggctttttaattaacttcacaatatgtactgtgtggcccttcacataatcagtggaccctcttggagggggtccataaaaagcttaacctctgtcatatatttcttcttt

SEQ ID NO: 215383 - DNA, 403 bp, Glycine max
cgaatagaaagacagagaagaaacgctgatcgaactagaacggaagcactgactaaactcagagcgagtgaaagtgttgctgctcgatgtctggtggtttcgcccgtggacgcctcaccgttgagctcaagttgtggcggcagaaccatacgcatggatttgatgcgctgccggagtcgctgccaggaggcaccgtgaacttgactgtgtggcattgcactcttcccgggaagactgggactgattgagagggtggctactgcccgattacgctgcactataaggacgactactgaggcacgtctttcaagtgtgcatgcccacaaggtttcttccaccctaatgtatatccttctgggactgattgctagactatacttaatgaggatagcgggtgatgacc

SEQ ID NO: 215384 - DNA, 505 bp, Glycine max
cttcacagagagaaagttgttgtaaagccttgttgctgccatggccacccacgcggctcttgcttctacaaggatcccttcaaacacaaggttcccatccaaggcctctcactctttcccaacccaatgcgccttaaagagacttgaggtgacagaattctctgggcttagatccacttcatgtgtcacatatgctaacagtgctagagaatcttccttttttgatcttgtagcttcccaactcactcccaagaccaatggatcaactcctgtgaggggagagacagtggccaagttgaaggtggcaatcaatggtttcggacgcattggtagaaacttccttcgctgctggcacggccgaaaagactcaccccttgaagtcgttgttgtcaacgacagtggtggtgtcaagaatgcttcgcacctgctgaaatatgattctatgctgggaacctttaaggcagatgtgaaaatactagacaatgaaaccatcactgttgatggt

SEQ ID NO: 215385 - DNA, 560 bp, Glycine max
  unsure (1)..(560): unsure at all n locations
ctcggacttgcgctcgagtaactattgactctgctacccttttcaataagggtctagaagtaattgaagcacattacttgtttggagcaagctatgacgatattgagattgttattcatcctcaatctatcatacattccttggttgaaacgcaggattcatctgttattgcacagttggggatacctgacatgcgcttaccgctcctttatacattatcttggccagaaagaatctattgctctgaagtaacttggcctcgtcttgatcttagcaagtatggttctctaacattttatgcaccggatgacaagaagtttccatcggtgaatctttgctatgctgcgggacgtgctggaggcaccatgacaggagttcttagtgcagcaaatgagaaagctgtagaaatgtttgttgaagaataagatagttatctggatatattcaagggtgtggtactaactngtcaggaacatcaaanggaantagtagcatctccgtcactcgaagaaatattcactatgaccatgggctcgcaatatgctgctagctgaaaaagc

SEQ ID NO: 215386 - DNA, 553 bp, Glycine max
ggaactggaagcagtgacaagtgagatcgttaggttgattgacacagcaacagtgcctattttggccgttgatgttgatgggctggtcaatgggtggaacataaaaattgctgagttgacgggtcttccaattggtgaagctactggaaagcatttactcacacttgttgaggattcttcaactgatagagtcaagaagatgcttaacttagcactgctaggtgaagaagagaagaatgtccaatttgagatcaaaacacatgggtctaagatggattctggtcctattagtttggtagtaaatgcttgcgcgagcagggatcttcgagataatgttgtcggggtttggtttgtggcccatgatataactgctcagaagaatgtcatggacaaattcatccgtattgaaggtgattacaaggcaattgtacagaaccgcaatccattaatccctcctatattcggcacaaatgaaatttgctggtgttgtgagtggattccagctatgatgaatttaactggatggagcgagaggaggtgatggataaaatgc

SEQ ID NO: 215387 - DNA, 495 bp, Glycine max
  unsure (1)..(495): unsure at all n locations
gttttctatcggtatgtatataggtgaataatccaacatgcctttttgtgaagtaaaaaaactaccctcgatccatgcctcaaaagggttgataataagtaaaaaaaatcaatgaattcatgataaaacccttctgcgtttttttattataaatttttttgtcaataaagggatcaaggggttgggggatcaaatggtaaagttcttttgttggtaaattggaggattagaaacatgactattgctttccaattagctgtttttgcattaattgctatttcatttattttattgattagtgtacctgttgtatttgcttctcctgaaggttggtcgaataacaaaaatgttgtattttccggtacatcattatggattggattagtgtttctcgtgggtattcttaattctctcatttcttgaagctctanttattctagatcaaaaacgaaatgacccctcccncagaattctttcggattgtacggcacatta

SEQ ID NO: 215388 - DNA, 552 bp, Glycine max
  unsure (1)..(552): unsure at all n locations
tgtaaatactgtatctactccttataaggctgctattcctgaatatcgagtggttattcatgattccaccgtcacatcttgcaatgataatcacttaaatgtggcaaatggtaatgctgtgtttgatattcaccatccttgcagtgttaatattgccgctcaaagagaacttcacaaacctgagtctgatcgttcttgcatacatttggagtttgacatatccgggactggcataatatatgaaactggtgaccatgtgggtgtttttgctgaaaacggcgatgaaactgttgaagaagctggaaagttgctgggtcaggatttagatttggtattttccattcacactaataatgaggatggtactcctctaggaagttctctgccacctccttttcctggcccttgcacactgcgctatgctttggcacattatgcagatctcttgaatcccccacgcaaggcttctntagtggctctggctgcacatacttcggaacccagtgaagcagatagattaacattcctctcatcttctcaggggaaggatga

SEQ ID NO: 215389 - DNA, 614 bp, Glycine max
aaaataacacacacttcacacatcattacgacaattaaaagaggtgtggaaattttcaaatagacagagcatactcaacaagagggtcatgtctaatttcctttattgaattaaacaaacgaacaaacgaaagaaaacacaaattccagatcatgcagaggattccgcattttcagaagatctggcagtagcctgtggaacagaaaaagctggcataagagtattaccagcaatttcaaaatcttgagaaattcccaagagaatatcaaaaactgtagactgtttgggattgtcaataaggaaactcaagtgccatgaagtttgatttgcccactcagaactccacatttcaaaaccattattaggaccacatacctctattgggaagatcaattcccaggaatgtggttccgattttgtccacttacatgcatcgaaatgctctgtactgttgctgtttgttaaaaacacttgtaccaatgaggcccaatcactccttttgactgctgcattcccagacatcacaattttaaccattaaacagcctttcttccaagcagcaactctcacaagttactaattggagaattttggataagtgtgatccaatctcc

SEQ ID NO: 215390 - DNA, 587 bp, Glycine max
gtcactagggaggggaattgtggattttcacggggagatggttttgttagagaactatactgcactcaactacacaggtctagtgaagataataaagaaatatgataagcgaactggtgcactgcttcgcttgccatttatccaagaggtgctgaaccagcccttcttcaaaattgatgtgcttaacaagcttgtaaaggagtgtgaggtgatactgagtattcttttcaacaatgactggccttcaattagtggggattttgaggaagatgaatatggctccacgactggaaatgaaagcaaagcgacgctgatgcatgttccaaaagaacttgctgaaattgaaaacatggagaacacgttcaccaaactaactttatcagcactgcgtagcttggaagaaattaggggtagaagctcaactgttagcattttctcattgcctcctttgcataactaggctttgcaactgcaagaggattggaaaataaaatgactgcactagcgactgcaaccaaataggtcctcaggataacatagatcttctcgtgttaatcttcacatctatcttaatggttatagaaaag

SEQ ID NO: 215391 - DNA, 530 bp, Glycine max
  unsure (1)..(530): unsure at all n locations
ccttgttctgtaccaaccctttcttccacatgttgagtttcagcatcgtcctctcttgagtccccatatcaaatacccaccgaattcaaccccccatataacaaatctcctcccatcccatttttcagcaccaaagtttgaaacttttctcaattgggttgaggagagtttgactcaaatttttatttttctaacgaagcagtagctattagaagtgcaaaaattaaatgtccaacatcttcttgttgatgtttgagattcatgtatccgattctcagtgaaatcttcttttccgggtgtatgatcaattccactgttaggcgcaggacccatttagttcaatccttctcagttgctttcctctattggttgtactacgtttcatgatttctaaaccttccttagtctaataatcatctactactagctattattattattattattattatcatcatcatcatatataataaaatctatctgcaatattatttntctgagtttgtgtctagttagtgtctgggtcctgg

SEQ ID NO: 215392 - DNA, 547 bp, Glycine max
gcggcgcgtcgttgatggcgaaggcggcgattaactctcacgcgcgggctctctacgcgctggccgtgattcagttcaacggaagcgggggcgctatgcgcaagagcggcgtttctcggacacgtcgacgcgctgcgcgagctcggccactgcctacaggacggttacggcgtacggcagaacatcgccgagggacggcggttcctcgtgcaggccaacgcgcgtgagctcgccgtcgtgctgtccaccggcgccgccgcgcgtaccttgctgagttggaatcttcagccgcagcagctccggcaggggtccgggtgtccgcttctcagcgatttcggatgcaacgtgccggcgccggatgtgcattcggcgagcctgttcatgactgagtggttcgccgctcacggcggttctccgggaccggtgctgagactctgttctaacgcggggtgcgggaggcccgagacgaggaagcacgagtttcgaggtgttctgtgtgccgcgaggtgaattattgctcacgcgcgtgccatgcgcttgattggaa

SEQ ID NO: 215393 - DNA, 590 bp, Glycine max
cgcgctggttcgtcaagcagggccggctcgaagaggcgtcccgctcgctccagcgcatccgaggtcagcccgccgactcgtcctacgtccaggaagagctcgcagaaatcgtcgccaaccacgagtacgagatggagctctcgcctcagggcggctacttttcgtcgtgggccgcatgcttttcgggcagcctctggaacccgggaagcaacctccgtcggacgatcctgggcacgtcgttgcagatgatgcagcagtggacgggcgtcaatttcatcttttactttggcacgacgttcttcaaggacctgggcacgatttcaaacccgttcttgatctcgctcattacgacgctcgtcaatgtgtgctcgaccccgctgtcgttctggaccattgagacgcttggccgtcgaccgctcctcatctggggcgctctcggcatgttgatttgcgaatttattactgtcatcattggtaccgcgcgccccaacgacgaggcagtcaccaaggctcagatctcgttcatctgcatctacatcttcttctttgactcgacctgtggtccccgcgcgtgggtgtgcatcggcgag

SEQ ID NO: 215394 - DNA, 532 bp, Glycine max
  unsure (1)..(532): unsure at all n locations
ctcgagccgtgagagaaaagattccatttccagaagtagcactgcactagtactctcttttgtttagaaaaaaaaaaatggttcaacaggaagtgcgtaaaggtccttggacagaacaggaagacttcaaattggtgtcctttgttggcttgtttggggaccgtagatgggactttatagctaaggtatcaggtttgaaggtggcgggagaaagtaaaataggcattagaaaaaaagaaataaaaaaatcaatgcttatttgggcatcatgctacaaaaaatagatttatggaagaagcagctagcctttaaccacctccttttgttgtaggtttgaatagaacaggtaagagttgcagattacggtgggttaattacctacatcctggcctcaaacgtggaaagatgacctcccaggaagaacgccttgtcttggagcttcactcanaatggggaaataggtggtcaagatttgctcgaaagttaccagggcgcactgacaatgagatcaagaactactggaggactctga

SEQ ID NO: 215395 - DNA, 479 bp, Glycine max
aaaatgtacccttttgatcggattgtagcaccattctgaacatagaattgtgaacaaggatagaatatatttttaaatacattctcatggaattgttactagagacttttaagggaattgaagtctataatgtatcacaaaacatgatatgttatcataatatacacattggacagatttttaaatatcttgctcgggttgaacttgatcattcgagtgtctgctctaatacaatattttagatatggacatgaatatagggatcatgtgcaatgtaaacttatagaatttgattataaaaaaccagtttaaaattgcatattggagaattgaacttgattaatgtgtaataggcatacattatgtattaggacagatctatgcattagattgttatggagtgacaagaatttgtatttggtaaatacgataatggtatatgtggtcttgaatatgaacttaaagtgattgatatgcac

SEQ ID NO: 215396 - DNA, 248 bp, Glycine max
tgagaaaaaaaaacaaaaaaggaaaacaaaaaatgaaatgagattaagaaaaaaaacaagcaaagagaaccaaagaagaggggttacaaaccaaccaaaaaaaagacaaatggcacgaaaaaaagcaaccagaaacacgcaaaaaaggggaaatatgattataaaactcacaaaaaaaacaaaagaaagggaaaaaggaaaaagagagagaaagagagagagagagagagaaagagagagaaactaag

SEQ ID NO: 215397 - DNA, 519 bp, Glycine max
gagaatccgaggcgaagagaagagaaaaattaagatggaggggaaggagcaggatgtgtcgctgggagcgaacaagttcccggagagacagccgattgggacggcggcgcagagccaagacgacggcaaggactaccaggagccggcgccggcgccactggttgacccgacggagtttacgtcatggtccttttacagagcagggatagcagagtttgtggccacttttctgtttctatacatcactgtcttaaccgtcatgggagtcgccggggctaagtctaagtgcagtaccgttgggattcaaggaatcgcttgggccttcggtggcatgatcttcgccctcgtttactgcaccgctggcatctcagggggacacataaacccggcggtgacatttgggctgtttttggcgaggaagttgtcgttgcccagggcgattttctacattgtaatgcaatgcttgggtggctattgtggcgctggcgtggtgaagggtttcgaggggaaaacaaaata

SEQ ID NO: 215398 - DNA, 575 bp, Glycine max
gattgggtcaataaatatgttacaccttactcgcaagacgtcaatttcaagtacatcgctgttggaaatgaaattcatcccaataccaatgaggcacaatatattctatctgccatgaccaacattcagaatgcaatttcatcagcaaatttacaaattaaggtgtcaacagctatagactctactttgattactaactcttaccctcccaatgatggcgttttcactagcgatgcggagccatacataaaacccataatcaacttcctagtgagcaatggggccccacttcttgccaacgtgtacccttactttgcttatgcaaatgatcaaagcattcctcttgcctatgctctttttacccaacaaggaaacaacgacgttgggtaccaaaacctctttgatgctatgttggattcaatatatgctgctttggagaaagtgggagcgtccaatttgcagatagtggtttctgagagtgggtggccatctgaaggtggagctggagcctcaattgataatgcaggcacttactatgctaatttgattcgtcatgcctcgagtgggaatggaac

SEQ ID NO: 215399 - DNA, 532 bp, Glycine max
  unsure (1)..(532): unsure at all n locations
ggcgcagagtagagcagcagagaagagagaaaacggcactgcagccgtagaaggaaaaccgaccatggtgcacgtctccttttacaggaactatggtaagacgtttaagaagccccgccgtccgtacgagaaggagcgtctagacgcggagctgaagctggtgggggagtacgggctgcggtgcaagagggagctgtggagggtgcagtacgcgctcagccgcatccgcaacaacgcgcggaatctccttaccctcgacgagaagaacccgcgccggatcttcgagggcgaggctcttctccgcagaatgttccgctacggactcctcgacgagactcagaacaagctcgattacgtcctcgccctcaccgtcgagaatttcctcgagcgccgccttcagacgctcgtcttcaaatccgggatggccaagtccattcaccacgccagggttctcatcaagcagagacatatcanggttgggaggcacgtggtgaacatcccatctttcttggtgagggttgactcacagaag

SEQ ID NO: 215400 - DNA, 482 bp, Glycine max
caaggttccaaacctcagccataagacgcctcacctatgatagctcagtggccatggttcccttcggaccttactggaagttcgtgaggaagctcatcatgaacgaccttctcaacgccaccactgtaaacaagttgaggcctttgaggacccaacagatccgcaagttccttagggttatggcccaaggcgcagaggcacagaagccccttgacttgaccgaggagcttctgaaatggaccaacagcaccatctccatgatgatgctcggcgaggctgaagagatcagagacatcgctcgcgagggtcttaagatctttggcgaatacagcctcactgacttcatctggccattgaagcatctcaaggttggaaagtatgagaagaggatcgacgacatcttgaacaaggtcgaccctgttcgtgaaagggtcatcaagaagcgccgtgagatcgtgaggaggagaaagaacggagaggtt

SEQ ID NO: 215401 - DNA, 455 bp, Glycine max
caagtgcctcttttccttccctcacctcattcgccaagtgcaccttgattacctggaaaatggtgcagacattataatcacagcatcttaccaagccaccattcaagggtttaaagccaaaggctattctgatgaagagagtgaagccttgctcagaagcagtgttgaaattgcacgggaggcacgcgaagtttactataaaaattgtgctggatgtcgttcgggtgatggggatgatgatggtagaatcctcaaacaacggcctatcttggttgctgcatcagtagggagctatggggcttatttggccgacgggtcagagtacagtggggattatggtgatgctatcacggtggaaactcttaaagattttcatcggagaagagttcaaatattagcagattcaggtgctgacctgcttgcatatgaaacagttcccattaagcttgaagctg

SEQ ID NO: 215402 - DNA, 560 bp, Glycine max
  unsure (1)..(560): unsure at all n locations
aagtaaattaaccattatttatttggacaataatttattttatttcaagtccatatcgggtctacacatagacacaacataactcatgttgctagagtagttttctcacaaccatcgtgcacacaggccaaaacatctctgtagtctcttgaaatggtaaaggagtcgtagacctctccatcactacttttcttgtactcaaacaagagatatgaatgattgaaagcagtcaatttgccaaacccatagtcaacgtccctataaagactccaaatagggggtgatggtgtgaagtctgacaggtgacttccccctccaccaacaaccacatgaattgttccattcacagtgccagagtagtgatgcttttcttcattcacacattgattctgataaatggggcatactctttcatagttatggacatgaccataaaatccaatgtctactttgtacttttgccaaagcttctgcaaactttcccttcccatgggctcttcaaatgaaccctncatgccataccaaagattaaaggagtagcccaggggacgatgagctga

SEQ ID NO: 215403 - DNA, 583 bp, Glycine max
accgaaaactggttcttgcttatcattcaagttttgcttccactttctgtaaatactaaataccagaaactgtggatacaaaattacaacacaacacaagacataactctggattatcccaaccactcatacgagttatatcctcgagttttattcattcattcattccatataatgatataaattacagggaaatacaaacaaagacgcacatgagaaattaaacagaagcagcaagaagagaatgaattaaattcaaggcacaatcttataagccttggtcttgtctatccaacttatgaacgaattcttggagttcctgaatcccaaaaacccatgttccttggccttgttcatgctatccaacattccctcccctgagaaaataagatccacaaaccaccaatcagcaacctcgtcaagcttggtaggcagaagctgattctcactcacaatctcatcccaaacaggacccttatccttcatcaattccgacaaactcaaaccttcttcctcaaacccatactcctgaatcccaaactgttccgccagcaccttccaaagatgcttgccacctgacacg

SEQ ID NO: 215404 - DNA, 562 bp, Glycine max
  unsure (1)..(562): unsure at all n locations
aagcacaaaagacgtggataacttgatattattttattacatacatgcatagatagcctgctctcaaataagtcggcaggaacaaagatagagagattcaacgatcttcaaatttcacatttgccagaaatatataacagaaaagaggggtctgggatatgagttaagttttgatcacattcaactacactatcccaaaccgttactcttaagactttgaacttcacttgtactctaggatcatgttgttctcaggagctaatccaacacaagccctcaggatgttttccagcatagctcgctgctttgacaacgcattcaccactggtgtacccggtggaaccagaggggccttggtcaggtaactaaggatggtcgcaactgggtggaatgagtggaattttccctcattttcagctttaaactcgattcgagtgctgagctcagcangaaggaccaagtccaagataataggagcagctaacagtgaatcctcacatgtgttgtgcaacacaattgtgttctttccacccatgaatatctcagaagtgtactcatccat

SEQ ID NO: 215405 - DNA, 420 bp, Glycine max
accaacataatttaccttggtattatagtgataaacagaaatgtgactaaattgcgggggcttggctgaagatagcatatttctttttctaaaagcagattaaaatagacaatgaattgccggtttaacagattaagcagctgctccaacagatacaccacccttgagcctggatttaccatacagggtttcttcaaaccggattatttcattcttggacccataagcaacttgagttctgccatcaatgttactgatgactttgtctagcacagactgatgaccatcactggtggaacctccagctttttcaatcaagaaccccaaaggagcttcctaaaacaacagtctaaggttggctttggctgatggagatgacccctcggtgaagattcctttttcttttacaataatttggtt

SEQ ID NO: 215406 - DNA, 552 bp, Glycine max
ggatattcaatttaagccctatttcttgtcaaccagggcctctgaaaatttttaagtgcatagcatattttaactgtcatggtaaattattattacctacttcactggtccaaagaacaatctgattatgttttacagcacggaaaggagcgcagataaacaaagaaatggatttgtattatatactgtacatgatgctccacatccatgcaaaggagaaattttttccatcaagttgcctgcaataattctctgatatcgtacccttgaagctgcagaaaagttagaaataatataactcctgagttccaaaaagaatggatagtgatgggagtgagaaggttgtgagtttgagcatatgaaaaccccaaagcagtccctagaacaaacaattggggaaattttccaggagtgagatgtgcaagggcaaaaacagtagcactaatgacaacagcaactggcgtaggaacccacttagtgagggaagtcataaaaaattccccgaaaacagtctcctcaaggagtggagcaagaacacctgtgatgcccacc

SEQ ID NO: 215407 - DNA, 558 bp, Glycine max
caattccaactagttcaaattcgatagagattatttaaaatcaaagtcccacacggaatttccttttatttctgtacatgaaaggactggcaagttaaattacaaatggcaaacaatggcaccaaaaattccactcgcccttaccaggctccccaactctgataattacactgcaagacttgagaagtatgacacacgacctcaatgagatattccatgtattgctctgaaaactcagttgcggaagattgttctgaatgtcttcccaacaatttgacaaccacgctaaattcagtgacaacccgccaggtaacttgaggcaccagctggtttcttcaagtataacaattgaagcagtgtaatgctgtttaaacccctgctgcagtttttgcttcagaacccgactttccctcagacgattcactctttcgaatcttcctagtaggtgtcctcatggtaacaaattcctcagcggcacttgggtgaatgcctacagtggcatcaaagtcagccttggtcaagcgagctttaagagcaactgcaaacccctgcacaatt

SEQ ID NO: 215408 - DNA, 562 bp, Glycine max
atgatgaactctatgcattttatgatagatgagcaaacgagtatttgtttaaacacaaacaaacaaaagggttagtgtctaatcatcctccccctcatctgtaacgaatttgccagttccaggattcaaagcagcaatgaagaagaaaagaacattgaacaacactaggggctcgatttcgttgattggtaccccagtctcaatgttgagttgggctagtgctccctttccggttataatttctccaatcaatgagaaaacgaaacccaattgagccaatcttcccacaaatagctcgtttgctttcgtgaatccaaataaaggacctgaaccaagaccaagagcttccctgaagcctttgcctggaggaataacacctccagtagtaggttcgtcatcaacaaattttccacggtcacctaaacctccaatggctcctagcagggtgaagaggatgaaaaacagaagaagaggctccgcttcataaaggggaattccagtttccagattcaattgtgctagaattcctttcccagttattccttcacccaacagtgatgct

SEQ ID NO: 215409 - DNA, 482 bp, Glycine max
aaaaatataagataccagtaatataaaactagactctgcacaattcaatatgtcgaaagaaaaaaaaaggctgggctttacaaacaagtttatttcccttatttttcacaagttgagatactgaatagaagaaaaagcgatcaaggagccaaccggtcatccttccacagccgttgtgcattgatctcatggggagtatattgcaacctgtcatgcaagcgagattactgcccttgccaaaactcgaaaagttgtggtagatagcctatatccaccccagttcttacgttgagggattaaacttgcatcagagcatttttcttccagctctttgtactcctgagaaagaacatgcgtacccggcactacagtactctgcttgctgactattgctccaatctgactacctctacggcggctatggaaatactgctctgattcctcatcagagactttctgaacaggccccttcacccgtacct

SEQ ID NO: 215410 - DNA, 404 bp, Glycine max
gatagtcgtattttatcaaaaaaatatcaagacaacatcgaaacagagaaatgttaaacagtttctgtcacatccataaacacagttgataaaactagtctgacttagagtctccataactccggggtttaacaagatcatacaaaaatatataacttttgcataaatgaaaacagcaaactaccagcaattgaggctagttctttggcccaatatccttcagtgcacaaatctgctcctcacccattgcagacataactgacacaacaaggtccttaccctcagcaaacccatcctttatctgagtaagcagactctcatctgtaggtaacttcaggtcatccttggtgttcccattttcagtaagcaagctaagaaatccatcctcagcaatgtcaatcaac

SEQ ID NO: 215411 - DNA, 410 bp, Glycine max
actagcacatattgtttaatctcactacatcaaaaaacccaacgggacaatacaaacaacaggagaaggatatcagattacagagatagctgcttgtgcttatagccagctgaataatgggataatacaaatgtttgctaccaaaactactgcaaactatgatgctgaccacaggccaaatcctgcctctatgacagcgttatcattatatatatattgggcaaaccatgcctaacggaacatttgatctacgcaatcagtaccttgttataccgtctccgtgcggtatcacatccttgaaggatccattactgggaatcatcggcaacacatgctcctgacgtggcacactgacatcaagaaggtatgggccacgggaagccaacatttgacgaatttctgctctaagc

SEQ ID NO: 215412 - DNA, 414 bp, Glycine max
ggcaaatgcattctttattaaaagaaactaatgctgaatgtttttctttttttctttttatacaattcgtttacatgaatcaaattcattttttcacattattgtgacagataggcctcaaatacattcctaaaataaaatagcagcagcaattatacgaattacttttttttgtttcctgtggttggatgaaacttacgagcagtggattatcatcattatcacatatgatgaagcaatattcaagaggtgcatgaactgtctgaataggaataagagtttatgtacaacgggaaatgaaaatagttgtcatttgaacacactatgctgtggcagtagcttgttctctaacagcctgtgatgctggcagaagggtgcaaatcaggttgcgggcaccgtacacattatcaacac

SEQ ID NO: 215413 - DNA, 537 bp, Glycine max
ctgaagctagaacttttattgaaacccttttaggaggacatatactttatatagctacccctttacattttacaagattgatgaaccaacaaatacatttacaaaatatgctagcagttgccaacaattcaccacagccgcaacttataaaatatgtcagaaatatgggattcaaacacttgaagctttttgcagactagcagcatattgccgagcccattggtcatagtgaataatttcttcgagtgacggagatgctactaattccttttgatgatcctgacaagttagtctccacaaccttgaatatatccagataactaatcttttcttgaacaaacatttctacagctttctcatttgctgcactaagaactcctgtcatggtgcctccagcacgtcccgtagcatagcaaagatgcaccgatggaaacttcttgtcatccggtgcataaaatgttagagaaccatacttgctaagatcaagacgaggccgagttactctagagcaatatattctttctggccaagataatg

SEQ ID NO: 215414 - DNA, 570 bp, Glycine max
aaacccatgatcattgaatctccacgtcataattgttaataatggatttaattcatacaaaaccttaaagttaataataataaaatgcaaccgataagcattagaaactaatagcagggcaaaaagattcattaaagactgcagggtggagaaaggggtggcagaagaaagattgagggggaaccaaagtatcatagacaaaatcatgcagcaggctgctcctcagtggcaggagcttctttctggggttcttctgtgaggccattagaggtggcatcctttggctgtgaatcaggtgcaccttctgctgcagatccagttgcttttgatgctgctttctcttttccatccttattatctttggcgtctttagcaagagccggtggtggaggaatcatgtgaggtggtggtgtatgcttcagctttaacagtatttgccgcaacctagacagatccgtgggtttgccaagctttgggccttggatgaccgtaattgatggcttcttgtcctgatcctttttgcctctttcttttaatgctgggaacctcacgaggaatgagctcttgcat

SEQ ID NO: 215415 - DNA, 366 bp, Glycine max
cctccttctcttcattgacctccccatcatcttctttcccatcatccttttctttatctactttatcaccttcctttgaggtttcttctatatcaatatcccttacagaaacttcaaccttgcttttctctttctcaccctcttcttttacatcctccttctttgcttttttgcgatccttctctttctccttcttatccttactcttatttctcttattttcttcatcaacctcgcctacgacattttgtccctttacctttaaagtgactggttctacatcttttgccttctttccctttttcttctccttctctttgttttccttcttctgttcaccatcaccatttttaacctttcccttta

SEQ ID NO: 215416 - DNA, 470 bp, Glycine max
ttttttttttttttttccgattttctgacgcattatcttgttatgaaattacattgtatgggctcgtactcgtgttctatctcgtctaatagctagacttgccttaattgtttgtctcttgccttccgccttatgcaaatcagcaccaagaatttcaagagaaaagagagctccttggggagaaaggaaaaaaacctttaccaaaacctccctaaaacagagagcggaggaaggaaaaagcgagcaaaagcggccaacagagccttcccccccccccgggggaaaaaaaaacgcacccccgaaagaccaaaaacccccgaagagggaaaacgcgccccaccaggaaagactccaaaaaaaacaaaattagtcgtaaaagggggtgcccttccgtctcgaaacccaaccaccccaaagggggacagccccccccgcaccaaagtcaaaaaaaaaaaacgcccccccctccc

SEQ ID NO: 215417 - DNA, 469 bp, Glycine max
aaaactaaaaacgttcattatgaaagggcagagacaacatagtacaaccataactctactcatttaacaaaacaggaaagcaccttcttggaatgactactacaattatatttgcgaggaagattatttaaacctaatcagggatccctcaagctgagaatcttcgcttttgctgtcacaactgccattcccattttcagtgaattgccaaaactgcgaacaaatttattgccggaattgtacgacggagcattgagcaagatactcaattaaccatcgccggaaagcattcacgaatgccgtcaatgaataaacatttttcttttccgaagggtacttaattggctgagaagagtgtttggagaagagtattattgtggggaagctacccaactgcagaccaggctatggatattccttcaggtttccatacgctctgaatttgtgaaccttaagtcctgacccagct

SEQ ID NO: 215418 - DNA, 586 bp, Glycine max
  unsure (1)..(586): unsure at all n locations
accatacccgctgctgtagcattatacacattattattactcttgctcccgtcaagataaatctgaccccttcccctgttcccacctacgtatataggatattttaagaaatgaacatctctcttagtagtgggatccggggaaagaataggaaaggttatttctttatatttttgaccaggaacagggcctaccacaagaatatttttttttgtaggacgatagttttgaaaagacagattgcctatcttctctttaatctcaggcgaaatacgatcggggggtgccaattcaaaaccttccggtaaaataagaacagcccccacattcaaagctccctttttaccattagcaagaacttgtttcacttgcatatcataaggaattcgaacaactgcttcaaatacagtatcaggaagtaccgcttgtggaacctcaatatccacgggcttattagctaaatggcaattggcacagacaatacgaccggttgcttctcggngattttcataaccctgctgtgcaaaaatgggatatgcgttngaaatgggtgctcgaatattatatatatcatgatcgatatgga

SEQ ID NO: 215419 - DNA, 503 bp, Glycine max
tttttttttttttttttttttttttttttttttttttttttttttttttttttttttttgtttttgtttttttttttttttttttttttttttttttaaaaaattcaaaattttgaaaaaaaccaaaaagcccaaaaaatttcccggccccaaaaaaaaaagggggcccccctggggggggggaaaaatcccccgggggcccccccccccgggggggggcgggccttcccccccgaaggaaagaacccccccagggcaacccccccggggggggtccccgccaaagcccgattccccggaatccccccccccaattttttcggcccaaccaaaaaccccggcaaaaagggaggcccttggacccgggcccggggaaggccccgccccaatttcgggcttacgcccgggggggggggaagaaaaagcgtttagagggggccccccaaattaaagggcggggccgcagttacacccggggggagggggaaaacccgggggggggc

SEQ ID NO: 215420 - DNA, 453 bp, Glycine max
attatccacttaacattgtgcaatgattaaaagattggaacaattggaagcaagtccctagaatgaacaaattctatatcaagaactatgtgggtgagcttgggtcaaccacgccaaaacttattactggctgcagagcaatacaaactacgagagcctctactgagactgactgactcaacatggcactccttttgcacctgatacgtactaaaaggagctttgatgtattggtctacatagcataccttatcagcagagttggtctcacacatatcatggaatgggcttccactctcagctttaggtgcccatggccgcttgctcgctactagatgatgaaaatcgacacgtctttggctgtgaccgcatgaatggtcatacgatggatcgactttaacaatatcatgttccctgaccatattgaaggttgagccaccagtagaggaaaca

SEQ ID NO: 215421 - DNA, 573 bp, Glycine max
atccagaaacatttattatttattgctttctaccatctctgcatctctaattgctgtaaaaacactggctctttggaaaactcagaggatgcaattcctactgattgcaaagaaattgacgcagtaattttgataataaaaaccaatctgttattgtacacccatattattgccacatttaagactagcccgtctttatatccttaatgctctcttattgccaaaatcacaatatgtaatcaagttcaagccgcaactttcttggatgtgactgaattgacaatggtagcaaactcaggaccctttaatgaagcacctccaacgagaaatccatcaatatcttcttgctttgctagctcagcactgttccctccatttacagaccctccataaataattcgcgttttagatgcaacttcatcagggacattcttttttagccaatctcgaacagctacatgtacttcctgagcttgctggggagtggccactttgcccgttccaatagcccatacaggttcatatgcaataacaatgttgtcccagctaggaactgcatctgcataagccttc

SEQ ID NO: 215422 - DNA, 434 bp, Glycine max
aagggaaatttgtcacatttattcattagggtatatgcttcacctagtatcacctggtttatccttaattaaaagaaaactaaaatacaatctcttacatgctatttttgttggtcttgaaatagaataatttcacctcgataacttttaaaatcctttaatgcaaattaccgaaataaaactctagttctagaacaaacaacacctagctataataattagggggtgataccatagagctttcgaatcccgtctatatcatcttgcgctagattcaccttcctagtttgaggtggtatagaaggatacatgaaggctcttaggtccgacgagtggcctaatccgagcaagtgcccgatctcgtgcactgccacaaatttaagggtaaacgcacttgtcaccggcgatttggtgacatccccagaccccaccca

SEQ ID NO: 215423 - DNA, 377 bp, Glycine max
taatttcttaggtcaaagaatatttaacaatgtcaaagtatattgtctcctgattagattaaaaaatttaagagaaattacaatagcctctattcaaagaggagaactaggtctagatattatgatgattcaaaatcagaagaatttaattcttctaggcctaaggaaaaagaaaaataacaaatttatgaaaaaagaaatatttgttatcgaaccagttcgcctgtctagaaaaaacaataaacaattttttatgtatcaaaccataggtctttcattaattcaaaagaataaacgaaaaatttatcacaaatacccagaaaaaattcatgttaataagaaaaatttttataaatatattacaagaacaagagatc

SEQ ID NO: 215424 - DNA, 377 bp, Glycine max
gatctcttgttcttgtaatatatttataaaaatttttcttattaacatgaattttttctgggtatttgtgataaatttttcgtttattcttttgaattaatgaaagacctatggtttgatacataaaaaattgtttattgttttttctagacaggcgaactggttcgataacaaatatttcttttttcataaatttgttatttttctttttccttaagcctagaagaattaaattcttctgattttgaatcatcataatatctagacctagttctcctctttgaatagaggctattgtaatttctcttaaattttttaatctaatcaggagacaatatactttgacattgttaaatattctttgacctaagaaatta

SEQ ID NO: 215425 - DNA, 482 bp, Glycine max
cacaaaagcggtgaccatggcaaacatgattatggcttccacaaaacctctggttccagtctgcaccagttcccgttcccccacaccaaaactccccattctccaaatttcactccccaaagccccaaccttgaaactgaaactcccaatttcaaaagccccagatgctgtccctcctgagagggatagcaccactggtcttggccagaccctccctagcagaagaatttgagaaagcagcactctttgacttcaacctcaccctgcccataataatggtggagtttctgctgctgatggttgccttggacaagatatggttcaccccacttgggaaattcatggacgagagggacgcggcgatcagggagaagctgagcagcgtgaaggacacgtcggaggaggtgaagcagctggaggagaaggccaatgctgtcatggcggctgctcgagcggagattgcagcggcgctgtacaccatg

SEQ ID NO: 215426 - DNA, 513 bp, Glycine max
  unsure (1)..(513): unsure at all n locations
aacctgaatctctgattttacattgaaaattattacgattacacaatagacacatccaaaagtagaaactgatcaatcctttggtgaggggattgaaatgaaaattacatagacatattaagcagtgggaagaaccttattaacaatctcctggctaagagctgcaatctgggaatcaagggacttgatggtttcttccttttgattctccaagctagacagagcctcctgcagctcagcctcgactttcttcctcccctcagcaatcttctgctccacctcagcctgcgtctccttcttcatggtgttcagcgccgctgcaatctccgctcgagcagccgccatgacagcattggccttctcctccagctgcttcacctcctccgacgtgtccttcacgctgctcagcttctccctgatcgncgcgtccctctcgtgcatgaatttcccaaagggggtgaaccatatcttgtccaaggcaaccatcagcagcagaaactccaccattattat

SEQ ID NO: 215427 - DNA, 533 bp, Glycine max
acaaaataattcacaatttagatatgtacatttagaaaagagacaaattgagaatgaagattgaataagaatatatatacatacactcgcacacaggatatttttattcaattctatccatcagattatttgtcgtttcccattccactgacaatggtcatttgtgagtcattttctaccgccttcaaatctacagatatcgtaaattccactgcctccttttaacttaaatcaaagccagcatcagcatttatggcatacagtaatttggtttccaattgctccttgcttgtataaggcggaagctttagtagattcatacaagtagccgatgttggtaatcggtcaagtgattcttcaacggcattaccggaagccctttgtatgcaaaacataggttcaagatatcggaaaccaagcaaaggcccacgagagcaacctgtcacaaacttcaaaaatttcttcctgttttccaatgaaaagcctttgagaacttcccaaaacatctccataacaaaatgctcattatgata

SEQ ID NO: 215428 - DNA, 535 bp, Glycine max
ctgggatccaaaactaccacgggtttggcttgatttttccaaattgaacaaaactattttccaaggttctggagttattgatggctcaagaagcaaatggtgggcggcatcttgcaaaaagaacaagtccaatccttgcaaaggtgcacccacagcatttacaattgatacaagttcatccataaaggtgaaaggactaacaatccagaatagccaacagatgcattttactatatcacgatgtgattctgttagaattactggcgtgaaagtgtcagcacctggagacagcccaaacactgatggaattcatattagtgaatcaacaaatgtcataatccaagacagcaaaattggaacaggggatgattgcatatcaattgtcaatgctagctctaatatcaaaatgaagagaatttattgtggaccaggacatggaatcagcattggaagtctagggaaagacaactcaacaggcatagtcacgaaagtgattttggatacagcagtttttaaggagactaccaacggtctc

SEQ ID NO: 215429 - DNA, 577 bp, Glycine max
tgaacacatcattaagaaccataatggacatcaagaggttatggttggatattctgattctggtaaagatgctggtcgctttactgctgcttgggaactttacaaagctcaggaggatgttgtagctgcttgcaatgattatggaataaaggtttctctattccatggtcgtggaggcagtattggtcgtggtggtggcccaacatatctggctattcagtcccaaccccctggctctgtgatgggaacgcttcggtctactgagcagggagagatggtagaggctaagtttgggttgccacagatagctgttagacaacttgagatatacacaacagctgtactacttgcaacccttcgtccacctatcccaccccgagaagaaaaatggcgtaatgtcatggaagagatctcaaacatcagttgtcagtgttaccgcaatgtagtgtatgaaaatccagaattcctggcctactttcatgaagccacaccagaggcagaacttggcttccttaacataggtagccgccctacaagaaggaagagctcagtaggaatcggacaccttcgtgcaatt

SEQ ID NO: 215430 - DNA, 545 bp, Glycine max
ggaaccaaaatgctggaaaaacttaattattttgcatcacattcttatataacagtatatctgagtacagaacaaaccattcaccattatggctatgataatctttccttagcaaacctattataaaacaagggtgaacatatgtgaattgtggaaggcttgtacaatatagtccttgagaagcaaggtcaacctgtattcttcatccctgcagcaatcccatttatggtgataagcaaagcatctctgatcttacggttgtcatcatcacgtcttaacctcttgagtatctccacctgcaacatgttcaagggattaaggaagggaagtctattctcaattagcctcctcaagctcctattattctgctgaagtttctcgtgcccactaataaccatgacaaacttttcagctgtcatgagctcacttcttagttcatgggcaagctcttgcctctcctttgacacaaggactttatcatagtgcttggctataggaatgtcagctttccccaaaaccatctcaataagatctatggcactttg

SEQ ID NO: 215431 - DNA, 615 bp, Glycine max
cgaaaaaataaatctcgaagtaattcgtagagttcaataactattattattttcaattcggaattcttattaattactttaaaccgaataaatcttgataattgaaaaattaagtcataatttattggttgattatatcattaactatttctttattttatatttaagttacgaggaaattatcatgaatccaattatttctgctgcttctgttattgctgctgggttggccgtagggcttgcttctattggacctggggttggtcaaggcactgctgcagggcaagctgtagaagggattgcacgacaaccggaggctgagggaaaaatacgaggtactttattgcttagtttggcttttatggaagctttaacaatttatggactggttgtagcattagcacttttatttgctaatccttttgtttaatcctaaaaaaatagaaatacatatccttttttccgaggacttgctttaccggtcttgctttttcgaattctatttatattaatatttcactcctataattctttatccgttcggacaagaacacaggggaaggacttatttgaaggtgaagaattacatactgattccgcctttttttctttttt

SEQ ID NO: 215432 - DNA, 533 bp, Glycine max
cgaattggggttattggtgttactgtcatggctgtgctatctggttttggtgctgtaaacctcccatacagttacttatcacttttcatcagagagattgaggaaacagaaatcaaggccttggaaagacagctaatgcaatcgattgagacctgtgtttcaaagagaaagaaaattattctttgccaaatggagatggataacaagctaggatctgaagagaagttaaatgctagatctttaattaaacgaatagtcggtacggttgttcgatctgtgcaagaggatcaaaaagagcaagatattaaagggttggaagcagaagttctggccttagaagagctttcgaagcaattgttcttggaggtctatgaacttcgtcaagcaaaggaagctgctgcttattctcgaacttggagaggacacatgcagaatctacttggctatgcttgctctgtatattgcgtgtataaaatgatcaagtcattgcatagtgttagtctcaaacaggatggttcagttgatcccgtgac

SEQ ID NO: 215433 - DNA, 514 bp, Glycine max
agaagaaattgctgatgtattggaaaccttccatgtcattgcggaacttccttcagacagctttggtgcctatatcatctcaatggcaacagctccatctgatgtgctttctgtagaacttttacaacgtgaatgtcatgtgaagcaaccattaagggttgttccattagttgaaaaacttgctgatcttgaggctgctcctgctgcggtagcccgcctattctctatagattggtacagagaccgtatcaatgggaaacatgaagttatgatagggtactcggactcgggaaaagatgctggtcgtttctctgcagcatgggcactatacaaggctcaagaagagctcataaaggttgcaaaagagtttggtgttaagctcacaatgttccatggcagaggaggaactgtgggaagaggaggaggtcccactcatcttgctatattatctcagccaccggatactattcatggctcacttcgggtaacagtgcaaggtgaagttattgaacag

SEQ ID NO: 215434 - DNA, 459 bp, Glycine max
aaacagaagaaaatccagttaaaatccaagctggcataagccaaaatccgtttttattacatgataacgataatagatagcgtaattgttatttaatgctggtccacatctgtagcagacaacataggttaaaatgtgtgtatccaaagttaagttacttgtataggaaggcaacacaggcatgcagctttttaaccagtgttttgcatgccagcagcaatacccttcattgtcaaaataagggtatcctccagaccaggagcataatcacttgtgggggtgagtttcacaagctcagctgctggcttgtttgattccatgtagtctttggacaaatggggcctcaacttcacatggtagtcaggatcacgaattcgcttcaatgtgtaggcttgcaggacattgagggttgtgatgtatgaatcgcgaaatcgaagtctttgcttcaagtaggggtct

SEQ ID NO: 215435 - DNA, 489 bp, Glycine max
gagtgcatggtcaccactaggagctttcaaaagtgctcaaggtacaaatgcagttatggagagcccaatccttaaggaaattgcttgtgaacgacagaagagcatggctcagattgctctaagatggatatatgagcaaggggcaattgctattgtgaaaagcttcaacaaggagaggatgaaacataaccttgacatatttgactgggaactgagccaagaggaatcacagaaattcagccagattccgcagcgtaggatgtatcgcggaataacttttgtatcagaaaatgggccttacaagaccttggaagagctttgggattgagattcctgaaatcattcctaatagcagcaaaatgtcatataaagctgtgtttggtttaagatgggaggagggaactaggagagaaattttgtacttttcatgtggaactcacatcttttacactttaatagaacacaaaaaatcttctatttctatcctct

SEQ ID NO: 215436 - DNA, 489 bp, Glycine max
agaggatagaaatagaagattttttttgttttattaaagtgtaaaagatgtgagttccacatgaaaagtacaaaatttctctcctagttccctcctcccatcttaaaccaaacacagccttatatgacattctgctgctattaggaatgatttcaggaatctcaatcccaaagctcttccaaggtcttgtaaggcccattttctgatacaaaagttattccgcgatacatcctacgctgcggaatctggctgaatttctgtgattcctcttggctcagttcccagtcaaatatgtcaaggttttgtttcatcctctccttggtgaagcttttcacaattgcaattgccccttgctcatatatccatcttagtgcaatctgagccatgctcttctgtcgttcacaagcaatttccttaaggattgggctctccataactgcatttgtaccttgagcacttttgtaagctcctagtggtgaccatgcactc

SEQ ID NO: 215437 - DNA, 544 bp, Glycine max
  unsure (1)..(544): unsure at all n locations
ctgttgcacttgtattgtggggaacatataatattaagacatatggtgagtccctggctcaggtcttgtggatgattggtgtgaatccagtagctgatacctttggaagggtcaaccgggtggaacctgtatgtcttgaagagcttggaaggcccaagattgatgttgctgtttattgttcaggagtattcagggaccttttcatcaatcagatgaatcttctggatagagcagtgaagatggttgctgaattggatgaaccagcagagcataactttgtgaggaagcatgcactagaacaagctcaagcccttgggattgacgttagagaagcagcaacaagggtcttcttcaatgcctcagggtcctacttctcaaacataaacctggcagtggagaattcttcatggaatgatgagaagcagctccaggacatgtaccttagccgaaagtctttcgcttttgactgcgatgcgcctggtgcatgcatgacagataaaagaaaggtctntgagaaggctctgagcacagcagatgccacatt

SEQ ID NO: 215438 - DNA, 504 bp, Glycine max
  unsure (1)..(504): unsure at all n locations
gatacaagggaatcattctctatatattaaactgagagcaatatttgacatgttggtttggagtttgcaactgcacaaaggaacatgatccctgaaaatgattaaaattacagcagggaaaaaggagagaggagcaaaatcacattaaaaggacaccatcaacaactttcaattcagtgtgggaaagaagctccagatacaaagaaggcatagttaaaaaacagttaatgtttctgctgttcatctcaattatcacttcagcgatcaatgccttctattttgtcttccacttctgagtacaactgcctgagcttgtcaatgttgtcttctgaagtctcccagtaaccgcgtccattggcttccaagaatgtctgcaccagcttcctaaaggagtttggatttgtgttcattagcttcttcaacatttcctcatcttgaatgaaagttgngttggcttcttcatacacccaattgtcgacttggcctgaggttgcactccatcca

SEQ ID NO: 215439 - DNA, 520 bp, Glycine max
attccaatgagttttatactgtatcaaatcattgcccttatttgtcctgtctttcttctcttttgctgcacagagaaatgggcagaatattttcgtgctcatgatattctcttcatcttctggtctgctaaagctgctactgctgccttggaaggcaaaaaacttggttcatcatgggaggatgataacatggggagaacttatagcccagacactaagatatatggaagggatgaacttttggcccgcttgcaatcagaggcagaagagatagttgacaggataagaaattcaggctcctctgatgcacgaccatctaatattaaatcccctgctgaaaatactgctggtagttcatcatcgagtcatgtaattgtgggatttgttggatatcctaacgtggggaacagttcaactattaatgctctggctggacaaaaacgcactggtgtcacctctaccccatggaaaacaaagcactttcagacattaattatctcggatgagctgatcctctgtg

SEQ ID NO: 215440 - DNA, 541 bp, Glycine max
gcggtatggaaaacaagcagctgcactgaccaggaagcctggttcagataaagctcgctatgaagggaagatgtctagtattatctacagtcctggccgcttcagtgatcacgcgtatgatgacagatttgcgaatgagggatctggtccaagaatttctgacttttctgtgtctagtggtggtgaacaattcaaatccgatgttcagtctcccaattttcataaggatatcaagattagaagtccatcctatcagcagcgttctggttctggttctagttcaagtgaagatgtgtggtatcaagcaagaaatgcatctttggaaactaatgccaatgccaagagagatgcagatggaattcgtcctccacagagaactgtgtcagcacaatcaagagacatcaaatttccatccttgagatcttataattctggcagtttagttgattttttctcagaaccagtccaagcttcagaaccacttcagaataaagcatttggcattcccagaccacctggtactacaagatctgttagcatg

SEQ ID NO: 215441 - DNA, 540 bp, Glycine max
atcgaaaatctagagcaaagtgattgattccagttccaatggccttgggcaccagcgccttgatcggaaggaaggttcttgtctcacccccaacccccaaaacaaccaaatcatctactccgctacaattccttttcaagagaagcatcttaaatgctcacaattcacaagctgctctagctgcccttatcttttcctccgcgagcctctctgtgaccccacaagcccttgccgctgataacgtcacccctccccctgtaattgaagcccaacagagccaattaaacccctccaactcatcctcccctttctcacagaacctcctcctcacagctccaaagccacaagcctcctccgacctccccgaaggcaccaactggcgctacagcgagttcttgaacgccgtcaagaagggtaaagtcgagcgagtcaggttcagcaaagacggttccgccctccagctaaccgtcattgacggccgtcgcgcctccgttattgtccccaatgacccggacctcatcgacattctcgccatgaacg

SEQ ID NO: 215442 - DNA, 514 bp, Glycine max
agaaccatattttttatttatttattgcgtaagctgctgtgctaattgttttttctccttgaatttgataaaataattattgattcttacagtgtacaagtcagagcgtattttatagtacaaacataattctgtgacttgcgtgtatgattatgcaacatataattcggcttttccatcaatgaatagactcatgaactcttcaccatccacagtttctttttctatgagaagttgagcaagcttgtgaaggatatcaatgtgagttgagataatatgtgttgccctagaatatgctctctctaccagttccctcacttccgcatccactacatccgcagttgccatggagtaatccttttgcgatgacatctgttgacccaagaatggatttccaccaggtccaccaatggcaacttgtccaatttttttgctgaatccaaatctctcaaccatctgccttgccactcgtgaaacttgcatgaagtcgtttgatgctccgttggtgacattt

SEQ ID NO: 215443 - DNA, 592 bp, Glycine max
atcatactaatttggtcgttgacaatagagcgcactataacaaactaaattaatgtttgtagcttgcgaatctcaacatcactctgccaacatggaaatttgtaaaccataaaataataaccctaagcccatatacaattttgaaagatgttgctttggtgcttccacttaaatatgctaaggtctgtaaatcataaacagctgtagcatagaaagaaaaaaaaaaaactcaggttttgctttaaacttttggtccaaaggaacatcacattgcaaaattttggccgacaaagcagtgttaaagaaaattattctgagtgcgatctgttcacaaatgaacggccacatctactccaataaacatctgaccttttaagcttgaccatctatctgcttgtcttccacatcattagtagtagcggctgcttctcccccctcggcgccttctgctggaggctgaacttgttcatcctccggaagtggctcctccacatagtcattttcaaacgcatccgcgggaacctcgtaaatcctaacctggggcttaaatggatccttcacaagaacatacttcccctcattcaatttcatg

SEQ ID NO: 215444 - DNA, 489 bp, Glycine max
tactgatttcaggacatgatgggggaacaggagcaagccctataagttccatcaagcatgctggaggtccttgggaacttgggcttacagaatctcaccagacactcattgaaaatggacttagagaaagggttattctcagagttgatggtgggtttagaagtggagtagatgtcatgatggcagcaataatgggtgctgatgaatatgggtttggttcagtggcaatgattgctactggatgtgttatggcccgcatttgccacaccaataattgcccagttggtgttgccagtcagagggaagagttgcgtgcacgctttcctggtgttcctggggatcttgtcaactactttgtgtatgtagctgaagaggtaagaggcatattggcacagctggggtatgagaagttggatgatgtgattggccggactgatttgttccaaccaagagacatatctgtagcaaaaactcagcatctagatctga

SEQ ID NO: 215445 - DNA, 487 bp, Glycine max
gtgattggttgaaactttattagctttggttattatttattgttacatttgattgaatcatttttcaacaagtgcaagaactgtttgaataggaataagagtttatgtacaacgggaaatgaaaatagttgtcatttgaacacattatgctgtggcagctgcttgttcttcaacagcctgtgatgctgggagaagggtgcaaatgaggttgcggtcaccggacacattataaacacgtcctgtggttggccagaactttgcagtacggagccaaggagctgggaaggctgcatattccctggagtatggttttgtccatgcatcagccatgagcagtgatggtggatgaggggcgcccttaagtacattgttgttaatgtcaacctttcctttctcaatctcagcaatttcttgtctaatggaaataagagcatcacaaaacctgtttaactcggccctgctttacttttagtaggctcaatcatga

SEQ ID NO: 215446 - DNA, 552 bp, Glycine max
ggaaacactgctgttgttgaggctgtttcgcccgagttggggaaccggtcacagtatgttagagttcaactccctggacttaaccaagagctccttcagaaattcagggaaaagaatattgactttgcagctcatagtccccaagaagagtcaggttcttttttagctaacctgattgagaatctggctttccctttgctcttgattggaggattgttccttctctcgagacgatccggagggatgggaggtcctggtggccctggatttcctcttgcttttggtcaatccaaagccaagtttcaaatggaaccaaacaccggagtgacatttgatgatgttgctggggtggatgaagccaagcaggactttatggaggtggtggagtttttaaagaagcctgagaggtttactgctgttggggctcgcattcctaaaggagttcttcttgttggtcctccaggaactgggaagaccttgttagccaaggctatggctggtgagctggtgtccatttttctctatatcaagttctgagtttgtgagatgttt

SEQ ID NO: 215447 - DNA, 446 bp, Glycine max
aacactaaaaacagtttctcttttatacatactctctggtggcatttggcaacactacaaaaaatgaaaaagtaagggagaatctttaatcattcacaaatatggagcaggctgcagagggcattctgttttctaagataatacatatgaaagatgttacatatataggctattcaaacaggggctggtactggagttgaaggagcaacacggttttcagctggaatttcaacaaactcaaacaatatagcacggaattcatctccgctcaaagtctccttctccagaaggacttccacaatcttggcaatggcctcacgggtgttccttatatgctccagggcaatttcatatgcttcatctgagatcctcttgatggcagcatcaatggcttctgcaagcctctctgacattgagttccttgccatcattctcatgatgacatc

SEQ ID NO: 215448 - DNA, 556 bp, Glycine max
cttttgtgggggtaaagagtagagagttgatctgtcacggagcgtatagtcgccggcgacggggagggtgcactttaaccgcgattaacgatgattaaccttcgccggagcggcgaaaacatccctgcgaaatcgaagcgattcatacgcccaatggtgaagttcgaggagctgccggagtacttaaaggacagcgagttcatattggactattaccgctccgaatggcccgtgaaggaagccttgtggagcatcttcgcgtggcacaacgaaaccctaaacatttggacgcatgtaggaggatttctcatattcgctgtgttggcggcgatgagcgccacctcggagctctggaatttgctcagatcgtccacggcgctcgggttgtcgaccacggcggcggagatgaacgggtctaacagtgacgccttcccggtaatgtttcataaaacatattttaaattcatagcttcgcataataatagtgatagtgatattacactgccaataataaaagtgatagtagtagtgattattatgcatatgggcaaatcaa

SEQ ID NO: 215449 - DNA, 563 bp, Glycine max
gacataataaaattctaattatttatctctcgagttttaagacacataattattagttggctaatgcacacaagtaggagatccatgtcggaaatctaatatgactagtatggcaacactatgggcaagtgcgccaagaacgacaaaaacatgaaaaatttgatggctgtgccctgtgatatcaaatgctcctggcttccatcgttctggtattctagcaacataaaatccagctccggtggcatatagaatggccatagcaagctcatatccaagtgcaacaagtatatggggatggccccaaaacaggacaacagcatgagctgcaggaattatacctgaaaagcccatggagaggaataaggaggccctgaggggtcggaaccgaggtgtagaaagtgaaggtgcaagtagagtaataatggcaaggactccaagcacagatattgatgccaaatagaataaccttgcgtaaggattgcagaaaaaaacatagtaaattggagcaaagaaagaacagacaatcattagagaaatgccagcataatctagacgccagaaaa

SEQ ID NO: 215450 - DNA, 602 bp, Glycine max
agctcggcaaccttattaggacctcaacttctacattaatctttccatcagacatcagtttctatgattttctgcactcttgtattctgagctgaacaaattctgttcttctctcgtatagtgaagtaaacaataagcacataaaccttcgtggacatggcaacaacagccttgtccacgaccagtgtgctttgcaggaggaaacctcagcacatgcatattatcctaccctcttcacagacactccaaaatggaactctaagaactgatgtaactgcttcagcctcaaaagataatatcagcatagaaagtgagaagtgttgttcctctttgttggtgaacagaagaacagttttggcttctggggtttccttgttgggtttcccgggtgagagtttggctgtggagaaacaaggccttctagctgggagaattcctggcctgtccgagccagatgaacaaggcaagcatttgatcagacaggttggaggacgtatcgcaagccggatgagaagtctggaggacatggtgttggatggagtcctattatttcatacagcttcagagtgcccaaagaatgggaagagtgatgcttatgatct

SEQ ID NO: 215451 - DNA, 541 bp, Glycine max
gaaatgtaacaaaactggtttggtatattgaaggtacaaagatttttgcatatataatctcttgattcacataaatcccagtcagacaaagtagagggaaacaacctctttgttgtactgcaatacaaatatagaaagctgcatttcaattatctctgggttcgcagaagattctagttatacaacccgaaaagattcagctatcttcttcaaatcatcgtagtgtctcttccactgaagaccgctgcctgttacaccaaacaaatataagcggttgccagctgcggtggcagtaatgaaaatatgaggaggctccagctcaaactggtagtaagttcttccttcatgttctgctacattagcgctcagaaccttcccttctacattttccccaatcatttctggaccaaatgcattgatcactttctctggaggtccaattttttctattgtagcattgtcaccaagatcatcagagaatctaagaacaggagcaacaatgacaaacaaacgtccttccttagagctggcaaatctcaaa

SEQ ID NO: 215452 - DNA, 511 bp, Glycine max
caagtagttgagaactaagaaggagaagcaaatggcttcctcaatgatctcttccccagctgttaccactgtcaaccgtgccggtgccggcatggttgctccattcactggcctcaagtccatggctggcttccccaccagaaagaccaacaatgacattacctccattgctagcaacggtggaagagtgcaatgcatgcaggtgtggccaccagctggcaagaagaagtttgagactctttcctacctgccagaccttgatgatgcacaattggcaaaggaagtagaataccttcttaggaagggatggattccttgcttggaattcgagttggagcacagtttcgtgtaccgtgagcacaacaggtcaccaggatactacgatggacgctactggaccatgtggaagctgcctatgtttggttgcactgatgcttctcaagtgttgaaagagcttcaagaggctaagactgcataccccaacggcttcatccgtatcatcggattcgac

SEQ ID NO: 215453 - DNA, 493 bp, Glycine max
attcattagttctcatccattaatttccattgaagtccgaaaacagaaaccaaaaatacaggatgatgaaatctcaaaaagcaaaaacaaatgggaatgtagtttaagtacaaacaaacaaagtggggtggcggctacaaatgctttgcaaatttttcacacttagaagcctgggggcttgtaggcgatgaagctgatgcactgcacttggcgaacgttgtcgaatccgatgatacggatgaagccgttggggtatgcagtcttagcctcttgaagctccttcaacacctgagaagcatcagtgcaaccaaacataggcagcttccacatggtccagtagcgtccatcgtagtatcctggtgacctgttgtgctcacggtacacgaaaccgtgctccaactcgaattccaagcaaggaatccatcccttcctaagaaggtattctacttcctttgccaattgtgcatcatcaaggtctggcaggtaggaaaga

SEQ ID NO: 215454 - DNA, 608 bp, Glycine max
ctgaatctgtcaagaaacaaaatcagcactattgaaggccttagagaattaacacggctgcgggtacttgacttaagttataatcgcatctcaagaattggacaaggattatcaaattgtaccctagtcaaagagctatatcttgctggaaacaagataagtgatgttgaggggctacataggttattgaagctaacagttctggacctgagctttaacaagatcgcaacaacaaaagcattaggccagctggtggctaactacaactcacttcaggccctgaatctgcttggaaatccaattcaaagcaacatcagtgatgatcagctgcgcaaagcagtttgtggtcttcttccaaagcttgtttacctgaacaagcaatctatcaagactcaaaggggacgagaaatactcactgatagtgttgccaaagctgcacttggtaacagcagccggaccttctacagaagagcactaaagaaaggtggcggccatggagggtcaagttccagtgtgcatagaagcagtgctagtggttccccagaaatcaggaacaggtcaaggagccaaactaaacatcattaggtgtctggaaagctgcattcatc

SEQ ID NO: 215455 - DNA, 570 bp, Glycine max
ggaagaagcatcatgtgtatgcttagttgtcatactgatacttgctctaacattggcatggagggtgctgaactggttatggctaaggccaaagaggttagagaggctcctaagagagcaaggccttcaaggaaatccctacaggcttttggttggggatttaaaggagattatgaatatgcaaaaggaagtcacatccaaacccatgaatctctcccatgatatagtgcctcgtgtcttttcctttctccaacacactctcaacacacatggcaagaattcttttatttggtttgggcgaaaaccaagggtgatcatcacagagcctgagttaatcaaagatgtacttaataagatgcatgatttcccaaagcctgacacgagtccgcttgtcaagttacttgctactggtctttaaaccatgaaggagaaaaatggaacaagcacagaagaataattagccctgcattcaacttagaaaaattgaaaatatgttaccaatattctacacaagttgcaatgatttaattatcaagtgggaggaaatgttgtcttctgatggatcatgtg

SEQ ID NO: 215456 - DNA, 522 bp, Glycine max
gctactattattttttatatttcaactttacgtaaaatgacatgagcaccatattggggctgaagagtaaatactgtaacaggagcatgagcataagctggagaaagttcaaatgagaaatgttgtaaaatcgttgacaaagccatctttgcctccaacaaggaaaagttttgtccaatgcatattctaggaccccatccaaatggaaaaaatgaaactctgccatttgtggccttcagaactccttcagaaaatctctcaggtttgaattcattcacatcatcaccccagagttcgcggtcatggtgaaccatagttgttggtaaggaaacttgcactccagcaggtaatgataggtttccgagtttcatatctctgtcaacatttctattaaggccaactgctggtgggtatagcctaagaacctcattcaaaatcatgctgacaatcttaaggtgacttagcccatcaaaatttggtttttgttgccaaatacttgtaaactttctccctcgcacgtgc

SEQ ID NO: 215457 - DNA, 539 bp, Glycine max
tgtgcttcgaaggggccgaggatctgtcaggtggaggtgggtccaagtacggaaccagtatcctgagggaggttgcactggatccctcccgcgacatcattctcgcctacatgcaaaacggggagcctttgtccccggatcacggcttccccgttagaatgataatacccggtttcattggtggccgcatggtcaaatggttgaagcgcatcattgttactaccgaccaatctcaaaactattaccattataaggataacagggtactcccttctcacgttgatgccgaacttgccaatgctcaagcttggtggtacaagccggactatattatcaacgagcttaacataaactccgtgataaccacgccttgccacgaggagatcttgcccatcaactcatggactactcagatgccttatttcatcagaggctatgcgtattccggtggtgggagaaaggtgacacgtgttgaggttaccctggacggaggtgaaacgtggcaagtgtgcacactggactgtccggagaaacccaac

SEQ ID NO: 215458 - DNA, 463 bp, Glycine max
gagaaatggggctgacattcacgaagcttttcagccggcttttcgcgaagaaggaaatgcgaattctgatggttggtcttgatgctgctggtaagaccactatcctctacaagctcaagctcggagagatcgttactacaattcctaccattgggttcaatgttgagactgtggaatacaagaacattagcttcactgtttgggatgttggtggccaggacaagattcgtcccttgtggaggcactacttccagaacactcagggtctttattttgttgtagacagcaatgatagggacagagttgttgaagccagagatgagttacataggatgttgaatgaagatgaactgagagatgccgttttgtttgtgtttgcaaacaaacaagatcttcctaatgcaatgaatgctgctgagattactgacaagtggggtctccactctctgagacagcgtcactg

SEQ ID NO: 215459 - DNA, 555 bp, Glycine max
gaagtgaatatagttttttttttcctggtatcttacaaacaataaacaaaatctccatttcattatatgaatgatacatgaccaaaataaaactaaaaatcagacaaaacctggtggcacattgaattagtatctccattacagttatgggcgttgcatccaaacccaatagaaagctcagagtattacacatcccaaaaagtaaaatcctactacagtttagcaccgagatgtcctaaaccacattacatgaacacaaattcgagttgtcttggaagaggaccaagaaataaaagctagataatgttcaaccctgcatccagaaataccaatccgcaagactcccgtctcccaaaggcattaagccttattggcaatgttgttggaaagccagtccagaccttcgtaaaggccctccccagaggttgcacaggtgctctgaatgtaccagtgacgctgtctcagagagtggagacccaacttgtcagtaatctcagcagcattcattgcattaagaagatcttgtttgtttgcaaacacaagcaatacggcatc

SEQ ID NO: 215460 - DNA, 515 bp, Glycine max
  unsure (1)..(515): unsure at all n locations
ccgtcttactcgaagtatcagttttcaaatcttggattcgattccatcactgatatttctcttctctctctctttctctgccgaatatggcgccgcctgcgccagcagttgaaggcggccaggcgccgcaagggcggcagcaacagccgcaaggagggtttggcctctccggaatcatacgcatggcagttttctggtacttcgcctacaaattcttttcccccaaaaaacctaccgaaccttccgctctcatctccaatctctatcagaaggcacagcctctggatatgtggctttatctttccgagtacgagaagttcaatgactttggtagtgaaagttctcttgtatggcatgaaaccaatattccgtatgccgtttggggacctgagagtaccaggactctaactttgaagtatcatccgtctgagtctttgaagcataatggggtctatatgctcatgttttctttgcacactctgngctttcgcctgacccaagtgatccagaatacc

SEQ ID NO: 215461 - DNA, 562 bp, Glycine max
gattcctggaaagacagtggttgatgtgataaggcagtacaaggagttggaagtggatgttagcaatatagaagctggtttgattccagttcctggctatagtagcactgctatctcacccttcaccttagattgggtgaacactcctggctatgatgggtttaaaggatgtggaaagagaccttcctcagtgagacccattgagcatgaaaggaagaaaggagtgccttggactgaagaggaacataaattgtttctattgggtctgaagaagtatgggaaaggcgattggagaaatatttctcgcaatttcgtgattactagaactccaacacaggttgctagccatgctcagaagtacttcataaggcaactttcaggaggcaaagacaagaggagggccagcatacatgacataacaacagtgaatctcacagaaaccatcacaacttcttgttcagaagacaccaatagatccactttaccacatgttctctcacagccgcagcagcataattctactcctactacccccagaactcatgttcagtggactaatcag

SEQ ID NO: 215462 - DNA, 343 bp, Glycine max
ctgagaaacggaaaacatctaagatccatgaaattaccgcaatccaatcatattgcagagcgaggacttaaccaagtatattctggaaactgctgtttaccctagagaacctgcgcctctaaaagagctgagggaagccactaataatcacgcctggagcttcactgctactttacctgaagcgggtcagctaatgaccttacttatgaagttctcgcggtggaggtgtcaagtgcgaagcaagagacaccgctgttgaagttgcttccgttactgatgcaaattggcaatcacttgtgattgaatcccgatctcctgtactggatgaactctgggctccatg

SEQ ID NO: 215463 - DNA, 468 bp, Glycine max
ctctaacaggaacacaaaatgcaatggttattcagggggctactaaaaatacagattatgctatcgcagagcattaacacaaaagtgaagcgacgcgcctacaaatattgagcccatcccctacgggagtaagagcaaattccacaccagaatcgtttgggattggtttgttaaattgaattgcagcgtccctccctgacctagggggggggggaactttgtcttcaggccagcaaacacgtacaccccacagtgtgttgtcatacacaagctaccccccaattttgaccagctttataagcctgtcatggtagttcacatagttctccttggcagcatcaatgaaggcaaagtcaaaagatccttaatttgcaggatcttcaagtagcttatccaaaattggtagagctggagactctatgaaatcaatcttgtgctcaactccagcctttttgatgactggtaaac

SEQ ID NO: 215464 - DNA, 480 bp, Glycine max
agattttcctctatatctgctccaacccagaggttagttacttcaatgctttcagataaaagatttattcaggagtactttgaaaccaaccggaaaagaatacgacaaatgcatgatgaatttgtgggttgtttaagtaaactaggaatcaagtgtgccaagagcagtgctggtatgtactgttgggttgatatgagtggattaatccgaccttatagtgagaaaggagaaattgaattatgggggaagtttttgagtgttgccaagatcaatataactcctgggtcagcctgtcattgcatagaaccaggatggtttcggatttgttttaccactataacattagaggagatccctatggttattgatcgaattaggagagttgttgaaaagtgtaatttttctagttgaagttccattgtttcattgacatttacagacgcctgatgttgcagtcagaagctgctcgttagaaatttt

SEQ ID NO: 215465 - DNA, 515 bp, Glycine max
gatcgaaatcggaagaaggattagggtttgtggagatgcaagggcaaggcgttgatgaagtgagcatagaagagttggcgtcgaatctttccctctacaaagatcaactgaaccaggttagagaactcttaaacgatgaccctgcaaattctgaatatgttgacatggagagggaactttccgaggtcattgccttgaccgaggaactccttgcaactgcaaagcagaatgaaatctctgctcctcctaataatgctgctgcatctccaaccttgtccatacataacgagaatcaattgctagatagtagttctgatcatcaagagaaacttcctgttggcaccaaagttcaggcagtttggagtgaagatggggagtggtatgatgcgacaattgaggcttatactccaaatggttattatgtaagctatgacaattggggtaataaagaagaggttgatcctgccaatgtaaggtcaattcaagaaggttctggtgatgctttattagaagct

SEQ ID NO: 215466 - DNA, 473 bp, Glycine max
gtgaaagaaaaaaaaatatatatatgtggggcgaaagctacaatctaaaacagttctgaagtctcgacacatttcagtagataacattgtttggtttgccatcagtgaacctctacagagaatggttgtttgagcatgttacatacaattgaaagggcatctagccgagtcggtgcataacctaatcatcattttcaacagtaccatctttgaggtgaaaatgtttttctctcttctggaactctgtcaaacctttcccacttcccgtcacaccaacctttccctgaggatcatcaggagatttaaaaatactcttccgttttctttcagagaagaaaccaagcttctttgcctttcctttgggtgactgaaactgctgccaagcattttgccgcttattttgtgtgagttcaagttgctccatacgcatctttgacttaaagcatgtgttttttgcgttttgaagctttaca

SEQ ID NO: 215467 - DNA, 483 bp, Glycine max
  unsure (1)..(483): unsure at all n locations
cacgatgctaatcgcatggcgcctcacctccactgctgcatctcagaatcgggacgccgtgttcctcactacatagtacctattagcacactagattttgccaaaaagatcaaattttgaagcaattgtttttgtgggcaacattcattctttgctatccctcgaaaaatcaattttcggcttcgagcatcggatatggagaaggtgatgaacattctgaagccgaagccaaatccgcagcaactattgagggattggcagcgcaagcttcgccaagagtgtcgcaacattgagcgccaaattcgcgatatacagagagaagataaaaatgtgcagaaagctattagagaagctgcatagaggaatgacatgggctctgcaaaggcacttgccaaggaacttgtgagatctaggctaactgtgaaccgcctttatgaaaacaaagcacagatgaatncgatatcagtgcatcctggagagagt

SEQ ID NO: 215468 - DNA, 433 bp, Glycine max
aaaaaactctgggtaatttacatacaaactgcacattccaataccatttttcccattagggttatcaatggtcattttcaatatagatatgacaaataggttacaataaacctgttaacatttctcttttataacataccagggtacaaggtagaggctgcgaaattagaaacttgattatgatcgaactttagcaagccgggcccttatttcttccatttcttcttcataatcaacaccctcagctatagcattttcctttgcgccaacactttgagcaggtagcttcaccctttttttcctcacagtttcaggaagttgagcagctgtctcaccagctattgcgggcaagactttatcaacttcttcttctatctaatcttctatggcctcagaatctagcgctgagtcgacggcatcgtttactatctcc

SEQ ID NO: 215469 - DNA, 500 bp, Glycine max
ctagaaatggaacattttttccactaaatatgcaggcgatcagtttagagttctacatggaatataggcacactcgtatatcttcaacgggtttcattggccgaaagagatataattaaagcactgtagtgaacttcttagtatcatagaaaacaggccttgaatcccttttgcaattccttagcatccaagtttttccctatgaatacaattttgtttacccttggttcatctggcccccacaacctttcaggtgaaccttgaaatatgtcatgaactccctgaaagacaaatctctcgttcattccttgaacagacagaaggcccttcatcctataaatgggttcactacgatcaagcaacaaggtgccaagccacatgttagccttctcaaggtctaagcttccttcacaaactatgctgacagatgaaacaccaggatcgtgactatgatcatgagagtgatgaccatggagttcatgcttgtgggcatgggaatg

SEQ ID NO: 215470 - DNA, 590 bp, Glycine max
  unsure (1)..(590): unsure at all n locations
gtgtatttccctacctctcccttcaagatgcagatcttcgtcaagaccctcaccggcaagaccatcacccttgaggtggaaagctctgacaccatcgacaacgtcaaggccaagatccaggacaaggaaggaatccccccggaccagcaacgtctcattttcgccggaaagcaacttgaggacggccgtacccttgctgactacaacattcagaaggagagtactcttcacctcgtcctccgtctccgaggaggcatgcagatcttcgttaagacactcaccggcaagaccataaccctagaggttgaaagctccgacaccatcgattacgtcaaggccaagatccaggacaaggagggtatccccccggaccagcaacgtctcatcttcgccggaaagcagctcgaggacggccgcacccttgccgactacaacatccagaaagaatcaacccttcacctcgtccttcgtctncgtggtggcatgcagatctttcgtaagaccctcaccggcaagactattaccctagaagtcgatagctccgacaccatcgacaacgtctaggctaagattcatgacaaggagggaat

SEQ ID NO: 215471 - DNA, 567 bp, Glycine max
aacaaacgtaggtgggatattagagtactattattaatgggacacaattgagttcaacacaaaccgaacttattttcaagggacattattacagacccattaaacatcaaagttcttcaaatgttttgggaacacatccaacattacacaacgagcttaaaaccccccacggagacggaggacaaggtgaagggttgattccttctggatgttgtagtcagcgagggtccttccatcctcgagctgcttgccagcaaaaatcagcctctgctggtccggtgggatgccttccttgtcctgaatcttggccttcacattgtcaatggtgtcagagctctccacctcgagggtaatagtcttacccgtaagagtcttcacgaaaatctgcataccaccacgaagacgcaacaccaagtggagagttgactccttctggatgttgtagtcagcaagggtgcgtccgtcctcgagctgcttcccggcgaagatcagcctctgctggtctggggggattccctccttgtcctgaatcttagcctttgacgtgtcgatggtgtcggagctttc

SEQ ID NO: 215472 - DNA, 572 bp, Glycine max
gaacatcgaccagatctccgcatctgtcgagaaagtcgtccccgtcctccacgccgacgtcgagccgttccgcgtcccgctgcctgcgagcccactgatatcaccgcaacgagagcacccgccgcagctgccaccgccccaaatcacactgcaggaagacagcgacgaggaagctgtcaaagaacaagctgcaaagatgcctcctaagacacagaagcagaaggagcagaaggaggaagaggagcatggcgctgtcttctccgtctccggtcccgtcatcgtggccgagaacatgattggtgttgccatgtacgaactcgtccgtgtcggccacgagaacttggtcggagaggtcattcgtatcgatgccgacaaggccaccatccaagtctacgaggagactgctggtgtgactgtcggcgaccccgtcttcaggtccggacagcccttgtctgtcgaactcggccctggtctcatggagaccatctacgacggtattcagcgcccttctaagggtatcgccgacgactccaacagcatctacatctccgtggtatcgatctgcccgccct

SEQ ID NO: 215473 - DNA, 335 bp, Glycine max
cccaggcctcaacaaaaaattttggggccaattttaaatttacgttccgggaaaaacaaaaaatccccctttgcaagccgttttttcttgtaaataaaaaacccaaacttttccggaattttttggggcagttccttattcttttgggggaccccctccttgcctttgccggggggtttaaactttatgctggggggctgagcttggatctttgaggggttatcggggattttgggccccttggttccctgcaaaaaccccttttgggcctcatgggggaacccccaaatgtttttaaaaaaccattaagtcttccacagggggcaaaactgggc

SEQ ID NO: 215474 - DNA, 439 bp, Glycine max
attctaaaaactggagaaggcattacagaagtctgccttagtgggtttattgcttttgatgttcctcctccaaagggtccattgtggattcttggcgatgttttcatgagggcatatcacaccgtctttgactacggaaatctacaagttggttttgccgaagctgtctaattaggctttctggaggattttctttgaaaaattgttaagcgtgttgtaaataagctgttataacaattgtagctgggattcactttatggaatcacgaatggatttatccatttaagacgtagaagtatccacttggaacttggaagtgttgtgttgtgtgctttttatatgaaaaaaccatcgtcttcactctttattttattccgtgttgggcagaatattatgccttttctgtccctttcaaaattaggatacttgtaatgtgcc

SEQ ID NO: 215475 - DNA, 439 bp, Glycine max
ggcacattacaagtatcctaattttgaaagggacagaaaaggcataatattctgcccaacacggaataaaataaagagtgaagacgatggttttttcatataaaaagcacacaacacaacacttccaagttccaagtggatacttctacgtcttaaatggataaatccattcgtgattccataaagtgaatcccagctacaattgttataacagcttatttacaacacgcttaacaatttttcaaagaaaatcctccagaaagcctaattagacagcttcggcaaaaccaacttgtagatttccgtagtcaaagacggtgtgatatgccctcatgaaaacatcgccaagaatccacaatggaccctttggaggaggaacatcaaaagcaataaacccactaaggcagacttctgtaatgccttctccagtttttagaat

SEQ ID NO: 215476 - DNA, 569 bp, Glycine max
  unsure (1)..(569): unsure at all n locations
gcttctctgaattctctggcctccgaagctcatcaggcttccttcccttttctagaaaatcttcagaggatttccattctgtcattgccttccagacctatgcagttggaagcagtggaggatacaagaagggtgtgacagaagcaaaactgaaggttgccataaacgggtttggaaggattggaaggaacttcttgaggtgctggcacggtcgcaaagactcccctcttgatgtcattgccatcaacgacaccggcggcgtgaaacaagcctctcaccttctcaaatacgattccatcctcggaaccttcgatgctgatgtcaagcctgttggcagcaatgtcatctccgtggatggaaaggaaatcaaagttgtttctgaccgcaaccctgccaaccttccttggaaggacttggggatagacttggtgattgaaggaaccggggtgtttgtagacagagaaggtgcagggaaacacattcaagcaggagctaagaaggtgctcatcactgctnctagtaaaggagatatccccacctacgtgggtggtggtaatgagtatgactac

SEQ ID NO: 215477 - DNA, 538 bp, Glycine max
caaggtaagaattttattgcacaatgagaaggcagagaaaattgatggttctgtttctcagtacaagtttaaaagaaaaatgaagcaacaagtgttgtagtggtagtagtagtagtaagcatacaaaattacaatggcatggtacatacataataatttaattaccaatgagaatttgtttggctctcacttccatttgttggcaacaatgtcagccaaatccacaaccctttgggagtagccccattcattgtcataccaagcaatgaccttcaccatgtcatctcccatgaccatggtcaacgaggagtcaacggttgaggacacatcagtgcacctgaagtcaacggacacaagtggctcatcacacacagagaggattcccttgagctcattgtctgcactctctctgaatgctgcattcacttcttctgcaaaggtcttctttgagacctgaacgacgaggtccaccactgagacgttcggtgttggcacacggagtgcaatgccattgagtttgcctatgagggttgggagg

SEQ ID NO: 215478 - DNA, 525 bp, Glycine max
  unsure (1)..(525): unsure at all n locations
gtcttggttggagcggatggaatatggtccaaggtgaggaagcagttatttgggctcacagaagctgtttactctggttatacttgttatactggcattgcagattttgtgcctgctgacattgaaactgttggataccgagtattcttgggacacaaacaatactntgtatcttcagatgttggtgcgggaaagatgcaatggtatgcatttcacaaagaacctcctggtggtgttgatgagcccaacggaaaaaaggaaaggttgcttaagatatttgagggctggtgtgataatgctgtagatctgatacttgccacagaagaagaagcaattctaagacgagacatatatgacaggataccaacattgacatggggaaagggtcgcgtgactttgcttggtgattccgtccatgccatgcagccaaatatgggccaaggagggtgcatggctattgaggacagttatcaacttgcatgggagttggagaatgcatgggaacaaagtattaaatcagggagt

SEQ ID NO: 215479 - DNA, 569 bp, Glycine max
gtgtaatatttccacttgaatgaatatggtgaaagattttctattggacagcatatataaaacacaaattcagtttaaaatggcagttcggaggcttaacaacagctatgctctcgactttgcagttgatagatacacatgcaacatttgttaatgcaaataccattcaactacctgtgtatatgatcatacttgatactacagagaaattatttcttttggataggcaataatggttgttatgactgccattaagagtatattgttgtcacttctattttttgtatgtttgttatttttatgcaattcaggtgggaatggaacttaccaaatagtttggtaatcttggaactgggcgtgggcttgaaatggttgctgcctttgaaaaagcttccagcaaggccatatcatattatttttcatcttcctctgctcgctcacatgaatcatccactcaacctgatttcttaattttgcagaaaattccattaataatgtgtcccagaagacccagagatgctactgctgtatatgcatctatggacaaagctgagaaagaactggttgga

SEQ ID NO: 215480 - DNA, 342 bp, Glycine max
gtgacatggcccagctttagtgatattcacccttttgcaccagttgaccaggctcaaggttatcaggaaatgttcaacaatttgggtgaactgttgtgcaccatcactgggttcgactccttctttttgcaaccaaatgctggtgctgctggagaatatgctggacttatggttattcgcgcatatcatttggcaaggggagaccaccaccgcaatgtttgcattatacctgtctcagcacacggaacaaatcctgctagtgcagctatgagtggaatgaaaattgtctctgttggaactgatgccaagggaaacattaatttataacagctgaggaaggct

SEQ ID NO: 215481 - DNA, 482 bp, Glycine max
ctcaatctcagcaatttcttgtctaatggaaataagagcatcacagaacctgtctaactcggccttgctttcactctcagtaggctcaatcatgagtgtgccaggcacaggccatgacattgttggtgcatgaaaaccgtagtccatgaggcgctttgcaacatcttcaggctcaattccagcagtattcttaaagcctctcaagtcaatgatgaattcatgagcaactgttccattgactccacggaaaagaaccgggtaataattctccaatcgttttgccatgtagtttgcattcaaaatggctatctttgatgcatcggtgagtcctttagaacccatcatggctatgtaagtgtaagagattggcaatatgagtgctgagccccatggtgcagcagcgatggtaccaagtggttgaggtttgtcaggggcaggaattccaccagtttctatcacagggtgtgaaggtaaaaatggtg

SEQ ID NO: 215482 - DNA, 562 bp, Glycine max
gtagcaattaataacttggaatttggctttgaggataagacacttttcaaaaaggcaaatcttacaattgaaaggggagaaaaaattgccattattggtccaaatggatgtggcaagagtactttactgaaattgattatgggtttggaaaagccaaccggaggtgaagttttgcttggagagcataatgtattacctaactattttgagcagaatcaggctgaggcacttgatctggaaaaaacagtgctcgagacagtagaggaagctgcagaggactggaggattgatgatattaaagggcttcttgggcgttgtaattttaaagctgatatgcttgaccgaaaagtttcactattgagtggtggtgagaaggcacggctggccttttgcaaattcatggtaaagccatcaactatgcttgtgttggatgaaccaaccaatcacttggatataccttctaaagaaatgctcgaggaagcattaaatgaataccagggcactagtatcacagtatctcatgaccgatactttataaagcaaatatgttatagagtgatag

SEQ ID NO: 215483 - DNA, 516 bp, Glycine max
atggggtaatcatccttttatatttccgtaaatgagttagtgaatagatacatgattatacaaaggctgtgtagcttaacccaatatgctagctacatcaccttctggcggtaaattagtgtaacaatgaaatggttcactcaattccatctcttggcatttttcacgcctttggacttctgttttgctgcctgaaaggcctgcatcttttgtttcttccgtgcctctttctcagccttggacatcttagatttggctttcactttaggagctttgctatcaagctcagcctcgcgttcaagttctctttccctagcatcaaaattcttctctaaataataatcgtaatcacctgcataatcctgtatggtgccatctttaatttctatcactctattaactatttgctttataaagtatcggtcatgagatactgtgataacagtgccctggtattcatttattgcttcctcgagcatttctttagaaggtatatccaagtgattggttggttca

SEQ ID NO: 215484 - DNA, 534 bp, Glycine max
  unsure (1)..(534): unsure at all n locations
ttattgttcaaatctatttttgaaagttagtgcattgataggatattattaataattcaaggctttatttaaacaggatataataaggctttcttccgtgaacatcttgagcaaaagtaagaaaaaaacgatgcttacttctctgaatgaattaacagagcagatgccttcgcttcttgaaattgatcatccatgtgctcagaggcacattgcagatgctcactacttggttgagtcaattcctgaagaagatgaccccattcaagatatttctcatggtcgcaagccatcaacagatctgggctctggatctgaaactgacgttgcacagtggaatgtactccaatttaatacaggctcgtcctcaccatttataataaaatgtggtgcaaactctaattccgaactagtcattaaagccgacgcacgagttcaggaaccataaggtagtgaaattgtgagggttgcccctagaccctcncgtttggaaaatatgagcttggaggaaatgaaacaagtatttaatgaactacc

SEQ ID NO: 215485 - DNA, 595 bp, Glycine max
agataacaatactgtagatatagagagatagttccaagctccaattcccagaaaaaaattaaaactttgcttcttcactttttctcttaccccttctgatctcatgcaatttcccctcatggatccctttgattcgattcgcaaagggtttggctgaagctatctggaatatttctgttacagtttttaaggtctatctatgttttagtcatttttgtccatattcttgtcaataatgagcttatccaagaaaggttcccaaacagacgcaaaattgagctccttaaacaaagcaacctatttgaatccaaatgcagcagagtttgttccatttgccctcagatcatcgccatctggaagcaccagcttggtagatgcaacagcgaggtttgctgctgccggatctcttgggaaagcagttttagatcgagcagaatcatgcatttcaaataattccgatgatgaggctcaccagtactggcgttgtcagcttcctgatgatatcacccctgacttcaaggtcatgggagaggatgaataccaaggtcttaacaacctctctttagcagcttatctataaatgactgatatgaat

SEQ ID NO: 215486 - DNA, 479 bp, Glycine max
ctcaacccgtaaaacctcttttttttcatttttctttttgacttgaccattgccattacttcccatatacagatacaagaatgactacaatgtctatgtgttcatgatgaatttttttaccgtgtcagaaacttgtatatctccttggttcagtatatcacaacacaaagcaggcccggctgcggttcagtgaaatcaaggccttcttcgagaagataacgctgtacagctattgggagtctcgcaggagtgcgggagccccgagtatggtgaccagtgccaacacagatgtaaacctgcaaacgctgctcgggggctctggctgtgcttcgtagcacactcagtttcgtgtttcagcacgtgaatcgcttcacttacgtgcagaccatgtaggtctatcattctttggggccctcttccattctctggagcaacaggattcctctggcgataatagattcttgagctttccatgtgct

SEQ ID NO: 215487 - DNA, 565 bp, Glycine max
ccgatcttttcctctgagaagacgtgtcggtagctgaagcattttataagcctccactttcctgaactagttttaacatacaatctttcaagtacacctccccagcttccatttaagaatggagatcactagaataggccaatggttaagtcttctgatatgtgtactactattactgcagacagaaggggttcctgtgggaatcacttttgttgaaaatgcagtggcaaaaggggctgtttgtttggatgggagtcctccagcttaccacttccacaagggatctggagcagggattaacaactggatagttcactttgagggaggaggatggcgcaacaacgttactacttgcctttcccgtagggacactcgattaggttcatctaagaaaatggatacatcactttccttttctgggtttttcagtaacagtaaaaagttcaatccagatttctatgattggaacagaatcaaggttaggtattgtgatgggtcatcatttactggtgatgttgaagctgttgaccgaaaaccaatttgcacttcaaggagcaagggtttt

SEQ ID NO: 215488 - DNA, 547 bp, Glycine max
tgaggttgttgctgttactggcgatggaactaatgatgcccctgcactgcgtgaggcagacattggacttgcaatgggcatagcaggaactgaggtcgctaaagaaaatgctgatgtcattataatggatgataacttcacgactattgtcaatgttgtcaaatggggacgtgcagtatatataaacattcaaaaatttgtgcagtttcaattgacagttaatgttgttgctctggttatcaacttcatttctgcatgcatcactggatctgctccactcacagctgttcagttgctttgggtcaacttgatcatggacactcttggggcattagccctggctactgaacctcctaacgatggacttttgaaaagacccccagttgcaagaggagcaaactttatcaccaaacctatgtggaggaatatcataggtcaaagcatatatcaattaattatccttgggattctaaattttgatgggaagaggctgctcggacttggtggttcagattcaacaaaaatactcaacacgttgatattcaac

SEQ ID NO: 215489 - DNA, 556 bp, Glycine max
gatacaataatggaatatattatgttcttgtactttgcaggaagctgcaaatatattaaatgatgagaatgcgcgcttgctttgcccttcaatgactataaaagtaccccaaaagtagcacaagtgtagatttgcttgaaattcttgaaatgacaaaaagttcaaggctctctcatccctatattaggaccaaaagaatctttttgtgttttttctttaacaatgtgtcatcagcatgcacaagcttatgcaatccgttgaaggttatatgccaccatatcttcaagggctaaacgaaatacactctgaggtaggcattggagactttgaattgcaagatcggctttctcttttgctaactcttgtgctctttcaatgcccccacaactcttgaccaaattgatggcttcctcaagggaaccaacctcactgaattcagactcgatgatatccctcaatttcggttctttctccagtgcgaaaattactggtgcagtcaggttgcccttggcaaggtcactgccagcaggctttcccagttgctcggctgatgagt

SEQ ID NO: 215490 - DNA, 570 bp, Glycine max
ttgcactccaattggaaaaaagaagtgaacttgcgatctgggtatccaattttcgaactctttcgatggggaatgatgcagggtcaccgcagggtccggttacgtgtgggtcgtggattcggaggcccgagaatttgaatttggtggtgttgggaaggttcagacgtggcagttcttgtccttctctcttagagattttctccttcgatcccaaaaccacttctttgtctacctctcctctgaccacttatgtgttggaagcagaggaaggtgatcctgttgccattacagttcacccaagtggggatgattttgtgtgcgctctcagcaatggtagctgcaaattgtttgagctgtatggtcgtgaaacaaacatgaagttgttggctaaggaactggctcctctacagggtattggtcctcagaaatgtatttcttttagtggtgatgggtctaaatttgctgctggcggaatggatggacatcttagaatcatggagtggcctagtatgcgtgtgattttagatgaacctagaacacacaattcagttcaagatatggatttagtct

SEQ ID NO: 215491 - DNA, 533 bp, Glycine max
  unsure (1)..(533): unsure at all n locations
gccccataccatactcattaaagtccacacacacagagcaacactgcactgtgtggaaacgaaacatggcaagagtggtggcactccaacagaaccaactatctttctctaccttagcttcctctctttctgacttcagtggaaccagacttcaaactcaacttcagttcaagagaaagcaatgccatccaaaagggtctttctacgtctccgcatcgagcaccaagaaaatcctaataatgggaggcaccaggtttattggtgtgtttttgtctaggctccttgtcaaagagggtcaccaggtgactttattcacaagaggtaaagcgcctgtcactcaacagttgccaggtgaatcagacagtgattatgctgatttttcttccaagatcttgcatttgaaaggagacaggaaggacttcgactttgtaaaatccagtctctcagcagagggatttgatgttgtttatgacataaatggacgcgaggcagatgaagntgaacccatactggatgctctgcctaatctggag

SEQ ID NO: 215492 - DNA, 545 bp, Glycine max
  unsure (1)..(545): unsure at all n locations
gaacgaaaagctcatgaatatttcacgacttcataatgtagcaaatccgaacagcttttctaaatacaagtgaaatacttaaaattgaaatagaaaagtttatacgctaacaagactcttgccaagaattatgtcatctgttgagaaatcagcctctttccgatatgttcctctaccaaagtccaggttgtacgagtctgctagaccctctacaagtccaaattcaggttccaatccaagcacgctctttgctttctcaactgatgcaaagaaatgctggtcacggaatggaaatgatttctttttcccaaaatcaaaatctttagggttgtagtgaatgatctctggctctgggaacccaccagccttagcacatgctcttgctaatccatcaaatgtgacatacttatctcccgagatgttgaatacttccttgctggccttctcattaccaagaacctggataaaagcttttgccanatccttaacatgaccaagttgggttatctggtattcctgagccggggatagggaatgggcgtccc

SEQ ID NO: 215493 - DNA, 516 bp, Glycine max
gcagaaagcaagctcatcctagagttttaaaaatggcagcagcctcctccatggctctctcttccccatccttggctggcaaggccgtgaagctgggcccatcagcccccgaagtcgggagggtcagcatgaggaagaccgtcaccaagcaggccttctccggaagcccatggtacggcccagaccgcgtcaagtacttgggcccattctctggcgagcccccgtcctacctcactggcgagttcccaggtgactacggctgggacactgctgggctttcggccgacccagaaaccttcgccagaaaccgtgagctcgaagtgatccactccaggtgggccatgctcggggccttgggctgcgtcttccccgaactgttgtcccgcaacggggtcaagtttggagaagctgtgtggttcaaggccgggtcccagatcttcagcgagggtgggctggactacttgggcaacccaagccttgtccacgcccagagcatcctcgccatctgggccaccc

SEQ ID NO: 215494 - DNA, 380 bp, Glycine max
gggaaaaagcaagtaacattaagttggattgggatacccaagaaaattcacattttctgaagtacattgcaataacatatacttcaccaaacacaaatttaaaaacttttaaaaggccacaaggcatccttttctttcatgcccacttgccggggacaaaattggtggcgtaggcccaggcattgttgttgactgggtccccaaggggatcaacaaggttttccaatggacccttaccggggacaatggcctgaacaaagaacccaaacattgagaacatggccaatctcccggtcttgagttccttcaccttaagctcaacaaaagcctttgggtcatcagcaaggcccaatgggtcaaaactgcccccagggtaaatt

SEQ ID NO: 215495 - DNA, 465 bp, Glycine max
catttcccatataagactcataaccgttcgttcgttcgttcgttccccacttgcttttcattttttttctcccttttcgctaacctcaaagagagttcagtttttatacaaataaaagttttttctttttttatttctggttttcgttttggaatggctgggatttgctgtggagttgttggagaagccgccgagacttcttctaccatcgaacccacctcacgccctttcgcacgccggagtttggaccttttgcccttgaaatacatagctgctgacgtgtcagtcccgccgctggagaacagccggaagcgccagaggctggataggcgcgcttctccggcaagggagtgcgataacgcggttcatagttccaaatcgaaagtagttgaggttgttccgaattattcttcgaagagtccaacgttggactccacaagtccaacagttgtcgaggagtatccg

SEQ ID NO: 215496 - DNA, 533 bp, Glycine max
  unsure (1)..(533): unsure at all n locations
ggaaggtattgacgaaatttgcaatattattcatgataatggaggccaagtatatatggatggtgccaacatgaatgctcaggtgggactcacaagcccgggttggataggagcagatgtttgccatctcaatctccacaagacattttgcatccctcatggaggaggtggccctggcatgggacctattggtgtaaagaaacacttggcaccatttttaccttcacaccctgtgatagaaactggtggaattcctgcccctgacaaacctcaaccacttggtaccatcgctgctgcaccatggggctcagcactcatattgccaatctcttacacttacatagccatgatgggttctaaaggactcaccgatgcatcaaagatagccattttgaatgcaaactacatggcaaaacgattggagaattattacccggttcttttccgtggagtcaatggaacagttgctcatgaattcatcattgacttgagaggctntaagaatactgctggaattgagcctgaagatgttg

SEQ ID NO: 215497 - DNA, 222 bp, Glycine max
gggaagaaacttaagggccgggggttatcatcattggcccatatgatgaagcaatattcaacaagggcaagaactgtatgaataggaataagagtttatgtccaacgggaaatgaaaatagttgtcatttgaacacattatgctggggcagctgtttgttcttcaacaacctgtgatgctgggagaagggtgcaaatgaggttgcggtcacccgacacatta

SEQ ID NO: 215498 - DNA, 551 bp, Glycine max
aagaaattgattatataaatgaaggaaagaatgctgacagattccgccgagattttagaaacataaagtgggttcggatacctctggtatattgggattatactgctttaaaggtgttgaccatggagtatgtaccaggcatcaaaatagaccaggtggatacattaacttcgcgtggttatgatcgattgcgtatctcatcacgtgctacggaggcgtacctgattcagatattgaaaacaggtttctttcatgccgatcctcatcctggaaatcttgctattgatgtggacgaagcaattatttattatgactttggcatgatgggacagatcaaatcttttacccgggagagactgcttgaacttttctatgccatatatgaaaaggattccaaaaaggttatgcaacgccttatagatctcggagccctacaacctactggggacttgtcatcagtgaggagatctgtgcagtttttcctggaccattttgctagccaagcaccagatcaagagcagaccctttctgcaattgggaggatttatttg

SEQ ID NO: 215499 - DNA, 498 bp, Glycine max
gttggtaaccatttatatcattttctcaaacttatcaagcatttttaccctttgcatggatctgacaaatagtgtcataaaaatacctgcaccaatgaaagatccattcgcaatagttatgttgccttggctgctcatagtgataccaagatttagcagagttcctcctaatacggtatacatagttgccatttgtaaacccgttgctttccgagcagctctttcagactcaagcactcggacccgaagttttagatcccctgcctcaagttgctttgtaaactcttctattctttgaactctgtatggcattgacatggtataggttgtagcatcatctgcttgctttcttatctcctccacaagctgtggtgcagtgcgctgcttttgccttatctctaaaagctcctgtgcgtagggtgcagcaatcttagaaaaggagaaatttggattcagtgtgtaacctatgccttcaagtgttgaaaacgccctgagaac

SEQ ID NO: 215500 - DNA, 517 bp, Glycine max
gataaatgagggtcaaagtaagcgcattagatgcatggaacacaagtgcaattccatatgtgatgaagctgttgtaagaactctactcagtagagagcactctcatatggctgagaaatatgaacgctttctgcttgaatcttacattgaagacaataagagagttaaatggtgtcccagcacacctcattgtgggaatgcaatacgggttgaggatgatgaactgtgtgaggtagaatgttcatgtggtgtacaattttgttttagttgtttgtcagaagcacactccccttgttcatgtctgatgtgggagctttgggctaagaagtgtcgagacgaatcagaaactgttaattggataactgttcatacaaaaccatgttcaaagtgtcacaaaccagtggagaagaatggtggctgtaacttggttagctgtatctgtggccaagctttttgttggttgtgtggtggagctaccggccgagagcatacttggtcaagtatagctggtcatagc

SEQ ID NO: 215501 - DNA, 552 bp, Glycine max
aaaagccttagccttccctacaactccaaacacaaagacatcatcatccatggctgcctccgtctccactgtcggagctgtcaacagagctcttttgaacctgaatggttctggagctggagcttcagctcccagttcagccttctttgggaccagcttgaagaaggttattgcctcaagggtccccaacagcaaggtttccggtggaagcttcaagattgttgctgtagaagagaagaaagagattgaagagacccagcagaccgacaaggacagatggaagggtcttgcctatgatatctcagacgaccaacaagacatcacaagaggaaagggtttggttgactcccttttccaagctccacaggatgctggaactcactatgcagtcatgagctcctacgagtacctcagcactggacttcgccagtacttggacaacataatggatggattctacattgctccagcttttatggacaagcttgttgttcacatctccaagaacttcatgaccctgcccaacatcaaggttcctctcattcttggatc

SEQ ID NO: 215502 - DNA, 557 bp, Glycine max
  unsure (1)..(557): unsure at all n locations
cttttgaacccaaagagcgggtagctgagatcggagaaccctctctttcttctccttcttcagcagttgaaaataaaaaatggcagatggtgaggatattcaaccactcgtctgcgataatgggacaggaatggtgaaagctggatttgctgggggatgatgctccgagggctgtgtttcccagcattgttggtcgtccccgtcacacgggagtgatggttggcatgggccaaaaagatgcatatgttggggatgaagctcagtccaagagaggtatattaactctcaaatatcccattgagcatggtattgtgagtaactgggatgacatggagaagatctggcatcacaccttctacaatgaactccgtgtcgctcctgaggagcacccagttctgctaaccgaagcacctctcaacccaaaggctaatcgtgagaaaatgacccatattatgtntgagaccttcaatacccctgcaatgtatgttgccatccaggctgttctatccttagatgccagtggccgcacaactggtatcgttctagactctggagat

SEQ ID NO: 215503 - DNA, 568 bp, Glycine max
atagtcataactaaagaagatctgttgaacaattgccaataatagaacaaaaacaaatgaaagaatttactgtcatcaattcagtcaactgatttaacaacacatttttatcatataaaacgaggacaccgtattttctttcaccaagccaccttgcaacattcagaagcatttcctgtgtacaattgaaggaccagcctcatcatactcagcctttgcaatccacatctgttggaaagtgctgagagaagccaagatagagccaccaatccagacactgtactttctctcaggtggagcaaccaccttaatcttcatgctgcttggggccaaagctgagatttccttgctcattctgtcagcgatacctgggaacatggtagatccaccactgagaacaatgtttccatacaagtccttcctaatgtcgacatcacacttcatgattgaattgtaagtggtctcatgaatgccagaagcttccattccgatcatggatggttggaagagaacttcaggacatctgaaacgctcagcaccaatggtgatgacctgtccatccggcaac

SEQ ID NO: 215504 - DNA, 407 bp, Glycine max
aaaaaaaaaaaaaaaaaaaaaaagaattaaaaaagaaaaaaaaaaaaaaatattaaaaaaatgaaaccaatgaaaaaacaagccggtgccggaatggatgctccattcactggcctcaagtccatggctggcttccccaccagaaagaccatcaatgacttttccttcattgcttggcttcggtggaagagtgctatgcatgcaggtgtggccaccagttgacaagaagaagtttgtgactctttcctacctgccagaccttgatgatgcacaattggctaaggaagccgaataccttcttaggaagggatggattccttgcttggaattccagttggagcacggcttcttgtaccgtgagcacatcgggtcaccatgatactactatggacgctactggtccttgt

SEQ ID NO: 215505 - DNA, 477 bp, Glycine max
ggggaaaaaatatgcttcagcactggcgctttaacacaaagcatcatactccacaaaggctttttagtacccccaatacatcatgtcatgcgtgtgaaactttacatccgtgaaatcaagaacttgaaagatcaaaatccttctacttaaactatagacagaatgcccctacatgaaagcccagaaaaatagaagaccaacttgaagtagctgtaacacccaacactaaggtttacaaagcgagaaacaatttttccactcatacagcacataaatgtaacactagatgaatcctcatgcgagagcacccacaatcctgattgttcttcagggataggaccggtcagcaagatatgaacaattttttggaaagatttatactttatttttctctttctggctttgctgcatacaaacctgtacataatgagcacaatcgtaagctattgagcacttggtgcatctctcatgcttaaa

SEQ ID NO: 215506 - DNA, 540 bp, Glycine max
gtgagagctagctccacagagaaggatgaatccaaggacaaagatgcttcagcattcaacccttttgggtttgtcactgacaacccttctagccgaaatgccattcaactgcctgaaaaccctgctgaggatggcaacgttggccaaatgctttataggatagaagacaagggcaaggaatatgggtcatatgttaaatctggcaagttaagatggtttgtgagagaaactgggtcagcaaatggcagaagaggaacaattgtcttccttcatggggccccaacgcaatcttttagctaccgagttgttatgtctcagttgtcggatgccgggttccactgctttgcaccagactggataggatttggtttcagtgacaaaccacaaccaggatatggttttaattacacagaaaaggagttccatgatgcattggataagctgcttgaggtgctgggggtcaaatcttcttttttcctagatggtcaaggatttcttgtaagctcatatggactaacttgggccctgaagaactcaagc

SEQ ID NO: 215507 - DNA, 444 bp, Glycine max
attaggaaagggaggacaaattcatttcaagaaagctataattttatttgttgaccatcattaaaagaaaagaaaaattaaggcatactaaatttacaatttaattaaggaaaaactcaagaatgcccttccaatgaaataaagcacttggatgcctgcagggtcaattagttgttgaaatcagaagaacattctgaaagcatcaacaactttctcaggccagtcctcttgtggcatatgaccagctccttctatcaatttaagctggatttgtgctggatttcctttctgaaactgctctgccacagactggggcaagtacttgtctgataatccccaagcaagtagtattggtttatcccatctctcagttgtaaatcctgctgatatttcactgaaagtacctttgaagttagcttttcttgcagcttcaagtagagcaaa

SEQ ID NO: 215508 - DNA, 456 bp, Glycine max
  unsure (1)..(456): unsure at all n locations
tttccttgttcttcttccttctcttcattctgtctctacccttcaacgcaactttctttcttttctattgagcttccaatattctcacgccttgcaatcgtagttgcaccctccaaactccttcccttttctttcatctgttcaggtacttgcagaaagagaacatatggtaaaactaagagggaaaaatggccttagatcactttgaggagactgtgcaccaaaaaggaaattggaaatcttccagtgaaatcattgcagattctgatagaaatgcctctggtgactttgactgcaacatctgcctggagtgtgtgcaagatccagtggtgacactntgtggtcatctttattgctggccctgcatatacaaatggcttcattttcaaagcacctctttggatgatgaagaacaacagaggccacaatgtcctgtatgcaaatcagaagtttctc

SEQ ID NO: 215509 - DNA, 509 bp, Glycine max
ctaaaaatggtatgagaatatcattattcacttcatatagctcgtagagagattggtaatttacacataactcagcatcaatttgcagcttctctaacatagaatacatctggatcaatgagtgaatgtattctatgtaaggatgcactataactaatgatgaaaatgaagtagcaatcagaataagagcagacacaaaactaggcagcaaaggaggaaacaacttattctgctgagtgatttatcaacttgcattaaatgtcttctcatccttgggttactggtccccgaaagattgtacgaattggcgtatgtatgaatgtttgacacgtggttaccaaagacccttgcatatatcatctcaccaaagattccaaatgtgttgtctattgaaccagttgttctaatcataggtgaggtgtaaccgcttggaatcgagttgaagtgttgttgaggatgataaggattactatagggatggtaactttgagaaataggttgtgaaacac

SEQ ID NO: 215510 - DNA, 527 bp, Glycine max
attcctttgcccaaatgggttgtggaggagattgataatgaccacgatcttgcatatactgatcaatggggaagaagaaactatgaatatatatcacttggatgtgatactttgccggtgctcaagggacgatccccagttcaatgttatgctgatttcatgcgtgctttcagagacactttcaagcacctccttggtgataccattgtggaaatccaagttgggatgggaccagcaggtgagttgcgttacccttcgtacccagagcaaaatgggacatggaaattcccaggaattggtgctttccaatgctatgacaagtatatgttgagtagcttaaaagctgctgctgaagctcacggtaagcctgaatggggaagcacaggccctactgatgctggccactataacaactggccagaagacactcaatttttccgcatagaaggtggtggatgggatggtccatatggtgagtttttcctcacttggtactctcagatgctgttggaacatagtgacaggat

SEQ ID NO: 215511 - DNA, 467 bp, Glycine max
gtttcacggaagagcaagacgctctggtggtgaaatcatggaacgaaatgaagaagaattctcaagaactcggtctaaattctttcaagaaaatatcggagattgctccagcagctcatcaatcgtcctcattcttgatggattcaactgttcctttggaggaaaaccccacgctcaaaccccatgccatggctgtctttgtcatgacgtgtgaatcagctgttcaactgatgacagctgctaaagtcactgcgagggaatcaaacttgaaaagattatgtgctactcattttaaagccggtgtaacggctgagcctttcgaggtgacaacgttcgcactattggcgaccataacagaagctgtgcctgccatgcggtcaccatccatgaatactgcgtgggaagaagctcatgatccgctgggcgaagccatcaaatccgaactgaagccctctgattagactcta

SEQ ID NO: 215512 - DNA, 512 bp, Glycine max
gtaacaattcataccatccatgcatttatcattttcccttaccttacaattcacatcaccttcaataactgaattgttaaaatgtgaacactttccgacatagcaaccccaatagcaacatagatacattattaaaattcatacaaacgagaagcacagacccaaacaccaccaccctatcaatcttattcaatttgagagaaagcaactactagagtctaatcagagggcttcatttcagatttgatggcttcggccagctgatcatgagcttcttcccatgcattcttcatggctggtgaccacatttcaggcactgcttcttttatggtctccaatagtgccaactttgttacctcgaaatgctcagctgctacaccggctttaaaatgagtagcacctaatcttttcaagtttgattccctcacagtgactttaccagctttcctcagttgaacagctgattcacacgtcatgacaaagacagccatggcatggggtttgagcttggg

SEQ ID NO: 215513 - DNA, 608 bp, Glycine max
  unsure (1)..(608): unsure at all n locations
ggaaagagcggattcctctatccaaacaacttgcttaatgtgaaagcaaacacaaagggctgggttagtactgaaaagttgaaacagagaaacaaggtcaacgattcactcaatgagcagaatcaaggtcctagaacagctaatgcaaaaggtgcattaatgtctggaggtaattctgtgagaggctcagccccaggtgggagtggaaatgttaccaacaaaatcaggacagatcagtacaaccttcctgattttccaaccaaatatgatcatgcacttttctttgtcatcaaatcttacagtgaagatgatatccacaagagcatcaagtacaacgtgtgggcgagtactcctaatgggaataagaggctggatggtgcatttcaggatgcacagaagagaatggaagagaaaggatgcaagtgccctgtgttccttttcttttcggtcaatgctagtggtcaattntgcggagtagctgagatgactggacgagttgatttcaacaaaagtatggatttcctgcaacaagataagtggatggatatttctctgtcaatgcacattataaggatgttcaaatctcaactcgcccatatactcgagat

SEQ ID NO: 215514 - DNA, 528 bp, Glycine max
  unsure (1)..(528): unsure at all n locations
ctaaagcatcaacagcagcaagaatttttggtttagaacttaaaatttgaattcattagcttttttttttcttactttgtggtccacgtggcacatcgccacaccatcgtgatcggcatgctggcatggcgggtccccaggaatagcatcagccccacatgctattcagtcattcactctctcaaccaccttaggatcctccatgttcttcacagatgataggtctactgacccaagtgtagtggttaattcctctatttgctgtacactggtatggggcatagattgccttgttttcttctcctgcaataccttctggcggctttcgtaaaattcaaagtcatccaatatggaagttcttgccacataattcttgaaaatgttaagcatttcaacaccttggggaaaactcacctcttgtgtgtctctactatttgngacaggcttgtgatcattattctcgagtattatgtggcgtagttgaggatttggaacatcctttataatgtgccatttgacagagaaata

SEQ ID NO: 215515 - DNA, 429 bp, Glycine max
ggcaaagcaaacttggcaagtaaatatttctgttcctgaaggttgtgctgatccaagtgctagaagttgtgatgggacttgcgtgtaacattcttagaattctcaatgtcttaggtgcaaagagaagatgccaagtttgagatgattttactatatttttcatattggactgtcttcctctataattttgagttaaagtgtccacttaaattgaatttggtgccttttccttttgtcctaaaaaaaaaaaaaaaaaaaaaaaaaaataaaaaacaaaaaaaaaaacaaaaaaaataaaaaacatattaaaaagaaaaaagaaaaaaaaaatgtacaaaaaaaaaagggggggccccccactttgggcctcttcaccccgggatttttttccggaccgtgccctgggggcgtcccacttttccattttgg

SEQ ID NO: 215516 - DNA, 411 bp, Glycine max
tttttttttttttttttttttttttttttttttttttttttttttttttttttttggtgttttttttttttttttttttttttttttttttttttttttttttttcgggcaaaaaggaaaaggcccccaattcaatttaagggggcccttttccccaaaatttttgggggagacccccccatttaaaaaaattagaaaaaattttttaaattgggcgttttttttttgcccccaaaaaattggaaaatttaaaaagggtccccccaaggccccaaaaaattttttaacctggggaaaaccacccctttaggaaaaaaaaatttttcttccccaatttgtttttcccctcgcccaaatttccaattttcctccccggggatgggaaaaaaatttttttttttaggggccccc

SEQ ID NO: 215517 - DNA, 570 bp, Glycine max
  unsure (1)..(570): unsure at all n locations
ggctgagtagaaaattgcaatccctgggtttggaaatggcagcggcaggttgtcagaagcttctggaattgagcacgaagatcgtcgctgttggcagaaactacgctgctcatgccaaagaactaggcaacgccgttcccaaggagccggtggtgtttctgaaaccgacgtcgtcttacttgagtaacggcggaaccattcaaatcccacacaacgagggctctctgcatcacgaggttgagctcgctgtggtcatctccaagaaagcccgtgacgtctccgaatcctctgccatggattacgtcgccggttatgcactggctctggatatgactgctagggaccttcaagctgctgctaagtctgcaggtcttccatggagtttggcaaaaggccaggacactttcacccctattagctctattttgccaaagactacagtgccgaatcccgatgatctagaattatggttaaaggttgacgaggaaattcggcanaagggctcaaccaaagacatgatatttaagatcccatttctgattagctacgtaagctctgtcatgacattgg

SEQ ID NO: 215518 - DNA, 549 bp, Glycine max
gctccatcataatcatcactttctacagtataaaaaagcacatccaccataaatagcacgctcagttcccatcatcgtaaacattttcatgacgaaagtctaaaatagcactccaccaagatgtatggtactgattcaatgaccattaaaaaaaaactgttaaatatcgtatagactctgaagtccatataactgaatttttattgtgtccacaagtttccttttggcaagatatttgatgtataactgaagtaccctcgaggagttatcaagaaagaacaggccttgctcttttttcaacattaaactgtacgtccacaaggcctgtaataccagcagtaattgtttgaccctctttcacagggccaacacccgggggagtaccagttagtatgacatctccttcaaacaatgtcatgacagagcttacgtagctaatcagaaatgggatcttaaatatcatgtccttggttgagcccttttgccgaatttcctcgtcaacctttaaccataattctagatcatcgggattcggcactgtagtctttg

SEQ ID NO: 215519 - DNA, 548 bp, Glycine max
  unsure (1)..(548): unsure at all n locations
ctttggagctgcgatcctctgcttcgatggccaccgtgcaactccaatccctaacccttgttcgctcctcagcacttccttccgccaccttctcccctccgatcgccgtctccggccgccgcaactccgccgcgctgccgcgctactccggcctccggctccgacccgncgctgagaccaggttcccgactcacgccagctcgagaaccgcttctcgcggcggaggtgtcaagtgcgaggcaggagacaccgctgttgaagttgctcccgttactgatgcaaattggcaatcacttgtgattgaatccgagtctcctgtactggttgaattctgggctccatggtgaggtccctgccgtatgatccacccgataattgacgagctggcaaaagaatatactggtaagctaaagtgctacaaactcaatactgatgagagcccttcaactgctactaagtacgggatacgaagtatcccaactgtcattattgtcaagaatggtgagaagatagatacagttataggagctgtgcccaagacaacattg

SEQ ID NO: 215520 - DNA, 374 bp, Glycine max
gaaaatcatatgatgttggaaaaatttcagccaccaaagggttggggggttggccggaacggtggaactcgatggagccaggagaccttcagctgccattgaaggataggtcctcccttcacccatggccccttcctgaggttgccaaaagggcatagggaatcaccccaagggactggtggcggtcaaaaagtggttgagaaaaaaaggctggccctttggttagaatggacctgcggttaagggcggattattggccctttgaccccaccactgtcttggcgggaaagcctaaggagaaaaaaaattcccttagggaactcacgggcaagcttttccaggatttcagcattcgggtccttgcgcgaaaaatt

SEQ ID NO: 215521 - DNA, 496 bp, Glycine max
atagaaaattttccctcatcatttgattttcttaaaatatcagtcaacaaagtgtctgagaaaatgatgcacaaagcttacacaagaaagcaagaaattaatcacattaaccaagtttggcaaggacatcgttcagagaagatacagtagcagcatagtacttctctgcttctgggctgctcttaatttttgctgcatgatccagattgctgatatcctggaagagcttgccagtgagttccttgagtgatttcttctcatccttaggctttccagcaatgacagtgttgagatcaaagcgcaaatactcagccctgagacgcagatcattctgaacatatggccaagccttcttttcaatcaacttcttaacaccaacaatctccttggctgattcctttgccctttgtgcagcctcagtaggagacaatggttgaaggaagaacctatctttcaatggcagctgaaggtctcttgcttcatctgagttcaacgt

SEQ ID NO: 215522 - DNA, 522 bp, Glycine max
cttgcagctcgtgtcgctacatccggaaaatgcatctatcaagcattgagatgcaaggaacctccttctaacgatcgcttagcagcaatgcaaatactatttgaggtctgcccgtgttttaaatttggatacatcgcggcaaatggtgcaattacttgagcctgttagagatgaaaagaaagttcacataatagactttgacatcagccaaggaactcaatacataactctaatacaaacacttgcttcaatgccaggtaggccacctcatgtgagattaaccggggtggatgatcctgagtctgtgcagcgttccattggtggcataaacatcataagacaaagacttgaaaagctggcagaggaacttggattgccatttgagtttcgagcagtggcgtcagggacctcagatgttacacaatcaatgcttgactgtcgtccggaggaagcacttgtggtgaactttgcatttcagcttcaccacatgcgcgatgaaactgtctcgacagtgaacgagcg

SEQ ID NO: 215523 - DNA, 478 bp, Glycine max
gaaacgcaaaattatatgctaactaacaagaaaatgatgtcattacaagcctaagcattgatagctgttttgtgttgccatacacatgaaagtatgtattagcataagttgcacgttagtatacatctgagtctgaaccaagcataaacataacagatacaaactaaacaagcaaacaaatactacatcaacactacaatgagtctcatgcaacaaaagaatttgtattggtcacttccatgctgaagcaacaattaagtttttgtcttcccacccaaaatgaagaccccccatttcctcctttatcttgaatttgtcacagtattgcttaataatgagtttcctaattgcttctctcacatttgtgctcattggggatggagtgaagccagccattgacaaccttgccctccattttccggcgacttcataccgttctattctttcctcaccctcgcaagcaacaatgttgactatg

SEQ ID NO: 215524 - DNA, 589 bp, Glycine max
  unsure (1)..(589): unsure at all n locations
gacgaaaaaataaatctcgaagtaattcgtagagttcaataactattattattttcaattcggaattcttattaattactttaaaccgaataaatcttgataattgaaaaattaagtcataatttattggttgattatatcattaactatttctttatgttatatctaggttacgaggaaattatcatgaatccaattatttctgctgcttctgttattgctgctgggttggccgtagggcttgcttctattggacctggggttggtcaaggcactgctgcagggctagctgtagaagggattgcacgacaaccggaggcagagggaaaaatacgaggtactttattgcttagtttggcttttatggaagctttaacaatttatggactggttagagcattagcacttttatttgctaatccttttgtttaatcctaaaaaaatagaaatacatattcctttttgcgaggacttgctttaccggtcttgctctatcgaatnctatttatattaatagtgcactcctataattctttatccgctcggacaagaacacaggggaaggactatttgaaaggtgaagaattca

SEQ ID NO: 215525 - DNA, 466 bp, Glycine max
cattcgaattcattttatttatatattaatattatattcaaatgaaataaaaagatattaaaagatactaattataagaatttgaaagtgaaattataaagttattaaatgattaatcaatttttttctacctgttcctgtagtaaaaagagttccatctgttcttgaatagcttccttcaaaaggacttctgcttccccagtgaatgtcttggtagaagatatgatttctttgaattgaggtttattcgtgtttaagtaagcacgtaactcaacaagaaatttccttacctgtccaatttctaatgaatcaagataaccattcgttccagtataaatagttattatctgttcttccacggtaagaggagctgattgggattgtttaagcaactcgcgcaatcgttgacctcttgctaattgattttgagtagctttatcgagatcagaagcgaattgggcaaaag

SEQ ID NO: 215526 - DNA, 510 bp, Glycine max
ggatccgagatcgagcaggaggagagggattgcttgtagtgttaccgagccagataacggtggcgacgagatggagaaagaagcagataaaaatggagaaacgctacgtgtggaagattcctctgagcaaagtatccctccacctgtagatgcagaacaactaaatgagtttagtgatgaaaataagggtcaaagtgatgtgcagaatatggatgatagcaatgaagttgccagtggatcacctctgccaggtgtgaagcctcagaaactggatgaagcaataaaaattcccaaggaaacaattgaaattcttaagaaccaagtttttggctttgatacttttttcgtaacaagccaagatccttatgagggtggagtgttgttcaaaggaaacttgcgagggcaagctgctaaaagttatgataaaatatctaagagattgaaagattaatttggagatgaatacaagcttttccttttagtaaatccagaggatgataagccagtggc

SEQ ID NO: 215527 - DNA, 521 bp, Glycine max
cagcctaaaattttgacgtttgattattcaccttgcgtacgaaccaacgttgacagtttgattcactgataatcctacctgtgtactcagttctcaaaatttcatgtactagcagaataaatcgatgctgccagagtatatggagccatttatttctagaaacttgtgatggtttcttctgtaaatgggaaaggatatggcaagcataccaacaagcctaagagtaaaactgttactccaatagcaacatatttctcaccaggatcagttatttcctcagaaagaggagcaattggacctctttgcaagaagaatatgagaactacccaatagaaagctacatcattaagcagtgatgaaactcccagcaatgcaattgaaacccctgtgaagcgtaatgaagcctttcttccccatagggcaaaagaaattctccctccatcaagttctcctgcaggaatgcttgcgatggcattgatgaagagtcctgcccatgccccaatcacaagagggttgataga

SEQ ID NO: 215528 - DNA, 565 bp, Glycine max
aagtcattcaaattggtggtaccatttcctagaaactgtggactgcttgatattggtttaagcaggttttgtcctcttatatgtgggcctctaaggatgtctctacttcagagtctttgttatgcacaacttacatatttccctctttattgcttgcccctttggtgtttagccattgtccctcagctttgactagtagatggaattcccttgtaccccaaggtctcagacccatttttcttcatttatctggatatccctctatcagctctcaccaagcacttagtagaagtcctctcaactggaggaacaatcagaaaatggataattgagcaaaggatatggatgatctcatccatcacatgccatctatatggatgcttggatgctctactgaagaaatttggtttaaaagaggctagtttcttgcccaccaattaagtggatgatgatgaacagactaggctttaccaaatggacataattgacttcagaacatcaaacatgttccttgtgccaatggatgcactccttatcatcaacatatcttgcctcatagggggaa

SEQ ID NO: 215529 - DNA, 606 bp, Glycine max
  unsure (1)..(606): unsure at all n locations
tgattttgattgcactctctgcctgaagttactgtatgaacctgtcacaaccccgtgtggacattctttttgctgttcgtgtctatttcagtcaatggatcgtggaaacaaatgcccattgtgcaggactgttctgtttattagtcctagaacatgttccatcagtgtgacattgaagaacatcatacaaaagaatttcccagaggaatatgctgaaaggaagcaagagcacgacagtttaatcaaagctggtgtagatttactccctctttttgtcatggatgttgtcataccatgtcaaaggtttccactcaatatatttgaacctcggtatagactcatggtaagaagaataatggaaggcaatcatcggatgggaatggctatacttgattcaacaggttccttagctgagtttgcctgtgaagtggaaatcacagagtgtgaaccacttccagatggtcgtttntatatagagattgaaagtcgcatgagatttcgtatcatccaattctgggatcaagatgggtatcgtgttgcagaggttgaatggatacaagatattatgccaccagaagggacaagtggaagagatactttcagcaa

SEQ ID NO: 215530 - DNA, 487 bp, Glycine max
caaaacttgtgtttgtctctacatttttttttattttttgaaaggaataaaagacaacattagtggttatttctactaaagttctctaacggcttatttaattttccatttggaaatggaggacaacttaatttcaagaaagctataactttatttgttggccagcattaaaagaaaaataaaattaaggcacactaaatttacaatttaattaaggaaaaactcaagaatgcccttccaatcaaataagcactttgatgcctgcagggtcagttagctgttgaaatcagaagaagaacactctgaaagtatcaacaactttctcaggccagtcctcttgtggcatatgaccagctccttcaatcaatttaagctggatttgtgctggatttcctttctgaaactgctctgctacagactggggcaagtacttgtctgataatccccagcaagtagtattggtttatcccatctgtcagttgcaaat

SEQ ID NO: 215531 - DNA, 473 bp, Glycine max
  unsure (1)..(473): unsure at all n locations
caggagagcaaaggggacccaggcatatcaagccccaactatttattttgaccgtccacaaaagtcccaatcaaattcgaatcaactgcattttatatacagcttttttcctttcacatggctatacaaaagagaatgctaatgcttcagatggatgtatacggggttcctcatactgctggcaaaaatgatcttgagaatacatgcagcaccatggtttcaagggatagtttaatcccatattttggctagcatttccacctaattgatagcctctccaattcctgtacaaatcagggacacaacaatggctccatagcctggcgtaatcaatgtaatgtaaccttagattgttaccctaagcagactgataagtgacctgatctgccgtagntgtgtcatatttggcatttgcctcgggggtatcttcttcactaggtggaaccagctgccaaaaagtgataaatacttat

SEQ ID NO: 215532 - DNA, 425 bp, Glycine max
gggcgagctaaactctcaatctatccattcatgatgaacgccacttgtacatggaggaactgatcatggctgctccggtcagatacgacaatgccttgaaatggagtatgatcatactgtatgccaatgataattgtgcacagtgacatctttgcactccatcatggcctaagtgggcctggcgatgagacctattggagctactaaacacttgactccatatttacctttgcaccgtgtcatagatactggtgacttttcatgtcctgactcatctgaaccactcggtaccatcgatgctgcaccatgttgctcatgactcagatagccaacttctgacacttacatagccatgatgggttcataaagactcacacgatgcatctaagatagccattttgaatgcaagctacatgtcgagacca

SEQ ID NO: 215533 - DNA, 268 bp, Glycine max
atcgtatcctatcgtcgcattgaatgaatgaaagacaaccgtaacttaccttgtgaactatcatgatgcagatctttgctaagacacatagtgctttgacaatgacgctatgatgtggacagtttatgtacgattgatactgtgaagaccatgagataggacaatggagggataccacaccaccatgagcgaatgctttacggtgtgaggctgatgaactgtggacggtcacttgctgattacgacatccataaggagttcactgtac

SEQ ID NO: 215534 - DNA, 430 bp, Glycine max
attgaaagtactaaattcattaaaacatgattgcaaattgtacacattcatagcttttcaaggtccgctaatggacccgggatgcacacatacacaaagttcaggaacatataaaaagaaaagaccagattatagactttcacatacttcagttcacaccaaacaagggacctgcagaccattctcaaactcaaaacccaccacgaagacgcaagacaaggtgaagagtagactctttctgaatgttgtagtcagcaagagtccttccatcctccagttgcttcccagcaaagatcaacctctgttggtctggggggataccttccttgtcctgtatttttgccttgacattatcaattgtgtctgaactttcaacctccaaggtgatagttttccctgcaaagtcttacaaagatctgcatacctcccc

SEQ ID NO: 215535 - DNA, 523 bp, Glycine max
ggaaaaatgagcatgaaggaaagctaaataagtttgatttatgatgttgcacgtattcgctgatatgacagatcactctgctagggatctattggccagagtgagaataggtgcatgggattctaggtgtgatacaagtcagcatcaccttagagcagcgttttataggatcatcatacgatgatgtggagggaaaagctcagggcttgatgtagtctagaatggtgaatattgaagcaatagtatgcttgggatgaccaccgttagactttgaggggatgaatcggaaactcgccgtatgacagacgatcttgcgaagtctactgaattgtgtgagtcgctaactaaacgttgcattagataaagatggatgtgctgattatcaccctaatattactgcagaaatgatagctggaccattaacgaatatagtatcgttgggatggcaatgacctaagctagagaactaactgaacaggcgggtacaacaggagttcaagtacacagtgcatgacgtatcgac

SEQ ID NO: 215536 - DNA, 400 bp, Glycine max
gccacaggccttctccgacctcatcgaacgcaccaactggcgctacagcgagtacttgaacgccgataacaagggtgaagtctatcgagacatgctcagcaacaccgttccgtcctccagctaaccgacattgacgggcgttgctgcctacgatattagtcccaatgacttggacctcatttgcatcctggctatgaactgcggaaccatttatgccgacgatgcaaatcccccaacagctggtgcaacatcatacgcagctcgcttttaccattactatcatcttcaggactgttgtttatcttccacacaactcaatgcagagcccacaaggcctagcgcgcttgcatgggccatggacttgctgcggaacaaggtccacattcaggatgctccgcta

SEQ ID NO: 215537 - DNA, 499 bp, Glycine max
gtcaggaatcccggctttaggtggtgggtttcctagagttgttgcaacatggggtctgactatagttctcacttacttgaactataggggtatgaccattgtgggatgggttgctgtttgtttgggggttttctcactccttccttttgtggctatgggatttttggcgattccagacctaaagccttcaagatggacagtgacaaacccgaatgatattaactggaatttgtatctgaatactctattttggaatctcaactattgggattccataagtactcttgctggagaagtggaaaatccgaagaaaactcttccgaaggctttgttttatgctgtgatcctagtagttctagggtacttctttcctcttctaattggtactggtgcttgatctgtcaaccgtgagttgtggacggatggatacttctcggatattgctttgattataggatgaccatggttgagatggtggctgcaggctgctgctgcaatg

SEQ ID NO: 215538 - DNA, 443 bp, Glycine max
ggccgccctttttttttttttttatatcaaatttctagtataattgttttcattgctagtaaacataaggcaagttatatcattcaaaatatagctacaatgacgaactttattcttctcttccacgcacaattatatgacgtcccaggcccttcatgaaacgatgaagtgatggtaaaaagacaaagacaacttaggagaacaaacaagacagaatctaaaggacccaattattatgcataataaagaaccacttccttagttcaaacttcaaagctttgatgtttccctcgggtgatgcacgacaatgtaattataagcatccagagtgagaaaatcatcaagcattggtgacgtgcattggcgagtgaagatcttgcaagcctccttgtacattcccttcttgaacttctctgtccccacttccttttcaatcctagcca

SEQ ID NO: 215539 - DNA, 298 bp, Glycine max
gccgcccttttttttttttttttttttttttttttttttttttttttttttttttttttttttttttttttttggttttggggtttttttttttggaaaaaaaaaaaaaagttttaattttttaaaccaagggttttttaaactacccgatttttattctaagaaatttaaaaaccactaaaatttatggttttgcaaaacttttttttgtaaataaaaacccctttctttgggggagaacttaaaacccttttttttcatccaaatttttcaaaacaagggggaagccccatcattg

SEQ ID NO: 215540 - DNA, 567 bp, Glycine max
gtaatcgctctacgtacttcttgctggttttttacccttccaggatgacaacctggtggccttgtacaagaaaatttaccgcggtgacttcaagtgtccgccgtggttctcctccgaggcgcggaggctcatcaccaagctcctcgaccccaacccgaacacgcgaatcacaatttcaaaaatcatggactcgtcgtggttcaagaaacccgtgccgaagaacttgatgggaaagaaaagagaggaattggatctggaggagaagattaaacagcatgagcaggaggtttctactacgatgaatgcttttcacatcatttcgctctcggaggggttcgatttgtcgccgatgttcgaggaaaagaagagagaagagaaagagttacggtttgcgaccacgcgccccgcgagcagcgtgatttcgagattggaagatttggcgaaggcggtgaagttcgacgtgaagaagagcgagactaaggtgaggttgcagggtcaagaataagggcgaataggtaaactcgctattgctgcggacttgtacgccgtgacgccgtcgtttttggt

SEQ ID NO: 215541 - DNA, 566 bp, Glycine max
caacaaaagtatggatttctggcaacaggataagtggaatggatatttctctgtcaaatggcacattataaaggatgttccaaatcctcaactacgccacataatactcgagaataatgatcacaagcctggcacaaatagtagagacacacaagaggtgagttttccccatggtgttgaaatgcttaacattttcaagaattatgtggcaagaacttccatattggatgactttgaattttacgaaagccgccagaaggtattgcaggagaagaaaacaaggcaatctatgccccataccagtgtacagcaaatagaggaattaaccactacacttgggtcagtagacctatcatctgtgaagaacatggaggatcctaaggtggttgagagagtgaatgactgaatagcatgtggggctgatgctattcctggggacccgtcatgccagcatgccgatcacgatggtgtggcgatgtgccacgtggaccacatagtaagaaaaacaaaagctaatgaattcaaatgttaagttctaaacccgaaaattcttgctgctgctgatg

SEQ ID NO: 215542 - DNA, 518 bp, Glycine max
gcgccctttttttttttttttttttctggggacccaaatttctaatatataaaaatataatggttctcatacagatttttctgctacacaggtgtagttacattagtgaaaatggagttaaacacaagggaactgcaaaagggagcagaagattgcattgcatgtaggcatcctcattgtccagggacaaagttagtggcataagcccaagcattgttggcaacaggatcagcaacgtggtcgtaaaggttctgaatagggcccttgccagtgacaatagcctgaacaaagaaaccaaacatggagaacatagccaagcgaccgttcttgagttccttgaccttcaactcagcgaatgcatcagggtcatcagccagaccaagagggtcaaaagcaccaccagggtagattgggtcaagtccttcaccaagtggtcctccaccaactctgtaaccttcaacaaaccccatgagcacaacctgaacagcccagatagcaaggatgctctgagcatggat

SEQ ID NO: 215543 - DNA, 531 bp, Glycine max
  unsure (1)..(531): unsure at all n locations
cttcttcttctctttgtctttgtactagacaaaagaaaaacagagatggcaagtttagaggaagacgagttagtacaaatggtgcaagattttatagaatccgaatcaacatcccccacaagttccacgtcctcaaattgccacaccttaaaccaccgaacccaatattttattctacaggatgttctaaggagtgagggtgatacaggatgtgaggctaaggtattgaagtgtgtattgaaccatatgagaggtagaaagggtgcggagaagactaagacaagtctcagtaaatggcttgttatgaggatgaaaatggatggccttgatgcttctgtatgccacacctcttgggccacctctttgggttgtcctgctggtgagtacgagtatattgaagtgataatagaggatgaccagaattgtggtaaacctacgaggctgatagtagatatagactttaggtcccaatttgaagttgcgaggccaacacaaaactacaaggaatngacagactcggtcccagtgatt

SEQ ID NO: 215544 - DNA, 340 bp, Glycine max
ataatttttcttcgaatcttagcaattgatatcctttcgaaacaccatttttttcttcatttgaattgacagtgaattctttcgatttcttattcgatttatgtattcttttgtctaaattaaacaaggcaaggactaactcccgaactgcaagtaaagagaatgatagaatagaatatagatttatctataagctctatgacttgtaatagaacttatgcttgatagaaaggttattatcatatagagttgacgaatgagatgacgtcgagttcatattataaagactatcaactgcaggcactataacattcattccgcttctatatctgacatctat

SEQ ID NO: 215545 - DNA, 512 bp, Glycine max
  unsure (1)..(512): unsure at all n locations
gtaggacgatagttttgaaaagacagattgcctatcttctctttaatctcaggcgaaatacgatcggggggtgccaattcaaaaccttccggtaaaataagaacagcccccacattcaaagctccctttttaccattagcaagaacttgtttcacttgcatatcataaggaattcgaacaactgcttcaaatacagtatcaggaagtaccgcttgtggaacctcaatatccacgggcttattagctaaatggcaattggcacagacaatacgaccggttgcttctcggggattttcataaccctgctgtgcaaaaattggatatgcgtttgaaatgggtgctcgaattattatatatatcatgatcgatatggaaatggatcgagtaatcccttcctttatacaagaaaaagcatttctagtttgcatggtctaatcattgatcctgaaaatttctacataagattaggtaggtcactcgcatagttcctatccaagtcggngacccctttt

SEQ ID NO: 215546 - DNA, 224 bp, Glycine max
  unsure (1)..(224): unsure at all n locations
cgattgtatagcttaatttanagacccgatcacggaattaaacaaaaaaggggggggggcaaataatcaatacgattacaaaatctatatatgcctaaatacaaaacagaatgtatgaatattatgattaaatatataacatgacaacaaaagttttaacgagtaaacacccaccatggagcaacatccgatctgaaaactgtttcaacaccaaggaaacaaac

SEQ ID NO: 215547 - DNA, 497 bp, Glycine max
agagacgaccgcggattcctctatttaaacaacttgcttaatgtgaaagcaaacacaaagggctgggttagtactgaaaagttgaaacatagaaacaaggtcaacgatgcactcaatgaacataatcaacgtcctataacagctaatgctaaaagtgcattaatgacctggaggtaatactgcgagaggctcagccccaggtgggagtggaaatgctaccaacaaaattaggacagatcagtacaaccttcctgattttccaaccaaatatgatcatgctctattgcttgatcatcaaatcccacagtgaagatgatatgacacaagatcataacctacaagctatgcaactagcccgtataatgggaataagaggctggatggtgcatttgatgatgcacagaagagaatggaagacaaaggatgcaagagccctgtgttccttttcttttcggtcaatgctagtggtcaattttgcggagtagctgagatgactg

SEQ ID NO: 215548 - DNA, 326 bp, Glycine max
ctaagatgagcttaatatatttatgcaattgcaaactgtcttcaaaaagttgaagattcacaagagcattatttatagcatagtagctcattacaaccatatgacagatccgtttattaaagggaaataatgacacgtatgtttaaatccatatatctgaagtacagtcaccaccaggatatctcatctcatgggcaagagaaggaccatcaggctcagttccaaagtccacaaagaagttggggttgattttcagtccacctttctcagtatcaacatcaatctgtattatgtgggagcctttctggacaagctctggataaaat

SEQ ID NO: 215549 - DNA, 429 bp, Glycine max
ctatgtatctatataatcgaattgaaattacgattctatcaaatctttttatttactttttttttttttaagaaaaaagaaagttctaattattaataaattatatctatatatatatatatacagatagatattctatatcttttatcttaattaatatttgacccctccttataatgtgttatagttttctttatttttaggaacttatccattccttttttaatgtgcccgacaatccgaaagaattctgggggaggggtcatttcgtttttgatctagaataaatagagcttcaagaaatgagagaattaagaatacccacgagaaacactaatccaatccataatgatgtaccggaaaaacaacatttttgtaattcgaccaacctcaggagaagcaaatcaacgggccactaatcaataaaat

SEQ ID NO: 215550 - DNA, 605 bp, Glycine max
gccagacaccagatcaacaacagactttatctgcaattggggaggatttatttgcaatagcacaagaccagccattccgttttccatctaccttcacctttgttattagagcattttctacacttgaaggcctaggttacatactcaatccagatttctcctttgtgaagattgccgcaccttatgcacaggaacttttagacataaggcaaaagcgaccgactgggccacaactcgtggaggagataaggaaacaagcagatgatgcaagaaccaattcaatatcgatgccttacagagttcaaagaatagaggaatttgtcaagcaacttgaggcaggagacctgaaactccgagtccgagtacttgagtctgaaagagctgctcgaaaagcaacaatattacaaatggctaccatgtattcagtattggggggaaccttgctaaaccttggtgtcactgtgagtagccaaggcaatcaagcttttgcaaatggatcattcattggtgcaggcattatatgggctctatttttaaggtctatgcaacgggtgaagagacttgacagggttgagaacatgatataattcgttccaaccaaattc

SEQ ID NO: 215551 - DNA, 398 bp, Glycine max
ggccgccctttttttttttttttttttttttttttttttttttttttttttttttttttttttttttttttttttttttttttttttttttttttaaaaaaaaaaccccctttttgcccaaaagaagggcctttttttaagggaaaaaaattttccctcctttttcccaaatgccaaggggccctttttaaccaaatttttggaacctttcccgttttaaaaaaaccccgtcaaaaaaggggtgggggggttaaaacccaaaattttttttttaaccccaaaaaaaacacccccttaagtttctggaaaagggccaacttttgtgaaaaaaaaaattttttttcctttcccaaggggtgggggaatccttttgtttgtttttgggggggggtttttta

SEQ ID NO: 215552 - DNA, 524 bp, Glycine max
catttatgactgggtcaaatcaactggtacccttcgtcttgatcctgagggtgagaacagtaagattcaaaagaatcctcattaccaggcaaaagagtacaagactttaaataacagatgtatggagctacgtaaaacttgcaatcatccatccctgaattacccattacttagtgaattatctacaaattcaattgtaaaatcttgcgggaaattgtggatcctggataggatccttataaagcttcaaagaactggtcatcgagttttgctgtttagtaccatgacaaaactcctagacctcttggaagattacctgaattggcgaagacttgtttacagaagaattgatgggacaactagtttggatgaccgtgaatcagctataatggactttaatagccctgattcagactgtgtcatcttcttgcttagtattcgagctgctgggagaggccttaaccttcagtctgctgacacagttgtcatttatgatcctgacccaaaccctaaaaatgaggagc

SEQ ID NO: 215553 - DNA, 524 bp, Glycine max
gccgcccttttttttttttttttatataatgaaattttattattatatcatatacaccaagaaaaattctatacgaaagtgaatggaaaaccaaacaacaataagaacaaaaaatattgggcacgaattaataaaatgtgcaaagcatcatacccctacgataaataataatagaaaaacctaaaataagaacgcaaatgtcaacaaagcgaaaacgccggacgagggccccacacaagtgaggcaccgaccaccgtcgctagcgtccctctccggtgctgacgtggcggtggagccattgaaattagggttggaaccatagaggaattgaatcccttcgatgtcgtcccttgccaacaccaccttcttcttccgagaagaaatcgtcggaaacataaccgcttcttctaccgatgagtgacctaaccctagcaagtgcccaatctcgtgcaccgccacggattctaaatccaccgctgtcggcagcgctgaccgcgtcacatcgccggaaaccacccagtcct

SEQ ID NO: 215554 - DNA, 567 bp, Glycine max
gccgccctttttttttttttttatctttaaattctagtagtattaaacatgttcatttctttactatatacttatataagttccttaaaacattacctaaaccttcaccaatccataaaaacaatggtttacggttgttacccaaaacaaaaaacatagataccaaattatattctatagaaatcaccgagagaccggctcttccaattcacttgccaattcaagaagcagtggccgcagtttatctttccaaaactgccccccaaacccccctcccttttcacttcttttcatttcaaccaccaccagctcatcggttaattggtaaaccacaacaataccaatcaaattaccatcctgcccttctagctttgctccaccaccattcttctcccttctcaccaccacccttccctcctccgtcattgcctccactctctccataattttctctggcaccactgtcgaaacaacccgttcaaccgaattcgatccggtcgggtcctcgaaaagacccgacatatccaacccggtcgagaaagaaattaagtcgaaagcattcaaaga

SEQ ID NO: 215555 - DNA, 507 bp, Glycine max
  unsure (1)..(507): unsure at all n locations
gaaagaaaaactcaacacaactccccctctccaccctctttttcttttaatttctcatcttatctattaatcttatatacatatatataaagacatagataatagtcatatagatataattatttcggtatattttccttgcatgggctgttaagatgtctcgcacgtgctcacagtgcggcaacaacggccacaactcacggacatgcaccgacggtggcgccgccgggtctccgagggagaacggcatcatgctgttcggcgtaagagtcatgacggaagctaactcctccttcaggaagagcgccagcatgaacaacctgtcacagtacgacgcggagttcaacgccgtcgacgccggctacgccttcgacgacgtcgttcacgccttcggccgcacgcgcgagcgcaagcgaggtgttccttggacggaggaagagcatagattgttcctgttagggttacacanagtcggaaaaggagattggagaggggattctagaaact

SEQ ID NO: 215556 - DNA, 396 bp, Glycine max
aagcaattgggagaattagccatgtctactggaaagttagaaatggccgaagagtgtttaaaacacgcaatggatttgagtgggttattgctgctatattcttctttagtgagatgctgacggaatatcaaaacttgcaactcttgctaaagagcaagggaagaataatgttgcatctcctttgcttattcatgttgggtaaacttgaggactgccttcaacttttggcataaagcagtcggattccagaagctgctttaatggctcgatcctatcttccaagcaaggtctcacagatagtggcactctggagaaaagatctcatgatcgttgatccaaatgccgccgaatcattggctgatcctgaagagtatcctaaactgctcgatgattggc

SEQ ID NO: 215557 - DNA, 543 bp, Glycine max
ggtgcatgagggaacagcaactatggactggatggaacaagaacaagagagggggattaccattacttctgctgcaaccactacattctggaacaagcaccggatcaacattattgatactcctggtcacgttgacttcaccttagaagtggagcgtgctcttagggtgttggatggagctatatgcttgtttgacagtgttgctggtgtggagccacaatcagaaactgtgtggaggcaggctgataaatacggtgtcccgcgaatttgttttgtcaataaaatggaccgtcttggagcaaacttttatcgaacaagagacatgatagctacgaatttgggtgctaaaccacttgtaattcagttaccaattggttcagaggataactttaagggaagtatagaccttgttaggaataaggctatagcttggtctggagaagagctgggtgccaagtttgatattgtagatgttccagacgatcttcaagagcaggctcatgaataccgagcccagatgatagaaaccatagttgagttcga

SEQ ID NO: 215558 - DNA, 343 bp, Glycine max
cttcatccggttcaattccttccaggtagttctccatagcctggtcatcgaactcaactatggtttctatcatctgggctcggtattcctgagcctgctcttgaagatcttctggaacatctacaatatcaaacttggcacccagctcttctccagaccaaactatagccttattcctaacaaggtctataactcccttaaagttatcctctgaaccaattggtaactgaattacaagtggtttagcacccaaattcgttactatcatgtctcttgttcgataaagtttgctccaagacggtccattttattgacaaaacaaattcgcgggacaccgtattta

SEQ ID NO: 215559 - DNA, 315 bp, Glycine max
aacaaagtgtcctcggcatgcacaagcttatgcaatccgttgaaggttatatgccaccatatcctcaagggctaaacgaaacacactctgaggtaggcattggagactttgaattgcaagatcagctttctcttttgctaactcttgtgctctttcaatgcccccacaactcttgaccaaattgatggcctcgtcaagcgaaccaacctcactgaattcagactcaatgatatccctcaattttggttctttctccagtgcaaaaatcactggtgcagtcaggttgcccttggaaggtcactgccagcaggcttt

SEQ ID NO: 215560 - DNA, 426 bp, Glycine max
caaggtaagaattttattgcacaatgagaaggcagagaaaattgatggttctgtttctcagtacaagtttaaaagaaaaatgaagcaacaagtgttgtagtggtagtagtagtagtaagcatacaaaattacaatggcatggtacatacataataatttaattaccaatgagaatttgtttggctctcacttccatttgttggcaacaatgtcagccaaatccacaaccctttgggagtagccccattcattgtcataccaagcaatgaccttcaccatgtcatctcccatgaccatggtcaacgaggagtcaacggttgaggacacatcagtgcacctgaagtcaacggacacaagtggctcatcacacacagagaggattcccttgagctcattgtctgcactctctctgaatgctgcattcac

SEQ ID NO: 215561 - DNA, 418 bp, Glycine max
cttcagaaaaggaatatctcttttaaacattaccaatatttgagaggaattttgcccgggcagctaggctccctccacataaattcttattttatgtatgtatacaaggaaaagtaagcatagctaataacaccactaagcatgatcttgtgaaaagaaattaataaagaacctactcaaataattgggaaacaaaaacaagtgatggatccttctcaagttcaatagttccaactatagaggtccttctacccttcaaaaaccggttgtaccattttgcagagagctttgggtatctcttcaactctggatcatccctatcaacgtagtataggccaaagctcgacttgtatccatctagcaacttgaacaaatccaggaaagaccatgcaaaatacccctttttatttgatccatc

SEQ ID NO: 215562 - DNA, 489 bp, Glycine max
attttatgtatagtagtggggaattatgggacaaaaaataaatccgcttggtttcagacttggtacaactcaaagtcatgattctatttggtttgctcaaccaacaaattattccgagaatatacaagaagataaaaaaatacgagattgtatcaaaaaattatatacaaaaaaatataagaatatcctctggtgttgagggaattggacagataaagattcaaaaaagaattgatcttattcaagttataatatatatgggatttccaaagtttttaatagagggtaagtctcaaaaaatcgaagaattacagacgaatatgcaaaaaaaactgaattgtgtgaatcgaaaactaaacattgctattgtaaaagttgcaaatgcttataaacaccctaatattattgcagaatttatagctggacaattgaagaatagagtttcgtttcgtaaagcaatgaaaatagctattgaattaactgaacagg

SEQ ID NO: 215563 - DNA, 506 bp, Glycine max
ggccgccctttttttttttttttttttgcaagaagccaagagcaatcccttttcaattaacactattacattattgttatataatgaagctgattatgatgcttgcagcatcaataaagcagtatataatatatacagattttttgcaaattagaggatccaaacaaacaagctaatcaaacaattttgaaagaatatatttttttcttgctttgtaagaatatagctcctctattccctgttcatggtaacctgagtggaaagaaacaaaacaatataagtatggcatataattcattcaataaaaaatgaactataatggcagtgcaaattatactgaaaaccaccactaagatctaaataaacctatagtattataaaactaatcgaccagtagtttatgacaagaggcagtagttcaagacttaatagctagaatatggaggggtttgagtatttatcttaaatatctgaccatttacaatctctagaatacgacaatgcat

SEQ ID NO: 215564 - DNA, 512 bp, Glycine max
gccgcccttttttttttttttttttttttttaaaaagtaatttgtgagatgataatggttttttattcttttgcacgagaccgtgcatagcaagctatgtcacagacatagccttaaaactaaaaacattaaagcagcacctaaataacagctgcaaccaacgagttcaacatacactggacataacaacagagaattcaactaatattggacataacagacagactcagaaaccaccacgaaggcggaggacaagatgcagggtggattccttctgaatattgtaatccgccaaggtacgaccatcttccaattgcttcccagcaaaaataagcctctgctgatctggtggaataccctccttgtcctgaatctttgctttcacattatcaatggtatcagagctttccacctccaaggttacggtcttccctgtcagagtcttcacaaatatttgcataccaccacgaagcctcaacaccaaatgcagagtggattccttctggatatta

SEQ ID NO: 215565 - DNA, 562 bp, Glycine max
gatgggtcggtcgtgaacatgtcagtgcccatcgtgctggctattgatgatgcgcagaagcatcggatcggggataacaaaaaggttgctctttttgattccaagggagaccccgttgcaattctcaataatattgagatttatacgcattctacagaagaaagaatagcccgaacttggggaaccattgcccctggcctaccttatgttgaacaaactataaccaatgctggaaattggttgattggcggtgacctagaggtcattgaaccaattcagtacaatgatggacttgatcattttcgtctatctacgacacaactccgtgcagagttcacaatgcgcaatgcggatgctgtgtttgccttccagctccggaatcctgttcacaatggccatgctttgctaatgactgacacccgaaagcgccttcttgagatgggctataagaatcctgtcctcttgcttcatccacttggaggctacaccaaagctgatgatgtcccacttgattggcgaatgaagcaacatgagaaggtacttgacgatggtgttcttgatc

SEQ ID NO: 215566 - DNA, 500 bp, Glycine max
gccgcccttttttttttttttttgtgctaattgttttttctccttgaatttgataaaataattattgattcttacagtgtacaagtcagagcgtattttatagtacaaacataattctgtgacttgcgtgtatgattatgcaacatataattcggcttttccatcaatgaatagactcatgaactcttcaccatccacagtttctttttctatgagaagttgagcaagcttgtgaaggatatcaatgtgagttgagataatatgtgttgccctagaatatgctctctctaccagttccctcacttccgcatccactacatccgcagttgccatggagtaatccttttgcgatgacatctgttgacccaagaatggatttccaccaggtccaccaatggcaacttgtccaatttttttgctgaatccaaatctctcaaccatctgccttgccactcgtgaaacttgcatgaagtcgtttgatgcttccgtggtgacatttt

SEQ ID NO: 215567 - DNA, 461 bp, Glycine max
caaacactcactaactggttgctgaagcaggagcaagctggggtgattgatgcagaactcactattgggctgtctagcatttccatggcgtgcaaacagattgcttctttggtgcaaagagccaacatttccaacctcactggggttcaaggagctgtcaatgttcagggggaagaccagaaaaagcttgatgttgtttcaaatgaggttttctcaaactgcttgaggtcaagtgggaggacagggataatagcatcagaagatgaagatgtgccagtggcagtacaagagagttattctggaaactacattgagagcgttgacccacttgatgggtcattcaatattgatgctgcaatgtcaactgcgtccatatttgggatatcagtccccaatgtgagtgtcttgctgacatttgtgatgaccccacactttgcacaacagaacaaagatgcgtggtg

SEQ ID NO: 215568 - DNA, 421 bp, Glycine max
acagaaaattctggttattgaatcttcaaaattgtacaaactgtaaacaagaggcagaaaacgcagtctacaagtaacaactagaatcataatgaaatgtgctaaacaaaaatatcatcatgtgcccaaaacagcacctaaattgtgtcttcatcccagttaaataatgctttcttcaaccacctcaattgcaaacacctaaattcgtcgtttctttgggagtctgcaaccattatggggttttcttgtagtatcttcaatgtatacaattggatttctatcccctcgagaaccagcagtaaagccctccttccagctcattattgcattcctttttctcctaaaatgagtaaatccattcactttcatgacaacagatttcaatcccaaacccctagcctttcggccacaacttccgcag

SEQ ID NO: 215569 - DNA, 407 bp, Glycine max
ggctgatgtttatagctttggaatgcttccgatggagatggcaagtaagaggaagaacctaaatccccatgcggatcattcaagtcaactctacttacccttttggatttataatcaacttggaaaagagacagatatagaaatggaaggtgtcacagaggaggaaaatggaatgacaaaacagatgatcattcgtacacttcggtgtctacagtataaaccaagcgatcgctcctgaatgaacagcgttctgaagatgcttagatgagacattgagagcctggatatgcctccaaagccttctgtcatccacatgagacactggagattgatcactgcatgtactctagcataacaatgtcgatggactgcattagttgtacatgctatcgcaaggaaatggtgac

SEQ ID NO: 215570 - DNA, 413 bp, Glycine max
tttgtttttttttttttttttttttttttttttttttttttttttttgtttttttttttttttggggtttgggggttttttctttttctttttttttttttttgtttttttattgtatttggtggtactaatacataaatatgggggaaaaaaaaaaagaggggggccccccggtttataacccggggaaaaaaaaaaacagggaaaacttaaaaaaaggggggccaaaaaaaggggggggcccaacaacaaaaaagggggcccaacaaaaaaggcccccccccacccggggggggccccccccccccgggagagcccccaaaaaacaagggcccccccccccccctggggggacgaaagaaaggctcagacaaaccacccctccccaaagggaaaaaaaaaaaggggggggg

SEQ ID NO: 215571 - DNA, 532 bp, Glycine max
  unsure (1)..(532): unsure at all n locations
gttaaaagccttagccttccctacaactccaaacacaaagacatcatcatccatggctgcctccgtctccactgtcggagctgtcaacagagctcttttgaacctgaatggttctggagctggagcttcagctcccagttcagccttctttgggaccagcttgaagaaggttattgcctcaagggtccccaacagcaaggtttccggtggaagcttcaagattgttgctgtagaagagaagaaagagattgaagagacccagcagaccgacaaggacagatggaagggtcttgcctatgatatctcagacgaccaacaagacatcacaagaggaaagggtttggttgactcccttttccaagctccacaggatgctggaactcactatgcagtcatgagctcctacgagtacctcagcactggacttcgccagtacttggacaacaaaatggatggattctacattgctccagcttttatggacaagctnngtgttcacatctncaagaacttcatgaccctgcccaacatc

SEQ ID NO: 215572 - DNA, 291 bp, Glycine max
aaaaggaaaaggccgcaaatgcaatttaaggggcccctggaactcaaaattatagaggaagacggtccaatttgaaaaatatagtaagatcattttaaacttagcatcttttttttgcacctaacacattgggaatgctaaaaatgttacacgcaagttccatcacaacttttaacacttggtttagtacaacaacctttacgaacaaaaatatttacttgccaagtttgctttgccttcaattcaagactggaagaaagctcccctctgaatagcatcctcgttagcatt

SEQ ID NO: 215573 - DNA, 337 bp, Glycine max
taatgcaggtcgagctcttttgctggatcataggagaggtaaattaggagcctggctgcgcgagctcttgcctcatcatattatcttacctcatgagcggaggctgcaagagcgaatattggaccaagatcactccaatctcgcatttggcttttacagacaagcctacgttctcgctaaggcagttgctaccccacttgtcaagccaggatcagacagaccttagcggattgcatcagagcaaagtcttttcttacttggatggcagccttccgggcgactatggattggaccctctgggacttacagacgctgtatgaacaggagggaccattga

SEQ ID NO: 215574 - DNA, 383 bp, Glycine max
agaagattgaggatcttcatcctgatatgattgtaaagggttatattaagaatgtcacaccaaaaggttgctttattatgctgtcacgaaagattgatgccaaaattcttctgaccaatctttccgaacaatatgttcaagaacttgagaaagaatttcctattggaaaacttgtcattggcagggctatatctgtggagcctctgtcaaatcgtgttgaagttacactgaagacgtcaacggatcccaatatacccaaatctgaaactatggatttgagtaaatttcacgtcggagatgtatatctggcgcggattaagcggattgagtcattgggataattcattcgactagacaacacatacatggatgagtaatgccct

SEQ ID NO: 215575 - DNA, 417 bp, Glycine max
gccctccttattgttgatggagtgtcttccatttgtgctcttgatttccgcatggatgaatggggagttgatgtggcaataactggctcccagaaggccctttcccttcccactgggataggtattgcggttgcaggccctaaaactattgaggcctcaaaacatgctaaatcacttagagttttctttgactggaaagactacctcaaattctaccagctaggaacctattggccatacactccttccatacatttgctgtatggtctgagagctgctcttgatctgatatttgaggaaggactcgaaaatgtgatcgcaaggcacagacgtttacgcaaagcaaccatacttgctgtataggcatggcgtttgaagaattgcacccaaaaggaagattggtacagtgacactgtg

SEQ ID NO: 215576 - DNA, 569 bp, Glycine max
ggccgcccttttttttttttttttttgccttacttagctatttcttatcattatcctcagctatggcaacaatttcagtgttggtttgccccagcaagctgcttatggatcgagctttcaccattccaagcttcatcctcctctttgtgacaatcacttgctttttctcatcattgttttcagcatcatttcccaaagggtactcttcatgagtgacacgacttgtagtactagactttgttgtttgtttttcgaataaattctcggattgaggcacaatattgatattgttctttggtgcaacacttgttgtgccaatggacttgtttctcacacttgtcatgcttctcaaccttcctttccctaagtgatgctcgcaaagagagtaacccaccaaggtttgttggcaacacctccatcctctcccatttacacgactgcaccttgaaccttccattagtgcaccaccccttaccctcttcttaccaacgttttcttgttcgggttttggtgctcttggtgccacctcttcctcgttctctcttacctcttcttcctcttctttttct

SEQ ID NO: 215577 - DNA, 401 bp, Glycine max
ggccgcccttttttttttttttttttttttttttttttttttttttttttttttttttttttttttttttttttggtttttttttttttccagggaaaaaaaggggaaatttccggccggggaatcctttttaaaaacaccttttttttttttgggaggggggttaaaccccaataattgtcccccgaaaccacccctttaaaattttggccccttcttttttccccggaattgttcagggggtttaaagggaacctccaaaaatcccgggggcaccatttttttttactgggagaatacttaaggaactagccttgggccctgattcacctttttaataaccttaaggggggggtgggccaaattcaccctgtgaaccattttttctttttttttaaaaa

SEQ ID NO: 215578 - DNA, 601 bp, Glycine max
gttcttggaaacaagtatcaaagcaaattgcttgaagttatagatgccagtgagttgccagaatttctgggaggtacctgcacttgtgaagatcagggaggttgccttagatctgataaagggccctggaaaaaccctgatatattcaagatggttctcaatggtggagcatggcggtcaaagcaagttgtaaaagttcttaacaatgaaagaaaggttattgtgtatgccaagccaggatacccaacggtaaaaggcagtgacacatcaactgctgaatcagggtcagaagccgaagatatatcctctccaaaagcgatgaagagttattcacaccttacgctgacccctgttcatgaggaagctaagatagtaggaaaaacaagctatgccagcaacttgtctgggtatgatgaatatattccaatggtagacatacctgttgatgctggttggaagaagcaagcatctctacagaggtcttacacctctaaaggagcacctactactctcgacactcagaaaactcctgatgggcttcaagctcggatgtgggtagcactgtctggcttcttcttgaccgtattaactcttttacgtc

SEQ ID NO: 215579 - DNA, 542 bp, Glycine max
gccgcccttttttttttttttttttgaaccaactcgatttatatatatatatatatatatatataacaacgtgatatagctttcactttcaaatataaattgaaaaaaaaaaaacactttcatttatctataaagtcttcgtacatatatagcaacataatctttatataaatctctttaaatttaggctttgtgagatccaagctctacctgatgagtttcatcaaggaggtccacatttcccttgtactgatatcttcttgcaacatatataaaaaaaactaggttgagggaagttaacccagctattaggtagtaaaagtagtctagcctcccagcatttatatcatctgttaaccaatccggatggctatgtgttcttgtagaatgatgaactatgttgactattatgctactcacatagctagacacaccaaaagaacacgagaagaaggaattaccaatgcttctcatatgctcaggaaattgcctgttgaagactcaatttgtcctataatattgaaggcctcacatagacccat

SEQ ID NO: 215580 - DNA, 570 bp, Glycine max
tggaggttcatctgtcaccttgagtgccatgagggaggcttggaagtttgcaaagtggtggattccacttgctgcatgagatacagaatagagtgtaagtgccccaaggcttacttttctgcttcagagaatggtggtggtgattctgatgggagcattgagtttcttgcacatagaccaatgatcaaggaaaaatatgacgcttatcaagaagacctttaacgagtacaagaagaccactctggacatacaactggcctaaagggtcaaaatgatccacctattattgaggtgatacaagagaatagcagtagtgaaatagagcaagtgaaattgcctttccttgtctatgtctcccgtgagaaaaagccttctcatgcgcaccatttcaaagctggggccctcaatgtactttaccgtgtctctgctgtgataagcaatgctccatatattctagtgctggatcgtgacatgttctgcaatgtcccagcttcagcacgccaagcattgcgtttccaccttgatcccaagatgtcactttcacttgcgttagtccaatttcctaaaaat

SEQ ID NO: 215581 - DNA, 537 bp, Glycine max
gccgcccttttttttttttttttgaatggaatgtcttgtatatacaataaacgacatggtacgatgcaaactagtaagatcaatatacaatttgcctctagggcgtatacttaatttaacttggaggattgaggaagccataattagaatgaaaatgtgaaaactaaaagttatttggctaactattgtaccaatggttgatgaaaatttcttttctccttacaaaacaatgatattcactttatcatgaaggaacagtttcttgcagcttcattaccctccaatcatgtttctgtacaactcgtactcgtatatcttatgcttatgagaaaaatatgaatggaaaaagagatcaagaatatatatatatatatatatatatatatcatgcatatgcttgaagcccgaaggagttgaatttggtgggaacgaattatatcatgttctcaaacttgtcaagtttcttcacccgttgcatagaccttaaaaatagagcccctaaaatgcctgcaccaatgaatgatccatttgcaaaag

SEQ ID NO: 215582 - DNA, 341 bp, Glycine max
aaaaacaaaaataatatttaatcattattgattcaatcactgttattcaaccaatacctccattgactcaactaccaatccggttttaaaaacattggtttaatgagatactggatatatatggtacaatcgattatttgttgtatacaaagactgaggcaggacggtacagtgaggctgccaaaattatcacagtttaccctgctcttgcagttgttcctctgtcacaaagaaggcatggaaaccatatggaactctatgcgggaattcgacaactgcaacaggatctgctgacattgtttttgcattgatgacatgcacaaatgattttccggtatttt

SEQ ID NO: 215583 - DNA, 440 bp, Glycine max
aaaaatcgaagaattacagacgaatatgcaaaaaaaactgaattgtgtgaatcgaaaactaaacattgctattgtaaaaggtgcaaatgcttataaacaccctaatattattgcagaatttatagctggacagttaaagaatagagtctcgtttcgtaaagcaatgaacaaagctattgaattaactgaacaggcgggtacaaaaggagttcaagtacaaatagcaggacgtatcgacggaaaagaaattgcacgtgttgaatggatcagagaaggcagagtttctctacaaaccattcgagcgaaaatcgattatagacgctatacagttcgaactatttatggggctttacggatcaaagtttggatattttctgaataaagaaatacttattattctctatcttaaatgtgctatattgtatcttaaatgtgctata

SEQ ID NO: 215584 - DNA, 485 bp, Glycine max
acatatataactaaagaatcttgttttgttctattatttgttattttataatattctaatgaatctttattttcctttttattattagttattagaatattttttattattagaaagaataaatagaattggcaaaaataaaaaaaaaattcaataaaatcaaaattatcgcgggcgaatatttactcttttattatcaatcaaattcagatgtaatgtagggcacaactcctaaaaaaaggattgctttttggtttcttccgccatcccacctaatgaatcattaagatttgtttttaataaaatcttaagtatttgcaggtttcgtcgttcccatcacttctcgattaatggttaggtctgaattcgacaatggagcctttctcatatcttaaaattaataatcttttttttttttcaatattgaatttgttttttcgtgaatcaatattctcaagtttttattgattcagagctcttaattt

SEQ ID NO: 215585 - DNA, 453 bp, Glycine max
cgaaaaaccaacagcgagtgttgtttttgtttggtccaggctggaccagggaatgaatagagatgagaggctttcggttgaagagaactgagttaagcggcgaagccaaacgcagaatcggcggcagaaattgccaccggaagcacgtcgaagacgggtgaaccaaacacaaaattccatccaccacttctcttttcaatccccaactcaaatctgtgaagaaaatctcaatttctaaattgtaattcttagcactactgctagtagtagtaaaaaaaaacaattagaaagtagtagagtggatatttttctttttttcgtttgttttacttttaagatgggtgagaagagcaacgttggcggcgacgcgattaacacgacactgcttcacgtgaagtacgagctgggccggctgttaggccacggaaccttcgcgaaggtgtaccacgcgcg

SEQ ID NO: 215586 - DNA, 294 bp, Glycine max
cctcgaacaacggcgacaaatcgaacccctccgagagcgaaatgatgtgaaaagcattcatcgtagtagaaacctcctgctcatgctgtttaatcttctcctccagatccaattcctctcttttctttcccatcaagttcttcggcacgggtttcttgaaccacgacgagtccatgatttttgaaattgtgattcgcgtgttcgggttggggtcgaggagcttggtgatgagcctccgcgcctcggaggagaaccacggcggacacttgaagtcaccgcggtaaattttcttgt

SEQ ID NO: 215587 - DNA, 470 bp, Glycine max
agaaaatcctaaaggattcaagcttgagttcttctttgataccaatccttacttttcaaataccatcttgacaaaaacatatcatatgattgatgaggacgaacctatattggagaaagccattgggacggaaattgaatggtacccgggaaaatgtttgactcataaggttttgaagaaaaagcctaagaagggttcaaagaatgctaaaccaattaccaaaaccgagagctgtgaaagtttcttcaattttttcaaaccaccagaagtccctgaggatgatgttgacattgatgaagatttggctgaggaacttcagaatcagatggaacaagattatgacattgggtcaacaataagagacaaaattatgcctcatgctgtatcatggtttactgaggaggctgttgagggagacgagtttgaagacctgtaagatgatgatgatggagatgacgatgaggatgatg

SEQ ID NO: 215588 - DNA, 536 bp, Glycine max
aagccacagaattataatattatacaaagttagccaaatctggaagttgttctttggcagttggacaagccctgaattagctaatatcttgaaagtagtaactccccctgccttccgctatgttttcatgatgttcattactataaggtcgagaaatccaaactatcacaataaataacctgtgcaatatcttctatgggagtcacaagctataagtactgttcaccattgtatgacaagtcacccaacacaaaaacaaaagcaacataacaatgaataaagaaagtaaaattactcaccaaggtgttattctctttcaatcatctacctttccccatcattcattatcatcaatattttcatcatccttcatgtacttctcttgcactgctgcaactctataataatcccaattgacaggaccaaccgcaatcttgctaaattcaactgcacttgcttccatcccaacaaatatgtacccattgcttttgtctatcagcttcactaaattccctacactctctttgtcctgaata

SEQ ID NO: 215589 - DNA, 368 bp, Glycine max
ctctctctcaccaaagtcttcctataacgaaaaagataagaagagcagttttccctcaccaaagaagaagaagcaaacaatggccgatcaacttaccgatgaacagatctccgagttcaaggaagccttcagcttgttcgacaaggacggcgatggttgcatcacaaccaaggagcttggaactgttatgcgttcattggggcataacccaactgaggcagagctgcaggacatgatcaatgaagtggatgctgatgggaatggtaccattgacttacctgagttcctaaatctcatggctcaggaagatgaatgacactgattttgatgaggcactgaaagatgcattccggagtttcgacacggac

SEQ ID NO: 215590 - DNA, 269 bp, Glycine max
acacggaaaaaagtgacctgttcaggttctttttcatcttagcttcagttcacaaaatatcaatttgattacaaaatatatttatgcattaatacaaaacagaatgtttgaatttcatgtttaaatatatattatgacaacagaggttttaaggagtctaagcccaccatggagcatcacctgttctgaaatctgtttcaacccaaggaacaaacacgaccttcccatcatctatatcacaatgtgctaatgccagagacaatggagca

SEQ ID NO: 215591 - DNA, 594 bp, Glycine max
gtggctaaagaggtcaagcatccattcaggaatcttctcaagcgcaggaaccgaccccaacttgtcatttccgttgccctacagatattccagcaattcacaggcatcaacgcaatcatgttttatgccccggtgctgttcaacacgttaggattcaagaacgatgcatccctgtattctgctgtgataactggggctgtgaacgtgctctccactgttgtatcgatctactcagtggacaaagtgggacgtcgcattctgttgctggaagctggtgtgcagatgttcttgtctcaagtggtgattgcaatcatactgggaataaaggtgacggaccattctgatgacctttcaaaaggcattgcaattctggtggttgtgatggtctgcactttcgtgtcttcctttgcatggtcttggggtcctcttgggtggcttatccccagtgagactttcccattggagactcgttccgctggtcagagtgtcaccgttttgtgttaacctgctcttcaccttcgtcattgcacaagccttcctctttatgctctgccacttcaaagttggtatcttcttgttcttctctggctgggt

SEQ ID NO: 215592 - DNA, 620 bp, Glycine max
gccgccctttttttttttttttttacgcaatgtaattttatagatcaccgcaaaaatgccttctgatcctggtgctacgcgtacattttgcacaagctaaagctagtagattatctataaaaactgccgcgcaaaatggcttctacaacttgtctagactcctagaatttgaaggtatatatgggtctatatacaagaattgttttggatataggaatggtttcaccgccttgaaaataccaccaagatcaacatggacatcgagaccaccattttgaatccagaagtgtcccagaaattctggtttagcttatctgcggctgcaacttctctttgttgctttgcagctaattgatctctcagttctttgatagctttgtcccgtcgttcacccatcctttgcagttttcgtgtctgagaacgagcttcctgcagacagaattctaacttcaacactttcttcttcagctcttgatcagcacgccgctgtttctccaactgtgactctaattccttagtcttgagcttccagtgagcagacatgatcttaatttcatccttaagttttgctatttcatcatccttaacacctagaatcttattcatcttctcaaaatttt

SEQ ID NO: 215593 - DNA, 520 bp, Glycine max
aattaaaaaagaagggaaagtgtacgagaaaattatctctctctatatatagatagataaatgataaaagcctcgagggtccgtcccatccctgaaaatgctatgaggtgttgggaaatggttgaagtagttgaataggaagatcgctatgactatagctcttggtaaatttaccaaagatgaaaatgatttatttgatattatggatgactggttgcggagggaccgtttcgtttttgtaggttggtccggtctattactcttcccttgcgcctatttcgccttggggggttggttcacaggtacgacctttgtaacttcatggtatactcatggattggcaagttcttatttggaaggctgcaacttcttaaccgctgcagtctccactcctgctaatagtttagcacactctttgttgttactgtggggtcctgaagcacagggagatattacccgttggtgtcaattaggtggtctgtggacttttgttgctctccacggcgctttcgcattaata

SEQ ID NO: 215594 - DNA, 418 bp, Glycine max
gtctcggaattcggctcgaggcggacgataccgatgggagctgttggctctaaggattttaggacaaagaaaatttttgtaggtggaattccttcaaatgtgactgaagatgaatttagagacttctttacacgctacggcgaagttaaagatcaccaaataatgcgggaccactccaccaaccgatctcgtggctttgggtttatcacatttgaatctgaagaagcagttgatgatcttctgtccatggggaacacaattgactttgctggagctcatgtggcaatgaagaaggctgaaccaaagaagccaaactcagcacctgcatcatacaagcgctataacgactctaggtcttcatacagcagttggtggatatggagatgcttatgatggatttgggggcgcttatgaatgg

SEQ ID NO: 215595 - DNA, 489 bp, Glycine max
  unsure (1)..(489): unsure at all n locations
attgtgtttacgctggatgaaggacctggagtactgtttaaggctttggcagtatttgcattgagggacataaatttaaacaagattgaaagccgaccacaaagaaatcggccattaagagttgttgatgactctaacactggaactgccaagtatttcgattaccttgtctatattgattttgatgcgtctatgactgagccccgagcacaaactgctttaggacatctgcaggaattcgccacatttcttcgggtgctgggctgctatcccatagatacaaccatatagtctatagatagctatctgctttttattggtcaatcttcaatgaatgtcattatattcaagcctgaaactttgaagagaatctgcagctaccttcatgtccaaataaatcaagagctgtcagatggtcaaaaatgtatntacattacatagtagttagcctttattcattttgatagtcagtttatagattgacacgtg

SEQ ID NO: 215596 - DNA, 424 bp, Glycine max
agttctgaatattgattgaatgaaaaattacaatacttgtctctgcttctcttatatatgtgtataagagagttagtataatcacacgtgtcaatctataaaactgactaacaaaatgaataaaggctaactattatgtaatgtaaatacatttttgaccatctgacagctcttgttttatttggacatgaaggtagctgcaaattctcttcaaagtttcaggcttgaatataatgacattcattgaaaattgaccaataaaaagcagatagctatctatagactatatggttgtatctatgggatagcagcccagcacccgaagaaatgtggcgaattcctgcagatgtcctaaagcagtttgtgctcggggctcagtcatagacgcatcaaaatcaatatagaaaagggtaatcgaaatact

SEQ ID NO: 215597 - DNA, 400 bp, Glycine max
gtaatcctatacgtacttcttgctggtttattacccttccaggatgacaacctggtggccttggacaagaagaatttaccgtggagacttcaaacggccgtcgaggatctccttcaaggcgcgcaggctaatgaccaagctggtaaacgtcaaactgacctgcccaataacaattacagtgctcatggactcatcggggatcaagatacccgtgccaaataactggatgcgtaagaaaagcgaggaataggatccggaagagaagatataactgcatgatccggatgggactactgctaggaatgcatctgacatgattaccctctccgaggggctcgagctggaggcgatgcacaaggaaaagaacatagaagagagccatttactgcatgttaccaca

SEQ ID NO: 215598 - DNA, 355 bp, Glycine max
gcagagacttctgtgtttataaatcattgtttgggatttagctctattctttatggctctgttggtgattgaacagatgctgatcttcgccaaaactttgaccggaaagaccatcactattgaggtggagtgcttcgacaccatcgataacgcgagcgctagcatataagacaaggaagggatccgacctgaccagcatagacttatcttcgcgtgtatacagcttgacgatggacgaacccttgtcgactacaacatccgacaggaatccactctggaccttgtgcttaacctgaaggctggtattcaaatctttgcctataattgtactgtcaacatccttgatctcgaggaa

SEQ ID NO: 215599 - DNA, 590 bp, Glycine max
ccgagtaagacccttgacattgttgagtttggccaaaatgccggatgttcataccctcgttaatgattttctgaatcagcttaaaaaacgtaaaattgaaggttctcaggccacagcaaagctcacagcagagttgctccggtctgtgatttcacagcagcgagtgccacacacgaaccaagctacaactctgattaatgcagtgagggctgtgggggagcagcttattgctgctaatcctattgagctagctgttggaaatattgtgaggcgtgttttgcacattataagggaagaggatctttcccttgcaacagctgctatggatggtttgggggtatcagctgcaagtgacgatgaagatgatgcggagcgagatgaaaatcctgttttatctgcggctgctgttgcagctgctgccagaagcacattgcgtccaccgtcattgcaaactcttctagaggatacatctgattcagctgccgctcccaccacatcttcctcagggggtgaatctgacgggagaagtagatctgtggtaaaaggttcacgagggaggaaattgagcatgatgtcatcgaagcagccat

SEQ ID NO: 215600 - DNA, 546 bp, Glycine max
ggccgccctttttttttttttttttaaggaaacagtaccccaaagtctatgattacgtacacaatgtaaaagggtcacaaatagaagttttaggtgcatacaatacaaaacaatataatacaaaattttacatcttcaaagccacaaacctgggctgttggttcactaaaactttcacacagcctccttgtgacttattcctaagccctattaccacaaggatgttcaacaattctcagtgcatcagcactgcagcctcttgcacaagaggctgtgtaacatgcacaaaatgctcagcttccctctccacctcttcccaacacttgtgtgcactcttcccttctttcatcttcttcacaaaccccacaaacttcctccagttatttggttcaaacaaatgcggattcatcctcaggtatgtgaaggcacacatctctctatcaccagactcaccatcaacatccaattgtgatgcccttatgatctgctcatgtgcatactcgtcgtaccgtggcagcgcgttttcgccggcaagtggaacctgtg

SEQ ID NO: 215601 - DNA, 543 bp, Glycine max
atctatgaatgatggaaccaccactaacgaggttgatgatcaacgttttcatagtgagtttcttagcactacttgtgaacttggtggtgggagtgctcggcgctgataactatagcagagatgattttcctcttgacttttgtttcggttccaagaacctctgcttatcaagtgggaggagctgctaacatagatggaagaactcctagcatctgggacacctttgcctacgctggatatgcccatggagaaaatggagatgtagcctgtgatgggtaccacaagtacaaggaagatgtgcagctaatgctggaaacagggcttgatgcctatagattttcgatttcatggtcaagattgttaccaaatggcagaggacccgtcaatcccaaaggattacagtactacaacaatctcatcaacgaacttatcagcaatggaatccaaccacatgccacgctacacaactttgatcttccacaggtacttgaagatgaatatggaggatggattagtcgtgacatcataagagacttcacatac

SEQ ID NO: 215602 - DNA, 384 bp, Glycine max
gccgcccttttttttttttttttttttttttttttttttttttttttttttttttttttttttttttttttgggggttggtttttttttttttttttttttctttttttttttcttttttggtctttttgttttttaacatttactgtgtttcactttgttagttggaagaacaaaaaaaaaaagtgttttcaccgcctcggggggggggagaaattctttttttttttaggaagctcgggggtttttggaacaaaaaaatctctttatataaggtgcggggggtaaagcccatgagggggcgcccgcttgtaataaaaaaattatctctgcacccgaccttaataaacaagttcccccccccccccccctttgttgggggggg

SEQ ID NO: 215603 - DNA, 393 bp, Glycine max
tgccgaggtcgagttattccgctgccacgccgtaactcggaataggaataagctccagggctgccatgctcgtatcctggtacaagcattgacacaaagatggtgtcctgcaactgtgtgtagatccatactggcgtctgatataaggtcatcaaacagatcgtgagcaaggggggactcaaccactgggactgatctagtatgatatacgcccagagcatactcgacatctgggcgggacgacgtatactaatgagcgtccgcacccggtaccgaattgctgaccggcacctgcatgaggacaatgttcccctatagcgagttggatgatagcacccagtgagccttgccaatgacccaacctgtgtgactgagctatacgatcacgatctc

SEQ ID NO: 215604 - DNA, 461 bp, Glycine max
gtaaaaagcaagtaacattaagttggattcggatacacaagataattcacattatgtgaagtacttcaccaaacacaaatctaaaaactctcaaaagtcatttcgttctttgacgctcactttccggggacgaagttggtggcataggcccaggcgttgttgttgacagggtcagcaaggtgatcggcgaggttctccaatggaccctttccggtgacaatggcctgaacaaagaagccaaacatagagaacatggccaatcgtccgttcttgagttccttcaccttaagctcagcaaaagcctctgggtcatcagcaaggcccaatgggtcgaagctgccacctgggtagattgggtcagtgacctcaccgagggggccaccagcaatacggtaaccttcaacggcacccattaggataacttgtgtggcccagatggcgaggatgctctgggcgtggat

SEQ ID NO: 215605 - DNA, 482 bp, Glycine max
tgcagtcgttgtctaaaccacaatgctttgcttcccaaaacaattctgtgcagagcacttctggggaaagtaccgatggccttggtagctcctctagtgctgacagaatgaaatccttgaatgaaattcctgagagtcaaaatgtgcttgaggagagaagctctaataattcaattggtgtaagggagaaagctatagcgttttctcagtggacaaggatgctagatatacttgaagcatgtcttaagaattcgtcgatccagtatagaagactggatggcacaatgtcagtcactgcaagagattaagctgttaaagattttaacactctccctgaggtttcagttatgattatgtctttaaaggctgctagtcttggtctgaatatggttgctgactgccatgttcttatgctagatctatggtggaatcctacaactgatgatcatgcaatagacccggcacatctgattggacaaact

SEQ ID NO: 215606 - DNA, 491 bp, Glycine max
gtagagcattatgactgggacaaattaactggctcccttcgtgtagcgactgatggtaaaagcactgagagacatcggagtactagtttccaggccgacgacgaccggactggaggttacagacggctggagctacgtcgggattgcgagatgcgatacgtgatgacagatggctcagtgaataatgtgcaccttgcgacgagcgatgtcgacgcacaccgtggatcctggataggagccttatgcagcttcaaagaactggtcatagaggtttgctgcatagtaccatgacaagaactcctagacgtgttggatgattacctgaatcggcgaagacttgtttacagaacaattgatgggaccactagtctggatgaccgtgaatcaggtataatggactgtaatagtcctgattgacactgtgtcatgtccgtgcttagtagtcgagctgctgggagaggccttgaccttgagtctgctgacacagttgt

SEQ ID NO: 215607 - DNA, 389 bp, Glycine max
ccgccctttttttttttttttgtggacaaatattgtattaaaaactaaagataggtaaataatttttggttctcaatattattttgtaaatccaagtttccgcgccttccccctaaaacaaaaatgcattattatctccaacttgggaagaaaaatcgtttcctatttttcttctgaaaattcttttgttggctaaccttgtatcggtaaagggaaaattacaataaaaaaaataccaaaaacaaacccaactatatgacaatggacataatacaactatgcaataagaagttccttgttaggagaccaagcaaatacattaagcggcaacttcttgctcttttgtgggcagttggttctgaatgtgctgaggcaccacatcaaacatg

SEQ ID NO: 215608 - DNA, 418 bp, Glycine max
ggccgccctttttttttttttttttggttgattaacataaaatcaatcattcagcacatagttgaatcaagcttgccaagttcaaagtaggaacacagttggtctgtccaaatatttctatgtacataacagccactaaacaatttcatgttggaacggaagggaaatccaaaagcacgggtcaacttcttgagccaaccatggtgcttggggcgggtcccatgcttgacacagttagcccgcgatcatacatacgctggatgtgttccctatattctgcaagagacttgacaggtatggctggtgtaagttcaatcacatctcccatcttcaacttggtattgggatcactaacgggttgatgattcaaccttggcctcaactcttccttcaatgggaacctatatgttgtcaacct

SEQ ID NO: 215609 - DNA, 620 bp, Glycine max
ggccgcccttttttttttttttttaattagttctactcattcacatccatatcttaggagaatccatatcacacaatggcttttcaagtaaactaagatgcatgtcaaatatcatcacaatattcatcatctttaaaaaaatgaggagtggcagaaagtgaagagacattaacattacaaccctttttttggataaaattacaagacaaactaagaaggttcagttccactacagcctagtagcaggacttgccactaattgacattttaaggttggattcaaaaaccatcaaataaaaatgtaggaagaagaaaggtcaaggactactacatcactgttataccacccaaacccttggccttcctcctacccctttttttgtcgtttccttttaatcaacatttcttcatttaggtttttgtggccataatgtgatgatcacttggccatcatcaccttaacgaactcctcgtagtttatttggccatcgccatcaacatcggcctcgcgaatcatctcatcaacctcttcatcggtgagcttctccccgaggttggtcatcacatggcggagctcagcagcagagatgaacccattctggtccttgtcgaaacccgga

SEQ ID NO: 215610 - DNA, 486 bp, Glycine max
gccgccctttttttttttttttttttttttttggcgaatgtttctagttgttttacatgtcatttcttacagcgccacaccaaggaacaaaatgtccacatgatatagaaaggtagaaaggtagttgagttttggcaacgtaaagaatatgtaaaataacatataatacattcagtggaacttgagactggtcaagatgttgttgtgcacggggtcagccaaatgatctaggaggttttggtatgggccaacacctgtgacaagagcttgaacaaagtaacccaagattgccaacatagccaaccttccattcttcacttccttgagcttcaaatccttcaaggacttctcatccttaccaaagcctagtgggttgaagaaaggtcctcctggataagctggctcaccagaacctccaagacccttctctagtcgtaggaagtattgtttgcccatagagcctggtttggcccagtcttggaatct

SEQ ID NO: 215611 - DNA, 346 bp, Glycine max
ctcgagccgcacaaaacttgctatagcagtaagctataactcatttgaggctctgtgagaattgagaaatggctaaagatgttgaggttcaagagcaaggaggagagtactctgccaaagactaccatgaccctcctccagcacctttgttcgacccagaggagctcacacagtggtccttctatagagccctcatcgctgagttcatagcaacccttctcttcctttatgtcactgagctcaccattattggctacaaaaggcagactgatacaacggtaagtggcaccgactgcgatggggttggcattctgggcatcgatagagcctatggtggcatgatctt

SEQ ID NO: 215612 - DNA, 264 bp, Glycine max
aattcagccacctgcacccgtttaactaagggagctagtgcacaagtgaggtttcagcctagactatggcgtttcctggcagcagcttctgatcaaggagcgtcaatttttgatgttgaatctgacacacatatttacaccctacactgacatcctgaaccgtcgagctatatcatgctgggatgggaatggtgatgccttggcatctgtgagttctaattggctgaaggtttgtagtatgacctcaggacgagaatgcattca

SEQ ID NO: 215613 - DNA, 499 bp, Glycine max
  unsure (1)..(499): unsure at all n locations
ctctactatactgcttcaccttctgctctagaaaattcagtgctgaaacatggcttcggctactctctctgtagccaaaccagcccttcaggcaaatgggaaaggcttctctgaattctctggcctccgaagctcatcaggcttccttcccttttctagaaaatcttcagaggatttccattctgtcattgccttccagacctatgcagttggaagcagtggaggatacaagaagggtgtgacagaagcaaaactgaaggctgccataaacgggtttggaaggattggaaggaacttcttgaggtgctggcacggtcacaaagactccgctcttgatgtcattgccatcaacgacaccggcggcgtgaaacaagcctttcaccttctcaaatacgattccatcctcggaaccttcgatgctgatgtcaagcctgttggcagcanagtcatctgcgtggattggaaggacatcaaagttgtttctgaccgcaaccctgcc

SEQ ID NO: 215614 - DNA, 446 bp, Glycine max
gatcatcaacattcagatttcaaggtaagaattttattgcacaatgagaaggcagagaaaattgatggttctgtttctcagtacaagtttaaaagaaaaatgaagcaacaagtgttgtagtggtagtagtagtagtaagcatacaaaattacaatggcatggtacatacataataatttaattaccaatgagaatttgtttggctctcacttccatttgttggcaacaatgtcagccaaatccacaaccctttgggagtagccccattcattgtcataccaagcaatgaccttcaccatgtcatctcccatgaccatggtcaacgaggagtcaacggttgaggacacatcagtgcacctgaagtcaacggacacaagtggctcatcacacacagagaggattcccttgagctcattgtctgcactctctctgaatgctgcattcac

SEQ ID NO: 215615 - DNA, 590 bp, Glycine max
  unsure (1)..(590): unsure at all n locations
gcagatgacagtgtgattgctttggcgactagatgcccccatctgaggtccctaggactgtactactgcaagaacatcacagatagagcaatgtattccttggcacacagcaaggtgaacaacaggatgtggggaactgtgaaaggaggaggaaatgatgaagatggtctaaggactttgaacattagccaatgcactgcactcaccccatctgctgttcaagctgtttgtgactcattcccttctctccacacatgctcagggaggcactcactcatcatgagtggctgcctcaacttgacatcagtgcattgtgcctgtgctgtccatgcgcaccgtgcattcaccactttcccttatcctgcccattaagaagctcatgcttttgatgttgaacacacttcgaggatgtgccccttgaaagggctcagagaagtgaaagaagtgaaatccacccgccttgtagatgtatgcctgcataagagagacttgaatctagctgattatgtacatcttttcttcaactntatgtcttaaactcgtttggcttaatccccgaatgtgtaagctcgagacattttgatgctaaa

SEQ ID NO: 215616 - DNA, 335 bp, Glycine max
gcctctaacctcgcagttccttgatctctcctctcaagatgcagatattcgtgaaaactttgaccggcaagaccatcacccttgaggtggaatcctccgacaccattgacaacgtacaagctaagattcaagacaaggaagggatcccacctgaccagcagagacttatctttgcgggtaaacaacttgaggatggtcgcacccttgccgattacaacatccaagaggaatcaaccctccatctcgtgcttcgactaaagggtggcatgcaaatctttgacaagactttgaccgtgaagaccatcaccctttgagtggaatcctgggacaccatt

SEQ ID NO: 215617 - DNA, 332 bp, Glycine max
cttaatttccctctctttaacaaacgtcgtcggttcagctcgactctatcccaacgactcctcctggctcaacgcccacgcccctactggaggcgcgtgggatgcctttctcaactgtaccggttgtcaccggggcgacatgtacgactgactagccaattcaaaatgatactttgaacgattcggttgcttacctcacgcgccgacctcctagaatgtctccgatgaattcgacgactcgctcgaatgcgccatcaaaacttaccagaagaactatgacctgaacgttactggcgttctcaacgacgccgccgtgcagcagaccgggctgc

SEQ ID NO: 215618 - DNA, 459 bp, Glycine max
gccgccctttttttttttttttgtacgtcaaacaaaagatataaatttaaagcataaaaaatcaagaatttaggacaaaaggaaaaggcaccaaattcaatttaagtggacactttaactcaaaattatagaggaagacagtccaatatgaaaaatatagtaaaatcatctcaaacttggcatcttctctttgcacctaagacattgagaattctaagaatgttacacgcaagtcccatcacaacttctagcacttggatcagcacaaccttcaggaacagaaatatttacttgccaagtttgctttgcctccaattcaagattggaagaaagttcccctgttaatagcatcctcgttagcatttccaagtgcagcctcgttcaagtacttgtcagccaattggactctcttgacattctcttgttcttggacaagcatgttaccatacgtcaagagct

SEQ ID NO: 215619 - DNA, 487 bp, Glycine max
  unsure (1)..(487): unsure at all n locations
gccgcccttttttttttttttttttttttgcaaactaggcggatcctatgagtgtttggatgatcttatttaaggttcccaacaaaacactcactatcctaagggaaaattgcctaaaattattacacacaaatggaaggatggtaacctattggaggctcccaacttacttccaatgaaagacctttttgttacaaaatttgaaagcaaaacaaattgtggtggctattttatctttggtgttaatactcattacaaaattacaaaaaaaaagtcctcaattgtggtggctattttatcttatgtgtttcactcaatttggagtgcttcttagtccaatagctcttaaggtggttgaccccttgcttcttgactcaaattcttcaaggtatgacatcaatcctnctttccaattccctttgtgaagctccgcttataggtaaaatcttccctttntttttaccttaaaaggatactaattaacaac

SEQ ID NO: 215620 - DNA, 576 bp, Glycine max
  unsure (1)..(576): unsure at all n locations
ctaatagacacgaggactatttaaaaacccggaccgtcgtatcgttccaccggcgccgtcaacctccaaggctcgaaccaccatccttccactcaaccgcgcacttgcactcgtcggctcaagctaccaccgcagcacgcctcagccgccgccagttaacaagcatttgctcataaagaaggaaggaagatggtgtttgggcaagtagtggttggtcctcctggctctggaaaaacaacttactgcaatggcatgtctcagtttctcagtcttattggaaggaaggttgctggtatcaatttggatcccgctaatgattcgttaccctatgaatgtgctgtgaacatcgaggatctcgtgaaactaagtgatgtaatggtggaacattcgcttggaccaaatggaggtcttgtgtattgtatggattatcttgagaaaaatattgactggttggaagcaaaattggaacctcttctgaaagatcactacctactctttgattttcctggccaagtggaactttttnttctccattcaagtgccaagaatgtcatcctgaagctcataaagaaattg

SEQ ID NO: 215621 - DNA, 538 bp, Glycine max
ggccgccctttttttttttttttttttttttttccgctgaaacgagttcaatacatcattttaaaacataataaacagcagcacttaaaccagagatgcaaagcacaagttcaagggagacactgaacaaacagataagacatatgagaacacttcataaaagggattccccttagcaaccaccacgaaggcgaaggacaagatgcaaaggggattccttctgaatattgtaatctgccaaggtacgaccatcttccaattgcttcccagcaaaaatgagcctctgctgatctggagggataccttccttgtcctgaatcttagctttcacattgtcaatagtatcagagctttccacctccaaggtaatggtcttccctgtcagagtcttcacaaatatctgcatacctccacgaagcctcaacaccaaatgcagagtggactccttctggatattataatcagcaagagtacgaccatcttccagctgcttcccagcaaagataagcctctgctggtctggtggaatcccctcttt

SEQ ID NO: 215622 - DNA, 553 bp, Glycine max
cagcaatggcatcaatgactagcttacgtggttcctctcaggctgtgttggaaggtagccttggctccacacgcttgaatgtggggagtggaagcagggtggcctcagtcacacgtgcagggttcacagttagagcacagcaacaacaagtgaatggtggtgaggtacaaagtagccgtagggcagtgctgtcacttgttgctgctggtttgaccactggctcttttgttcaagctgcgcttgctgatgccaaacctatcaaagttggaccaccttccccaccttctggcggattacctggaacattgaactcagatgaaccaagagaccttaagctgccattgaaagataggttcttccttcaaccattgtctccaactgatgctgcacaaagggcaaaggaatcagacgaggaaattgttggcgttaagaagctgattgaaaagaaggcttggccatatgttcagaatgatctgtgtcttagggccgagtatctgcgctttgatctcaacactgtcattgctgcaaagcctaaggatgagaagaaatcact

SEQ ID NO: 215623 - DNA, 450 bp, Glycine max
ccgccctttttttttttttttttttttttttttttttttttttttttttttttttttttttttttttttttaagaggaacaaagcccaccctttgattttttttaagtttctggaatgaaattccaaccgtaacaaatcacagcttcccttacttttatataaccccacattctttcaaaatgggtgggaaaaaaaaaaaatggcctctcaataaattcaaacttttggatcttagggggaaaatgattcagggcccctgaaaaattgcttgaaactgaaacccacttttccattaggccccccattggaccttaaaaacccccattagccacatgacactccgaaaaaataaacaattactggtggttgcactttggagggggttcaccattaccagcctgtgccctttcactttttttaacaggaaaagacttttttttaggcttact

SEQ ID NO: 215624 - DNA, 450 bp, Glycine max
cctacctatcttgttgtggagaaagacagaacccttgcaacatttgcaattaatgccgtgtgcactcatcttggatgtgtcgtgccatggaatcaagcggagaacaagttcatctgcccttgccatggatctcagtacaatgacccaggactagtgctagaagacctgcttcattggctctggcattagcacattgtgatatagatgatgggaaggtcgtgtttgatccttgggttgaaacagatttcagaacaggtgatgctccatggtgggcttagactccttaaaacctctgttggcataatatatatttaaacatgaaattcaaacattctggtttgtattaatgcataaatatatttcgtaatcaaattgatattttgagaactgaagctaagatgaaaaagaacctgaacaggtaacttttttccgtgtcaaaaaaaaaaaata

SEQ ID NO: 215625 - DNA, 548 bp, Glycine max
gtcgtggtgatgtctcgactcgatcggtggccaagagccacatttaaaacttagcggtcatgccatacgtcggtttgtaaagaacattgcacctttgccatcattcagaaggctctctttctcggatctcagccgttcgtcgtcgacgcgaatcaacgaggatcttgcacaagtcttttgggtcggacttggttgattttcagctgattgagctgcgtgccataacacagaattttagcagcaatttcttgctgggtgaaggtggctttggaacagtgcataagggttacatagatgacaatttgaggctgggtttgaaggcacaacctgttgctgtcaagcttcttgacattgaaggtttacaaggacatcgtgaatggcttgcagaagtgatttttcttgggcagctaaggcaccccaatttggttaagttgattggatattgttgtgaagatgaagaacgattacttgtctatgaattcatgccacgaggaagtttggagaatcacctcttcagaaggctaacatcactgccatggggaacaaga

SEQ ID NO: 215626 - DNA, 582 bp, Glycine max
  unsure (1)..(582): unsure at all n locations
gatttaccaatgtggcggtaacgtcggagactcttgcactattcctttgcccaaatgggttgtggaggagattgataatgaccacgatcttgcatatactgatcaatggggaagaagaaactatgaatatnnatatccacttggatggtgattacttttgggccggtgcttcaaggggacgatcccccagttcaatgttatgctgatttcatgcgtgctttcagagacactttcaagcacctccttggtgataccattgtggaaatccaagttgggatgggaccagcaggtgagttgcgttacccttcgtacccagagcaaaatgggacatggaaattcccaggaattggtgctttccaatgctatgacaagtatatgttgagtagcttaaaagctgctgctgaagctcacggtaagcctgaatggggaagcacaggccctactgatgctggccactataacaactggccagaagacactcaatttttccgcaaagaaggtggtggatgggatggtccatatggtgaagttttcctcacttggtactcttagatgcttgttgaacatggtgacaggattctc

SEQ ID NO: 215627 - DNA, 436 bp, Glycine max
agtcggcggccgcccttttttttttttttttttttttttttttttttttttttttttttttttttaaaatcttaacccttaacgtttactaatatacaaacataacatttattacaaagggaagcccgaaatacagcaagggaaaactttcatccttaagaactacaactacaaggacaaacagttacctgaatttattatttctcgcagcatgaaagccacgatagacaggcaagtcaagcattatgatacatcagaccccaaaataccaacaacactactcaggtgagcagttattatatcgtactttcacatgaaagtgtcataaaggcagataaaagcatttacattcaacacacacgaccataaggctcaagcacaaggcaatagtatgacttaaacggtgacacatttcagcaattattcttaaaacact

SEQ ID NO: 215628 - DNA, 392 bp, Glycine max
agtcggcggccgcccttttttttttttttttttttttttttttttttttttttttttttttttttaaatttttggtccttgattttttttttttttctttctttccgcccaccgcgaaaacaaaccaaaattccccctcttggaaactgaaatccccaagagctgaaattacgagggcaaaatggggccacaaattattatttctggggataaaaactctttagaaaaaggtcttttccccctcccatttcttgcccacccctgagggccggccgcttttctcaaaaaaacagtttttaaaaaaatcttcctgttgagggcttttttaaggcggtttaaagaattttctttccacacacgcccccttgaggggcattccccagggagttttt

SEQ ID NO: 215629 - DNA, 446 bp, Glycine max
agtcggcggccgccctttttttttttttttttttttttttttttttttttttttttttttttttttttttttttgtttttggaaaaaaataggctcatccacataacaaaccaaccttgttactggggaaagattatccctgggggtggcaagagggcccacttaatttaaccatttcacaacaattggcacagcagaaatttttccacataacaaaccaaaagggtcgccttagttacccacagcctggacccccttggaattaatcaaatttggacatccggggattcaacctaggaaattgaaatcgattcaaacctaaatttggcctgccaataacctttgggttttgcaaatcggcttgggtccttgctttccggcacaaattgtgattccacaattttctttggtaaagattcagatttcgcaataagcatttaccggga

SEQ ID NO: 215630 - DNA, 457 bp, Glycine max
gctggaatttgctgcggggtttttggagaaggtgacactccggcttcactcgaggggactcctcgacccttcaggctccggcgttcggacattttacctttaacagatatctccgacatgcccatgccgccgacggaggctttacggaagcgtaccaagctcatcctcagggactgggataactcaattgaaaattcgcacgaattcactgggcacaaggtgacgaacaaggaatccgaagttgactacaacgacgacggcgcttcggaaactaatatcgtctctgcctcggaacgtgctgatgaagctcccatgttcggcgtgacgtccgcttgcggcatgagaagagacatggaagattccgtctcagtgcgggcttgctttacccactgcttacactactaccgcgtcttcgacggtcaccgttggtgtcatgttgcgactatgtgcaatgagc

SEQ ID NO: 215631 - DNA, 392 bp, Glycine max
cgttcttcttattttgctgctgtgcgttagcgtaaggtgaatgtctcacctgaaaatgacatgctgtggtggtaactgtggtagcggaagctcctgcaagtgcagcaacatctgcagaggctgcacagatgtacccacgacttgagctacacatgactcaaccatcaccgagaccttgttcatgggagtggcacctagcaaggctgaatttgagggtgctgacatggatgtgtccgctgagaacgatggctgcaaatgtgaaccaaactgcttctgctaccgctgcactagctagtgatgctgagggagcacaagctctcagcacagatagaccttaattaggaacaacgataaactattcatgtgtagctggaaacttatgtattacgtct

SEQ ID NO: 215632 - DNA, 468 bp, Glycine max
ggatgggtttcgttagcctgtgtcttctgtctgtatcagtatcaggtctgctccaacgcctagagcaccctgtcaaagctgatggctcacttagccttatggtcattggagactggggaaggaaaggaacatacaaccaatctcaagttgccactcagatgggaagggttgctgcaaagttaaatatcgactttgtgatatccactggagacaatttctacgatgatggattgactggtatagatgaccctgcatttgaaatttccttctcaaaaatctacactgccaagagcctccaaaagcaatggtatagtgtgttgggcaaccatgactacaggggtgatgttgaagctcaattgaatccaatccttcagaaaattgatcctagatggatctgccaaagatcatttattgctgatactgaaattgctgagttcttcttcattgattcaacaccttttgtggaca

SEQ ID NO: 215633 - DNA, 596 bp, Glycine max
atcaactcgtgctggaggtcttggtattaatcttgctactgctgatgttgtcattctgtacgatagtgactggaacccacaagttgacttgcaggctcaggatcgtgctcataggattggtcaaaagaaagaagttcaagttttccgtttttgtactgagtatacaatagaagagaaagtcattgaaagggcctacaaaaagcttgcacttgatgctctggtgattcagcaagggcgattggctgagcagaagacggtaaataaagatgagttgcttcaaatggttagatttggggctgaaatggttttcagttccaaggatagtacaattacagatgaggatattgatagaattattgctaaaggagaggaggcaactgccgagcttgatgccaaaatgaagaaatttactgaagatgccatcaaatttaagatggatgacactgctgaattatatgattttgatgatgagaaggatgaaaacagatttgatataaaaaaaattgtgagcgagaactggattgaccaccaaaagggagcggaacgcattactcgagtctgatacttaaagcaacatgcgccaggtgtctacaaac

SEQ ID NO: 215634 - DNA, 531 bp, Glycine max
cactggtgttgctgatttggttgatggggtatataaactgagtcacttaaccaagctggctcgagaaaataatacggctagcaagtcagttgaagcagaccgcttgcatactatgttccttggcatggcagatgcaagagctggcctcggtaaactgggagaatcgttgcataatatgatgacactagatgcatggccaggggccaagcaacagaggtttgcaaaggagactatggagattatagcacctttggccaatcgcttgggaatttctacttggaaggaacaattagaaaatttgtgttttaagcatctcaacccaagccagcatgacgagctatcatccaagcttgtggaatcgtacgatgatgcaatgattacttctgcaatagagagattagagcatgcacttaaagatgaaggcatatcttataatgtcatttctgggcgacataagagctcgtatagcatttattgcagaatgttcaagacgaaactgaccatagatgatatccatgacatttatgggct

SEQ ID NO: 215635 - DNA, 409 bp, Glycine max
ggtttctctgtttctctcttctcttgatctcatactttcactctcactcactattcttcatggatcataatatgtgctcacatatgaggacaaagatggcgataggatgcttgcgggtgatgttccctgggacatgttgattgaaacatgcaagaagctgaggatcatgctgagctctgaggccattggtctagctgcgacggctgtacgcaaaaaggcagagcatgaccttggcagctcctgtgttgctgtctatgcatctaactgtctgcgggactaaaagcttctgggctatcacggactacctaatcagaacgtggttgacttggaagctacaaatgacagcattcagggctgcatagaatctcatactatgctgccttaatgccttcatgcctgattatgactg

SEQ ID NO: 215636 - DNA, 534 bp, Glycine max
agtcggcggccgcccttttttttttttttttaacacatgagcagatccttcaaccacaacattaactcttttcaatctcgcatacataaaatatcgggactcccatagtcaagttcttggagttttgttaagttttaacatcatcttgaaaagaagcttactaaaacataaactccacgacaacataagacagacataataaaaaaaaaaaggattaaggcagcatatgatgagattctatccagtccaaaatgcctttatttattgcttccaagacaaccatgttctgatttgttcagacctgatagcccagaagcttttaaccccgcatacagtttgatggatagagaggaacacaggtactgcctaagccctgctcttacttttttcaacagccctgagagctagaccaatggcatcagaactcttcatgatcctcagcctcttgcatgtttcaataaacatgtcccacggaacatcacccacaagcatccaatcgccatctttgtcctatatgtaagacatattctgatc

SEQ ID NO: 215637 - DNA, 533 bp, Glycine max
gattggtggtaattgcagcctcactacaagcagctgctactttcatgcaacccaccatgttgatcaggagcaacactttgcatcaaaagtctactcagtccatttccaaggcttttggtttggaacctgtgggagctaaaaaggtcacatgcttcctttatgctgatcttaacgacttggctcacaagtgtgttgatgctaccaaaattgcaggattcgcccttggcacctttgccctagctgtctctggggctagtgctgaaggtgttacaaagaggctaaccttcgacgagatccagagcaagacctacttggaagtgaaagggacaggaacagcaaaccagtgcccaacaattgatggtggattggactcatttgccttcaagccggtgaaatacaatgccaagaagttgtgccttgagccaacttcattcacagtgaatgccgatggtgtggccaagaatggctcacttgagttacaaaacacagagctcatgacacgtgtgacctacactctggatgagaatgaggga

SEQ ID NO: 215638 - DNA, 424 bp, Glycine max
gtcggcggccgcccttttttttttttttttttcaagattagcttattatatttatgcaattgcaaactgccgggaaaaggttgaaaattcacaagagcattatttatagaatagtagctcattacaaccatatgacagaaccgtttattaaagggaaataatgacacgcttgtttaaatccatatatctgaagaacagtcaccaccaggatatctcatctcatgggcaagagaaggaccatcaggctcagttccaaagtccacaaagaagttggggttgatcttcagtccacctttctcagtatcaacatcaatccgtattatgtgggagcctttctggacaagctctggataaaattgtctgtcccaagtactaaataacgagttgcgagcatagagccgcttcccatctaatcttaattgaa

SEQ ID NO: 215639 - DNA, 448 bp, Glycine max
gaaggttggtgagcgtgtccgatctacaagagcagccggtgatcaaggcccattatatccttgcactgctggagtctttgcggcattgatgatggcccacattgcgatcctgaggaagaaagggcatccctactcgcaaatcatcaatgagagtgtcatcaaggcacatgactctttgaatcctttcatgcatgctcgcggcgtttctttcatggatgataactgttccaccacagctaggatgggttcgaggaaatgggctccacgacgtgactacatcctaacccagcacgccatggaggctgtggacaatggaactccagataacaggggcttaatcagcaacttactgtacacccagtgcactgagccatttgagtcagcgcttaactgagacccacaggagacattgttgcgccaccagatgcagactatgttcgtccggagt

SEQ ID NO: 215640 - DNA, 508 bp, Glycine max
gtcggcggccgccctttttttttttttttaatgggaagtactagcgtgactcatttaaataggacaccaaggaacgttgctcagtggctgaacacaggcgggtacaaactgtaaaatgacaatacaacttacacactagcatccaatcatgaaaacccaaactaacaagataactgcagttctgagaaatctgaaaaagattcgaagggaaagccataattgcttttaagttctaattgctagaacgcaactccggacgaacaaaggctgcatatggtggcacagaaatgtctactgtgggtctcagttcagcgcaaactttaatggctccgtgcactgggtctgacaggaagttgctgattaagtccctgttaacaggagttccattgtccacagccaccatggcctgctgggttaggatgtagtcaaatcgtggagcccatttcctcgaacccaagctagctgtggttgaacagttatcaaccatggaaggaacaccacgagcatg

SEQ ID NO: 215641 - DNA, 516 bp, Glycine max
aatctttctgcaccatcgttctccatttttggctttacaaaaccactgtgtctgattaagggttctttaatatttccaatatttcttgtagtgaaaaagttgttagctaaaagaagaccaagtttttggtgttgtacaaggaagagacgaattaacatgaaaattcagtgtgacgtgtgtgagagagctccagcaacagtgatttgttgcgcggatgaggctgctttgtgtgccaaatgtgacgttgaagttcatgctgcatacaagcttgcaagcaagcaccaaagacttcttgttcaatgtctatcaagcaagcttcccacatgtgacatttgccaagacaagccagcattcatattttgtgttgaagacagagcactcttctgtcaggattgagatgaaccaatttattcagccggaagcctttccgcgaaccaccagcgcgttcttgctactggtattcgagtggcctcgagttctaattgcaccatcgaccatgaaaaaagtcactcggag

SEQ ID NO: 215642 - DNA, 543 bp, Glycine max
ttgcaattgaagttgaagtcttgcccttctctcttcaactccaaacacaagacatcatcatccatggctgcctccgtctccactgtcggagctgtcaacagagctcttttgaacctgaatgggtctggacctggggtttcagctcccagttcatccttctttgggagcagcttgaagaaggttattggctcaagggtccccaacacaaagatttcctctggaagcttcaagattgttgctgtagaagagaagaaagagattgaagagacccagcagaccgacaaggacagatggaagggtcttgcctatgatatctcagacgaccaacaggacatcacaagaggaaagggtttggttgactcccttttccaagctccacaggatgctggaactcactatgctgtcatgagctcctacgagtaccttagcactggacttcgccagtacttggacaacaacatggatggattctacattgctccagcttttatggacaaacttgttgttcacattaccaagaacttcatgaccctgcccaacatc

SEQ ID NO: 215643 - DNA, 413 bp, Glycine max
agtcggcggccgcccttttttttttttttttttatatatatatatatgtatctatgtatatataaaaatatgtaatgctcaacacttgcaagacatgtttttccagtaaaaagtaatactgaagatattgcggaaacctacacgttaaacagaacagtaacagcaacaacacaaattacatttacatctcttacacatgaataagccaagaaaattaagaattgcctctgatcctataaaagattatatatatattctccctctaactaagctctcgctatcttttaaaacggagagtagaagagggttgtacagaatgctgtgcagtgttcttcacatactagagcctttgcttcacccgcctcccatttatatcactgccatcaagtagggcatcattcctatgattgcac

SEQ ID NO: 215644 - DNA, 522 bp, Glycine max
ctggattggagatcacatatctgctatagctgccggagccttttaggttcatcttcacttgctttgctgctgttcccctcatagcgtggatagctctgtcactgacaaatgccattgtaaaagactttgagaatttaaagggcccttgtccgaactgcggatctgaaaacacctctttctttgagactatacttccaatttcaaatggcggattcaccaacactgtcaaatgctccaactggggcactgcaatggaatatgattcaacttcaagatggattacattaccacaaggaagtaacgcctgaggggaagtattgcctgaacatcatatgtatagatccagcaatggtagatcattaatagcagttcttgtgagagtgacaaatttatcatttagcaaatcgtcatgttcttccgcaaatgaccttcaagtcatgttatcactatcacacacaattggtgtcatctcaatttatgtgccaccatcctacttgtaaagataagggctttggatatata

SEQ ID NO: 215645 - DNA, 467 bp, Glycine max
gatattatgtatagatggagccaattgatcatggaagccaacctgaaaaggaaaaatggaagaggcaaggccacaacagaagtaagaggagccttagcaggaacatgtttggtctcttgcggacgattacattgcacttgacacgaggttccccaccctctgtacaagcattacaggtgaaggtatctatggccaacctgcgtagcgtcagattctgctgctggactcaagaccgactgaggatgataggctaacatactgagaattggactatgcagaatctggtatacattgacccagctcaacaggtttttagctattcgatcgtggatgggactgtaggatttcactcctacgttgaaactatgaaagtgctgccaatggctgatgggagagagactgtgtggctatcagaggctgaacctgacgaagggtggaaactggagcatcttgattacttatagaca

SEQ ID NO: 215646 - DNA, 560 bp, Glycine max
gatattatctatagatggagccaattgaacaaggaagccaacctgaaaaggaaaaatggaagggcaaggccacaacagaagtaaaaggagccaaagcagaacaagtttggcctcttttggaggatttctttggacttgacaagtggttccccaccctctctacatgcattacacgtgaaggtatctatggccaacctgcgtgtgttcgcttctgctctggtttcaagacccctgtggatgatggcaaacatactgtgaattggactaagcagaatctgctatacattgacccaactcaacaggtttttagctattcgatcgtggatgggaatgtaggatttcactcctacgttgtaactttgaaagtgctgccaatggctgacgggtgtgagattgagtggctatatgaagttgaacctgtcgaagggtggaaactggagcatcttgattacttcatagacacgggctcgcaggtcatggctcagaggatgcaagcagctttgaagacaatggacgaagcagtattcatggcttaaaagttaggacaaaactcatatact

SEQ ID NO: 215647 - DNA, 486 bp, Glycine max
cctaattgctatcaatattcaatattctatactatactttattcttattcttccagttatatggttagtatttgctaatagctcccatcaaaggcccaaaaatgggtaccatcgttgaagcagataacacatataccaagatcctaggaagacggccagtcttttattatggcatgggacacatgctcaatgacataactgctgcttgttgggtcacatattaattattgatctagacagatattggactttcaccaaggaatgcagctgttgtgatgctttctggtcaagtggctgatggatttgtcaccatatttgttggtgaactgacacgtttggacactctaagatatcgcatggtgctggatctttattggtggcactttcattttcttctgttttcggtggttgtgtaccatgcaaactgggtagttacgattcaggtactcttgtaactttgagttacaacgtgtctgcagcaatctt

SEQ ID NO: 215648 - DNA, 543 bp, Glycine max
gctggaatttgctgtggtgttgctggagaaggtgacactccggctccactcgagcgcactcctcgccccttcaggcgccggagtttggacatcttacctttaaaatatatcgccgacatgcccatgccgtcgacggaggctttacggaagcgttccaagctcaacctcagggactgcgatcacgcaattgaaaattgcgacgaatccactggacacaaggtgacgaagaaggaatccaaagtagactacgacgacgacgtcgcttcggaaactaagaacgtaactgcttcggaagttgaagaagaatctcccaagctcggcgtgacgtccgcttgcggcaggagaagagacatggaagattccgtctcggagcggccttgctttacccaaagcttacactacttcggcgtcttcgacggtcacggttgctctcatgttgcgactatgtgtaaggagcggctacacgagatcgtgaatgaagaaattgaaagcgcgcgcgagatttggagtggaactgacatggagaacgattcctcgctggac

SEQ ID NO: 215649 - DNA, 485 bp, Glycine max
tcttgttgccttcatggccaagccagtgtccattgaggtatggaacccaagtggcaaatacagagttgtcagcaccaaaccaatgcctggaactcgttggatcaatcttctcattcaaaatgatgttcgccttgaaatatgtaccgagaagaaaacgattttgtcagttgaagacatcattgctttgattggtgataagtgcgatggagttattggacagttgactgaagactggggagaagagttgttctctgctttgagcaaagcgggaggcaaagctttcagtaacatggctgttggttataacaacgtggatgttgatgctgcaaacaagtatggtgttgctgttggaaatactcctggagtgctcactgagacaacagcagagttggcagcttcactaactttggcagctgctagaaggatagttgaggcagatgagttcatgagagcaggattatatgatggatggctacctcatctat

SEQ ID NO: 215650 - DNA, 576 bp, Glycine max
  unsure (1)..(576): unsure at all n locations
tcttgttgccttcatggccaagccagtgtccattgaggtatggaacccaagtggcaaatacagagttgtcagcaccaaaccaatgcctggaactcgttggatcaatcttctcattcaaaatgatgttcgccttgaaatatgtaccgagaagaaaacgattttgtcagttgaagacatcattgctttgattggtgataagtgcgatggagttattggacagttgactgaagactggggagaagagttgttctctgctttgagcaaagcgggaggcaaagctttcagtaacatggctgttggttataacaacgtggatgttgatgctgcaaacaagtatggtgttgctgttggaaatactcctggagtgctcactgagacaacagcagagttggcagcttcactaactttggcagctgctagaaggatagttgaggcagatgagttcatgagagcaggattatatgatggatggctacctcatctatntgttggaaacttgctcaggggcanacaagtggtgttattggagctggtcgaattggatctgcttatgcaagaatgatgggttgagggttc

SEQ ID NO: 215651 - DNA, 494 bp, Glycine max
ctgtactacttgttctatataaattctacccatcccttgctctcatgtcacattgtatttgcactacgaccatttcaggaagaaagaagtgcaatggacatcggaacctatggctatcctacaccagcagtgaaaaagattgagtcttactatgatgtgccagagggagtggatattcggggaagatatgatgcagagtttgcaaaaatcctcacaaaagatgctttgaaattcgttgctgacttgcaacgtgagttcaggaaccatatcaagtatgcattagagtgcagaagagaagcaaagaagaagtacaatgaaggggctcttccagagtttgatcctgccacaaggtacatcagagagcaagagtgggtgtgtgcacctgttccaccagcagttgctgatagaaaagttgaaatcactggccctgtggatagaaagatggtcatcaatgctctcaactctggagctaaagtctttatggctgattttga

SEQ ID NO: 215652 - DNA, 604 bp, Glycine max
atcaagtctgatggtattgctggcctttatcgtggtttcaacatctcatgtgttggaatcatagtgtaccgtggtctttactttggaatgtatgattctctgaaaccagtggtcttggttggtggattgcaggatagtttctttgctagttttcttttgggatgggggatcacaataggtgccggcttggcctcttaccccattgatactgtgcgtagaagaatgatgatgacatctggagaagctgtaaaatacaagagctctttggaagcattcaagataatcgtcgcaaaagagggtactaagtcactctttaaaggtgctggtgcaaacatattacgtgctgttgcaggtgctggagtgcttgctggttatgataagctacagctcatcttgttcggaaagaaatacggttctggcggtggaagttaatatacagataatgatgacgacaactatctgaggcaatgatgttgcttcccctttgctttgaatcatttggatgaataatagtgggtttggagtttccccgatgtaagggctttatattaacataacatagttttgcaaaacttgattttagttgcttatacatgtcttaagc

SEQ ID NO: 215653 - DNA, 458 bp, Glycine max
ctgcattgcagatcacatatctgttaaagctggcagagccttatacgctcattgtcacttggataggtgctgatcccctaattgcgcggatcgctatgatactgacagatgccattgtataagactttgtgaatttagagagcccttgtccggactgcgcatctgatgacacctggatctttgagactacacttggaacatcaaatggaggtttcaccaacactgtcatacgctacatctgaggcactgcactggcatgtgatgcatctacaagatggattacgataccataaagcatgtacctgccagcatggacgtctgcctgctaatcatataaagctgaccacctgttggatatcgattttagcactgatatgtaaagcgacaagcctatcatggacgaaaatcatatgctctttcgctcatgaactggaagacctgtcaccactatcatacac

SEQ ID NO: 215654 - DNA, 347 bp, Glycine max
tcggcggccgcccttttttttttttttttttttataggtacatatgaacccttgtatatatgaaaatcagtggtgctcaacacttgcatgacccgcatttccagacaacagccctactgacgattttgcggaaccctccgcgttatacattccaaggccagctacaacccggggaacccacacaggtcttacacacgatgaccctacgattttttagagatgcctttggggctctatgcgattatatctataccctacatgtagcttaggtatcactataccctagctcggaaagcttatgaggggcctacaggatgctgggcagggaggtttacttactcgatgct

SEQ ID NO: 215655 - DNA, 479 bp, Glycine max
gatattatctatagatggagccaattgaacaaggaagccaacctgaaaaggaaatatggaagggcaaggccacaacagaagtaaaaggagccaaagcagaacaagtttggcctcttttggaggatttctttggccttgacaagtggttccccaccctctctacatgcattccagctgaaggtatctctggccaacctgggtgtgttcgcttctgcgctggtttcaagacccctgtggatgatggcaaacaaactgtgaattggactaagcagaaactgctatccattgacccaactcaacgggtttttagctattcgatcgtggatgggaatgttcgatttcactcctacgtttcaactttgaaggtgctgccaatggctgacgggtgtgagattgagtggctatatgaagttgaacctgatgaatggtggaaactggagcatattgattccttcatagacactgtcttgcatgtcatg

SEQ ID NO: 215656 - DNA, 515 bp, Glycine max
gttaaagagaggactatatatggagattcatactatggctctcacgtgaagcaatatggtgatgtaaggcttaacctaaatgttctcttccattatccggatacatatcctgctaatgataatatcacttttcgggatgaaaacttcttatggtcaccttcaaaaccagtcaaccaacgtgatgctgatctcatccatttttgggatcagtctcgcaaagcttctgagggttctctcatgaaacatacagctcagaaactagttatggacacaatgtctcacagaatgcctgtacgacaacagagtaaaactgattgggaagcttatattgcgcattgaaaagggtccagaaatgactctcgctgttagaccggctggatcggcacttgttgatgactggcactagctgaaaaccatggtgacgacttttgagacacattgcggatccttgtctcaatacaggatgaaacacatgacgacctttgcaaacatctgcgatgtatggataaagaatg

SEQ ID NO: 215657 - DNA, 592 bp, Glycine max
  unsure (1)..(592): unsure at all n locations
gtaagttgcagaatagtttcactgtgaattttgcttcgtttcacagtgactccgacattgtagtgagagaagccctttgtatttttgtttctctctctcttttcctcgtaattttatttttgagataactaacaagtctttgcaaattgcaacttggttgctgctgttggctcaatttctcgttttctctctctacacccaactcaccttcagtttctgttttctgccgactagtttgaccagtttatggttcttgcacgcgagtactgaaaaccagctacaatgaagaaggccattggtcaaactgttagggaacttaaaagagaagtaaataagaaagtgttgaaagttcctgggatagaacagaaggttcttgatgctaccaacaatgaggagtggggtcctcatggatcacttcttgcagatattgcacaggcatccagaaattatcatgaaaacttaatgatcatggcagtaatctggaagcggattaatgacactggcaagaattggcggcatgtctacaaggctttgcagtattagaatacttggtggctaatgggtcanagcgagtcatagaggaaatagagaa

SEQ ID NO: 215658 - DNA, 514 bp, Glycine max
gtaagttgcagaatagtttcactgtgaattttgcttcgcttcacagcgactacgacattgtagtgagagaagccctttgtatctttgtttctctctctcttttcctcataattatatttttgagataactaacaagtctttgcaaattgcaacttggttgctgctgttggctcaatttctcgttttgtctctctacacccaactcaccttgaggttctgatttctgccgactagtttgaccagcttatggctcttgcactcgagtactgaaaaccatctacaatgaagaaggccattggtcaaactgttagggaacttaaaagagaagtaaatcagaaagtgttgcaagttcctgggatacaacagaaggttcttgatgctaccaacaatgaggagtggggtcctcatggatcacttcttgcagatattgcacaggcgtccagaaattatcatgaaaagcttatgatcatggcagtaatctgcaagccgattaatgacactggcaagaattggc

SEQ ID NO: 215659 - DNA, 464 bp, Glycine max
ctgtgaaggacaaggctgattttgatgagcataagaagaaagtggtggccaacagtgcatttgagaatcctagtagaaccaccgacaagaacaacatcatggtcggagctcttgttcatattagcattccgcaaacacttctacacgggctccatgcacttgctgaataggaccatgttaagctcttcgaaacgggcacggatgatggttgtgtagaagacaatgccctcatacaaggaatcaatctcaatggtggcaagagcagtgtaagagagagttctcttggccctctcacatgctgatctcaacctcctcaatgctctggcatcttcactaatatgcttcttgtacttcctctggaatccctgaacaaaatggttcaccattctgctatcaaattgttcacgtgccaagagagtatcaccagcagtggctatcacttcgaaaataccctgctcaatggt

SEQ ID NO: 215660 - DNA, 563 bp, Glycine max
  unsure (1)..(563): unsure at all n locations
tcttgttgccttcatggccaagccagtgtccattgaggtatggaacccaagtggcaaatacagagttgtcagcaccaaaccaatgcctggaactcgttggatcaatcttctcattcaaaatgatgttcgccttgaaatatgtaccgagaagaaaacgattttgtcagttgaagacatcattgctttgattggtgataagtgcgatggagttattggacagttgactgaagactggggagaagagttgttctctgctttgagcaaagcgggaggcaaagctttcagtaacatggctgttggttataacaacgtggatgttgatgctgcaaacaagtatggtgttgctgttggaaatactcctggagtgctcactgagacaacagcagagttggcagcttcactaactntggcagctgctagaaggatagttgaggcagatgagttcatgagagcaggattatatgatggatggctacctcatctatttgttggaaacttgctcaaggggcaaacagttggtgtaattggagctggtcgaatnggatctgcttatgcaagaatga

SEQ ID NO: 215661 - DNA, 495 bp, Glycine max
catttctccatttccattttctctctcacttttcaagaatcgtaagctatgggaaagtcttacccaactgtgagtgctgattaccagaaggccgttgagaaggcgaagaagaagctcagaggcttcatcgctgagaagagatgcgctcctctaatgctccgtttggcatggcactctgctggaacctttgacaagggcacgaagaccggtggacccttcggaaccatcaagcaccctgccgaactggctcacagcgctaacaacggtcttgacatcgctgttaggcttttggagccactcaaggcggagttccctattttgagctacgccgatttctaccagttggctggcgttgttgccgttgaggtcacgggtggacctgaagttccattccaccctggaagagaggacaagcctgagccaccaccagagggtcgcttgcccgatgccactaagggttctgaccatttgagagatgtgtctggcaaagctatg

SEQ ID NO: 215662 - DNA, 526 bp, Glycine max
aaaaacaaatttaatatttaatcattattgattcaatcactgttattcaaccaatacctccattgactcaactaccaatccggttttaaaaacattggtttaatgagatactggatatatatggtacaatcgattatttgttgtatacaaagactgaggcaggacggtacagtgaggctgacaaaattatcacagtttaccctgctcttgcagttgttcctctgtcacaaagaaggcatggaaaccatatggaactctatgcgtgaattcgacaactgcaacaggatctgctgacattgcttttgcattgatgacatgcacaaacgattttccggtattttcatcgtgtacaaaacaaatcaagtatccatcatcttcttcagaatcgggaccagggacacgagggacataaacagcttccgagccatactttgctagtcccaagtcatagagaccctgaacatttcctactacttcaagttttgtttctccattatcccggtcagcttgcaaatcatatttaata

SEQ ID NO: 215663 - DNA, 462 bp, Glycine max
gtctcgaatcccggctttaggtggtgggtttcctagagttgttgcaacatggggtctgactatagttctcacttacttgaactataggggtctgaccattgtgggatggcttgctaggtgtgtgccggctctcatactccttccttgtgtggtgatcggattattggcgattccagaccttaagccttccacatggacagtgacaaccccggatgattttaactggaattcgtctcctaatactctattttggaatctctactattgcgattacatatgttctcttgctggagaagttgcatatgcgcataaaactcttccgaatgctttgtgtcatgctgctatcctagtaggtcgagggtactcctgtgctcttctaattggtactgctgctggtcctgcataccgtgatgtgttgaccggttgctacttgtccgatcttgctctgattatcagacgaac

SEQ ID NO: 215664 - DNA, 439 bp, Glycine max
gctgtaatagctggcggaagctattcggacggtcgtatcctggactttgatgtacggatcggaattgtgagtcatattatgagagcctatcctgaagctgaacgagccgagagcgatgtgcttctggggatatttcaaggatcggaattgtcaagagatattgatgcaaacgtggtcatatatgaattggaactgacatgtggtgaagagtgcactatacagactacaacgtggacagatcttcctatcatgtgccctggacactatgccaatggagcagatatgcctgcaacagctgacgcgcctgatctggccgtcgttgtgaatgatgaattgactagccgggagcctgctgacatggcagctaaataacacgacgaggagcgactagagtggcctaccattgagagacttcctgagcgagcaacgtcgatgaatg

SEQ ID NO: 215665 - DNA, 493 bp, Glycine max
catggcactcatcgaactacagacatgtcgcagtgtcacgtcgtagcgtaacgcctcggaatgtcggcgtcgagcgtgctcttctgatactcactttatctagttcagagtcttgaacggtgcacttctcaggtcacattcatcgcgattgggtggactgctgtgtccctctacattagtcgtggactagctactgccaatcgcaactgccattgtaaaagactctgagagatcctaggggacacgtccaagctgcggtactgaatacacctttttctttgggactatacttccaatttcaaatggcggatccaccagcactgtaccatgctccaaccggggcacttgaatggactctgattcaactccaggattgattacatttccagaaagaagtaccgcctgattggaagtatgcctgaaaatcagcttgataggtccgcctttgggagatcattaattgcagttcttggctgagtgacaaatttatcat

SEQ ID NO: 215666 - DNA, 523 bp, Glycine max
  unsure (1)..(523): unsure at all n locations
gattggtggtaatggcagcgtcactacaagcagcagctactttcatgcaacccaccaagttgagcaggagcaacactttgcagcaaaagtctactcagtccatttccaaggcttttggtttggaacctgttggagctaaaaaggtcacatgctcccttcaggctgatcttaaggacttggctcacaagtgtgttgatgctaccaaaattgcaggattcgcccttgccacctctgccctcgttgtctctggggcaagtgctgaaggtgttccaaagaggctaaccttcgacgaaatccagagcaagacctacttggaagtgaaggggacaggaacagcaaaccagtgcccaacaattgatggtggattggactcatttgccttcaagccggggaaatacaatgccaagaagttgtgccttgagccaacttcattcacagtgaaggccgagggtgtggccaagaatgctccccttgagttccaaaacacanagctcatgacacgttngacctacactctggatga

SEQ ID NO: 215667 - DNA, 528 bp, Glycine max
  unsure (1)..(528): unsure at all n locations
ctgtttcccgccatatatccaataagctttaaccatgtctgcctttgttggaaagtacgcagatgagcttatcaagaatgccaagtacatagccacacctgggaagggcatcttggcagcagatgagagcactggcaccattgggaagcgcctatcgagcattaacgttgagaacattgaggccaaccgccaagctcttcgcgagcttctcttcaccgctccagatgccctccaatacctctctggtgtcatcctctttgaggaaactctttaccagaaaacctccgatgggaagccttttgctgaggtccttcaagagaacaatgtcatcccaggcatcaaagtggacaagggtgttgttgagttggctggcacaaatggtgaaaccaccactcagggattcgactctctcggagctcggtgccaacagtactacaaggctggtgcacgcttcgncaagtggcgtgcagtcctcaaaattggcccaactgagccctctgagctttccatccagcataatgcacaggg

SEQ ID NO: 215668 - DNA, 536 bp, Glycine max
gcattttaaaaatgaaaaacttcttaatgctttcatttcgcaaaccccccttggacggattggagaagcagaggaagtgtcttcattggtggcattcctctgcttacctgcagcctcttacataacaggacagaccatttgtgttgatggtggattaacagtgaatggtctctatataaattagagaagtactaccaacacactctctaacacacttctcttgacacatattctaccataagttacaaataataaaaaattacaaaatcatgaaaataagatctaggacccatatatttttgtgatatctaaaaaatttcaagcaataaaaaaaatgtattgaaaagagtgtataagataatgtgtcgttagcatttttatataaactatgttaagagcaaggtctgatgcatacgttgctagttattatattagtattgagaataaatagctgaaagtcccttggttcaatctatatcatttgggaggaggaatttgctgagaataaattcggtgtccacgatccaatcatcatg

SEQ ID NO: 215669 - DNA, 532 bp, Glycine max
  unsure (1)..(532): unsure at all n locations
tgacaataagatatttgatcttggaagaaagatttggacatcaaagggagaagaaaaagaagctgccaaaaaggagttcatagaggcccttaaattattggaggaacagctgggagacaagacttattttggaggagacgatctaggttttgtggatatagcacttattccattcgacacttggttcaagacttttggcagcctcaacatagagagtgagtgccccaagtttgttgcttgggccaagaggtgcctgcagaaagacagtgttgccaagtctcttcctgatcaacacaaggtctatgagttcattatggacataagaaagaagttcgacattgagtaggttcatgttggattttaatagccatagtgacgtattgatcattcttggcctttcaactaaatagtatttgcgtagtaaattaaaggcacttggatgtaccaaacttcatgcttcttgtangagtgcgtatggtttaaaaatgttctgatgtatctttcatgtgtctggtggttttgtaacagaata

SEQ ID NO: 215670 - DNA, 523 bp, Glycine max
  unsure (1)..(523): unsure at all n locations
tgaagaggaaaagcttgctgaagggataaaactttatgctatagcagccactgccacttcaaagcggacaattctttctgatcttgtaactgtttatgcaaagggtgggaagactatagtttttacacagacaaaaagagatgctgatgaagtatcattgtcattaacaaatagtataatgtctgaagcactgcatggtgatatatctcagcatcagagagagagaacattgaatggtttccggcaaggaaaattcacagtgcttgttgccactgatgttgcagctcgcggacttgacattcccaatgttgatttgattatccattatgagcttcccaatgatcctgagaccttcgtacatcgctctggtcgtactgggcgtgcaggaaaacaaggtaatgccattctgttgtacaccagtagccagcggagaacggttagatcccttgaacgtgatgtangctgcaagtttgaatntgttagttcaccagctatggaagaggttttggaggcatctgctgag

SEQ ID NO: 215671 - DNA, 475 bp, Glycine max
gatgggtggtgatggcagcgttactacaagcagcagctactttcatgcaccccacgaagttgagcatgagcaacactttgcagcaaatgtttactaagtccattttcaaggctttgggtttggaacctgttggagctaaaacggtcacatgctccattgatgctgatcttaaggacttggctcacatgtgtgttgatgctaccaatatctctggattcgaccttgccatctttgacctcgttgtctctggggcaagcgctgacggtgttgccaagaggctaaccttcgacgtacttcagagcaggacctacttggaagtgatggggaccggaacagtttaccaatgcccaacagttgacggtagattggactcatttgacttcaagaccaggaagtacattgccaagaagttgtggcttgatccaacttcattcacagtgaaggccgagggtgtggaccagattgctcccattga

SEQ ID NO: 215672 - DNA, 345 bp, Glycine max
attagattgatgctgctctcttatatatgggcgtataaaccataacttcttaccctgtgacgctgtctcccatacatcatggctgggcgatagcccaagatcggaccttagacatcacataccaaacttgctgtgcacaaggatggcgccaccacctagactcagtttccggccaggacagggactgcttgagaatattgtcacacgcaagcgacgcttccgagtgcacaattcgtgttcatggaggaactcatgaatgtgagcaaccaggaacattccacaacaaagcacctattgctgtggtcaaagctgatgagacatgataggaagacgatgcctgatgct

SEQ ID NO: 215673 - DNA, 549 bp, Glycine max
gcattttaaaaatgaaaaacttcttaatgctttcatttcgcaaaccccccttggacggattggagaagcagaggaagtgtcttcattggtggcattcctctgcttacctgcagcctcttacataacaggacagaccatttgtgttgatggcggattaacagtgaatggtctctatataaattagagaagtactaccaacacactctctaacacacttctattgacacatattctaccataagttacaaataatagaaaattacaaaatcatgaaaataagatctaggacccatatatttttgcgatatctaaaaaatttcaagcagtaaaaaaaatgtattgaaaagagtgtataagataatgtgttgttagcatttttatataaactatgttaagagcaaggtctgatgcatacgttgctagttattatattagtattgagaataaatagctgaaagtccctcggttcaatctatatcattcgggagggggaatttgttgggaataaaattgtatgtccacgatccaatcatcatgtaatcattttaa

SEQ ID NO: 215674 - DNA, 543 bp, Glycine max
gcattttaaaaatgaaaaacttcttaatgctttcatttcgcaaaccccccttggacggattggagaagcagaggaagtgtcttcattggtggcattcctctgcttacctgcagcctcttacataacaggacagaccatttgtgttgatggtggattaacagtgaatggtctctatataaattagagaagtactaccaacacactctctaacacacttctattgacacatattctaccataagttacaaataataaaacattacaaaatcatgaaaataagatctaggacccatatatttttgcgatatctaaaaaatttcaagcagtaaaaaaaatgtattgaaaagagtgtataagataatgtgttgttagcatttgtatataaactatgttaagagcaaggtctgatgcatacgttgctagttattatattagtattgagaataaatagctgaaagtcccttggttcaatctatatcatttgggacggggaatttgctgggaataaatttgtatgtccacgatccaatcatcatgtaatca

SEQ ID NO: 215675 - DNA, 538 bp, Glycine max
  unsure (1)..(538): unsure at all n locations
ctgtggtgtttctgagctgggtagggtttactccttctcgcgccaacccagttgcgagcttggaggagaagatccttgccgtggccaacgagtataaggccgtgaaggcctttctggtcgcttacagcaccgttgctgaggattgggctaatttttcgccacctatcttctttatcactctccatggccttctgggtaactctgcggttaagggagcgtccattaaggtcattagtgacgccaccgcctcctttcccgccaagtggatccctgaaattttattgttggctgcctctaaatgaatgaggtatgacatgaaaggtgaacacgtatctcagaagtgttatgtgatatgtatgatgtgtgaatcttgaaataatatcttaagggcaagaagttattagttaaaattattagaggtagttttatgaatgggtcataataataaatgctagctatatgtaccactatggaataagattgggtcataataataaagctagcttgctagctatatggactatacgntactatggaa

SEQ ID NO: 215676 - DNA, 386 bp, Glycine max
ctgagatgttaatgatctgggtagggtttactccttttctcgccaacccagttgcgagcttgaaggagaagatccttgtcgtggtcaacgagtataaggccgtgaaggccttactggtcgcttacaacaccgttgctgaagattgggctaattttacgccacctatacttctttatcactctccatgggctcttggtgaactcttgtgttaacggagcagtacatatagcgtattagggacgccaccggctactttcacgcaagtggatccctgagatgttattgctggctgactttacatgaatgatgtatgacatgaatggcgaacacgtatctcagaagtgctatgagatatgtacgatgtgtgaatcttgcaataatatctt

SEQ ID NO: 215677 - DNA, 496 bp, Glycine max; identical to SEQ ID NO: 211487

SEQ ID NO: 215678 - DNA, 559 bp, Glycine max
  unsure (1)..(559): unsure at all n locations
gccctccttattgttgatggagtgtcttccatttgtgctcttgatttccgcatggatgaatggggagttgatgtggcaataactggctcccagaaggccctttcccttcccactgggataggtattgtggttgcaggccctaaagctattgaggcctcaaaacatgctaaatcacttagagttttctttgactggaaagactacctcaaattctaccagctaggaacctattggccatacactccttccatacatttgctgtatggtctgagagctgctcttgatctgatttttgaggaaggactcgaaaatgtgatcgcaaggcacagtcgtttaggcaaagcaaccagacttgctgtagaggcatggggtttgaagaattgcacccaaaaggaagagtggtacagtgacactgtgactgctgttcttgttcctgcttacattgatagtactgaaatagttaggagggcatggaagagatccaatntgagcttangtcttggactgaacaaagttgctgngaagggtttcagaattggacatcttggccacttgaatg

SEQ ID NO: 215679 - DNA, 487 bp, Glycine max
acaggacaataaaagaagcaatgcattaaagctgaaagtagaaagtacgttcatcttcaaaggagtgtaaaagagggtaatatatattttacagaatttctgaaagagcagaaaaaggaagtaaagacaagaatgatttgtgactcaaatcctggaagggatcataggaatagtgttctgtaagtatgcactggcagcagcaactccacttccaagctttacaggataacccacatctttgagtatcatctctacaccagctagacatcccaacagttgcaactcattcaagtggccaagatgtccaattctgaaaaccttcccagcaactttgttcagtccaagacctaagctcaaattgtatctcttccatgccctcctaactatttcagtactatcaatgtaagcaggaacaagaacagcagtcacagtgtcactgtaccactcttccttttgggtgcaattcttcaaaccccatgcctctaca

SEQ ID NO: 215680 - DNA, 569 bp, Glycine max
agataagtacttttgctacttatacgatggctaagtgcttttcattctctctctctcgttatctgatcttttcgtttgtgctgctacagacacaaacggggaatgggtcaaatgcaacaccgatcaagttgagagtaggggtacccaagagagatggtttccgccaatttgtggatgtagtaccttcggactctcatgaaaaaaagtacaacgtatctggatattgcatggatgttttcaatgccgttgttacccgcttacctttcaaggattctcttcatattcaacaaccttatggtattgaatcaagtgagatttctggaacatacgatgcacttcttcatcagatcccagcaaagtacgatgttgtggtaggggatgtaacaattctggcgaaccgttcaaatttcgtagatttcacgctgccatatacaggttcgggagttaaaatgttagtaccagctcaacatgggaggcaacaagccatgtggattttcgtggaccattcagctgggagcttttgttgagcatagtcattatctataccttcatagggttttccatactca

SEQ ID NO: 215681 - DNA, 471 bp, Glycine max
aaaaaagtacttttgctacttatacgatggctaagtgcttttcattctctctctctcgttttctgatcttttcgttagtgctgctacagacacaaacggggaatgggtcaaatgcaacaccggtcaagttgagagtaggggtacccaagagagatggtttccgacaatttgtggatgtagcaccttcggactatcatgagcaacagtgcaacgtatctggatattggatggatgttgtcaatgccgttgctacccgcttacctgttaaggattctcttcatattcaacaaccttatggtattgaatcaagtgagatttctggaacatacgatgcacttcttcatcagatcccagcagagtacgatgttggggtaggggactgaacaattctggcgaaccgttcagatgtacgagattatacgctgtcatatacaggttcgggagttaaaatgttagtagcagctgaacatg

SEQ ID NO: 215682 - DNA, 331 bp, Glycine max
aatctttctgcaccatcgttctccatttttggctttacaaaaccactgtgtctgattaagggttctttaatatttccaatatttcttgtagtgaaaaagttgttagctaaaagaagacccagtttttggtgttagagaaggaagagaagaattaacatgaaaatttagtgtgacgtgtcgtaaaaagctccagcaacagtgatttgttgcgcagatgaagctgctttgtgggccaaatgtgactgttaagttcatgctgcaaacaagctttgaagcaagccccaaagactttttcttcaatggctatcaaacgagctttccacatgtgaca

SEQ ID NO: 215683 - DNA, 546 bp, Glycine max
gttttgttgcaaagcaaaaaactacgaggagctttcctccatacgaatccaaggaggagagaggagacacagacacaaaggaaacggaaaaagcaacacacacaaaaaaggtctgtgcctcctcttatatgtaatagatagtttctgaaacaaaagaaaaaaataaaataaaaataaaaggaccacatggattatgaaaacaacagttggatttgggagggggtaaactactacccgcgtgtgtttggtggtctaatggttacagcagccttgctgggcttgtcaaccagctactttggtgggattggggttccatatttgtcactgccatgttcctggtctaatttggggatttttcacaagaagaaatcggggaagaggcgcattcgggtgtacatggatggctgttttgatctgatgcattatggccatgccaatgcactcaggcaagcaaaggctctaggagatgaactggttgtgggtcttgtgagtgatgaggagatcgtggccaataagggccacccgttttgtccatggaggagaggc

SEQ ID NO: 215684 - DNA, 558 bp, Glycine max
cgttgatctcggggttgaaccccagtactttgctctccgctggttgcgagttttatttggacgggaattttcactcagcaacctcttgataatctgggatgaaatcttttcatcagataatagtaaattggaaaaacatgcagaggacaatgcagactctggttttaggatcttcaattcgtctcgcggagcatttatctcagctatggctgtagcaatgatgcttcatataagatcttcgttacttgcagctgaaaatcctacaacctgtctccagagattattaaacttccctgagaacattaacgttgaaaaactaatagagaaagctaaatccttgctggctcttgcattaagcactgagatttcatcctcaatgcctttattggtcgagtatcataaccagggtaaatcagctattgcaagatctcgcaccctttcatctgaatcaatttcaccaaaaactcctgtgaatttggtacctgatagctactgggaagaaaagtggatagtggtccactaggcttgagaactcatacaagatggagtagaagaaca

SEQ ID NO: 215685 - DNA, 523 bp, Glycine max
  unsure (1)..(523): unsure at all n locations
gggtgcagctaagaagctcaaaaagattcaatttcaaggtttgtagtggaagttatgatgatggttatgtgattggtgaagaggaagcaagggatatttcagggttagaggagcctgtaacaaccaaggttctgattccaggtctgcctgatgattcaaaaggtgaatctggtgctccaataagtagttgtttttggggatggaaacctaaactcaatgtgcactatgagaaggccgggtgcgaaaacgtcaatgatttgcctcgtgttctctttttaccaggttttggtgttggctctttccattatgagaagcaacttaaggatttggggcgtgactacagagtgtgggctctggattttctaggccaagggatgtctttgccttttgaagatcctgcccctttgtctaatgaagaggctgcatcaaatggaagtgtttcttcatggngttttggagatgaaactaaaccgtgggcgactaagcttgtttactcggttgatttattgcaagatcaagttcg

SEQ ID NO: 215686 - DNA, 498 bp, Glycine max
aagtatgtcaatgccagtgttggttttggtggatcctgcttccagaaggatatcttgaaccttgtttacatctgtgagtgcattggccttccagaggtggctgagtattggaaacaagtgatcaagatcaatgattatcagaagagccgatttgcgaaccgtgtcgttgcatcaatgttcatcacaggttcaaacataaagattgctattctgggatttgccttcaagaaagacactggtgacacatgggagactcctgccattgatgtatgccaggggctactaggcgataaggtcaacctgagcatatacgacccgctagttaccgtggaccaaatccagagggatctatccatgaacaagtttgattgggatcatcctatccacttgcagcccacaagtcctactactgtgaagaaggtcagtgttgtgtgggatgcctatgaagcaacataggatgcacatggcctttgcattctaaccgagtgggatgagttc

SEQ ID NO: 215687 - DNA, 432 bp, Glycine max
aaacaaaacaagtttccccagaacattcataaaagattggggtacaaaacaacatagaacataaaccctccccagttcccacaattgataccccaattatgtcaactattatgagaacgttaaagaggaaaagaaaaactcttacaaaaaataataaagaatcaaactggctgcctcaacacttgactgatattgcatggcacttgatcaatgatctattttatgccacagcaggcatgtctttgagccatgggtccagtggcttaccaattgagtaaactatgaagccaatctcacgcaacttatcagcatccacaatgtttctgccatcaaaaacaaatgctggtttctgcatgttgtcaaatatcttctggtgataaagagtcttgaactcatcccactcggttagaatgcaaaggccatgtgcatcct

SEQ ID NO: 215688 - DNA, 575 bp, Glycine max
  unsure (1)..(575): unsure at all n locations
aaaaaagtacttttgctacttatacgatggctaagtgcttttcattctctctctctcgttttctgatcttttcgtttgtgctgctacagacacaaacggggaatgggtcaaatgcaacaccgatcaagttgagagtaggggtacccaagaaagatggtttccgccaatttgtggatgtagtaccttcggactctcatgaaaaaaagtacaacgtatctggatattgcatggatgttttcaatgccgttgttacccgcttacctttcaaggtttctcttcatattcaacaaccttatggtattgaatcaagtgagatttctggaacatacgatgcacttctccatcagatcccagcaaagtacgatgttgtggtaggggatgtaacaattctggcgaaccgttcaaatttcgtagatttcacgctgccatatacaggttcgggagttaaaatgttagtaccagctcaacatgggaggcaacaagccatgtggatnntcgtgaaaccattcagctgggagcttggttgagcatagtcatcatctctaccttcatagggttntccatactcatcatgg

SEQ ID NO: 215689 - DNA, 392 bp, Glycine max
tgcatatggatatcatttggttcgtggaaccaacactatgtatcacatcgagttcagatgtgccaacacataaaacctctttgctggaaaggttaatgatgcggcacatatgatccattgaccttgatggttttctcactactgaggatgaacatgagcgtaccatgctcaacgttaggctctgggatgaccccttctgatatcatcatgactccactggacatatggtgaccaataccgactccaatgatgacaacaagtactacgtagcttctgctgctaacaacattgctgttgctaaagcattggatgaagcatcgactggcgacatggattaagcttgcttctctagaactgacgctgctctggcatgatcgaagcctgctctatta

SEQ ID NO: 215690 - DNA, 511 bp, Glycine max
gctgggcccatcagcccccgacgtcgggatggtcagcatgaggaagaccgtcaccaagcaggcctactccggaagcccatggtacggcccagaccgcgtgaagtacttgggcccattctctggacagcccccgtgctacctcactggcgagttcccaggtgactacggctggcacactgacgggctttcgaccgatccagaaaccttgaccagaaaccctgagctcgcagtgatccactccaggtgggccatgctcggggacttgggctgcaggctttcccgaactgctgtaccgcctcggggtcaagtgtggagaagccgcgcggctcacggccgactcccagatcttcagcgagggtgggctggactacttgggcaacccaagccttgtccacgcccatagcatcctcgccatctgggccacccaagttatactaatgggtgctgctgacggtcatcgtattgctggtgcgaccctctgtgaggtcactgacccaatctaccctggagg

SEQ ID NO: 215691 - DNA, 490 bp, Glycine max
gctgggcccatcattccccgaagtcgggagggtcagcatgaggaagaccgtcaccaagcaggcctgctccggaagcccatggtacggcccagaccgcgtcaagtacttgggcccattctctggcgagcccccgtgctacctcactggcgagttcccaggtgactacggctgggacactgctgggctttcggccgacccagaaaccttcgccagagaccgtgagctcgaagtgatccactccaggtgggccatgctcggggccttgggctgcgtcttccccgaactgttgtcccgcaacggggtcaagtttggagaagctgtgtggttcaaggccgggtcccagatcttcagcgagggtgggctggactacttgggcaacccaagccttgtccacgcccagagcatcctcgccatctgggccacccaagttatcctaatgggtgctgttgaaggttatcgaattgctggtgggcccattcgtgaggtcact

SEQ ID NO: 215692 - DNA, 573 bp, Glycine max
  unsure (1)..(573): unsure at all n locations
cgttgatctcggggttgaaccccagtactttgctctccgctggttgcgagttttatttggacgggaattttcactcagcaacctcttgataatctgggatgaaatcttttcatcagataatagtaaattggaaaaacatgcagaggacaatgcagactctggttttaggatcttcaattcgtctcgcggagcatttatctcagctatggctgtagcaatgatgcttcatataagatcttcgttacttgcagctgaaaatcctacaacctgtctccagagattattaaacttccctgagaacattaacgttgaaaaactaatagagaaagctaaatccttgctggctcttgcattaagtactgagatttcatcctcaatgcctttattggtcgagtatcataaccagggtaaatcagctattgcaagatctcgcaccctttcatctgaatcaatttcaccaaaaactcctctgaatttggtacctgatagctactgggaagaaaagtggagagtggtccacaaggctgaagaactcanacaagatggagtagaanaacaggttcctactcggaa

SEQ ID NO: 215693 - DNA, 500 bp, Glycine max
cgttgatctcggttttgaaccccagtactttgctctccgctggttgcgagttttatttggacgggaattttcactcagcaacctcttgataatctgggatgaaatcttttcatcagataatagtaaattggaaaaacatgcagaggacaatgcagactctggatttaggatcttcaattcgtctcacggagcatttatctcagctatggctgtagcaatgatgcttcatataagatcttcgttacttgcagctgaaaatgctacaacctgtctacagagattattaaacttccctgagaacattaacgttgaaaaactaatagagaaagctaaatccttgctggctcttgcattaagtactgagatctcatactcaatgcctttattggtcgagtatcataaccagtgtaaatcagctattgcaagatctcgcaccctttcatctgaatcaatttcaccaaaaactcctgtgaatatggtacctgatagctactgggaag

SEQ ID NO: 215694 - DNA, 393 bp, Glycine max
cctcggggaattccaattccacattttcaagatataaggaggcaaaaatgttcatatatgaattggaattatttgttctcttattaggcctatcctgaagccaaaggaaatgagatcggaattccttggggaattccaactccacattttcaagatatatggaggcaaaaatgttcatatatgaattggaattatttgttgtcttattaggcctatcctgaagccaaaggaaatgagatcggaattcctcggggaattccaattccacattttcaagaaataaggaggcaaaaatgttcatatatgaattggaattattggttatcttattaggcctatcctgaagcctaaggaaatgagatcggaattcctcgagggtaccgagctcgaatt

SEQ ID NO: 215695 - DNA, 555 bp, Glycine max
cggctcgagctgagagtgagatacagaaaagaaaaaggaaaccctagctggataggtcaaacatcatcatgtcggacgaagagcaccatttcgagttcaaggcagacgccggtgcctacaaaacctaccctcagcaagccggtaccattcgcaagaacggctacatcgtcgtcaaaggacgcccctgcaaggttgtggaagtttcgacttccaaaactggaaagcacggtcacgccaagtgccactttgttggaattgatattatcactgccaagaaacttgaggatattgtgccctcttctcacaactgtgatgttcctcatgtgaatcgtactgattaccagctcattgatattgctgaggatggattcttgagtctgcttactgaaaatgggaacaccaaggatgacctcaagcttaccactgatgagagtctgctcactcagataaaggatggatttgctgagggcaaagatcttggtgtgtctgtcatgtctgctatgggtgaggaacagatttgcgccctggaagatatcgggccaaaagactagcttt

SEQ ID NO: 215696 - DNA, 568 bp, Glycine max
  unsure (1)..(568): unsure at all n locations
cgctacaagctccttggtggcctagctgtgcgcagggcttgctatggtgtcttgaggtttgttatggagagtggtgctaagggatgcgaggtcattgtgagtggaaaattgagagcccagagagccaaatctatgaagtttaaggatggttacatgatttcttctgggcaacctgtcaaagattacattgactctgcagtgagacatgtgctcctgagacagggtgttcttggcattaaggtgaagatcatgcttgattgggatcctaaggggaaacagggtcctaaaactcccctccctgatcttgtcacaatccattctccaaaggaggaagaagaatacatccagcctgctccagttttggctgctaatgatattgaggtccctgttgcttgaaaagttatacactggagaagtaattcatagtagctgagtgcctagttnttcttgtgtgcaatgtttgttgtcaaagacattgtcaaaattttgtagtttcttgaattttgaagaaattgttatactcagttacaagtattctaagttatttggtttatctttttcataaaaa

SEQ ID NO: 215697 - DNA, 546 bp, Glycine max
  unsure (1)..(546): unsure at all n locations
aaaagcatcgccttcgtaaggcattaggtcagacagctgactggtttaggagagcattgtttgttgagcctgtcaagggtaacttgagattaagtgggtactctgcatgtggacaagatggaggtgtgcagcttcctcatgaatatgttgaagagggagtctctgatgccgacttagttctcttggtgactacaagacctacaactggaaatacacttgcttgggctgtggcatgtgaacgggaccaatggggccgtgctatagctggacatgttaatgttgctcctcgtcatttgacagctgaggcagagactttgctttcagcgactctgatacatgaggttatgcatgttcttggtttcgatcctcatgcctttgctcattntagagatgaaagaaaaagacgccgtaataaggttaccgaacaagtaatggatgaaaagattgggcgaatggtaacacgtgtggtgcttncacgtgttgtcatgcattctcgacatcattatgcgggcatttctgggaaatttactggcttagagctggaag

SEQ ID NO: 215698 - DNA, 504 bp, Glycine max
tttcttttttttttttttttttttttttttttttttttttttttttttttttcttctttttttttttttttttttttttttttctttttttaaaaaggggcaaaaaaaattttttttttaccccgtttttttcccggggggcccaaaaagcataacccaaattttacaagggttaaattcccccccacattcggggaaaaaaaccccccccccccccataaccgaaaaaaaaaacacacggggcccccaagggggcccccccctccctggcccaacaaacgggaatcccagggaaaaaaaaccacgttccaaaccacaaaattaaggggaattttttcctaaaaaccaaatttttttccaaaaacaggggggaaaacgggggccaacccccccaataacccctcaaaaaaaggctccccccccccccgaaaaaagggggaaaaaggacccccccattcttgggggaaaaactggttattttttctctaagattcaacccccccc

SEQ ID NO: 215699 - DNA, 529 bp, Glycine max
  unsure (1)..(529): unsure at all n locations
attttaagaattgttttactgaccaaagataactcattaaagctttcaatcatgttagaaaaactgaagtcatatcttcaaaacgatgcttctgaatttcatacacgtttaccaattttaattcgaaacttgtgcacaggtaagaaaccaagcaatagtgaagtggatcagctagtgaatcttgcagaaaaatacactcttgcaaaccatctattttggggcttgtggggacttatttcgagtcatgtcaatacaattgactttgactacaaggagtatgcgaggcagagatttcagcaatactggttgaagaagcctactttattggactcaccaagtatcgtttcccaagatgggattgccaatggtgtgaaccattgacatggatgcttcttatgtatttagcatgttcagcttggtatgtgttgactaatatatagaaaggcatgatgtgatgcataaaatttgtaaataatatataactaanaatgtgtgatttgagaattttacaacagttatgttagtaatc

SEQ ID NO: 215700 - DNA, 541 bp, Glycine max
  unsure (1)..(541): unsure at all n locations
atcacaaaaggagggattactaacataactgttgtaaaaattctcaaatcacacatttttagttatatattatttacaaattttatgcatcacatcatgcctttctatatattagtcaacacataccaagctgaacatgctaaatacataagaagcatccatgtcaatggttcacaccattggcaatcccatcttgggaaacgatacttggtgagtccaataaagtaggcttcttcaaccagtattgctgaaatctctgcctcgcatactccttgtagtcaaagtcaattgtattgacatgactcgaaataagtccccacaagccccaaaatagatggtttgcaagagtgtatttttctgcaagattcactagctgatccacttcactattgcttggtttcttacctgtgcacaagtttcgaattaaattggaanacgtgtatgaaattcagaagcatcgttttgaagatatgacttcagtttttctacatgattgaaagctntaatgangtatctttggtcagtaaaacaattctaaaat

SEQ ID NO: 215701 - DNA, 553 bp, Glycine max
ctgtaacctcacacctctccaaaatccgttccccctttctttcaaaccctttttttttttcttccaacaaatcagcgatggcgacgacgtcggtggtgccggcgaatcggcggcgtgcggcggcgaaccccgccgaggatatggacttcgagacgacggagggcgtgaaggccatcgcgagcttcgaggagatggggatcaaggacgatctgctccgcggaatctaccagtacggcttcgagaagccctcagccattcagcagcgggccgtgactccgatcattcagggccgtgacgtcatcgcccaggcccaatccggaacgggcaaaacctccatgattgctctcaccgtttgccaggtcgtcgatacctccgtcagagaggttcaggctttaatattgtcaccaacgagggaactggcctcgcaaactgagaaggttatattggctattggggatttcatcaatatacaagctcatgcatgcgttggaggtaaaagtgtgggagaagacataggaaacttgagtatggagttcatgtggtgtcttgaact

SEQ ID NO: 215702 - DNA, 521 bp, Glycine max
atctcttctcaagtcttcacttgttcttgacaagtctgagtgggtgaagggacaaacacttcgccaaccttctgctgcatcagttgtgagatgcaaccccaccaccccatcaggcctcaccatcagagctggttcctatgctgatgagctcgttaagaccgcgaaaacagtggcttcaccagggaggggtattttggccatggatgagtccaatgctacctgtgggaagcgtttggcttcaattgggctagagaacactgaagctaaccgccaggcataccgtaccctccttgtgacagttccaggacttggtcagtacatctctggtgccattctctttgaggaaactctctaccaatccacaactgatggcaggaagattgtcgacgtgctcctcgagcaaaacattgttcccggtattaaagtcgacaagggtttggtaccccttgctggttccaacgacgagtcatggtgccaaagtcttgatggtcttgcctctcgctcggctgcatactaccagc

SEQ ID NO: 215703 - DNA, 532 bp, Glycine max
caaccatgtttgttatatattgagacataatcaatcaagtacaccactcacagcagaaggtttataagctgtaaaggtacatgtaaccataaacaaaaatagtctccaagactataaaaacattacattttagacaaattagtcttcttccacttcatcctccgtcaacacctactataactgctggtgttgctgctgcctaacatgtatcatattcactacatacatcttagtaggagtagcctttgacgaacaactccttcttggcttcctcggattcaccctcaccggtgtacttcccaagctgggcgagcgagttggacttggcacggaaaaggagtgcatcttgtgccgctttcacgttctctgggcggcctccccatgtcttaaggcagtgttttggagggctctggcatacgagaaccacacgtgcaacgggtttggagattggttcatggatttcagtggagggtagcttcacctcagactgtccaccagacaaaaacataattccagggacagcagggggaat

SEQ ID NO: 215704 - DNA, 470 bp, Glycine max
  unsure (1)..(470): unsure at all n locations
ccgaagttaagtctgtggaaatgcaccatgaagctctcacagaggctcttcccggtgataatgttggattcaatgttaagaatgttgctgttaaggatctcaagcgtggttatgttgcctcgaactcaaaggatgatcctgccaaggaggctgctaacttcactgcccaggttatcatcatgaaccatcctggtcagattggaaatggctatgcccctgttcttgactgccacacttcccacattgctgtcaagtttgctgaactcatgaccaagattgacaggcgatctggcaaagagcttgagaaggaacccaagtttttgaagaatggtgatgctggttttgttaagatgattccgaccaaacccatggtggttgaaactttctctgagtaccccccacttggtcgctttgctgtcagggatatgcgtcanactgttgctgtgggagtcatcaagaacgtggagaag

SEQ ID NO: 215705 - DNA, 454 bp, Glycine max
  unsure (1)..(454): unsure at all n locations
gaagcttcatggattttggtattttccctacactttgagggtggtatggaccttaaagttaaaggatataccatatcaaaacatagaagaagaccgctacaataagagtcttcaacttcttgaatacaacccagtatacaagaaaactccagtgcttgtccataatggaaaacccttatgtgagtccatgcttattgttgaatacattgatgagatttggtcacataattcattacttcctgctgatccctacgagagagctctggcaaggttttgggttaaatatgctgatgatgacatgttttctgcagttattgcattcttccttagcaataatgatgaagagcgagaaaagagcatagagaagatatgggagcatctcanggttgttgagaatcagtgttttggtgatcagaagaattttttgggggagacattattaacattatggaca

SEQ ID NO: 215706 - DNA, 508 bp, Glycine max
aattgaagttgaagtcttgcccttctctcttcaactccaaacacaagacatcatcatccatggctgcctccgtctccactgtcggagctgtcaacagagctcttttgaacctgaatgggtctggacctggggtttcagctcccagttcatccttctttgggagcagcttgaagaaggttattggctcaagggtccccaacacaaagatttcctctggaagcttcaagattgttgctgtagaagagaagaaagagattgaagagacccagcagaccgacaaggacagatggaagggtcttgcctatgatatctcagacgaccaacaggacatcacaagaggaaagggtttggttgactcccttttccaagctccacaggatgctggaactcactatgctgtcatgagctcctacgagtaccttagcactggacttcgccagtacttggacaacaacatggatggattttacattgctccagcttttatgggacaaacttgtgttcacat

SEQ ID NO: 215707 - DNA, 544 bp, Glycine max
  unsure (1)..(544): unsure at all n locations
aggacaaaaggaaaaggcaccaaattcaatttaagtggacactttaactcaaaattatagaggaagacagtccaatatgaaaaatatagtaaaatcatctcaaacttggcatcttctctttgcacctaagacattgagaattctaagaatgttacacgcaagtcccatcacaacttctagcacttggatcagcacaaccttcaggaacagaaatatttacttgccaagtttgctttgcctccaattcaagattggaagaaagttcccctgttaatagcatcctcgttagcatttccaagtgcagcctcgttcaagtacttgtcagccaattggactctcttgacattctcttgttcttggacaagcatgttaccatacgtcaagagcttctccagagtcatcttgggctgctaaaggttggaggtccatctgttgagttcacaagcttcttcccaatgccgtcaacaccaacaccagaaatccacttgctcacttcgncatcatatactctggccctcagtgcaccaaagaaatcaatggattg

SEQ ID NO: 215708 - DNA, 520 bp, Glycine max
  unsure (1)..(520): unsure at all n locations
acacccaccaccctctccatcacacctgcccgcctccatcacaggcgctcgttccacatcaccggcgcctttcctgccgtctcgcacgcctgtcgcctcgccggccgacagcattccaaactcgcccgtcggacttcggtgactgacatagcaacaacgagcgagacaccgctcatcacacaacaccgcaatcatgtctgcagagccagaccactccgccagcaagggtaaggtcaagctcgataatgacccatcgggcgccgagaagcgcgatgagaatgaggtcgccacagcaatcctcaagaagaagaagaagcccaacagcttgatcgtcacagacgccaccactgatgacaactcgattctcgccctctccaacaacaccatggagacgctacagctgttccgtggtgacacagtgctcgtcaagggcaagaagcgaaaggacaccgtnctcatcgtgctggccgatgacgacctcgatgacgggtcagtgcgcatgaaccgcgtcgtgagacac

SEQ ID NO: 215709 - DNA, 496 bp, Glycine max
aacttctgctacttcctactcctaccgcacttctgctccgcaattatcatgggcaaggtcaagatcggaatcaacggatttggaagaattggccgtttggtagccagagtggctctgcagagagacgatgttgaacttgttgccgttaacgaccctttcatcaccaccgattacatgacatacatgtttaaatacgacagtgttcatggacactggaagcatcacgatgtcaccgttaaggacgagaagacccttctcttcggtgacaagccagtcactatttttggacacagaaaccctgaagagatcccatgggggtcaactggagctgacatcattgttgagtccaccggagttttcaccgataaggacaaggccgccgcacatttgaagggtggtgcaaagaaggttattatttctgcccccagtaaggatgcccccatgtttgctgttggtgtcaacgagcacgagtacaagccagagcttgatattattt

SEQ ID NO: 215710 - DNA, 573 bp, Glycine max
cgccaggactgtcgatgcaagtcagccgcgcgctcaattcggacatggacaccgaccgccccccgttctcgatcaggattcttaccagcacaggacgatggcagggatcgccacggagacaatcgacagcttcatcactgctgcctcgccaaaaagctacgatggatctgacctgaccccttcgcagtattccgacgcctttgcaaatcaaccgacagatctcacagaggatgccttcactccgttcgaatccgtggatgacctacaggacgataggtctataataaaggacatcgatctcgcttctctgggtcatgcgacgcatgatgtgaatgaaagcgcaaactcgctcagtaagaagctgttcgcatgtgaaatatgtggccgctctttccaacggatcgatcaccttgccagacataaggtcaaccacgatagcgtcaagccgttcaattgcatcgtctgccatcgggctttcgcccgtaaggatgtctatcggaagcacttacagaggcacgaggcggacagacggacgcgcaaaccccacacggcaccacttcatgcacattgatc

SEQ ID NO: 215711 - DNA, 368 bp, Glycine max
  unsure (1)..(368): unsure at all n locations
ggttgtgaaagcagagaagtgagatacactaagttatcctcataaatacactctaattaggtggcaagataagtgtctaaccttagtaacattgccacatattgtgttcattttggaattgtgccactaaaattctattcaattcatctatggctgcctcttcttatgctatgcaatcaatcctggcaaaccctttgatccgcatttccagcgggtctagggtgaaccaatttggcgttcctgctttgcacatgagaaggaatgttggcctgagagttaggtccatggctaaggaagaacaaccaagtgagcctgcaaccccagttacaccgncaccatcagtagaacccaagccacaggcagtctct

SEQ ID NO: 215712 - DNA, 554 bp, Glycine max
  unsure (1)..(554): unsure at all n locations
gtggaagtgagaagaaaaagacatggcagtgtcagcagcaaagttcgatgtggtaatcctaggagcctcaggtttcaccggcaagcaagtcctcaaagaagccctcaaattcctcaattccaaccatttcacctccctcgccatagcgggccgcgacccctccaagctggcccaaaccctcaaatgggccgctcagcccaacccgccgccccaaatccccatcctcgccgccgacaccgccgaccctccctccctccgttccctctgcgaccagacccgcctcctcctcaactgcgtgggccccttccgccgccatggcgaacccgtcgtggcggcgtgcgtcgcgtgcggctgcgactacctcgacatcacgggcgagtcggagttcatggagcgcgtgnagcgtgagtaccacgcggaggcaacaaaaaagggttctttggtggtttcggcgtgtgggttcgactcggttccagcggagatgggcttttggtccattcgaggcagtgggtgggcccggcccggnccacagggtgggggcgtacctgagtttg

SEQ ID NO: 215713 - DNA, 565 bp, Glycine max
  unsure (1)..(565): unsure at all n locations
agcacttagtgctattcaataattacgaaaaaccaacagcgagtgttgtttttgtttggtccaggctggaccagggaatgaatagagatgagaggctttcggttgaagagaactgagttaagcggcgaagccaaacgcagaatcggcggcagaaattgccaccggaagcacgtcgaagacgggtgaaccaaacacaaaattccatccaccacttctcttttcaatccccaactcaaatctgtgaagaaaatctcaatttctaaattgtaattcttagcactactgctagtagtagtaaaaaaaaaacaattagaaagtagtagagtgtttttttttctttttttcgtttgttttacttttaagatgggtgagaagagcaacgttggcggcgacgcgattaacacgacactgcttcacgggaagtacgagctgggccggctgttaggccacggaaccttcgcgaaggtgtaccacgcgcgccacctgaagacggngaagagcgtggcgatgaggtggtgggcaaagagatggtgtgaaggtggcatgatggacagatcaagagaga

SEQ ID NO: 215714 - DNA, 576 bp, Glycine max
  unsure (1)..(576): unsure at all n locations
ctttaccctttatagataatataaagatagatgaattgagcgaaaataaaaaagattcaacaatttataagaataatccaatgatttctgaaacaaccatttcaattcaatcgataaattcagtaaattgttcattgaaaaaaaaaaaaataaaggatcttaatgctaaaagaaaagcagttataaaaaaaattgaaaaaattaaaaaggggcttgtaatttcagagacaaatattcattcaaacaaaacaacttatgatagtaaaagggtagaattcgaaaaaaaaaaattgcagatattacaaagaagaagaaatgctcgattaactcgtaaatcacattcttttttaaaatttttcatgaaaaggatatacagagatatatttctatatatcagttgtattccgaggatcaatatacaactttttcttgaattaacaaaaaaatttttaaataaatccatttacgataatgaagcaaatgcagaaagaatttataaaacaaatcaaagtataattcgctttatttaaatttacacanatattttcatactagaaatccgaattcacattaatc

SEQ ID NO: 215715 - DNA, 437 bp, Glycine max
acttgttgttctttgtaaagaattaattggcttttttcatatgaattgcatttggttaaatctttattttgagctatacgatattcagctattctatttctccatttttgtgagactaatctggaccatctacttttagatcagtcatattgataataatgatcctttaaccaatttgtccattgatttattacagaattgcgagggttattatgttttaatttataatgaaatattccttgtgctccaaaaaaagaatcctttatttcatttttcagaaaaaaaaaaattccatgatattgaaaaacagatcttaacttatagaggtgtatgttaataattcggcgagtgtaataaattaaaaaatacatctgcgttgtgacaaaaaggagcatgtcacaagaattatgtgaattcggatttctagtatgaaaata

SEQ ID NO: 215716 - DNA, 483 bp, Glycine max
gaaaaaaaagaaaaagataattttgatttacttgttcctgaaaacattttatccgctagacgtcgtagagaattgagaattctaatttgtttaaatccaaataatataaatagtatgcatagaaacacaatattttataatccaaataaagtccaaaatggtttttcacttttgactaataaaagactatattttgagaaagataacccctaactaaggagttgaagaataactctttggccaaaatatcgattagaagatttagcttgtataaatcgatattggtttaatacccataatggaagccgtttcagtatagtaaggatacatatgtatccgcgaatgaaaattcgataatccaaatttgtcttctatttaccatatttatattggtaatagaagacaaattaatatctatatctatctatatagatagatatagatacataacataaattaagacacgcattatggtatggcatt

SEQ ID NO: 215717 - DNA, 579 bp, Glycine max
  unsure (1)..(579): unsure at all n locations
gtgaaataacaggtataattgaattttttaccataaaaaaattaaagtttttcccttctcttcgctttttacttttgatagatattttgattgatcagtaatagtaatgacactaattttgaattttttatataaatctgaatttacttaatttacttaagaattcttgatttttttacaatcgaattaattcttataaataaaaaaaatggaatccatgcaatttaaatagatataaaggagactttttttatagattcaccataaaaaatggtatacttaaaaaaaacataattttgtggattctttttttatctaaggtatatatcagtgaattagtatcaatgccataccataatgcgtgtctttatttatgttatgtatctatatctatctatatagatagatatagatataattntgncgctctctatttaccatataaatatggtaaatagaagacaaatttggattaacgaattttcattcgcggatcatatgtatccttactatactgaaacggcttccatatgggtattaaaccaatatcgatttatacaagctaaatcttctaatcga

SEQ ID NO: 215718 - DNA, 491 bp, Glycine max
tttttttttttttttttttttttttttttttttttttttttttttttttttttttgttgttttttttttttttttttttttttttttttttttttggggggggaaaccaattttaaaaaaattaatttcgccccccccaaaggggtgaaccccctaaaaatttttttgaacaaaaaaaaaagcccttttaaacaaaaaaatttcccaaaaaaattcccccgggccaaaaaaataaatttctcttcttttcccttttaacccttccaagcggaaacagagcggttggttctctaacccccccatccttaaacccccccgccaatttccaaagggttcctttttttgggggggaaattttgctaaaaacccccaaaaaaaatggcaaaaccttccctttagggggcaaaaaaaccaaaaaacaagggtgttgtagaaaaaaaaaagggttacttttccggccccggggggaaaaaggaacgcaccaatccccg

SEQ ID NO: 215719 - DNA, 433 bp, Glycine max
aatttaaagaaatcaacacacatttacacaacaacatatggaggtgctaagggtgcggaccatagctttcaaatccaaagatgctgccatcccagccatgtttgttagggcagagacagagcaactcaggcatcaacaacccgttcaaggtgtgaaccttgaggtgccaattattgattatagtgacccagatgaagggaaagtggtgcatgagattttggaggcaagtagggactggggcatgttccaaattgtgaaccatgacatacctagtgatgttataagaaagttgcaaagtgttgggaaaatgttctttgagttgccacaagaggaaaatgagttgattgcttagcctgcttgggtctgattcttattgaagggtatggcacatagctttagaaagaggtgaatggcatgaaagggtgggtggatc

SEQ ID NO: 215720 - DNA, 388 bp, Glycine max
ccccacaagtcacactttgattccataaattaaataacaaaacagagaaaccaactttggtcacagatcttatttaatttacttcccacaaggcacactttctttccataaattaaataacaaaccagagaacccctgggctataattatctgggggggcccacttcattcatggggggatcttatggggcttacaataagcataacccttggatttctgggtttggaatttggggggattggctgggttaaccaacttggggggaggaccaacttcttgttcctttttgggttctatgaacacgggccacgacattcttggctaatcttgtgccactggggtgctgtgaaaaactgccttatattttccattgctcagtatctccat

SEQ ID NO: 215721 - DNA, 506 bp, Glycine max
gtgaactccactgttcctattgctgctgaagttttcaagaaggcaggaacttatgatgagaagagattgtttggtgttaccacccttgatgttgttagggcaaaaactttctatgctgggaaagccaatgttccagttgctggtgttaatgtacctgttgtgggcggccatgcaggcattactattctgccactattttctcaagccacaccaaaagccaatcttgatgatgatgtcattaaggctcttacaaagaggacacatgatggaggaacagaagttgtagaagctaaggctggaaagggttctgcaactttgtcaatggcctatgctggtgccctttttgctgatgcttgcctcaagggcctcaatggagtcccagatgttgtcgagtgctctttcgtgcaatccactgctactgaactttccttctttgctttcaaggtgaggcttgggacggttggtgtggatgaagttctgggcttggtgcacctttcagatttgag

SEQ ID NO: 215722 - DNA, 346 bp, Glycine max
gggaaaacaaaaccctttttaagggaaaaaaaatgggaataagggggccccccccctgccattccctttagggaaaccctcccgttaaagggggaccctttttaagggggggccaaatcctaaaccgggttttaaaaaggttaaatccctttggcaacaaacaggttttaaactttaatttttaaacccggggggttcccccccctaaaaaaaaaaacaaaaccgccccaccattggcgaaaaaaataaattaaggggtttgaaaaagcaaaatttggtttggtttttaaaggaatttcccggcccctccccaacatggttgggataacatgttcaattacggggg

SEQ ID NO: 215723 - DNA, 554 bp, Glycine max
gtgttcccaggacttattgtgttttaaatccacaaaatccttttgtgttgaataggtggatggggaaactgactttcccccagggcacttcccgaagtgttaagagaatgcctctttctatagggggaggagctggtgcaaagaatgctattctcatgaatatgccaaatgctgttctttcaatgtggagatattttgttggagatctcgtctttgaagtttctaagatgacttctccctacattaaatgtacagtctctttcttcatagcatttggaaatttggctgatgacaccatcaattttgaggcttttccccacaagctggtgcagtttggagagattcaggaaaaagttgtattgaaattttcacaagaggaatttcttacagcttggtcaactcaggtgcgtcctgcaacaactctggtggctgatgggtgtccatatttgtatgctatggtgcatgatagttcagtgtctacaataccaggtgattttgtcattggtgttaaggtgacaacccataacattatgtgtgcacatgggctcaatcct

SEQ ID NO: 215724 - DNA, 541 bp, Glycine max
aaaataacacacacttcacacatcattacgacaattaaaagaggtgtggaaattttcaaatagacagagcatactcaacaagagggtcatgtctaatttcctttattgaattaaacaaacgaacaaacgaaagaaaacacaaattccagatcatgcagaggattccgcattttcagaagatctggcagtagcctgtggaacagaaaaagctggcataagagtattaccagcaatttcaaaatcttgagaaattcccaagagaatatcaaaaactgtagactgtttgggattgtcaataaggaaactcaagtgccatgaagtttgatttgcccactcagaactccacatttcaaaaccattattaggaccacatacctctattgggaagatcaattcccaggaatgtggttccgattttgtccacttacatgcatcgaaatgctctgtactgttgctgtttgttaaaaacacttgtaccaatgaggcccaatcattccttttgactgctgcattcccagacatcacaatttaaccattaaac

SEQ ID NO: 215725 - DNA, 596 bp, Glycine max
  unsure (1)..(596): unsure at all n locations
tccacaactgatggcaggaagattgttgacgtgctgcttgagcaaaacattgttcctggtattaaagtcgacaagggtttggtgccccttgcaggttccaacgacgagtcatggtgccaaggtttggatggtctagcctctcgctcagctgcatactacgagcaaggtgcccgtttcgccaaatggcgtactgttgtgagcatccccaacggtccctctgctctggcagttaaggaagcagcctgnggtctggctcgctatgctgcaattgctcaggacaatgggttggtcccaattgtggagccagagatcttgcttgatggggagcatggtattgatagaacttttgaagtagcccaaaaggtctgggcagaggttttcttctaccttgctgagaacaatgtccnttttgagggtattctccttaagcctagcatgggtacacctggagccgagttcaggacanggccagtcctcagacagttgctgattacaccctcaagctccttcacaggagaaatcccctgctgtccctggaatatgtttttgctggtgacagtctgggttgaactaccctaatttgatgcatgaaccat

SEQ ID NO: 215726 - DNA, 437 bp, Glycine max
aagtacacaactcatagcaaaaggtttattaagctgtaaaggtgcatttaaccataaacaaaaatagtctccaagactataaaaacattacattttagacaaattagtcttccacttcatcgtccgtcaacacctactgtaactgctggtgttgctgcctaacaagtatcatattcactgcaaacatcttagtaggagtagcttttgacgaacaactccttcttggcttcctcggattcaccctcaccagtgtacttcccaagctgagcgagtgagttggacttggcacggaatgcgagtgcatcttgtgctgccttcacgttctctgggcggcctccccatgtcttcaaggcagtgttttggagggctctggcatacgagaatgacacgtgccacgggtttggagattggttcatggcattcaaatgagggtagct

SEQ ID NO: 215727 - DNA, 560 bp, Glycine max
tccttcgtctcttttgtttcgtcctttccttcaccacttttcccttttcattttcaggataacaaaacaacactccttgcaggattaaacttcacttcaattgaactaacctatctgtgggttttttgtagattgattcaattcaatggcttcagtaatgctcagtggaactgaaaagctcactctcagaaccctaaccggaaacggcttaggtttcactggttcagatttgcacggtaagaattttccaagagtgagttttgttgccaccactagtgctaaagttcccaactttaggagcttagtagtacccaagtgtagtgtctctgcttcgaggccaacctcgcagccaaggttcattcagcacaaaaaagaggcgttttggttctataggtttctctcaattgtgtatgaccatgtcattaaccctggccattggaccgaggacatgagggatgatgcccttgaacccgctgatctcaatgacaggaacatgattgtcgtcgatgtcggcggctgcaccgggttcaccactcttggtattgtcaagcatgtggatg

SEQ ID NO: 215728 - DNA, 511 bp, Glycine max
  unsure (1)..(511): unsure at all n locations
gcgagttgttgtaaagctagccttgttgcagccatggccacccacgcggctctagcttctacaaggatccccactaacaccaagttcccatccaaggcttcacactctttcccaacccaatgcgcctcaaagagacttgaggtgacagaattctctgggctaagatccacttcatgtgtgacatatgctaacgatgctagagaatcttccttttttgatcttgtagcttcccaactcactcccaagaccaatggatcatcaactcctgtgaggggagagacagtggccaagttgaaggtggcaatcaatggtttcggacgcattggtagaaacttccttcgctgctggcacggncgaaaagactcaccccttgaggtcgttgntgtcaacgacagtggtggtgtcaagaatgcttcgcacctgcttaaatatgattccatgctggngaactttaaagcagatgtgaaaatactggacaatgaaaccatcactggtgatggtaagcccatca

SEQ ID NO: 215729 - DNA, 558 bp, Glycine max
  unsure (1)..(558): unsure at all n locations
atcaaaacaaaatataaaaattttgaatagattctatgaaatctcaaaaaatcccgctattcaattattcattaaacatatgaatattagtgcatattattttatcgattagattaaatagattatctatatatatagatagatatctatntgaattgcttcattcgcgaggagccgtatgaggtgaaaatctcatgtacggttctgtaataaagatggaattgagaaacaaccatcaattataacccccaaagaaccagatttcgtaaacaacatagaggaagaatgaaaggaatatcctatcgagggaatcatatttgcttcggaagatatgctcttcaagcacttgagccagcttggataacatctagacaaatagaagcgggacggcgggcaatgtcacgaaatgttcgccgaggtggacaaatatgggtacgcatatttccagacaaaccggttacagtaagacctacttgaacacgtatgggttcaggaaaaggttctnccgaatattgggtagctgtcgttaaacctgggaaaatactttatgaaatgggt

SEQ ID NO: 215730 - DNA, 412 bp, Glycine max
acgttctattatatatatatctatctatattctatatatagatatattgttcaggttatcaagtattaatctgaaataaataagaattgctgcttctaatacttataataattactacaaattctaataattactacaaaagggatatatgttagataaaatagattaattaatctatttcacaaaaaaataatgtatccatagcacagtttcgtcttataatacctcgggtgctaatgaaactattttagtgaaatttaactgtctcaattcccgggcgattgcacaaaagattcgagctccttttggatttccttcttgatcaatgacaactgcagcattatcatcatactgaattattatacccgtgctacgtttgagttctttacaggtacgtacaattacagctctg

SEQ ID NO: 215731 - DNA, 427 bp, Glycine max
ctaacttctttagatctctcccataataattttattggtcttgttccatcatttacaagattcttccgtggcatttatccatttgaacaacaatcgtttgagtggattgtctaaaagaatgttccatggaaactcttctttagtgatgttagaccttagctacgatgaaatatctaacaaccttaaagatctgatacataaccttagttataaaaggttaaatattctccttttaaaaggtaatcactttatgggggatataccaaagcaactatgccagttgatagatttaacatgctagacctttctcataacaatttctctggtgttatccccaaatgcttaggtaaaatgccttttgaggttaagaacccgaaagactttgtagcaagattttctatctttgatccagatctccatatccatg

SEQ ID NO: 215732 - DNA, 552 bp, Glycine max
cttactggaagccttgttgtgagtaagagaaaaggcttcctgcaccgagcacaccaacttgatacctctgattctttctttgcttagaattccacagaatatggagactgttcttttcaatcactccccacctttggaattcaaggggttgagcaaggaggaggaagactcattgctagggcaagtggaaatatggaggtacatgacatgcttcacggactccgtggccttgaaagctgtcatagagcttcgtatagcggacatactagaccgttatggtaaaccactatccttgtcgcaaattgtggagaacatagaagacgcaccctccccagatgcctctcttctccagagagtcctgagagtgatggtgcgcagaaagatcttcagtgcacaagaatcagagacaggagaaaccctcttcggcttgacacgagcctcgaagtggatccttcgcgacacgaaaatgaccctagcacccattgtgcttgctgagaaccactcaattcacctgaactctgcgcactacatcagtgagaatattagagaagg

SEQ ID NO: 215733 - DNA, 480 bp, Glycine max
  unsure (1)..(480): unsure at all n locations
gaaagaaaaactcaacacaacaccccctctccaccctctttttcttttaatttctcatcttatctattaatcttatatacatatatataaagacatagataatagtcatatagatataattatttcgttatattttccttgcatgggctgttaagatgtctcgcacgtgctcacagtgcggcaacaacggccacaactcacggacatgcaccgacggtggcgccgccgggtctccgagggagaacggcatcatgctgttcggcgtaagagtcatgacggaagctaactcctccttcaggaagagcgccagcatgaacaacctctcacagtacgacgcggagttcaacgccgncgacgccggctacgccttcgacgacgtcgttcacgcctacggccgcacgcgcgagcgcaagcgaggtgttccttggacggaggaagagcatagattgttcctggtagggttacacanagtcggaaagg

SEQ ID NO: 215734 - DNA, 554 bp, Glycine max
  unsure (1)..(554): unsure at all n locations
ctcgagccgctcgagccgcaaaatctttgtacaaatttctgaacagtttctaggtatggaaactctttcatatgggtcagcaccatgctgccaagttgtgaactcaaagtggaaattagttgaaaagagtttgagttcacgtcaatcaagagtttcctctataggaaaacttggagtttattacacaggtactatttctgcatgtgcgcctgtgagattttatgagatgggtactagggtgcagctaagaagctcaaaaagattcaatttcaaggtttgtagtggaagttatgatgatggttatgtgattggtgaagaggaagcaagggatatttcagggttagaggagcctgtaacaaccaaggttctgattccaggtctgcctgatgattcataaggtgaatctggtgctccaataagtagttggttttggggatggaaacctaaactcaatgtgcactatgagaagggccggtgcgaaaacgtcaatgatttgcctcgtgttctctttntaccaaggtttggtggtggctcttttcattatgagaaagcac

SEQ ID NO: 215735 - DNA, 519 bp, Glycine max
tgctcatcaagtccaagaaccaacctaccttttgcaatctcaattcaatggcgtcctctctcattgcgaagcgcttcctctcctcttccctcctctccaggtccctccttcgccccgccgcttccgcttcccaccgctctttcaacaccaacgccatgcgccagtatgacaaccgcgccgacgaccacagcaccgacatcgatcgtcactccgaacgctctttccctagcactgcgcgccgcgacgatatcttctcagatgtgttggatccattttttccgactcggagtttgagccaggttctgaacatgatggaccaggtcatggacaatccgttcctctccgcgtcgcgcgggatcggagctggcgctggagtgcgtcgcggatgggacgcgagggagacagaggatgctctgcatctgcgcgtggacatgcctgggctcggcaaggaagacgtgaagatctccgtggagcagaacactctcattatcaaaggtgaaggtgctaaagaaggcgatg

SEQ ID NO: 215736 - DNA, 384 bp, Glycine max
agacttctaaacaacaagctcattcacaactctatataacaattattacagatacgtttgaagtttcaaaaccaaacacagcaacaatactattaagctggtatatctactaactagattcatcaccacctaataaaagaaaactaaagagtagtgtcgatgcaaaatggccaaatcagcttgggttgttctactcaaccttaacactgatcacgtctttcctctcttcctccttcattttcgggacaacgaccttgagcacaccggtcttcatctcagctctgatctggtcaatcttgtagagcttggccggcaagtcaatcctgcgtagtgtagcgacgagcgctctcttcttcatcgccttctttagcaccttcacctttg

SEQ ID NO: 215737 - DNA, 412 bp, Glycine max
tgctcatcaagtccaagaaccaacctaccttttgcaatctcaattcaatggcgtcctctctcattgcgaagcgcttcctctcctcttccctcctctccaggtccctccttcgccccgccgcttccgcttcccaccgctctttcaacaccaacgccatgcgccagtatgacaaccgcgccgacgaccacagcaccgacatcgatcgtcactccgaacgctctttccctagcactgcgcgccgcgacgatatcttctcagatgtgttggatccattttttccgactcggagtttgagccaggttctgaacatgatggaccaagtcatggacaatccgttcctcttcgcgtcgcgcgggatcggagctggcgctggagtgcgtcgcggatgggacgcgagggagacagaggatgc

SEQ ID NO: 215738 - DNA, 389 bp, Glycine max
agacttctaaacaacaagctcattcacaactctatataacaattattacagatacgtttgaagtttcaaaaccaaacacagcaacaatactattaagctgttatatctactaactagattcatcaccacctaataaaagaaaactaaagagtagtgtcgatgcaaaatggccaaatcagcttgggttgttctactcaaccttaacactgatcacgtctttcctctcttcctccttcattttcggcacaacgaccttgagcacaccgttcttcatctcagctctgatctggtcaatcttgtagagcttgtccggcaagtcaatcctgctagtgtagcgacgagcgctctcttcttcatcgccttctttagcaccttcacctttgataatg

SEQ ID NO: 215739 - DNA, 580 bp, Glycine max
ggcaagtaccatttttatcaatcttatcacccttttgcattgcacctacaaaagggccaccccttcttcccttctcaacttgtacttcatctaattcaatactacaacttctgaatcacttagttgaattgaattatcttcaaaatgagagaaatccttcatgttcaagctggtcaatgtggcaaccaaattggaggcaagttttgggaggtgatgtgtgatgaacatgggattgatgccactggaaattacgtaggcaattcccatcttcaacttgagagggttaacgtgtactacaatgaagcaagtggaggacgctatgttcctcgagctgtgcttatggaccttgaaccagggaccatggatagcttgcgttctggtccttttggaaaaatattcagacctgataatttcgtgttcggccaaaatggagctggtaacaactgggctaaagggcattatactgagggagctgagcttattgattctgttcttggatgtgttcgaaaagaagctgagaactgtgactgcttgcaggggttccaaatttgtcactcactgggaggaggaactggggtct

SEQ ID NO: 215740 - DNA, 529 bp, Glycine max
ctcgagccgctttttttcttggtttgtgttttcattttgttgtggttttctaaagcgaagtgaaaaattcaatggcggaggttttaaccaaggcgagtttggtttcatcttcttggcatggggttagtcaacggcatcatcatcgaagggtttcaacggttctttcaaataatacatgtagcttccgttccggcgtgggaaagttctcttctttgaagatgaattctcaggttctcagatcttggtcctcttcttctgagtttcagggtaaaaagcttgtctttcatgtaaatataggattacccaatagggtcaattcgcggttgagagcttctactgggactcagatgaaccttagactagggaaagttcagaaatggtgggaaaaggggcttcaacccaacatgaaagaggtgacttcagcacaagactttgtggattcactgttaaacgcaggggacatgttggtggtggttgatttcttctctcctggttgtggtggctgcaaagcccttcatcctaagatatg

SEQ ID NO: 215741 - DNA, 547 bp, Glycine max
  unsure (1)..(547): unsure at all n locations
gacatgtaacagctgaaaagatattaatcatcgatcaatgatcaatccaatagccataataaatctgaagattattcactgtaatatatgtataaaagaaataattatacatcatgatgaaagtaaaaaaaaaaaaaaaaaaatcatatatgacgatttggaaaaatcttcacagtgaagtaaaatactgcaaaaagtaataattgtaaaaaaaaaaaaactcgggaaccaaaacaatatttaggacaaaaatgcctacgaaatttctctaccaatgacaaaaaaaaaatgatcttacaattacagaagtatataaatctaaacttccattcatgtagggctagnttggtgggctggtagtgaacacggatccaggagaagttcaaggagaaactgacactgtctgatccagaagagctgcattcagggtgatttcttgctcatatataagtatggcgatgttctcatcatccttccctttctcttctccaaaaaccgagccaaggatgctttacgtgcctgaggcaagcaaactggctgagccttt

SEQ ID NO: 215742 - DNA, 579 bp, Glycine max
  unsure (1)..(579): unsure at all n locations
gttcaggatcatgggatccttttttatcagataggaagggctgtttcacaaaatgtgcttctaagtaattgctccatagatcctatatctatctatatgaagaagaaatcatgtgacgggggggattcttatttgtacaaatggtacttcgaacttggaacgagtatgaagaaattaacgatacttctttaccttttgagttgttctgccggatcggtcgctcaagacctttggtctctacccggacctgatgaaaaaaatgggatcacatcttatggactcgttgagaataattctgatctagttcatggcctattagaagtagaaggcgctctggtgggatcctcacgtacagaaaaagattgcagtcagtttgataaggatcgagtgacattgcttcttcggtccgaaccaaagaatcccttaaatatgattcanaatggatcttatntctatcgtgatcagagatttctctatgaanaatatgaatcggagttttgagaaggggggggagtcctcgaccacaacagatagaggaggatttttcaatcacatcgtttgggctcctagatatgagcc

SEQ ID NO: 215743 - DNA, 455 bp, Glycine max
agttattcagttaaaccaatgattcgttattggagcagatagcaacaaccatctcatctgggaaaagccatctttttctcaacaatgtctttgtcatttgatccaatagcgcttcgttagataggaacagatttgataaatattgataactctcagatagagtattagaacggaaaaatccattagataatgaactattgattctaagccatctctggcaatgaatcaacaattcaaaatgcttttcttgcgtattcttgataaaccagtgtttatatatagatgtaggaagatctgtttgggaagtaaagaagttcccttgacatctcttcatctgtaaagaattgtccgatgtgaaaacacagagacaaaaggcttgatctttgaataggaaaaagagtgggatccgcgggggtcccaaatgaattggcttattcgaaaaaagccctgttctt

SEQ ID NO: 215744 - DNA, 517 bp, Glycine max
aataatcatggagaatggagatttcaaggaaatgggaaagttattccaaaatcaggtagcactggctacacagagtggttcctctcaaaggatcatcttcaggtgggcgacgtggtccgatctagaaagccttccaatgcatgcagacctcaaaacatggacatcccagaaggaactgtcgttggtttagagcgaaatgcagatcacggattcgccctcgtgagggtccatggaattcatgaccctgttaaaattcatatgtcaactcttgaacgtgtcacatttggcttagtagctggtgattgggtccgcctgagggatgaaaatgagaaacactcactggtgggcattctacatgccgtcaatcgcgatggtagagtggctgttggatttctcgggctgcaaactctctggaatggaaactcttcggaactcgaaatcgcggaatcatactgcatcggccagtttgtcaggctcaaagacagcctttcaagtcctcgattcgaatggcgtcgca

SEQ ID NO: 215745 - DNA, 488 bp, Glycine max
aaagtccatgtttaattattatgtaactgttttgagatagaaacaccaaaataaataaactaccgaccattggacgaggtaacactttccttaaaaatcatattagcaactgcaggaacccacattgagctaactggtattgtagcactggaagtggaaggtttctttgtagtagttgtagttgtagcagaggtggcagcattttgattttgaccatcaagatattgagtttcagtttctattgcagttaccttgttgttcctcctcactttctttccaactgatatgcctagtttgagagcagtgaatagaccaattgcaattagaacaggcctaattgcccagtgatgatcctctacatgttggtacttctctatcattccaggacatgtcttgaactcaaccacttccacctcggagggatcagccaagtaggtgcttggttcatttccgaaagggagcattcctgggaacttgacaaccaagca

SEQ ID NO: 215746 - DNA, 495 bp, Glycine max
gtaatagtaatatacataagttttataaccaatggaagcgcgtgcaggagccaatcagcgtattgcaagaatctctgctcatcttcagcctccaaatttccaggaagggagtgatgttcttcttaagagtgctgagtgcagagcaaagggtggggcacctggattcaagttgcaatattggaggctgctgtgggaattggtcacaccccttactttgctgatgaagatgaacccattggtttcagttcttcatctttatgatgttgtcaacacccctggtgtcactgctgatgttagccacatggacactggtgctgaggttcgtggctttctggggcagcaccaccttgaaagtgcactcactggcttggacttggtaatcatacctgtgggggtcccaaggaaacctgggatgacaagagatgatttatttaaaataaatgctggaattgtgaggaccctttgtgaaggaattgccaagagctgccccaatgc

SEQ ID NO: 215747 - DNA, 531 bp, Glycine max
agtacaaaaggctgatattttagtatctttctgagattattaagcagttccactgatgtcaaatccgttatcatcagcaattacggatgacaccaaaaatttagagtactattcttaagaagaagaaaaaaatctatgaacaaagagaagcattacacatggtccttatatataagagacaaaaactagtttttccttatcacatttattttctgatgaactctacacccttctggatgcttcctgctaactctctctttgccttttccaatccaatcctttcatactcattcaggggacccagttgataaacctcttctgctccagcacgacctagacgtaccttggttgcaaagaagggaagttccgtaacctgagaatcaacaaaagcacactccactaccccagcttctccttttaagccacggaggcatgcaccagcaaacttggcagctgcatatgccattgatagtgttgcagaacctgtcccagcttttgcctcaacaacttcagttccaccattttggatgc

SEQ ID NO: 215748 - DNA, 573 bp, Glycine max
  unsure (1)..(573): unsure at all n locations
cgatatcacagactatatccgcgtacgtagctcgaatctcgctcgagcacctttgttcactcttcttctcttgcggctagggttttagcgcagcttcttctagatttaaggaagatgggtaaggaaaaggttcacatcagtattgtggtcattggccatgtcgactctgggaaatccactaccactggtcacctgatttacaagcttggaggcattgacaagcgtgttattgagaggtttgagaaggaagctgctgagatgaacaagaggtctttcaagtatgcctgggtgctggacaaacttaaggctgagcgtgaaagaggaatcaccattgatattgctttgtggaagtttgaaacaacaaagtattattgcacagttattgatgcgcctggacatagggatttcattaagaatatgattactgggacatcccaagctgactgtgctgntcttatcattgattcgaccactggtggttttgaagctggtatntccaaggatggacagactcgtgacatgctctgctttattcacccttggtgtaaacagatgattgctgctgaacaaaat

SEQ ID NO: 215749 - DNA, 493 bp, Glycine max
ttttgaagcacagcgtggaacatataagatacttaaggttgagcctttcaattcagtgcggaagaagatgtctgtgctagtcggtcttcctgatggaagtgtccaagctttctgcaaaggtgcattagaaattagtattaaaatttgtgtaacaaagttattgatccaaatggaacagctgttgatctttctgatgaggaggcaaagaaagtctctgatattataaatggatttgcctctgaagctttgagaactctttgtttagctgtcaaagatgtaaatgaaacccaaggagaagccagtatccctgaagatagctattctctgatagccattgtgggaatcaaggatcctgtgcgccctggggttagggaagctgttaaaacttgtttagctgctggaataactgtccgcatggtaaccggtgataacataaatacagcttatgctatagctagagaatgtggcattcttacagaagatggtgtggcca

SEQ ID NO: 215750 - DNA, 493 bp, Glycine max
gggagaaaatttcttaaaaacgaagccaaaagacaagatttgtagtatgccacagaggccaaaatttcagccacatttgcactaaagaaaatcttagaagggaaaagttatgtttttccttcccgtattttatgccagctcgggaccagaaggtagcgcctcgtaaccatcatggggcgttgtagcatctcctctttcaactgggatgcacttgagtatagcagatataggcatgctaaatgctccgattacgacactgagcacccagaattgccagcttagaggcactgtactggcaaatgttcccaggaactcaactatgagtacttggaacaccactgtggagaagatcaccgtaaaaaatatccagctctcaaacatgcctttgaatatgtttatcttttcgatttctcggctgtttatctcattgaaaacctggcaaaatacaaggagttgaatataaagtgttgagcactatagttgcatctggacg

SEQ ID NO: 215751 - DNA, 577 bp, Glycine max
  unsure (1)..(577): unsure at all n locations
gcaaaggctaaagtagattctattctcctcaagcaaaacctatagctcccccacactcctccagtacttgaataaaagctaaataaatattaaagcctttccttcatcaaggtactgtttgatctttgaatttcagtcctcaaagattggaacaacaggaacatgtgtactctcacaattgttcctgtgctcccttctaagcttaacaagccttcgctttctccgcaccacaattctctttttccctactgtggaagacgggtcgggaagaagaacaaagcaatggttcctgttgcaaggttgttcgggccagccatatttgaagcctcaaaactgaaggttttgttcttaggagtggacgaaaataaacacccaggaaatctcccaaggacttatacgctaacccatagtgatataaccgctaagctcaccttggcaatctctcaaaccatanataattctcagctgcaggggtggtacaacagatttcaagggacgaagtgtggcacagtggaaaaaggtgaaaggaggatgtctctgcacgttcactgcccattagtggaggcattttctcttg

SEQ ID NO: 215752 - DNA, 466 bp, Glycine max
aacaaagaaagtaaagaaaaatatataaaaaaaaaaaaattgcaaatacgagcttccttatttacattgaaatgggtttcgaatatttaatttgtatacagggaatttgccaatttggcagcatccccgtaactgtgaattgtagtagtttggctgtttatagattttgttgggtcccaatcccatcacaaggttcgtaatggcggctgggaacttgtttagaccactgaatagggctcaacgtaagcggtggaaagcaacattggcattcttcttggcatggctgtggaattgccaacccctcctcctggaccccacctgtgggtgctgacgcttccttcagtgggccccaacattccaccttgttgaattctggaatgtttgagtgaaagtagacccaaaccaaggcatcttgcaattctgggtagctgttgaataaggttttcatcgccgtgaacgacgggct

SEQ ID NO: 215753 - DNA, 532 bp, Glycine max
caggatttggcttctgctgagaaatcaataagggagacaatggaaagcaaacaagttctgcaggggagtctggaatggctcaagaatgtttttggctcggaggttgagttgccatggagtaggattcgggaacttgttttggaagatgaatcagatctttgggatgaaatttttgaggatgcttttgttggcaggatgaaagcaatcattgacttgagatttagggagctaacaggtgctgttgatgtggtgaactcaatttctgctataggtgacttgtgtaccaagctagatgatgttcaggggtatttgaacagaccttctacggctggtggtgtttggtttctagaatcaaatgccaaaaaaactggagttgcttctgggtttaaagtccagcctgaagagagcgaatttcagtattgtcttaatgcctattttggtcctgaagtaagtcgaatcaaggatgcagttgatgtttcttttcagagcatccttgaggatctattaagtttcttagaatcttcaaaggctt

SEQ ID NO: 215754 - DNA, 513 bp, Glycine max
  unsure (1)..(513): unsure at all n locations
cgaacgcttggggtttggaaaagggttttacattttattcgttctccggtgagaaacagaaacacacagaagacagagtgagacgcttctcacgatggagggaggagtatcctacgcgcgcatgcctcgggtcaaaattcgcgagctgaaggacgactacgccaagttcgagctccgcgacaccgacgcgagcatcgccaacgcgctgcggcgcgtgatgatcgcggaggtgccgacggtcgccatcgacctcgtggagatcgaggtcaactcctcggtgctcaatgacgagtttatcgctcacaggctgggcctcatccccctcactagcgagcgcgccatgtccatgcgcttctcacgtgactgcgacgcgtgcgacggtgacggacagtgcgaagtttgctccgtcgagtttcatcttagggttaagtgcatgactgatcagaccctcgatgttacgagcaaggacctctacagntctgaccctactgtcagtcccgttgatttctctga

SEQ ID NO: 215755 - DNA, 478 bp, Glycine max
caaatggtaatcacagtaattactaattagcatccttggctcaacaagttaatacgttctgcaggtattcagttaaagacaagtaagaaacaagttccgggaaacaagttgtgggaaacaagtctgatatccttctaacaaattaatcaacctcctcgcatatgtgcaccaagctcgccaaactgatcatcagcctccactgtatcttcagatagcctcacagcatccagcttctgcttgagaatttctatggcatttagaaccaattgagaagctttaaccgctccagtagactccacagtgaatatgaagctatcctgcctcgcaatgatttctacaagcccaggcttgcccatagcttctgctttcttaagcacctcatcatatatgtgtatgcctcagcatcaaccaccatcacttgttgtgtcactggatcaatttaaagaacgggttggactactgtcaacccattctcttt

SEQ ID NO: 215756 - DNA, 510 bp, Glycine max
ggcaatcattgcgctctgataatatcaggatgtttgtattggatgaggcagatgagatgctctctcgaggtttcaaggatcagatctatgatatttttcagctgctgccacctaagatccaggttggggttttctctgccacaatgcctcctgaagccttgaaatcacaaggaagtttatgaacaaacctgtgaggattctagtaaaacgtgatgagcttaccttggaggggatcaagcaattttttgtcaatgtagacaaggaggactggaagctcgagacactatgtgatctttatgaaactttggcaatcacccagagtgttatctttgtgaacaccagacgcaaggtagattggctgacagacaaaatgcggagtcgtgatcacacagtttcagccactcatggagatatggaccaaaacacatgggatatcatcatgcgggaattccgttctgggtccttccgtgttcttattaccacagatcttttggcccgtggtattgatgt

SEQ ID NO: 215757 - DNA, 565 bp, Glycine max
  unsure (1)..(565): unsure at all n locations
gataatgaaaataaatccagtatatttccaacgtaacgttaaacaagtttcaaatttacagaaccaccttacggatattaaaacaaaacacagagaaagagaaagcagcactctacaatctttagtaataagacaaacaagcaagccagcaacaaaattgcaacaacgcattctgctagacccaaaattagagagaagaatggcaaattcaaatcaccggtttggggttaagttcaagtcttgctagagaaaggccctgggccgtgaaaaataaaataatgacagcggccttcataacaaaaagcataccagtgatgggaagaccaaatcaaatgagatcggctacattggctggcagctcctcaatctgcacattataaaactttaggatgtgaaacagcatggtttcatcatccccagtcacaaaattgatagcaacaccctttctgccnaaccgtccactacgaccaattcgatggagatagttttctggctgagatggcagatcataatgtataacacgtgagacttggtggacatcaataccacgggccaaaagatctgt

SEQ ID NO: 215758 - DNA, 503 bp, Glycine max
  unsure (1)..(503): unsure at all n locations
cctcattcccgtagtagacatattctaggctctttgccattcatggtgttgatgtcaccataatcaccaccacagccactgccgccattttccaaagctctatcgatcgcgaccgtgaccgcggccacgctattagaacccacgttgtcaagttcccatgtgaacaagttgggttgccagaaggagtagagagcttcaactccaacactcctcgggatttggtccacaaaatctaccagggactcaccattctccaagaccaataccaacaactcttccatgacttgcagcctgatttcttgttcaccgacatgttctacccctggactgtggatgctgctgctaagttgggaattccacggctcatttatgttggtggaggttaccttgctcactcttctcagaacacaattgaacaattcttacctcacaccaaggtactggtggattacatgacangcaagaggatattctcatattctattctttttcatatttgacag

SEQ ID NO: 215759 - DNA, 505 bp, Glycine max
cttcaccaatttccccaggaagttgtgggatctcagctggaacgattgttgcaattgtggttccaattacggtcgctgtgcttatatttatagtcggaatttgtttcttgagtagaagagcaaggaagaagcagcagggttctgtaaaggaaggaaaaactgcgtatgacatccccaccgtggactccttgcaattcgatttcagcacaattgaagcggccacaaacaagttctctgccgataacaagttgggggaaggtggatttggtgaggtttacaagggcactctttcaagtggacaagtagtagctgtcaagagactctccaaaagctctggacaaggtggagaagaatttaagaatgaagtggtggtggttgccaagcttcaacatagaaatttagtcaggcttcttgggttttgcttgcaaggagaagagaagatacttggttatgaatatgtgcccaacaaaagtctcgactatattctctttgatccctgaaagca

SEQ ID NO: 215760 - DNA, 585 bp, Glycine max
  unsure (1)..(585): unsure at all n locations
gcataatacatatattttatttagttgaaaaataagcaactataatacaaagtgttccaaggtttcgtcatttaaaactaggagaaataagtacatggataataatacatattagaacctccaagcgatcaagcttatcgaggatccatttcgctaatcgacatgtcattcacagacattggtattgattgatcgaatggcagctcctttggcatgtttggatcagttccactgtggacgaaaaatgcaggctgcgtaggagttggtagagtaacagtgttactgtctagcataagaactattgttgccattgtgggtctgtcagctggatcttcttggacacacaacaaaccaatatggatgcttctgatgacttcattctgattataggattctcttaatatggggtccatcagttccaaaggtgttccatccttccaaagttgccaagcatagctcaatagatcctcagcaccatccgtttgatagaaagagctattcttcttgccacttaaaatctccatgagcaggacntccaaactgtacacgtcagacttaacagagaactctncatgcatggcatac

SEQ ID NO: 215761 - DNA, 458 bp, Glycine max
ggctcgagcggctcgagcagaaatttatgagaagacaactggttttgcttgttcaggttttatcatctttccctgttgtctttgcccccaccaaacaagagagaaatggaagcagcatgggccacaagtttgactctgatactgatactcgctctgatgtgtccatggcatgcgctgacctggttatggttgaggccaaagagactagaaaagctgctaagagagcaaggccttcaagggaatccatacacactttttggtggagactccaaggagtttctgaagatgagaaaggaagccttatccaaacccatgaatctctctgatgacataataccacgtgtttcttcctatgaacaacatagtgtcaacaaacatggtaagaattcttttatctggttaggaccaataccaagagtgaccatcttagattccgagcaaataaagatgtatttaac

SEQ ID NO: 215762 - DNA, 399 bp, Glycine max
aggaagaaaacacatttatttttttggctattcaattacaaagttacaattcaacaaaagattttaacccccaaacctgtaaatgaaagtaattaaacatatgacaggatctaagaagggatcattttggtaataaagtataagctttaccggagttgggtgctataatcacacaataagaggctactattttatttcatattgggactttacgtaaaatgatatgagccccatactgggggtgaatagtaatcaacgcagttggagcatgagcatatgctggagaaagttcaaatgaaaaatgctggaaaatcattgacaaagccatttttgctttcaataaggaaaagttttgtccaatgcatattctaggaccccatccaaatggaaaaaatgaaa

SEQ ID NO: 215763 - DNA, 493 bp, Glycine max
  unsure (1)..(493): unsure at all n locations
gcgtactgttgtgagcatccccaacggtccctctgctctggcagttaaggaagcagcctggggtctggctcgctatgctgcaattgctcaggacaatgggttggtcccaattgtggagccagagatcttgcttgatggggagcatggtattgatagaacttttgaagtagcccaaaaggtctgggcagaggttttcttctaccttgctgagaacaatgtcctttttgagggtattctccttaagcctagcatggttacacctggagccgagtccaaggacaaggccagtcctcagacagttgctgattacaccctcaagctccttcacaggagaattccccctgctgtccctggaattatgtntttgtctggtggacagtctgaggttgaagctaccctcaatttgaatgccatgaaccaatctccaaacccgtggcacgtgtcattctcgtatgccagagcccttcaaaacactgccttgaagacatgggga

SEQ ID NO: 215764 - DNA, 453 bp, Glycine max
cgtaataacaataaataatcataatagtggcacactaattcaccactttccacacccaactgcgtaaagctcaaagctttttgacagtttgagcatttcagacaaacatgggggatgatggaaagaagattagtggagagggggggttagtgaaggttgagccaaaactcctgcaatggtttcacctcaaaagtggttgatttgttggagaaattggtggtgaagttcttgtatgattcttcactgccccatcactacctcactggtaattttgctcccgtgagtgagaccccttcaaccatggacctttctgtcaaagggtacctttcggattgcttgaatggggagtttgtcatagttggtgcttatccgaaatttgctccctgtagctggatatcactggtttgatggagatggtatgattcatggcttgcgcatcaaagatggaaaagc

SEQ ID NO: 215765 - DNA, 525 bp, Glycine max
  unsure (1)..(525): unsure at all n locations
aaaaacaaaaataatatttaatcattattgattcaatcactgttattcaaccaatacctccattgactcaactaccaatccggttttaaaaacattggtttaatgagatactggatatatatggtacaatcgattatttgttgtatacaaagactgaggcaggacggtacagtgaggctgccaaaattatcacagtttaccctgctcttgcagttgttcctctgtcacaaagaaggcatggaaaccatatggaactctatgcggcaattcgacaactgcaacaggatctgctgacattgtttttgcattgatgacatgcacaaatgattttccggtattttcatcgtgtacaaaacaaatcaagtatccatcatcttcttcagaatcggtaccagggacacgagggacataaacagcttccgagccatacnttcctggtcccaagtcatagagaccctgaacatttcctnctacttaagttttggttttccattatncggntcagcatgcaaatcaaatttaata

SEQ ID NO: 215766 - DNA, 453 bp, Glycine max
ggcggctctcagaaaagccgtgttctttgtaatcgctcaatgcttcaccttttccgcatatgctgcaaggtttgaaatcacaaaccgatgcacatacactgtctgggctgcgtctgtgcctgttggcggtggcgtgcaattaaacccgggccagtcatggtccgtggacgtgcctgcaggaacgaaaggggcccgcgtttgggcccgaaccggctgcaacttcgacggttcgggccgcggtggatgccagaccggtgactgcgggggtgtcctcgactgcaaagcttacggtgcgcctcccaacaccctggctgaatacggcctgaacgggttcaacaatttggacttcttcgacatctccctcgtcgacggttttaacgtgcccatggactttagtccaacctcgaatggatgcacacgtggcataagctgcactgcggacattaacggaca

SEQ ID NO: 215767 - DNA, 363 bp, Glycine max
agacgaggaggggcacgcaaagtgcacacgccttatgtaattttattgatctttattttagggcatatattatatattatgtaagggtattgggttcaaggacaaaagacaaccctatagtcagtcccaccattacaagtgaaggggctagttggatcatccttggggtaactataagcatcggggcacctttgcttgaagaatctggaataatcagtgggcccacagctaccggaattgcaacagtactggtcggttttgaagacagtgcaaggggttgttgcaacctccttgagtctttagctcactagggcactgtccgttaatgttcgcagtgcagcttatgcacgtgtgcatccattc

SEQ ID NO: 215768 - DNA, 565 bp, Glycine max
  unsure (1)..(565): unsure at all n locations
attccccttatctttctctcttctctctccccgcccaaaccctaactccctaccctattccgctttctctcatccatcatgaaaggaggaaagtccaagaccgaatctaagagagccgatgccaaacttgctgtgaataagaagggcgccgccaccaagactaggaaacccgccggaaaggggaaggcagcgaaagatcctaacaagccaaagaggcctccaagtgctttcttcgttttcatggaggaattcaggaaggtgttcaacaaggaacatcccgacaacaaagcagtgtctgctgtgggcaaagctgctggagcaaaatggaagacgatgtctgatgctgaaaaagcaccttatgtggcaaagtctgagaaaaggaaagtggagtacgagaagaacatgagagcttataacatgatacaggcggaaggtcctactggtggngatgaagaggaatctgagatgtcttgatctgaggtgaatgatgaggatgatgacgaggaatgcagtggcgaggaggatgatgacgattagagaatggactgatgataatagcatttat

SEQ ID NO: 215769 - DNA, 490 bp, Glycine max
  unsure (1)..(490): unsure at all n locations
acagcagaaaggggatgataagtcaattatattgatacaaacttaaccagatttcaacaagaaaactctaaatcaaactaaaagctctacaagagataaccatcccttaactaaacagttggatttagaaatacaaataaagagaactcccttctttaaactattcacgttttggaaagacgagcaatttacggaaggaggagcagggaaatattttttggaaagagaaatatgtttataaggaaatgaccagaccacctacacggatgatcaaaatcatcagaacctacataaatgctattatcatcagtccattctctaatcgtcatcctcctcctcgccactgccttcctcgtcatcatcctcatcattcacctcagatacagacttctcagattcttcttcatccccaccagtaggaccttccgcctgtgtcttggtataagctctcatgttcntctcgtactccactttccttttctcagacttt

SEQ ID NO: 215770 - DNA, 529 bp, Glycine max
  unsure (1)..(529): unsure at all n locations
gttaacaagaatttccaagctgatgtgaaagcgatccgacgtcatattaacaaaaataccatcttgattgttggatctgctccagggtttcctcatggagtaattgaccccattgaaataatttggcaatttcttccgtaggaacttggtcatctggcatcaagctttggtatttgtttccatgtggacctttgccttggtggctttgtattaccatttgctcgtgagcttgggtaccacattccaccttttgatttttctgttaaaggggtttcttcaatatcagtggatgtacataaatacggtttagctcccaaaggaactagcgtagttctttacagaaaccatgaaatcagaaagcatcaatttgttgctgttaccgagtggtctggtgggctgtatgtatctccaaccatagctggaagcaagcctggaagtcttattgccggtgcatgggcagcgatgatatctctagggaaagaaagttactngaaaaatacaaaagaaattatggaagggtcaagaagaa

SEQ ID NO: 215771 - DNA, 358 bp, Glycine max
ggttgctgtaggagataagatattgaagtagtgctaagtgcctaacacctgcagtgaacaatggcctctgcatcagcatctcttctcaagtcttcacttgttcttgacaagtctgagtgggtgaagggacaaacacttcgccaaccttctgctgcatcagttgtgagatgcaaccccaccaccccatcaggcctcaccatcagagctggttcctatgctgatgagctcgttaagaccgcgaaaacagtggcttcaccagggaggggtattttggccatggatgagtccaatgctacctgtgggaagcgtttggcttcaattgggctagagaacactgaagctaaccgtcaggcatacc

SEQ ID NO: 215772 - DNA, 395 bp, Glycine max
gattgccgagattcaaccatgtttgttatatattgggacataatcaatcaagtccaccactcacagcaaaaggtttataacctgtcaaggtacatgtaaccataaacaaaaatagtctccaagactataaaaacattacattttagacaaattagacttcttccactttatcctccgacaacacctactataactgctggtgttgatgctgcctaacatgtatcatattcactacatacatcttagtaggagtagcctttgacgaacaactccttcttggcttcctgggattcaccctcacacggtgtactttccaagctgtgcgagcgagttggacttggcacggaaaaggagtgcatattgtgccgcttaacataatgtgggcggcctcccca

SEQ ID NO: 215773 - DNA, 551 bp, Glycine max
tggaccccctctctctcttctgtaccggagccctcctcgccggcggcctctactggttcgtgtgcgttctgggccccgccgagcagaagggcaaacgcgccaccgatctttccggcggctccatctccgccgagaaagtccaagacaactacaaacagtactggtccttcttccgccgcccaaaggagatcgagaccgccgacaaagtccccgacttcgtcgacaccttctacaatctagtcacagacatctacgagtgggggtggggccagtccttccacttctccccctccatccccggcaagtcccaccgcgacgccacgcgcctccacgaggagatggccgtcgatctcatcgaggccaagcccggcaacagaatcctggatgtgggctgtggcgtgggcggtcccatgcgggccatcgcggcccactcgcgggccaacgtagtcggcatcaccatcaacgagtaccaggtcaaccgcgcaaggatgcacaacaagaatgcagggttggagtccctctgcgaggtcgtgtgccggaattttctcaag

SEQ ID NO: 215774 - DNA, 361 bp, Glycine max
aacatagcaaaattaaaaataaaattgaaaagatcaaaatccaaattacaccaagttcatagtaataataataactaataacaataagttaaacccaagataataataattatgaaaaaaaaaaaagagagtaccggaaagaaacaaggtggggggtgttatagttttggaatttcccaatgaaacgctcagttatggacgaccttgtcatggggctttctgcagaggatcatgtgcatcggcgagaaaatgccagagtcaccccctctggtcaaatagtcagaggtcttgaagagcatgtcatgaacatcgacggtccccttgggcgcgatttccaaagcggcgagaacagtgaccacaa

SEQ ID NO: 215775 - DNA, 632 bp, Glycine max
  unsure (1)..(632): unsure at all n locations
cccgcagtcagattattccggtcgacagctcacagtccgcgccgccctttttttttttttttttttttttttttcttttttttatttatttttttttttttttttttttttgggttggttttttttttctctcattttatatgttaatccactttgttacgcaagcatgataaaatttacactaacaaacaaccaaaggcccaaaaacaaaagcncctacacaagatgggcagcactgacacccacggaggggaaacacacccaagacaaaaaaagacggacacaacgaccgcaacggaccccacaagagcaaagacaccgggcaccaaaaaaaaaaaaaaaaaaaaaaacgggcgggagaaacaaaaaaaaaaaggcccaggacacaaaaaacccctacctggatcaaagcaaaaaccaaaccacagcccccaaaaaaaaaaagaggggacaaaaaaaaaaggcccccaaccccgtggggcaagcccagaaccacaaccaagcgggagaaaaaaaaaaaaaaaacgggggccgtacaaaagaccgcccccgaaaaaaaaagggcgggggggaacccccaacgaaaaaaaaaaaaaaaccaatccccgggggcaaaaaaaagggaaaaaccc

SEQ ID NO: 215776 - DNA, 519 bp, Glycine max
ctcatttccaccatttcaccttttcaatctgtttctctgctttactaatttgtcccagatcagaaccagattgagcttctgcacaaccagaccagagattcaacgcagaaactggaagcagagacaaatgccaagaacatggaattgcaaattggaaggttgcagaagaatgtggaagagagaaatgagcagcttcaggcgtcagcctcctctgctgagaagtatctgaaggagttggatgatcttagaacacagcttgtaacaacaagagcaactgctgatgcaagtgctgcatcagctcaatcagctcagctccaatgtttagaacttgtaaaagaattaaatgagaaaaatggttcactaagagagcatgaggatcgagtcctgaggctaggggagcaactagacaatttacagaaggatcttcaggcaagggaatcttcacagaaacaattgaaagatgaagttttgaggattgagcacgatattatggaggctcttgcaaaagccggagagaac

SEQ ID NO: 215777 - DNA, 572 bp, Glycine max
acgcaatgtaattttatagatcaccgcaaaaatgccttctgatcctggtgctacgcgtacattttgcacaagctaaagctagtagattatctataaaaactgccgcgcaaaatggcttctacaacttgtctagactcctagaatttgaaggtatatatgggtctatatacaagaattgttttggatataggaatggtttcaccgccttgaaaataccaccaagatcaacatggacatcgagaccaccattttgaatccagaagtgtcccagaaattctggtttagcttatctgcggctgcaacttctctttgttgctttgcagctaattgatctctcagttctttgatagctttgtcccgtcgttcacccatcctttgcagttttcgtgtctgagaacgagcttcctgcagacagaattctaacttcaacactttcttcttcagctcttgatcagcacgccgctgtttctccaactgtgactctaattccttagtcttgagcttccagtgagcagacatgatcttaatttcatccttaagttttgctatttcatcatccttaacacctagaa

SEQ ID NO: 215778 - DNA, 524 bp, Glycine max
ccttgccgactacaacatccaaaaggaatccactctccacctcgtgcttcgcctcaggggtggcatgcaaatctttgtcaagactttgactggcaagaccatcaccctcgaggtcgaatcctcggacaccattgataatgtcaaggccaagatccaggacaaggagggtatccctccagatcagcagaggttgatatttgctggtaaacaacttgaggatggaagaacccttgctgattacaatattcagaaggagtctaccttacacttggttcttcgtttaagaggtggcatgcagattttcgtcaagactttgacgggaaagaccatcaccttggaggtggagagttcagataccatagacaatgtgaaagccaagattcaagataaggagggtatccccccagaccagcagaggcttatctttgctggtaaacagcttgaagatggacgaacccttgcagattataacatccagaaggaatctaccctgcacttggttttgaggcttcgtggtggcatgc

SEQ ID NO: 215779 - DNA, 479 bp, Glycine max
aactgtgaaacgatattgatatttaaaataaaaacataaacaacatactttcgctgaaacgagttcaatacatcattttaaaacataataaacagcagcacttaaaccagagatgcaaagcacaagttcaagggagacactgaacaaacagataagacatatgagaacacttcataaaagggattccccttagcaaccaccacgaaggcgaaggacaagatgcaaaggggattccttctgaatattgtaatctgccaaggtacgaccatcttccaattgcttcccagcaaaaatgagcctctgctgatctggagggataccttccttgtcctgaatcttagctttcacattggcaatagtatcagagctttccacctccaaggtaatggtcttccctgtcagagtcttcacaaatatctgcatacctccacgaagcctcaacaccaaatgcagagtggactccttctggatattataat

SEQ ID NO: 215780 - DNA, 536 bp, Glycine max
tattatttggctctgcccttcccaattgagaaggcccccactaagagaattgcaagtgtaaatggtggggtgaagatatctgaactgttgaagtatccggttagaggctttgtctttgagggcggcgaaatgctggaagatctatcaaacgttgtttcagatgcatgtatatgtcttcagaacaacaacatacctttcaatgttcttatctctgactgtggaaagcaagtgtatctgttaccacagtgttatgcagagaaacaagctcttggagaagtgaatgctgagcttcttgacacccaagtgaatcctgctgtgtgggaaattagtggacacatggttttaaagaggaggaaggattatgatgaggcgtctgaaggcaatgcttggaggcttcttgctgaggtgtccctttctcaagagaggtttcaagaagtcaatgatcttgattatgaagccattggctgtggtgaattggaggatgtcaatgttcaaagtgtcaaaaaagaagttgatgcagtcagcacaagcgaaca

SEQ ID NO: 215781 - DNA, 547 bp, Glycine max
  unsure (1)..(547): unsure at all n locations
gcaaattttcttcccctcaatcgtatattgctcaggtggtgttcctgttcccccccaagcacccctgagattcgttcgcaaaaagcttaataagaacaaaaaataaaaataatattcttcgttattatttcatttcaatttcgttttcgttttcgttttctgttttgatttgatcttccaatggcgtccgatggctttaccgacaagaacaccgtgttcagaaagctcaaggcgaagtctgaaaataagatgtgtttcgattgcaatgcgaagaaccctacctgggcgtccgtcacgtatgggatctttctctgcatcgattgctccgccgtacaccgcagtctcggcgtgcacatcagcttcgtgaggtctacaaatttagactcatggagtcctgagcaactaaaaacaatgagctttggaggaaacaatcgtgcacagggtttctttaagcacatggntggaatgatggtggtaaaattgaggctaagtacacatctagagctgcagactttgataggcaaattctttcaaaggaagttgcaaa

SEQ ID NO: 215782 - DNA, 512 bp, Glycine max
ataaatgtaaacaagaaaactatttcactgatagaagctgacgtaaacactcttttagagttcacgagttcaccacaaactggtatcgactaacccaaaaaaaaaggaataaatctaaaacattagcaacatctaagcagtacctgttatacaaaatagaagcacccgtctatatgacaagcctgaaaatatagcatcttattttctcaaagaattgtatattgaaaactcttctattacatttgaaacataattggctggcatatgtaaaaaactccaaagattctcttaaatacagagcatacacattttagaggattcggtcctgaagatctgtcatcaatgtggaggccaatgagctcagcttctttccagtctctcctgcaatgttcttaagggaagagagatcctgttgtgcctggaaagataatcgattgatgaggtcaccagcagtaagatcaatagttgttgtctcttgagtcaccaaaaagatcagcactggagatggcact

SEQ ID NO: 215783 - DNA, 501 bp, Glycine max
ccaaatctatggcctttccattatctctagatgacgttaaaatatagtaacaatgtgatatataataatattccgaaccaaattaaaaaaaaaaaaggaaaaaaagcgagccgagttaacgccaagcagatgcgaccgtgagtgttcttcccatccaaccaaagcaaatccctccgttctcttcttttacagtcagtcccgagttgactcggttgttggccgtggtgagtcgcgattttattgactcggccatgctttgactcagtggttttaactcgaaccccgccatgctcatacgcgcgcgccattttccaaacacttcacaccgttccacgcgatctcttccttcgcacgccaccgagttatgcaattttcgactcagtccctcctcgagtctgactcggtctaggttgttattggtattttctctccatgcagtggtggcctcaatggactccaacaacgcgctgtaatacgacagcgtctccgccacgcgcgcca

SEQ ID NO: 215784 - DNA, 399 bp, Glycine max
taacgacgcactctactctctcttagggtttcttctcccgccaatttcccctctcccccattcaattccaaaccctaacctcactccacccttgccggaaccgcaccttcgattcgacctagggtttcacagtttcactccgagcacgcacgcacgaacttcacgatgccgtcgctactctccccgggcaaaatccactgcctcgaggtggagaatttcaagtcctacaagggcttccaagtgatcggtcccttctacgacttcaccgccatccttggccccaacggcgccggcaagtccaacctcatggacgccatcagcttcgtcctcggcgtccgcaccggccagctccgtggcgcgcagctcaaggacctcatctacgccttcgacgaccgcgag

SEQ ID NO: 215785 - DNA, 419 bp, Glycine max
actagcttcactttcgaagtattctagttctttaacaacaccttcacgacttttttcctcatctgcaagatccttaattgcttcagcataatcgttgtgtatattaaacaacttccacaagaaatgttctcccttcatagatttcagttcttgttgcagacagagatgcttctctgcttcttgcttctgcactttcttctgctttctctccataaccacagtcttctttttctgataaacaagtgctgatttttcctacgcagcacctttttcctcctcaaactgctcatagcccctcttgcactcgtcagagccggatatctgttccaccagcgcagtgagctctttgggattctacgacgcaatagactccacatcaccctgaaagaccaagaaattgcgagctttgacgagaatgc

SEQ ID NO: 215786 - DNA, 519 bp, Glycine max
  unsure (1)..(519): unsure at all n locations
gacccaacttccaggaacttctattgagggagttgaaaagggtggctacaccatttcagacaactcatcaggtaacaagcctgatgttattttgattggaactggttctgagttggaaattgctgctgctgctgctgaggatctaaggaaggaaggaaaagctgttagagttgtttcttttgttagctgggaactttttgatgagcagtcagatgaatacaaggagagtgttctacctgcttcagtaacagctagagttagcattgaggcaggatcaacatttggttggcacaagattgttggaagcaaaggaaaggccataggcattgatcgatttggagcaagtgctccagctggaaaaatatacaaggagtttggtatcaccaaggaagctgttattgctgctgccaaagaactttcgtagatatatttggtgagtttcttttatctcatctagaacttgtggttntcacttgtggctttgggttactggtacatgacttggttttgagatatcac

SEQ ID NO: 215787 - DNA, 548 bp, Glycine max
gtacgccaaagatttgttgaactcttgcgatgccaacaaggatgggagagtggatttccaggagttcaggaagtatatggacgacaaggaacttgagctttatcgcatttttcaggccattgatgttgcgcataatgggtgcattttggccgatgagctttgggaggcgcttgtgagagcaggaattaagattgatgatgaagaactcgcccgttttgttgagcgtgttgataaggataataatggtgttataacatttgaagaatggagggattttctgctgctttaccctcatgaggcaaccattgagaacatttaccattatttggagcggatatgtgtggttgatataggggaacagactgttattccagcaggtattggtaagcacattcatgcaagcaggtatctgattgcaggaggagtagcatgtgcagcgttacgcacagcaactgcaccccttgaccgtctaaaggtggtatttgcaaattcaacaacacaatcttatataatgcctgcatttaagatttttgaaaaagggtggttgt

SEQ ID NO: 215788 - DNA, 522 bp, Glycine max
agacaattgtcacaataatcaattgtatttgtagactttattcttgtcatcaatgtctacattgcaaaaccatttccaatgtatagttgtgccaacggtcagccatgtcaataagattaattaccaagcagtaaatttcttcactccaaatccaaactttttttcatagactcataaaccatgtaggtgatgcttgctgacggtacaactttgagtaagttaggaaatattcctttgtagaaccccctcaaaccttcatgttcaagggttttcctgaatacatcagccattcccttatatgagcgttgagcctgcattcttgttctaaccacctgcagcgggtaaacacatgttgctccaagagttccagatacagctccacatcctaattgtactagaggaccacgctctccatcatgaagaatatactgcttggacatatccttcaaggtttcatatgcagcaagatctatgccggcataagggataatccaagaagagaggaatcaatccccttaaaat

SEQ ID NO: 215789 - DNA, 543 bp, Glycine max
  unsure (1)..(543): unsure at all n locations
aggttgctgtaggagataagattgcagtagtgctaagtgctaacacctgcagtgaacaatggcctctgcatcagcatctctgctcaagtcttcacttgttcttgacaagtctgagtgggtgaagggacaaacccttcgccaaccttctgcatcagttgtgagatgcaaccccaccaccccatcaggcctcaccatcagagctggttcctatgctgatgagctcgttaagaccgcgaaaacagtggcttcaccagggaggggtattttggccatggatgagtccaatgctacctgtgggaagcgtttggcttcaattgggctagagaacactgaagctaaccgccaggcataccgtaccctcctcgtgacagttccaggccttggtcagtacatctctggtgccattctctttgaggaaacactctaccaatccacaactgatggcaggaagattgttgacgtgctgcttgagcaaaacattgntcctggtattaaagtcgacaaggggttggtgccccttgcangttccaacgacgagtcatg

SEQ ID NO: 215790 - DNA, 532 bp, Glycine max
  unsure (1)..(532): unsure at all n locations
gattgccgagcttaaaccattttgttatatattgagacataatcaagtacacaactcatagcaaaaggtttattaagctgtaaaggtgcatttaaccataaacaaaaatagtctccaagactataaaaacattacattttagacaaattagtcttccacttcatcgtccgtcaacacctactgtaactgctggtgttgctgcctaacaagtatcatattcactgcaaacatcttagtaggagtagcttttgacgaacaactccttcttggcttcctcggattcaccctcaccagtgtacttcccaagctgancgagatgagttggacttggcacggaatgcgagtgcatcttgtgctgctttcacgttctctgggcggcctccccatgtcttaaggcagtgttttggagggctctggcatacgagaatgacacgtgccacgggtttggagattggttcatggcattcaaatgagggtagcttcacctcagactgtcaccagacaaaacataattncgggacagcagggggaa

SEQ ID NO: 215791 - DNA, 449 bp, Glycine max
aaaggaaggaacttgggacttgtttctctcagagatggcgttgcctaaggttgatttcgaggttggagctgatggggttgctgtcatcactatgtgcaacccacccgtcaatgctttggccattccaattatcatggggttggaagaacagatttgatgaggcagctaggaggaatgatgtgaaagctatagttttgactggcaaaggtgggagattttctggtggatttgatatcagtgttatgcagaaggttcaccggactggggattcctcgcatctccctgatgtctcagtggaactagtagttaattcaattgaagattcgaagaagcctgttgttgcagcagtagcagggctttgctcttggaagtggcttagaactggctatgggatgccatgccccgtgtgccgcttcaagagctcaattgggtctaccagagctgactct

SEQ ID NO: 215792 - DNA, 429 bp, Glycine max
  unsure (1)..(429): unsure at all n locations
caacgaaatcccaatcacttaagattaaagtagcaactcgtcaccccaagaaacaattattttccttcgatttttctctttgtgaaaccaaatttaataatttattctttaatctaggaaggaagcaaacattggttgttacattttctattgtagaacatccaacatatatgctcaacacttggctttctcatagacgtgccattgactttggagtagatgaagcaggtgcactcaagggaatgcctttgagtgctctttcttccaaataccttgagggtttatagaagttaccatataattgtgcccatttttttaggctggtatatatatgattggccccaaccaagtctgcccagaaaacaatgccaccccggtaatttgggaagctcattccagaacagatgncatgtcaaggtctgatgctcg

SEQ ID NO: 215793 - DNA, 526 bp, Glycine max
  unsure (1)..(526): unsure at all n locations
cccaaacaccccttccccgatcttcgggggcagcaccggcgggctcctgcgcaaggcacaggtggaggagttttatgtcattacgtgggactcacccaaagaacagatctttgaaatgcccactggcggcgccgctatcatgagggagggtcctaaccttctcaagttggccaggaaggagcagtgcttggctcttgggactaggctcaggtccaagtacaagatcaagtaccagttctacagggtcttccctaatggggaggttcagtatttgcaccctaaggatggtgtttaccctgagaaggtcaacgccggacgccaaggggtgggtcaaaacttcaggtctattggtaagaatgttagtcctattgaggtcaagttcactggcaagcagtcctatgatttgtgagcacacaactctatcttcatcatcatcatgccncgtgcttactttatatgctatatattctcatgtgatatcatgtacctattggcagtttattatgccacacatattgcttaaact

SEQ ID NO: 215794 - DNA, 525 bp, Glycine max
aatccaaaccatgcagttggcacaaataataatcaccaaaatagcgaaaaagaagtgtaaaattaaggtacagagtttaagcaatatttgtggcataataaaattgacaataggtacatgatatcacatgagaatatatagcatataaaggaagcacgggggatgatgatgatgaagatagagttgtgtgctcacaaatcatagggctgcttgccagtgaacttgacctcaataggactaacattcttaccaatagacctgaagttttgacccaccccttggcgtccggcgttgaccttctcagggtaaacaccatccttagggtgcaaatactgaacctccccattagggaagaccctgtagaactggtacttgatcttgtacttggacctgagcctagtcccaagagccaagcactgctccttcctggccaacttgagaaggttaggaccctccctcatgatagcggcgccgccagtgggcatttaaagatctgttctttgggtgagtcccacgtaatgacat

SEQ ID NO: 215795 - DNA, 540 bp, Glycine max
  unsure (1)..(540): unsure at all n locations
cgccaacgaccttgccccactcatcaacgacaccgccgccgccaactacctctgcgcacaattcgattccatttctagaaagctcgtcgaaacaacctacgccgtcgacaacacctaccttctgttttcagcgtatcttgtcttcgccatgcagctcggcttcgccatgctctgcgccggctccgtcagagccaaaaacaccatgaacatcatgctcaccaacgtcctcgacgccgtcgccggcggtctctcctactacctattcggctttgcattcgccttcggcggcccctccaacggcttcatcggccgcctaaacttccgcctacgagattacccgatgggctcctctatctncagcttcttcctctaccagttggtcttagccatcgncgacgcaggaatcaccatctctcccttcggcgactacagcttctttctctaccagtgggccttcgccatcgncgncgcagggatcaccagcgggctccatcgccgagagaacacagttcgtggcttaccttatctactcttctttct

SEQ ID NO: 215796 - DNA, 488 bp, Glycine max
  unsure (1)..(488): unsure at all n locations
gaaaaacaagtagttgagaactaagaagaaggaaatggcttcctcaatgatctcctccccagctgttaccaccgtcaaccgtgccggtgccggcatggttgctccattcaccggcctcaaatccatggctggcttccccacgaggaagaccaacaatgacattacctccattgctagcaacggtggaagagtacaatgcatgcaggtgtggccaccaattggcaagaagaagttcgagactctttcctacttgccagacctcgatgatgcccaattggcaaaggaagtcgaataccttctaaggaaaggatggattccttgcttggaattcgagttggagcacggtttcgtgtaccgtgagcacaacaggtcacctggatactatgatggacgctactggaccatgtggaagctgcctatgtttggctgcactgatgcttctcangtgttgaaggagcttcaagaggcttagactgcataccccaatg

SEQ ID NO: 215797 - DNA, 526 bp, Glycine max
  unsure (1)..(526): unsure at all n locations
acagaaacacattatatcgttcattcatcccataggccataacaagaaagatcaaccaagctcttctagaaaaaacaaaaatattagaagaaggaaccatatgagaacttagacgtaggagacgagcccttgagacaataattaattaacagtgacttttcccaccataccagctccttggtgaggcgaacagaagaaactgtaggttcccttagcatccaaagtaacgctgtaagtctcaccaggcgcattgagaaggtcttcatcgctcatggagattttccctgcatccacgccgctaggaatctcgtcctcgtcgaacacaacgttgtgggggaaacctgcgttgttcttggacnacgatcttctccccagaggccacggagaaattgttgggaacgaaagccagagacccgtcatcaccacccagcaacacttcaatggcctgggcgttgctagccagcactgcactcgcggcagtggccacaacagcgactcaacgtctttcagcgaagccttgatgccc

SEQ ID NO: 215798 - DNA, 539 bp, Glycine max
  unsure (1)..(539): unsure at all n locations
gaaaaacaagtagttgagaactaagaagaaggaaatggcttcctcaatgatctcctccccagctgttaccaccgtcaaccgtgccggtgccggcatggttgctccattcaccggcctcaaatccatggctggcttccccacgaggaagaccaacaatgacattacctccattgctagcaacggtggaagagtacaatgcatgcaggtgtggccaccaattggcaagaagaagttcgagactctttcctacttgccagacctcgatgatgcccaattggcaaaggaagtcgaataccttctaaggaaaggatggattccttgcttggaattcgagttggagcacggtttcgtgtaccgtgagcacaacaggtcacctggatactatgatggacgctactggaccatgtggaagctgcctatgtntggctgcactgatgctttctcaggtgtgaaggagcttcaagaggctaagactgcataccccaatggctttatccgtatcatnggatttgcaacgttcgccagtgcagtgcatcagc

SEQ ID NO: 215799 - DNA, 529 bp, Glycine max
  unsure (1)..(529): unsure at all n locations
acagaaacacattatatcgttcattcatcccataggccataacaagaaagatcaaccaagctcttctagaaaaaacaaaaatattagaagaaggaaccatatgagaacttagacgtaggagacgagcccttgagacaataattaattaacagtgacttttcccaccataccagctccttggtgaggcgaacagaagaaactgtaggttcccttagcatccaaagtaacgctgtaagtctcaccaggcgcattgagaaggtcttcatcgctcatggagattttccctgcatccacgccgctaggaatctcgtcctcgtcgaacacaacgttgggggggaaactgcgttgttcttgaacacgatcttctccccagaggccacggnagaaattgttgggaacgaaagnccagagacccgtcatcaccacccagcaacactttcaatggcgngggcgttgctagccagcactgcactcgcgggagtggccacaacagcgactcaacgtctttagcgaagccttgatgcccacc

SEQ ID NO: 215800 - DNA, 511 bp, Glycine max
atagaagaagcagaaagagaagcattagcaaaagcaagaagaactagtctaagcagaaatggcctcttcagtgatggcatctgtggccctcaaacctgcccctttcactgttgagaagtcctcagttagaggccttccctccctctcaaggaactcctcttcattcagagttgtggccagtggtggcaagaagatcaagactgacaagccttatggaattaatggtggcatggctttgagggaaggagttgatgcatctggcaggaaaggaaagggaaagggcgtttaccagtttgtagacaaatacggtgctaatgtcgatggttacagtcctatctacgacaccaaggactggtctccaaccggtgatgtctacgctggcggtacgactggcttggctatctgggctgtgactctacttggtcttcttgctggtggtgcacttcttgtctacaacacaagtgctttggcgcgataaactttgcaaatcgatgtttaagctcaacttagt

SEQ ID NO: 215801 - DNA, 530 bp, Glycine max
cacatccacacatttatagaacagaaggaacacgtatccacaaagtacttcatgaataattcttcatttttagatagttacatggactaagtttgagcttaaaacatcgatttgcaaagtttattgcgccaaagcacttgtgttgtagacaagaagtgcaccaccagcaagaagaccaagtagagtcacagcccagatagccaagccagtcgtaccgccagcgtagacatcaccggttggagaccagtccttggtgtcgtagataggactgtaaccatcgacattagcaccgtatttgtctacaaactggtaaacgccctttccctttcctttcctgccagatgcatcaactccttccctcaaagccatgccaccattaattccataaggcttgtcagtcttgatcttcttgccaccactggccacaactctgaatgagaaggagttccttgagagggagggaaggcctctaactgaggacttctaacagtgaaaggggcaggtttgagggccacagatgccatcactga

SEQ ID NO: 215802 - DNA, 563 bp, Glycine max
gtacgggataacattttgtttggttctgtctttgacccagcaagatatcaaagggcaataaatgtgactgaactgcagcatgaccttgagttactgccgggtggtgatcttactgaaattggtgaaagaggggtaaacatcagcggtggccaatagcagagagtatccatggctagagctgtctactccaattctgatgtgtacatctttgatgatcccctaagtgctctggatgcgcatgtggctagacaggtttttgataaatgcatcaagggagatttgagagggaagacccgagttcttgtcacaaatcagctgcattttctttcgcaggttaatagaatcattttggtccatgaaggtatgggtgaaggaaggagggaacttttgaggaactctctaaccatggaccgctgtttcaaaagcttatggaaaatgcgggaaagatggacgagtatgaagaagaagaaaggtagatactgaaaccacagatcagaagccctctttcgaaccaggtgtcaatggaggcattatgatcatgcaagagtggagtaacccaaaga

SEQ ID NO: 215803 - DNA, 490 bp, Glycine max
aagtcttcgtgtaatataataattgctaaaaaccattcctatctataataatattttaaaaactaaatagacaaaagaacaatctcaatgaagatgagcatcgatgaaaattcttttggtaatcaaaattacaatactacatgaaaagaatttctactcaccaaagtaaacaataaaaagttcttggttgattttcatagctccgttgtagagctacgcgccaaaataaagttagcaaaaccttaggtctatcgacttgatcgaagtcatcagtcatcagtaggcaggagctgttatataaagaagtgcagttttccctacatatcaacctgatcaaagttaattgatctgtcctcaaaaccgaagtctgattgatggaacctgttcacggtcaatctgctcatgatagcaagaccttcaatcattttataaagcgatgaccaccatccgtctggggatatttggcgctgctctaaagattcctcaattt

SEQ ID NO: 215804 - DNA, 549 bp, Glycine max
aattcctaattgtttaaacctatttctcatttcttcatcgttcgattcttctcctcctaaagatgcagatcttcgtgaaaactttgaccggtaagaccatcacccttgaggtggagtcctccgacaccatcgataacgtgaaagctaagattcaagacaaggaagggatcccacctgaccagcagagacttatctttgcgggtaaacagcttgaggatggtcgaacccttgccgactacaacatccaaaaggaatccactctccacctcgtgcttcgcctcaggggtggcatgcaaatctttgtcaagactttgactggcaagaccatcaccctcgaggtcgaatcctcggacaccattgataatgtcaaggccaagatccaggacaaggagggtatccctccagatcagcagaggttgatatttgctggtaaacaacttgaggatggaagaacccttgctgattaccatattcagaaggagtctaccttacacttggttcttcgtttaagaggtggcatgcagattttcgtcaagactttgacgggaa

SEQ ID NO: 215805 - DNA, 442 bp, Glycine max
aactgggaaacgatattgatatttaaaataaaaacataaacaacatactttcgctgaaacgagttcaatacatcattttaaaacataataaacagcagcacttaaaccagagatgcaaagcacaagttcaagggagacactgaacaaacagataagacatatgagaacacttcataaaagggattccccttagcaaccaccacgaaggcgaaggacaagatgcaaaggggattccttctgaatattgtaatctgccaaggtacgaccatcttccaattgcttcccagcaaaaatgagcctctgctgatctggagggataccttccttgtcctgaatcttagctttcacattggcaatagtatcagagctttccacctccaggtaatggtcttccctgtcagagtcttcacaaatatctgcatacctccacgaagcctcaaca

SEQ ID NO: 215806 - DNA, 565 bp, Glycine max
aaagactaaagagagttgtggtttggtggtggttgtcgtttttgaaatggcagcgtcgtcgtcagagaagcaagtggtggtgataggcatagacgacagcgagcagagcacgtacgcgttgaattgggctctggataacttttttcccgagcccaattttcaagctcgttctcatccactccaggcccaccgtcacctccgctgtgggcttcgccggccctggagccgctgaggtcttgcctattgtagattccgatttgagaaagattggcgccagagtcctcgaaaccgctaaacaactttgcatcaacaaatccgtaaatgatgtgacagcagaagtggtggaaggtgatcctagaaatgttctttgtgatgctgtagataagtaccgtgctgcaatgttggttgtgggtagtcatggttatggggctataaaaagggcgggtttaggtagtgtcagtgactattgtgctcatcatgctcactgcactgtgatgatcgtgaagaagccaaaatcaaacactgatctgtaatggctgcgtctatatagtacaacaattaacat

SEQ ID NO: 215807 - DNA, 550 bp, Glycine max
agtacaatatttttttactattttattttattaaggatgaaaagagcagtaatggaattgaactcatcagttcaagaacttttcgtgtacaatgtaaggtaaagtcctgatacgtacatattttctgatggttccatctttaaaaataaactgtgcctcaacgtatcaaaccataaagtcaataagccatatccatacaacaagcatagttacgaatttctgtgaacattattttctttctctcttctttggctgaaaggattatgtttattgttgtactatatagacgcagccattacagatcagtgtttgatttttggcttcttcacgatcatcacagtgcagtgagcatgatgagcacaatagtcactgacactacctaaaaccgccctttttatagccccataaccatgactacccacaaccaacattgcagcacggtacttatctacagcatcacaaagaacatttctaggatcaccttccaccacttctgctgtcacatcatttacggatttgttgatgcaagttgtttagcggtttcgaggac

SEQ ID NO: 215808 - DNA, 485 bp, Glycine max
gattggcacggtggtgcaaaagctgctgaatttgctgcaagtaacttagaaaagaatgtgttagatgaagtaatcgtgagagatgaagataatgttgaggaggcagtgaagcgagggtacctaaacaccgattcggatttcctaacggaggatcttcatggtggctcttgctgtgtgacagcattgattaggaatggtaacctcattgtgtccaacgctggtgattgccgcgctgtcattagcagagggggtgttgctgaggctctaacatctgatcacaggccttcaagggaagatgaaagggacagaattgagaacctggtaagcttctgagtgtgatagtacttaatcttttctctgtggttattgaaaccacatgaacctgtttgaatttggatttgttggttcttaagcattcgaatttgtcttgtagggcggctatgttgacttatgccgtggtgtttggaggatccagagatcttctg

SEQ ID NO: 215809 - DNA, 608 bp, Glycine max
actaaataaataatgtataaattaattaattgtatgctgctcattacataaattattcaatgaaaaaaataattactaaatgttattgttaatatccccctctcccctatgcgggtacaaaaaaattcccaataatgtagtcagatttatatttacagaaaagaatcagctactcttatccatcaggcaccaccaaggctgttcaaagtcgcaaactgcaacgcaatcttaacctcaatgcgatctcaactgcaataatctaaaaccttatgcactacctccccttctgttgtactaaggtaactttaaatatagtgctccaatttgattagcataacacttgtgtcatccaaagagcctcgtgaaacagacaaatctacaagctttttacaagccagcagcaatggttgtgatttgttgttgcctacgagaaaagaacgagcagtatctactgcttcctgattactaacctgaaatgagaatgagaaacaaacttgtttagtgactcagtccaatgcatgagcaacaatattaaaaaatacttaaaaagacactattaacattgaagtgaaatggtcaagttctataccttatcccataatccatct

SEQ ID NO: 215810 - DNA, 462 bp, Glycine max
cgaaaacagaggctacaccaggtaggggaattttggccatggatgagtccaatgctacctgtgggaagcgtactggcttcaattgagctagagaacactgaagctaaccgacaggcataccgtaccctcctcgtgacagttccaggccttggtcagtacatctatggtgccattctctttgaggaaacactctaccaatccacaactgatggcaggaagattgttgacgtgctgcttgagcaaaacattgttcctggtattaaagccgacaagggtttggtgccccttgcatgttccaacgaccagtcatggtgccaaggttaggatggtctagcctatcgctcagctgcatactacgagcaaggtgcccgtttcggcaaatggcgtactgcagcgagcatccacaacggtccctatgctctggcagttaaggaagcagcctgtggtctggctcgctatgct

SEQ ID NO: 215811 - DNA, 534 bp, Glycine max
gccgagcttaaaccattttgttatatattgagacataatcaagtacacaactcatagcaaaaggtttattaagctgtaaaggtgcatttaaccataaacaaaaatagtctccaagactataaaaacattacattttagacaaattagtcttccacttcatcgtccgtcaacacctactgtaactgctggtgttgctgcctaacaagtatcatattcactgcaaacatcttagtaggagtagcttttgacgaacaactccttcttggcttcctcggattcaccctcaccagtgtacttcccaagctgagcgagtgagttggacttggcacggaatgcgagtgcatcttgtgctgccttcacgttctctgggcggcctccccatgtcttcaaggcagtgttttggagggctctggcatacgagaatgacacgtgccacgggtttggagattggttcatggcattcaaattgagggtagctttaacctcagactgtccaccagacaaaaacataatttcagggacagcagggggaat

SEQ ID NO: 215812 - DNA, 463 bp, Glycine max
aatggcctcagccgcatcccccaccactttctctctcctccactccgccaccccttcctcctcctccaccgccacctccgcctccccctccccctcgcgcgtgcagctcacctcctccctccgcgcccgcccgctgcgccgcctgggcttcgccgcggcggacccgctgctcgcggcgagtgtagcggcgcgcgtggcggcggtgagaggaggaggaaagggcgcgaggggggtggtgtcgatggcgaagaagagcgtgggggacctgagcgcggcggacctgaaggggaagaaggtcttcgtcagggccgacctcaacgtcccgctcgacgacaaccagaacatcaccgacgacaccagaatccgcgccgtcattcccaccatcaaacatctcatccaaaacggcgccaaagtcattctctccagccacttggggccgccgaagggtgtcactcccaaatac

SEQ ID NO: 215813 - DNA, 572 bp, Glycine max
gccagcaactaaaagatttatttgaatttatggctctcagccagggtttacagttacacgcaatttatgtgtgaagccaataataactcaagcaagataaaatttacactaacagacttcgaagggtcctacaacatatgctcttttacaagattgacaacactgacacctaaggatgggaaaattttccaagatgaaaagtgtcttacacagcgactgggacggcttcatcaagagcaaggactcctggaagctctttgccttccaataactccaaactggcaccaccaccagtagatatgtggctcatgacactagcaactcctactttctccacagctgcaacagaatctcctcctccaataattgtggtcaccccctttccactgaggtcagccagcttctttgcaatagcctctgtaccaacagcaaacttgtcaaactcaaacactcccattggtccattccatatgatggtttgggtagtatccaatgcttcactgaatgatttaacagaatctggaccaatatccaatcccatccagccatcagggatggcagatgctggcacg

SEQ ID NO: 215814 - DNA, 508 bp, Glycine max
  unsure (1)..(508): unsure at all n locations
gtctgaattggccaaagcattggctgcatactactttggctccgaagaagctatgattcggcttgacatgagtgaattcatggaaaggcacactgtctccaaacttattggttcacctcctggatatgttggttacactgaaggtggtcaattgaccgaggcagttcggcgtcgtccttacactgttgtactgtttgatgagattgagaaagcccatcctgatgtgttcaacatgatgcttcagatcctggaagatggaagactaacagacagtaagggcagaacagtggatttcaagaacacacttcttataatgacatcaaatgttggaagcagtgtgattgagaaaggaggccgcaaaattggatttgatctggattacgatgagaaggatagcagttataacagaatcaagagcctggtaactgagagattaacacaatacttggggccaaattttggaattgattggatgaaatgattgtctttaggcagctcacanaactgg

SEQ ID NO: 215815 - DNA, 516 bp, Glycine max
gttacttattttttttttttctccttttacatttttatgtttataattctgtattggtcatgtaaccattaacaaaaattgttctttcaagacttttaaaacattacaattaaagacaggggtaggtttattccactttatcctccgccaacacctactataactgctggcgttgctgctgcctaacatgtatcatattcactacatacatcttagtaggaggggcctttgactaacaactcctccaaggcttcctcggattcaccctcaccggcgtacttcccaagctgggcgagcgagttggacttggcacggaaaaggagtgcatatagtgccgccttcccgttctctgggcggcctacccatgtcttcaaggcagtgttttggaaggctctggcatacgaaaacaacacgtgccacgggtttggagattggatcatggcattcaaattgaggggagctttcaccttaaactgtccacctcacaaaaacataattccagggacagcaggggga

SEQ ID NO: 215816 - DNA, 503 bp, Glycine max
attgttcattcaatttctttttcttctctcatcatctcaaccaacaaatcatttaattgcaatcatctatggcgtctttcgacccgaacgtagattcaagtaattccgacacgttgcgagaatccaatcacaagaagcgcagaaaaatcggagaccacgccgccggcgatctcgatttcgccgccgccgtcccttggagatccgacgtggagcagcggatctactcccgccgcctcgtggaggctctccgccgcactccgtcatcggcgaccaagcctagagccgccggccaggtccgcgagaccgccgaccgcgttctcgccgccaccgccagaggccgaacgaggtggagccgcgcgattctcaagcgctggaggaagctccgcatgcagcacaagaaggcgaaggcggcatcgtccaacaacggtttgaagagaacgaggattggaaacggagagaggaggaacccgttaccggctgttcagaagatagcgcgcgttctc

SEQ ID NO: 215817 - DNA, 501 bp, Glycine max
ggggatagtggaactcaaaggaaggaggaataagcaaatggcatgtacagtgtacacgataaaatacatgaatctgaaaaaaaaaacgatataataattaaaaataaaaaataaaaaataaaaaacacctggcgcaatatagcctaggcgcgcgggtcaactcaacgcggagccggcgagatttgccggcgcggcgccggcgagtagttcggccagagccgtcatggctcgcacttgcatctccaaggcggagatatagtccgtggcttcttccagaaggttcgggaacgaaaccttccggcaaccgggaaccaaccggctgagaacgcgcgctttcttctgaacagccggtaaccggttcctcctctctccgtttccaatcctcgttctcttaaaccgttgttggacgatgccgccttcgccttcttgtgctgcatgcggagcttcctccagcgcttgagaatcgcgcggctccacctcgttcggcctttggcggtggcg

SEQ ID NO: 215818 - DNA, 461 bp, Glycine max
  unsure (1)..(461): unsure at all n locations
gctaagtgcctaacacctgcagtgaacaatggcctctgcatcagcatctcttctcaagtcttcacttgttcttgacaagtctgagtgggtgaagggacaaacacttcgccaaccttctgctgcatcagttgtgagatgcaaccccaccaccccatcaggcctcaccatcagagctggttcctatgctgatgagctcgttaagaccgcgaaaacagtggtttcaccagggaggggtattttggccatggatgagtccaatgctacctgtgggaagcgtttggcttcaattgggctagagaacactgaagctaaccgccaggcataccgtaccctncttgtgacagttccaggacttggtcagtacatctctggtgccattctctttgaggaaactctctaccaatccacaactgatggcaggaagattgtcgacgtgctccttgagcaaaacattgttcccg

SEQ ID NO: 215819 - DNA, 460 bp, Glycine max
gattgccgagattcaaccatgtttgttatatattgagacataatcaatcaagtacaccactcacagcagaaggtttataagctgtaaaggtacatgtaaccataaacaaaaatagtctccaagactataaaaacattacattttagacaaattagtcttcttccacttcatcctccgtcaacacctactataactgctggtgttgctgctgcctaacatgtatcatattcactacatacatcttagtaggagtagcctttgacgaacaactccttcttggcttcctcggattcaccctcaccggtgtacttcccaagctgggcgagcgagttggacttggcacggaaaaggagtgcatcttgtgccgccttcacgttctctgggcggccctcccatgtcttaaggcagtgttttggagggctctggcatacgagaacgacacgtgccacgggtttggaga

SEQ ID NO: 215820 - DNA, 604 bp, Glycine max
aattgaaaaaaatctaagtccctttggtcttcatcttctgttctgatccaggtatggcttctaaacgcatcttgaaggagctcaaggatttgcagaaggatcctcctacctcatgcagtgcaggccctgtggctgaggacatgtttcactggcaagccacaatcatgggacctgctgatagcccatatgcaggtggtgttttcctagtttcaattcattttcctcctgactatcccttcaagccaccaaaggttgcttttcggactaaggtgttccacccaaacatcaacagcaatggcagtatatgtcttgacattctcaaggagcaatggagcccagccctaaccatttccaaggtccttttgtcaatttgctcattgttgacggatcccaaccctgatgatccactcgtaccagagattgcacacatgtacaagactgacagggccaagtatgaggctactgcccgcagctggacccaaaagtatgccatgggatgaccatttagaactgtttttcaatgaagcagcagaatcataattattgtaaaagaccaaaggatatttggatgaatttgaatgcttaatttatataagtgaactcc

SEQ ID NO: 215821 - DNA, 432 bp, Glycine max
aggacttacggcaccggcgcctaataaaaaaaatgtggacactttggctaaccaggttttttgttaccactgcggagtgccacttatataaaataaagctttcacttgcattcaaattttcgttcgttcttcaacataaattatgagattgctgctcgcttgaaaaacagctctttttggccctcggatgggatacttctgggggcacatgagggccgactcctcatacttggtccggctacaattgaacatgggtggaatgtttggctggagtggacaatcagggttgggatccgagagcagtgagcaaatatgcctaaggaccctggagagggctagggacgggctccagtgcttggtgagaatggtaagaaatctactggcactgctgcagatgtatggggggcacaccataggccgaagggccacctt

SEQ ID NO: 215822 - DNA, 553 bp, Glycine max
caacaacttcaccaacactaactcaacccgacacacacccacacaaaaaaaaatgtccctcctttcctccggtggcttcttcggccgcagaagaaacgacccgccaccccaccaacccacgtgggaccactaccaggcccaggaccatcaccaccctctgggagtttcccagccccaccacccaccccccttcatgtccttccccagtgactcctcgccggtgctcaacaccgccctcatagagtggaaggagaccccggaggcgcacgtttacaatgcgcacctcccgggctacaagcgcaacgacgtgcgcgtggaggtcgacgacgaccgggtgctctgcatcgtgtgcgggaagagcgtcgagaaggaggagcagaggggaggctggcaccgcgtcgagctctccagtggacagttcgttcagcgcctcactttgcctgagaattccatggtggatcatgttaaggcctatatggataacggggtgctcactatcacggttcctaaacaccacagaggggtcaataaccgtgttagaaacattaacatc

SEQ ID NO: 215823 - DNA, 285 bp, Glycine max
tgactcataaggctcacttgactactgcaatgacaacttagattagagtttggttaagcatctgttatggcaatgtactttacagaatgtgaattatcttgtgtatccaaatccaacttactgggactagctttatgcacaaactatctgacatagatctcatatcaacacaagtggattcgccatccatactggagaactcacttcttactctaatcatcgagcgtgaccttcgcaaaaacattcccgtcatcaggatgtcatctcaggactgcgatatgatgg

SEQ ID NO: 215824 - DNA, 385 bp, Glycine max
gggaaaaaccaaccaacaattcgggggggggggaaacccaaaaaaattcccattttttgaaaaccctggggattacccttttcttccccaaacccccattttaaaaccctcaaaaggcccccaggccccccttgttttcccccaaccccaaaaccaaccttacaaaccccggcctgcccccgttttaattttccctcggggcccccaaaccaaaaaaactgccccccgctttacaagggagcgaatgggaaaaccccggggttcccccccctataacccttgggggaaaaccccctttcccccgggggggtaacaccgaaaaggcccccaccggtccccctttccaaaaaatttcccacccccacgccccacgggccccccccgg

SEQ ID NO: 215825 - DNA, 421 bp, Glycine max
cttggaccttcctcttgagatcttcttcaaccttcagagtgagaaaacacattcagaaaccacgttactctcttcttcttcttcttctactttgtctctctctcgaggtcattagcaagtattcaccatggaggcaccatcttccaccacacccaacgacccaacaaaaccttgcaacacttgcaccacccttagtctggaggccggcccggcccaagcgagcccactccgaaaaatgtttgccgtggcgaccatcaccgccggcatacagttcgggtgggctctgcagctctatcttctaaccccctacgttcagctgttaggagtcccccacgcggcggcctccttcatctggctctgcgggcccatctgcggactcgaggtacagaccatagtgggctactacagcgaccactgtacc

SEQ ID NO: 215826 - DNA, 592 bp, Glycine max
  unsure (1)..(592): unsure at all n locations
gcggcacccaccatgaaagccggcaagttgccaccaccaaacaaagcatcccaaggaccacttaatgtagacaccaccatctgtggcaccacaattgcaagattgaggactcccaaagataaaccttggcctgctcctgaagcgctgcagtatattgatgctagagcaaatggaacactgaaagtaatcgcaagaggaactccgagaaccccaaagaaaaccatggacccaaccaccaccccttcggaggggtgacccacggcggcgggattcatcttgcgctggtgctccgccaccttggtgatcaccaccgtcattccgaacccaattgccagaataaagttcacaatcgcccacagcctcttcactcccccaaccatcttccccaacggctccaccgccagcgacatgaagcccaaaacgacggcgtttaccatcagccctagcgacccaacgcgcactccattggcgtacgcgtnctccctcacttgaccaccgtacacctcgcgccccatccaatcggtgtcgaacaaaaagtaagggaaccaccccacccagttcacagctgtcaccagcatcagcatccacatcg

SEQ ID NO: 215827 - DNA, 387 bp, Glycine max
atttacatattctagtcataggtcatgatgaaacagtcaaggccatcattcgggctgatcagatagctcgaatagtactagaacgcattgagcaatctaatgccgacttaataattgttggtacaactgccgtactgaaagttggcgagggcatagcttggattgaaggctacgatgaatccataggaagctgtgatacgggtagacgtgaagggatctatgggcagggacactgatttcgaactcattgatgtcagctgctggatatatgggtgacactgagaggaggcaataggccaatgcagttcaggcgacgacgttgcactgctgaaatgcctgatgataatgataaagcgcatcctgatgtgtatgacatgacgctaccaa

SEQ ID NO: 215828 - DNA, 582 bp, Glycine max
gtggagtagaacacattcattcaattgcaattttttataatttcatatatcctccaatattgctggtggttagcactcacaagagacaggctcaactaccagacaaattttccattcccggcatctcctccaaacctacgtaccccagataccctaaattcgattcatacacataacacaacacaacctcgttcctttgctgaccaactcggttgttgtttttttctttcactttcacctatggttatggcttctttgattcagttttccccaactcccctctcctctgttcccatcactacccgtttcacccggacccacaagtctcgccttcgttgctccttagatgctaatgtttccgacatgagcgttaacgcgccaaaagggttgtttcctccggaaccagaacattatcgaggaccgaagctgaaagtggcaattattggagctggacttgcaggcatgtcaactgcagtggaactcttggatcaaggacacgaggtggatatatatgagtcaaggcctttttatggaagcaaagttggtcttttggtgacaaggtgggatcacattgaaatggga

SEQ ID NO: 215829 - DNA, 450 bp, Glycine max
gggataggaatcacaatttatagaccccggattttacaactataaacaacactacttgcttcgaaacaatcagttctgaaattatttttggattgaatatacatttgaaaaatgttgcatggaaaaagaacgagctagcttcatgtcaacgtgaccaccttgtggaaatttatcatactaggctcaattcatctttagtatttgatattggtaaggcggctttaaactcatcatcgagctttttccgcaatgccactaatccttcccctgcatcacaaatataggccgaagcttgtctgccagacaagggtgcaccttccatgctggctatgtagtcctgctttgtgtaagatccagcaagaaagaaattcttcactggcgtcttttgatcaggtctatatggatctttaccaggtccctcacgggacaaagattggccaattttaacaa

SEQ ID NO: 215830 - DNA, 561 bp, Glycine max
ctcgacgccgtcgccggcggtctctcctactacctattcggctttgcattcgccttcggcggcccctccaacggcttcatcggccgcccaaacttccgcctacgagattacccgatgggctcctctatctccagctgcttcctctaccagttggtcttagccatcgccgacgcaagaatcaccatctctcccttcggcgactacagcttcttcctctaccagtgggccttcgccatcgccgccgcaggaatcaccagcggctccatcgccgagagaacacagttcgtggcttaccttatctactcttctttcttaaccggtttcgtttaccccatcgtttcgcattggttctggtcctcagacggttgggccagcgcgactcgtagccacggaaatgttttattcgggtctggagtcatcgacttcgcgggctcaggcgttgatcacatggttggcgggatagcggtcctgtggggggctttaattgaaggcccgagaatctggcggctcgatcgttcgggcccgtcagttgctttacgtggtcacagcgcgtctttagtt

SEQ ID NO: 215831 - DNA, 375 bp, Glycine max
gtcatggttctcttttagctaacctgattgggaatctggctttccctttgatcttgattggaggattgttccttctctcgagacgatccggagggatgggaggtcctggtgggcccggatttcctctttgcttttggtcaatccaaagccaagtttcaaatggaaccgaacaccggagtgacatttgatgatgttgctggggtggatgaagccaagcaggactttatggaggttgtggagtttctaaagaagcctgagaggttcactgctgttggggctcgcataccgaaaggagttcttcttggtggtcctccaggaccgggaagacacttgtagccaaggctattggctggtgaagctggtgttccatttttc

SEQ ID NO: 215832 - DNA, 404 bp, Glycine max
aaagggttattaaagttacactgtattatagacgtaaagaaactagtaatttttacacttaattctcttttatatatactctctgggggcatttgtcaacactacaaaaatgaaaaagtaagggagaaactttaatcattcacaaatatggagcaggctgtagagggcattctgttttctaagataatacatattaaagatgttacatataggctattcaaacaggggctggtactggagttgaaggagggacacggttttcaactggaatttcagcaaactcagacaatatagcacggaattcatctccgggcagggtctccttctccagaaggacttcgacaatcttgtcaatcgcctcacgggtggtccttatatggcctagtgcaatttcatatgcttca

SEQ ID NO: 215833 - DNA, 447 bp, Glycine max
aatggccatggttgagctctggtggattacgtgctttctctaactactgttttccacacttaacgaaccagaacacagtgagaaagacataatggcggtggagtacacatgctgctcaacggccttcttcgttcacatactggtcatcgtgctgctcgtgcttttcgcgggcctcatgtcgggcctcaccttgggcctcatgtcgctcagcctcgttgatcttgaagttcttgctaagtctggtactactgaggatcgtaaacacgctgagaagatattaccagttgtcataaaccaacatttattgctatgtactctgctaattcgcaatgctgcagtcatggagacacttcctatttttcttgatggccttgttactgcatggggcgctatcctaatttgtgtgacattaattctcttagttggtgagattataccccaatcagt

SEQ ID NO: 215834 - DNA, 519 bp, Glycine max
catacaatacacgtaggtatcaattaatcaaaagaaaggaaaacgcgcgcgcactaaaaaacaaaccatgatttgctgccttgctggtatgcgtcattgcgatagagacacgcatgtacatctcaaaaacagctgtctggtccctgcatttcatcaacgataatggcttacacgttccaaatcacaactcagatctctatacagcaggtttcaaccctaaaccgcattatctatttaattatttgtaaggtgcaaacaagaaatatgaacatggaaggttttatggaaaaaaagccactgctatgagtcttcaaaatgatgatctgtctcatgaaagatctcctcctgtgaaagctcttcaatgacatcttccatggtaataattccaacggcttcttcttcttcagggagctttggaaggggacttccatctatctccaaaatatccgagtacatattttttgaccattgtctgctccgagaacacctatttgatgactggtttgtatttggaaagct

SEQ ID NO: 215835 - DNA, 401 bp, Glycine max
cgacaaatggcgatggcactggcgcttcgcaggctttcatcttcaatagacaagcctctgcgccctctcttcaatgccggatgcctctactacaagccggctatgcctgatgaagctgtttacgacgaggagcgacccggtggtacatggccggcgcaggagtatgctccactggaggtcgcggatcctgagattgctgatgttagtgagcttgagaaagctaggcgctggcaggggctagagttgataccggcagagaatgatcacctctgtgggtgtgatgcaagcggctggatcggttatgaccagcagatacagtgaggggtaccctggtgcaagatattatggcggaaatgagtctattgacatggctgaaacactgtgcacaaagcgtgccctag

SEQ ID NO: 215836 - DNA, 493 bp, Glycine max
actttttccacccacaaacacgtaactactattccaaactccggcatggccactgccaccgccgtcgccgacacgtcatactttttcggcacccgtctaaacaacgttaacacgacaaccttaaacaacgggagattccacgcgctcttgaacttcggcaaaaagaagacggcgccgaagtcgccgccgaagaaaaaggaagtgaaagtgaaaccctccggagaccggttggtgtggttcccgaatgcggagccgccggagtggctcgatggaagcatgatcggcgaccgcgggttcgacccgttcgggttcgcgaagcccgcggagtacctgcagttcgacctggactcgctggaccagaacctcgcgaagaacatcgccggcgatgtgatcggaaccagggtggaggtcgccgaggttaagccgacggccgttcagccctactcggaggttttcgggattcagaggttccgtgagtgcgaactcatttatg

SEQ ID NO: 215837 - DNA, 486 bp, Glycine max
acaacagagtacaaacatacatacataattatacgtagcagttttcatcatcttttgggtgtacagaaaagaattaataaaattagatgaggatgtggataacttaaccgaggagaatgagaacaaggttgaaagttttcatttataaagttatattatattggtatatgatgtcacttgttgaaggtagcaagaaaactgattgggccttttcctgtcacagcagcttgaattgcaaagatgaggaagaccaccatggctaagcgagaatgcttgatctcagcaagttgaagtctggctttttcttcagggtcgttggccaaacccagaggatcaaagaacctgccacctgggtacaaccttttctctgggtcaagttctgcatttctttgaaactctatgtaccctatcactatcacctcaatccagatcagtgtggtcaatgaaaatggaagaggaagtcccaggtaagatgatccttccact

SEQ ID NO: 215838 - DNA, 558 bp, Glycine max
  unsure (1)..(558): unsure at all n locations
ttaataatagaacacaagtagttaattcaataacaacgttttcaaaaattcacttctccttcaacgaggaaagcagcgtttcctgtttttgagttgtcgcattttgagacggcttaaaggcatgggagacattgaagaacaaaccatctgacatagatctcatattaacagaagtggatttgccatcaatatctggattctcacttcttactttaatcatggagcatgacatttgcaaaaacattcccgtcataatgatgtcttctcatgattccgttagcatggtactcaaatgcatgttaaaaggtgcagctgattttcttataaaacctgttcgcaggaatgagctaagaaacttgaggcagcatgtatggagaaggcacgccataagcaggcctnctcaaaattttacactaccagagattgaaattggttttgctgcaaaaaaccatgctgcaagcaatgactctagtggttctgtggcttctacagcaaataatggtgaatgcatcgagaaaacaagtgaggctcaagatatatcgcagctgaagaggtctt

SEQ ID NO: 215839 - DNA, 579 bp, Glycine max
caccttttcaaccgttcactccttcttctgcgtcaccgtcaccatcataatcaccatcccttaccttattcttcttctgtaccatccctctccccattatctcgctctcgtgtcttgtcctctactcctttctccatggcttctgattcccctttccctgtcaccgctcaaaacatcaaccccaaggttctgaaatgtgagtatgctgttagaggagaggctgtcacacttgcccagaatttgcaaaaggatgtacaggccaatccaggttctcacccatttgatgagatactttactgcaacattggaaatcctcagtctctgggccagcagccaataacttttttccgagaggttcttgcattatgtgaccatccagctatatcgtacaaaagtgaaacacagggtttgttcagtactgatgcaatacagcgagcatggcagattgtggatcagattcctgggagagcaactggtgcctatagccatagtcagggtgtcaagggctagcgtgatacattagctgctggaattgagagcgtatggtttcctgccattctgatgactttcatgactgat

SEQ ID NO: 215840 - DNA, 512 bp, Glycine max
attcgattaaaaagagatttatataggacctaatacaagtataagaatggagaaaatcaaatatcctttcaagtcttgcatattcaaaatgcaactataaggagttgacaaatttattcctgaaaacaaaagagactattttctctaactacaaaatccatcctcatcaaatatcaattgggtacccttaaattgacggataaaattcaagtaggacttagtcacggaactcatccatgaatttttcatggaactcagtcaagcgggtgacgatggccggaatcttttcttctggaggcaatatggtgcacctaaaatgccatgtgccaggaacctgtccaaaaccagaaccaggaacaacaacgactcctgtggcattaagcaagcgtttgcaatagaagttatcaggtgttgcatttgcagcctctgcagctttgatagccttttcggacaggcgaatttgggggaacaggtacattgccccttctgctttgtgcatgttacaccctcta

SEQ ID NO: 215841 - DNA, 507 bp, Glycine max
tggaaacaggcatagcatgctacactcgcgggcctttcttgcctagtgtttcttccaagcactctccaccttccatttctccatctttcggcttgaggagtctgaaatcaagctctttatttggagaatcgctaagagtggcctccaaatcaacaataaaggtttcaaagacaaagaatacttcactcgtgaccagatgtgaaattggtgacagtctcgaagaattcctcacaagagcaacaccagataaggggttgatcaggttgctggtgtccatgggagaagcattgataacaatttccttcaaagcgaagactgcttcaagcggtggaacacaatgcgataacacttatggggatgagcagcttgcagtggatttgctagctaatcagcttctttctgaggccttaaattactctcatttctgcaagtatgcttgctctgaagaaaatcctgagctctaggacatgggacgtccagttgaaggtggacttaaggggtgcattg

SEQ ID NO: 215842 - DNA, 600 bp, Glycine max
  unsure (1)..(600): unsure at all n locations
gttattatagtgattaacagaaatatgtgactaaattgcaggtacttgtctgaagatatagcatatatctttttttctaaaagcagataaaatagacaatgaattgcaggtttaacagattaagcagctgctccaacagctacaccatccttgagcctggatttaccatacagggtttcttcaaaccggatgatctcattcttggatccataagcaacttgagttctctcatcaatgttagtgatgactttgtctagcacagactgatgaccatcactgctgtaacctccggctttttcaatcaagaaccccaacggagctacctcaaacaacagtctcagcttggctttggctgatggtgatgtcacattggtgaagatgcctttttcttttacaataatctggttgacatctggcaccattcctcccgtgtatctcaatgtgtacttttcattgacatagtaatcgatcaacttagcataatcggngttgtcagatgtggctctcaaatttcctggggagaacaattttccttcaccaatttctgtggtctctttgacatgctgccattttccttcatcaagcagaagaaattcatgg

SEQ ID NO: 215843 - DNA, 549 bp, Glycine max
acgccataatgatcatttacagtaatgctgggatattaatattacatcatagtcaaaccagtggaaacatacaaacacccccagcttccgacggaatagttcattggtgccaaagttataccgaatacggcgctgattttcaccttccccacaaatcctttttcagtttttccctatatccccctggtaaccccgctaccctttttctgaatttgatttgctttataggcaaaaaacatgatgaggcctaccaggtattccattaaaaactttaggtacattgacaagtaaaacatactatgactatggtttaaacaaattaagtacatagtattagcaaattaaccgcattatacaggaagcgtctctggcaaggattcgggggctccgctgctaccattgagcacaatcacattaccatcagaatcaacatccactataacagagtcgcccttcttgatctctctggcaagcatcttctcagccatgctgtcctccaaaagtcgcattatggctcttcttagaggtctagctccataactagggtta

SEQ ID NO: 215844 - DNA, 550 bp, Glycine max
tgaatgatctcaagtttaaaattcatgctcatgatccttcaaattctggagatattcaaaaagagcttcgaaagtctctgttatggttgagggatgaggtccgaaatcttccctgtacatataaatgtcggcatgatgctgctgctgacctaatccatatttatgcttataccaagtacttctttagaatacggaattatcaaaccattacatcaccacctgtctatatcagtccgcttgacttaggtcccaagtacactaacaagttgggagcagaatttcaggagtatcgaaagatatatggtgaaaattattgtttaggacagctgatattttggcataaccagagtaatgcagatccagatcgtaacctggctagagccagcaggggttgcttgtctttaccagacaccagttccttttatgccaaggctcagaagccatcacggcattgtgtttatggtccaaggaccgttagatctatgctggctagaatggagaggcagccgcagagatcttggcccaaagaccggatatggtcattcaaaag

SEQ ID NO: 215845 - DNA, 575 bp, Glycine max
  unsure (1)..(575): unsure at all n locations
ctctctctgttttctctctctcgtctcacttgaaactccacaacccaattttcttttcctatgacccaattccaaatccaaatcaccaattctaattccattcttcaggagttgaattgaattcgtgatgaagagggaccacaaagatagctgcggcggcggcggcgccgccggagggactgtgaagggtgagtgttcctcaatgcagtcaaacgggaaggcgaagatgtgggaggaagagcaacagcagcagcagcagcaacaacagcaacaacaacaacaggggatggacgagttgctggcggcgttggggtacaaggttcgtgcttccgacatggctgacgtggcacagaagctggagcagttggagatggtcatgggttgtgcccaggaagacggaatttcccacctggcctncgacaccgttcattacgaccctacagatctctattcctgggtccaaagcatgttaaccgaactcaaccccgaacccaacaacaacctcgatccatcttctttcttgatcgacaacaacaacaacatcatcaacagcacagcccctgttttcaacgacg

SEQ ID NO: 215846 - DNA, 499 bp, Glycine max
aaacaaattatataataataataatttagagaaaggaaaacaaaacactaaagaggagaaacggtaattatgagagcacaattacaaattacagtctttctttgggttttctttttacttttttttttttttttggtcacccctctcatttatttatcctcttgctgcctggaaggctcactgactcggtcactgactcagttcactggaacaagtccaattaatctatagttttacattcactgagtcaagccactagactcgctggaggagggaagcttccaagcggaggtagcgatgagtggcctagtgtgccagccaagcatgaggcagccgttattctcctcaaccctatacccatcaccgcctgcgaatagagcaagtagcatactcgcttgcttgaatgcgttggacccgagatgaaccgggtcgaacccggccgagtccaatctccccctccactgagtcaaagtctcgtgccgctcgacccggtccgggc

SEQ ID NO: 215847 - DNA, 548 bp, Glycine max
ttcactttcaactttcaagtcaaaaggacaatagtttcaaggatcaaactcttggtaagatttcctatatgtaacccttcttgtcttctagctgttgagaatttgggatagttataactctataaggaaatactccctttgatcattatgcatgtctggccctgtggccacagttgataatttggatggagcactttcttgtgcagagagaacaaaatctcttgatgccatttctgaaatagactgtttatctatatttacaatcggtgaagctgctcattcctctgaagttgctggatttagagtaggggaactctcacttcctaatggagaatcatattctgggtcctttcttggtaacattccagagggtcagggtaagtatgtatggtcagatggttgtgtatatgagggtgagtggagacgagggatgagaaatggatatgggaaaatacaatggccttctggagtaatgtatgagggcgagttctcaggtggctatatccatggtacaggagcatatattggccctgatagtctgacctaca

SEQ ID NO: 215848 - DNA, 506 bp, Glycine max
gaaaatagaaaagaccatttagcatatttatataaaatctaaacatattcaagtcaattatacagcatgcacaaaaggaggcaatgtgacaatgtacacactttctgaataaaccaactggttgaatttaacccccaaaccttatcttgccatttcatgtggggggaacattttctgaataaaatccaggaagcgacgcgagtagaatgttgggtccaccgccgagatagataatgaatcaaactgaatagatttgtatgcatgttcaatcttcttagtcatgttgtactcttgcaatatgtcaattataccaaggtaaagtacaacatcgtaagcctcatggaacatttgaacttcctcttttccaggaatctgctctgccctagcaggcatgttcacacctagctggatttgtagtcttgctgtaccgggtagaagtagatccacctcctcatccccagcagctcgcaatctgctacccctaatgtgtgaccctacaacaacac

SEQ ID NO: 215849 - DNA, 445 bp, Glycine max
gttaaaagccttagccttccctacaactccaaacacaaagacatcatcatccatggctgcctccgtctccactgtcggagctgtcaacagagctcttttgaacctgaatggttctggagctggagcttcagctcccagttcagccttctttgggaccagcttgaagaaggttattgcctcaagggtccccaacagcaaggtttccggtggaagcttcaagattgttgctgtagaagagaagaaagagattgaagagacccagcagaccgacaaggacagatggaagggtcttgcctatgatatctcagacgaccaacaagacatcacaagaggaaagggtttggttgactcccttttccaagctccacaggatgctggaacttactatgcagtcatgagctcctacgagtacctcagcacttgacttcgccagtacttggacaac

SEQ ID NO: 215850 - DNA, 493 bp, Glycine max
aagtggacactgtaactcaaaattatagaggaagacggtccaatatgaaaaatatagtaagatcatctcaaacttagcatcttctctttgcacctaagacattgagaatgctaagaatgttacacgcaagttccatcacaacttctagcacttggattagtacaacaaccttcacgaacagaaatatttacttgccaagtttgctttgcctccaattcaagactggaagaaagttcccctctgaatagcatcctcgttagcatttccaagagcagcctcgttcaagtacttgtcagccaattggactctcttgacattctcttgttcttggacaagcatgttaccatacagcaagagcttctccagagtcatcttgggctgctcaaaggttggaggtccatcttttgagttcacaagcttcttcccaacactgtcaacaccaacaccagaaatccacttcctcacttcatcatcatatactctggccctcagt

SEQ ID NO: 215851 - DNA, 391 bp, Glycine max
ctcgatacggctactccagcatcgataagcagcgccagcgtctgcctgtgggctaggaccggaccgacatcctgtacctggacgagactcgcgccaccactatcatgcgtcggcgaaaccggaagcgggagaaccacatcaaatgacttatcgcatgatcgatgctgtgtgacccgtggaaaaatgttcccctgtaatgcactcaacctaagcgacgtgccgtacaagctgttgctcccagagctgccgaagaacagggagggaaactacgtgaagaggttggctacaccattaggatagaagatgttaccaaaccggatgtaactgtgctaaaggtcttaactgatggagagctgctaaagggaatgatgggacgagcctatgttgacca

SEQ ID NO: 215852 - DNA, 526 bp, Glycine max
ctcgtgagctcgagcgagaaatggcgatggcaatggcgcttcgcaggctttcatcttcaattgacaagcctctgcgccctctcttcaatgccggttccctctactacaagtcgtctttgcctgatgaagctgtttacgacaaggagcgacccggagttacatggccgaagcagttgaatgctccacttgaggtcgtggatcctgagattgctgatattattgagcttgagaaagctaggcaatggaaggggctagaattgataccgtcagagaatttcacctctgtgtctgtgatgcaagcggttggatcggttatgaccaacaaatacagtgaggggtaccctggtgcaagatattatggtggaaatgagtatattgacatggctgaaacactgtgccaaaagcgtgccctagaagcttttagattggatcccgctaaatggggagtgaacgtgcagcctctgtcagggtctcctgcaatttccacgtttacactgcattgcttaaacctcatgaaagaatcatg

SEQ ID NO: 215853 - DNA, 550 bp, Glycine max
aaaaaaataaaaaaaaacccattgatttcttggacctccatgacttctttgtctacccatcacacctatagccgaaagcaaaaatctctcggcctcctctgcaccaattttctgagtttgtacaacaaagaaggtgtgcgcctggtcggtctcgatgacgcagcttcgcggttaggtgtagaaagacgtcggatctacgacatcgttaatgttttagagagtgtgctaaccagaaaagctaagaatcagtatacttggaaaggattttgtgcaattgctgctgccttacaagaacttaaggatgaaggtttgaaagagaatcctggatcatttgatgactgcaatgacaatgcacaagtgtctgatgatgatgacgaggaagaagaaacatctcctaatattaacattgggagtcagagtgagaaggaagatcctgattacactgctactgtcaaattcttcaagaatgaaaacagtacggataaatctctcgcattgcttactcagaattttgtcaaagcttttgcctgctctaaatctgaaatgatct

SEQ ID NO: 215854 - DNA, 518 bp, Glycine max
attctcatcctcctctgtatctctctctccaccattgccatggatccttacaagcttcggccatgcagcgccttcaattctcccttctggactacaaattctggtgctcctgattggaacaacaacttctctttaaccgctggagctagaggtccaagtctgcttgaggattatcatcttgcggagaagctagcatactttgacagggaacgtatcccataacgtgttgtccatgccaggggagctagtgcaaagggtttctttgaggtcacacatgacatttctcacctgacatgtgcagatttccttcgagcccctggagttcagacgcctgtaattgatcgtcactcaactgtcattcatgagcgtggtagccctgaaaccttgagggaccctcgaggttttgccgtgaagttttacaccagagagggtaactatgaccttgttggaaacaaccttcccgtctcgttgtacgtgacggcatgaaatcttcagatatggttcatgctcttaaaccc

SEQ ID NO: 215855 - DNA, 494 bp, Glycine max
cttaattaattggattacaaggaacacatagtccacaacaatagcagcgaaacatgccgaaaaggtatataaatataaatactaacacatacaaacggcatttattgagatagctcaacgagttgcatgcatggagttatgggtacacaactaaaattgcaagaaatggataagttctttcaaattgatcgaaaatcacatccttatcggactctttgcacgtctgcaactctaacaatcattctggggttggcaacaacattaaatatttggcctcatgctcagacgagatgctatcttttggcctagagaacggtcagcctgagaccagtaagatatccagacactgcggatttcatgggtgacccgtgggtcagataaagcatcaacccatcggcgattaaatctatcttgcctgtcaggtgcccaagatcggtatctgtctccgggctgcttaaaggtggtctccttctcaattgcacacttttcacgcc

SEQ ID NO: 215856 - DNA, 543 bp, Glycine max
aaacaaagaaaaaaaaataacccttagccaacacaaccatcatggccacctctgctatgcagcaatcagcattcactggtcaaactgctctgaagcagctcaatgagttcgtccgcatgaccggtggcgccggcaaacgtcgcactaacatgcgccgcaccgtcaagagtgctcctgagagcatttggtatggccctgaccgtcccaagtacttgggtccattctgggagcagattccatcatacctgaccggagaattctgtggtgactacggatgggacactgctggattatcagctgacccggaaaccttcgccaggaaccgggagctggacgtgattcacagcagatgggcaatgcttggtgcccttggctgcaccttgccagagatccttgagaagaatggtgtcaaattcggcgaggccgtgtggttcaaggccggtgcacagatcttcttagagggaggccttgactacttgggcaacccaaacctgatccatgctcagagcatccttgctatctgggctgttcacgttgcgctca

SEQ ID NO: 215857 - DNA, 499 bp, Glycine max
ctggggacccaaatttctaatatataaaaatataagggttctcatacaaatttttctgctacacaggggtagttacattagtgaaaatggagttaaacacaagggaactgcaaaagggagcagaagattgcattgcatgtaggcatcctcattgtccagggacaaagttagtggcataagcccaagcattgttggcaacaggatcagcaacgtggtcgtaaaggttctgaatagggcccttgccagtgacaatagcctgaacaaagaaaccaaacatggagaacatagccaagcgaccgttcttgagttccttgaccttcaactcagcgaatgcattagggtcatcagccagaccaagagggtcaaaagcaccaccagggtagattgggtcaagttcttcaccaagtggtcctccaccaactctgtaaccttcaacaaaccccatgagcacaacctgaacagcccaaatagcaaggatgctctgagcatggatcaggtt

SEQ ID NO: 215858 - DNA, 562 bp, Glycine max
  unsure (1)..(562): unsure at all n locations
ggaaaatcacgacgacaacacaacacccaactggtctgtgactgaggcagcaatggtgctgatgacagcttcataagtataatgggcttggtcactgttacatggacaaattatctaaaaaagcgtattccactaagaataaggtttcttcataccttgaaaggtaatcaaataggccaaattttaatgtctccacctcttgcatctctggaccttcctgacatctggagtcctatttcttcatgtcggagtattccagcaatacataaaagctttaatgagcagactactgtagtgcttgatggaaagttgatatccatggaaatcagatcaaaaatagctgctaaggtaagacaaatgaagaaaggcctaggaaaagttcctggattagctgtaatcttagtgggccaaagaagggattctcaaacttacgttcgcaacaagataatggcctgtgaagaagttggaatcaagtctttggtgactgaattacccactgattgtgcagttacagatgttcaatatgccatcatgagatttaacanagatccatncattcatg

SEQ ID NO: 215859 - DNA, 412 bp, Glycine max
cagcaagaatacgggctttacaaaaactgttaaaaaagaattccagtttttaaactcaatccatgctaaaaatgaccttgaacgaagtattgtagtttcaagaggggtaggggtcaactaaaattgagcatgcccttggcaaaatctaaggtattacatagtggcatagcaccggttatgggcccaaccccgccgggcacaggagtaataagggatgccacttttacggccttttaatagcatacgtcccctgggaggggataaccatcctcgcggccgggatcctaaaccggagttgtaccaacatcgatcacaggtgcaccaggttttatccagttcccacggaccaaattaggccctccagcagctgaaactacaatatcagcttttgaggtgatctgttcagggtttt

SEQ ID NO: 215860 - DNA, 538 bp, Glycine max
  unsure (1)..(538): unsure at all n locations
gaaaaaagtgtaaatcaaatagaaatttataaaatctatgatcctagagtagttccctagacaaaatagaagtaagttcacaaacaagattcaagaataagattctctgatgaaaggagagaaatatgtctgaggatccgctgggtataaggagtgaaagaggggatcatttgtttcttgaacagttcttttaaaaaaattttctatcggatttttgagtcataggagattttatgatttatgacttggaggatttttaagaatagaaaggaataactacattgagttcatcgatttgccctagatatcaatagactcataaattattttttattcgaaaccaattaaaattaaaaaagaagggaaagtgtacgagaaaattatctctctctatatatagatagataaatgataaaagcctcgagggtccgtcccatccctgaaaatgctatgaggtgttgggaaatggttgaagtagttgaataggaggatcgctatgactatagctcttggtaaatttaccaaagatgnaaatgat

SEQ ID NO: 215861 - DNA, 448 bp, Glycine max
caggctactcaagtctaaaccattcggaccccttaggggttttaaccaaggggcccccaaatcccaaaaacgcttagtttttcccccaaaaataactttctcctgggggggaacgcattaaatttttacctaaacctgtaggtccttgagcaaatcctacattacccccaaaacgttggtttttaactaaaaaagtaaatgcttgagcttgaaaagcttttggcccagggggcccgtaaaactcactaggataagcggtttttttaaaccagacaaagcaccaggcattaaacccaaaaccggataaggcccctaaactttaagataagtaagcttttccaaaccatacaagggcacgccgagcccatgcaaaaggtttggttaaaatttgccaaattcccccaagtttacaaatggaacccaaccatacatgcccccctttttattt

SEQ ID NO: 215862 - DNA, 537 bp, Glycine max
cttctccctttttctctctgtctctctctctcggtctcgctcttcttctcatcaagcacagagttacagactcaccgatcttccgattctctttcgtcttggtttatgagctcgaaggagagacccactcttggtggcacgcggattaagacccgcaaacgaaatattgctgcgccgctggaccctgcagcattctcggatgcagtggtccagatttatttggataatgctggtgatctggaacttattgctaagagtattgaatcttcagaccttaacttttcaagatacggtgacaccttttttgaggctgctttcactgggggtcgtacacaacctggaactaccaagcctgatgagggggaccgccacccatactctataatagagtgtgagcctaagcgtgaagtcattttaccatctgtaatctacatacaaaagattttgcggcgaaggccatttctcatcaagaaccttgaaaatgttatgcggaaattccttcagtccttggaacttttcgaggaaaatgagaggaaa

SEQ ID NO: 215863 - DNA, 545 bp, Glycine max
gttgtattatggtatcattcgctgagtcggtcctagggttcgttcatttcgttgcgtttccgtaacttctctgcgtttttcttcattctctgaagctttcaattaagcttgatgacagaaaattccttctgtggaatcaacgggttggcggaatcgttgcaatgcaaaaattgcattgtttacttgtcaatcctacaattccttcaaagtatgattcagatctagatcgtcaactggatcgcatgtttgttgaatatggaaagtggttcattcaagatcagtctctcttcacatggcttctgtctactctttccgaatcggtgctttcgagagtgttgaattgtcaccatgggcatgaaatttgggacaaaagccacactcaatactacgccacacttaaggctaaggtgcggcaactcagatctgaactgaaaaccacaaagaaaggtaatcgttcaattgctgagtacacactccgtattcatgctttagtcgattccttgattgctataggagagacaatatctgatcaagaattgcttgat

SEQ ID NO: 215864 - DNA, 531 bp, Glycine max
  unsure (1)..(531): unsure at all n locations
aagtgcttgaataattgttcctgcatggcatataccaattcaaatataagtggaacaggtagtggctgtgtcatgtggtttggcgatttattagacatcaaattgtatccagcaccagaaagtgggcagcgtctatatataaggttgcctccttccgaattagattctatcaggcacaaggtgtctaaaataatgtatgcaacctccgttgctgcagctataggagttatacttgctatttattttctctacagaaggaaaatttatgagaaatcaatggccgaatataacaatgaaagttatgtgaatgatctggatctgccattgcttgatttgtcaataatcattgtagccacaaacaaattctcagagggaaacaagattggagaaggtggctttggatctgtatattggggaaaattagccagtgggctagaaattgctgtgaagagactctaaagaactcggatcaaggaatgagcgagttcgtaaacgaagtanaactgattgcagagttcacacagtaatctt

SEQ ID NO: 215865 - DNA, 575 bp, Glycine max
ggtacttctcgtgcaaaatatccttcataccattcagcaatttcctttacaacaatatccacctatctcgttgattatcagcgagcagttaataaggttatggacatcgcattggttgaactacatgagcttgaatttgcttcaatagattccttcttcacaaaatgccctggctctttaggttcatccaattgcacctcatcactccccaacaagagaaccactgaggtcattgtaggcctatcctctgggtattgttgcacgcacaagagcccaatatggatgcaacgtaacacttcagacgcaatgcatgaatcctccatgtttgggtcaactatttgtaaagccatatcttttttccacaatgtccacacatgatcaacaaggtgaacaatttgctttccactagaacatctacttttcttcccacatataatctccaacagtaaaacaccaaagctgaagacgtcagattttatagaaaattgcccatcgatagcatattctggtgccatgtacccatatgttccaacaatgctatttgtatttccttcaatattctcttcttcaaagtt

SEQ ID NO: 215866 - DNA, 493 bp, Glycine max
  unsure (1)..(493): unsure at all n locations
agattgttgacaccttccctggccaatccattgatttctttggtgcactgagggccagagtatatgatgacgaagtgaggaagtggatttctggtgttggtgttgacggcattgggaagaagcttgtgaactcaaaagatggacctccaacctttgagcagcccaagatgactctggagaagctcttgacgtatggtaacatgcttgtccaagaacaagagaatgtcaagagagtccaattggctgacaagtacttgaacgaggctgcacttggaaatgctaacgaggatgctattaacaggggaactttcttccaatcttgaattggaggcaaagcaaacttggcaagtaaatatttctgttcctgaaggttgtgctgatccaagtgctagaagttgtgatgggacttgcgtgtaacattcttagaattctcaatgtcttaggtgcaaagagaagatagccaggttgagatgattntactatatttttcata

SEQ ID NO: 215867 - DNA, 442 bp, Glycine max
gcattaaacaaaattttcctaaacagatattcatagttccacatttttaaatgtgtttatgaggaaagccactgacaactgaatccatcaattatacctttatcacctaaaactcatttccagaaataaacgttatatattcaatgccaaatttaatctgacttattccatagctcattgatagatggaccaatacagaaaggatgaatgttggacttctacaacagccacatgagctccttcaaaggtttagaaaatcttcttaatttgctttagaaccaatcttactcttcgcaaacgacggcaagcagaaagctgcggtatgaatctcagagttgtaaaatttaagcggtcttactgacttctgactctcattttcatctatgggattcactggatgcttgaaatcaacaggtggtccctcagctgagcaaagcataaa

SEQ ID NO: 215868 - DNA, 541 bp, Glycine max
ggatattacatgctcgactgctgctacttgcgaaaaagtgatgatcaaagcaagcccggtatctcaaatttttgtagctttctctctaccacttccgcgatgccatcctcaagggccacaccgatcgcttctgcgtcttgaacgccgacgtctgctgttcattccctctggaacaaatgttgcgtctgttcgaggagaaggacggcgaggctgtcattctcggcacccgcgtggccaacgatgctgcgaccaacttcggctgcatcgtcagcgacacccatagcaagcgtgttctgcactacgtggagaagccagagtctcacatctccaatctgatcaactgcggtgtctacctcttcagcaccgaagccttcttccccagcatcaagtccgccatgaagcgccgcgcagaccgtccacgtctgctctactacccctcctcagacaccctcgactcttcatacgttgcccgttccggacaagacaacgacgacgacggcgagaagaccgggtcatccgtctcgacaggacttctttctga

SEQ ID NO: 215869 - DNA, 512 bp, Glycine max
ctcggtgaagttgcctggaaatcccaaattgggtgaagggaagcccgagaatcaaaatcatgcaattgtatttacgcgtggaaatgcagtccaaacaattgacatgaatcaggataactattttgaggaagctttgaagatgaggaaccttcttgaagaatttcattctgatcatgggcttcgtcctccttctatacttggtgttagagaacatgtcttcaccggcagtgtctcatctctagcgtcatttatgtccaatcaagaaactagttttgtgactttagggcagcgagttttagcaaatccattgaaggtccgcatgcactatgggcatcctgatgtttttgatagaatattccacgtaacccgtggtggtatcagcaaggcttcccgtgttatcaacattagtgaagatatctattcaggattcaattcaaccttacgtcaaggaaatattacacatcatgaatatattcaggttggtaagggaagagatgttgggctcaatcaga

SEQ ID NO: 215870 - DNA, 577 bp, Glycine max
  unsure (1)..(577): unsure at all n locations
acaggtactgcagttgtgctagtcatgctggttacaacattgcttatgattttgatcatgatacttgtgtggcgctgccattggattctggtggtggtgttcaccggcttatcgttgattgtggaatgcacatacttctctgctgttctcttcaaagttgatcaaggtggatgggctcccctagcaattgctggagcatttcttctgatcatgtatgtctggcattatggctcagtgaaacgctacgagtttgagatgcatagtaaggtctcaatggcatggattctcgggcttggaccgagtttaggacttgttcgtgtcccgggaatagggttagtatacacagagcttgcaagtggagtaccccacatcttttcacatttcatcacaaacctaccagccatccattctgttgntgtttttgtatgtgtgaagtatcttcctgtctacactgtcccagaagacgaaagattcctttgtaagagactnggacccaagaacttccacatgtttcgttgcgtggcgcgatatggatacaaagatctgcacaagaaagatgaggattttgagaaaaagc

SEQ ID NO: 215871 - DNA, 559 bp, Glycine max
  unsure (1)..(559): unsure at all n locations
gaacaacatagtgatgcatttggaacatcaaatgaataatgaatttcaggattcaacagaaattacccaaagtcattcttctgaagacattccctttggatagtacacactgcacaccataaggagttgttcatatgctacgctaagctcaactgtacacaaaatgactgtcacaaatgataaatcttacttatcttgggctcaagtggaacaattagtgtgatcaagatgtttataaactcaatcaatcaaaagcttttgaataatattaaaacaatattaacatatagatttcaatacatattttattattattaactattttaacatgcttttgattgaatgtgcctataaactcaatgttcacgcaagaattaccaagagaagaggagtagaggctatacatagaaaacctgaccaacatttaatagactctcatgaggaacattgaagatcacactattttccctgcatatcttcctgagaaatgcatatatataatcaacagctattttcttgtggaatcttgaatccctncttgccctgacaactgtgtttc

SEQ ID NO: 215872 - DNA, 496 bp, Glycine max
ttcacctatgcttctcacaaggctgttgatgaatacaaggaggccaaggcgcttggagtggataccgttccggtcctcgttggccctgttacatacctgttgctctccaagcctgccaagggagttgagaaatccttttctctcctctctctccttcccaaggttcttgctgtctacaaggaagttattgctgaccttaaggcagctggtgcttcatggattcagtttgatgagcctacccttgtcttggaccttgagtctcacaagttgcaagcattcactgacgcatatgcagaacttgcgcctgctttgtctggtttgaatgttcttgttgagacctactttgctgacatccctgctgaggcatacaagaccctcacatctctgaatggcgtcactgcatatggatttgatttggtccgtggaaccaacactcttgatttgatcaaaggtggatttcccagcggaaaatacctctttgctggagtggttgatg

SEQ ID NO: 215873 - DNA, 478 bp, Glycine max
aaaatgaaatgctaaattatttctttattccttaattggcacaaagtaaaaactggaatagtattgaatcgatctacaaggaagaaacaatgatgctaggttggacgatgtggttgttaagcacactgttcaactccttctgaaacctctccatggcctcagacggtaaacaaaccggtataaccaacccttcctctcctttagcattcttgaaaggtatgtaaaagctagcaacaccaggtatggctccaacccctcccttggcgggtcctccataaacagccttcccccacccaaactcaacgttttcaaacccagcacgagtcacatctgacacaacataggatctcacaacagtgaagtgaggccgtcccttggccaccattaaattcgccaccgagtgcatgtattcctcagtcacgtccgctttcgcttttctcaccaactcgacagcgtatcccaaaggattctcgcacag

SEQ ID NO: 215874 - DNA, 483 bp, Glycine max
  unsure (1)..(483): unsure at all n locations
gtcctctttactgtttcttgttgtgggaatttcaatggctctcactccatggctagctgaaggaggtcagctccttgcttcccgttttgagttacacgatgttcgaagtttattacctgtggaaagtgagacagatgatctgcaaaatcatatcattatttgtggatttgggcgagttgggcagatcattgcacaacttctttctgagcaacttattccttttgttgcactagatgtgagaagtgatagagtgacaattggacgttccctggatctccctgtgtactttggagatgctggtagtcgagaggtcctacacaaggttggggctgaaagggcaagtgctgctgcggtaactctagattcccctggagcaaattatagaacagtttgggctctgagcaagcacttcccaaacgtgaagactnttgttcgtgctcatgatgttgatcatggattaaatttagaaaaggctggagctac

SEQ ID NO: 215875 - DNA, 531 bp, Glycine max
  unsure (1)..(531): unsure at all n locations
gataaaaaaaatggaaatatgacttcatattatacacgcttttcgaaatccaaagaatatgaaacaaaatcaatgttacataaaacaaggacaccatcctcagctgaaatttaaggatgattaatcaaatttttttatgcagatatatatatttctgtacatcatgatggaacatttactctgctgctatacaatttttcacttttctgttttcttttaccttccactttgtatatatggggcaatcttcatgtcgccagtttaccttcagagacttgagtatcatctgatgaatctggggaatgagatttggctttgctcgtagttctattatatccatatccaaaagaagttccatttgtttcggatagttcagtgagctcagaaagatggcgggatctgaattcatttatagtcgctgcaatctctgatgtaggaagtttagcctgagcaagcacggcagctgctagttgaagactnggttccaaggtctctgggacaacacagtagctccagcctttctaaattaat

SEQ ID NO: 215876 - DNA, 414 bp, Glycine max
ctaggacagaaatcaagcattttttcgaactattctttgatgtcaaagtaatagctatgaatagtcatcgactcccggtaaagggtagaacagtacgacctattatgggacatacaatgcattacagacgtatgattattacgcttcaaccgggatatgctattccacctcttagaaagaacagaacttaaatcaaaatacttaatatcatggcgatacatacatacaaaacttctaccacaagcacacgcaatggagccgtagacagtctagtaaaatccaatccacgaaatcatttgatctatggacagcatcgttgtggtaaaggccgtaatgccagaggaatcattaccggagggcatcgagggggatgttatagacgtgtataccgtaaaattgattttcgacggattg

SEQ ID NO: 215877 - DNA, 480 bp, Glycine max
ccgcgcccaatttctctgaaattttacggttccgagaaacctctcgcgcgcgtggtggcgctggccgtgaagagcctcggcgaaacggaggcggtggcggtgtcgccggaagatggccaatccggcggagaactgccgtcgggatccggcgtctacgccgtgtacgacacgaacggtgacgttcagttcatcggtttgtcgcggaacattgccgcgagcgtaggcgcgcactggaaatcggtgccggagctttgcggatccgtcaaggctggcgtagtggatgaaccatacagagtaactataacccaagcatggaagtcttggatggaagaatacatactggttagtgtgaaagttgcacctggcaatgaatcaagagatgccacttgggtcatgcagccacctaaactgtagcctgatctttgattaacgcccggtcaccacatgcaattgagcgtccctcttgagaacctgattgat

SEQ ID NO: 215878 - DNA, 527 bp, Glycine max
gaatgaaaaagaaccattttgtactatgataaaaatcaaatatacataactaattttttcttttgtttcttttctccccttggatctaaaagattaattcatacaacagagttgaaatgaccttgaatgcattacacccttccctcactctccattctgtactcctatcccccaacttcaaaagaatgcctaaatgcaggtaacttgcacaattattttttgaacaagctagcaagttcacctttctcatacattgaggtcaatatatcacaacccccaaccagttcaccatccacaaaaatctgagggaatgtcggccaattgctgtattttttaagtgtttccctcaatccgtagttatactcttcatccagcacatttacactctcataatctactccttcattttcaagaatggctattactctctgtgagaatccacataatggtgcacttctagggcccttaatgaatgccactaccttgttctctctcaccaacgcatcaatgaggttctcaagagggac

SEQ ID NO: 215879 - DNA, 416 bp, Glycine max
  unsure (1)..(416): unsure at all n locations
tcgaggcatgttatgcttcaaaggaggaaatttcaagagcaatcaagcctcttgtggaacagtactttcctgtggaaactcaaaatccacacaagtttgctgtactgtatgaggcacgggcaaatactggtgttgacaggatggaaatcatcgatgctgtggcaaagtcagttcctggaccccataaagttgatctaaaaaatcctgataaaactatagtagttgaaattgccaggactgtgtgcttgatcggggtcatcgagaaatacaaggaactttccaagtataatctgaggcagttaacatctcgtaaagactgagccttccaggcaacccgtatagatgtcgntcttgcagcattataatggcttaacggatttaggctttcccttaacttcatgttgatactctggtct

SEQ ID NO: 215880 - DNA, 531 bp, Glycine max
gaacctgtctagggtttctgtccattggaaattgcaaaatctgcatatgtaaacatgttcccttccactaattatacctcctcaggctcttaccctcgtttcccttcatcttcttcttccacttcaccctatccttcttttactctccttcatcctgaaaattcttcttccagcaacaacacctttcttcatgatccacttgctcttacctacataccctctcattaccatgctccaatcccagaaacactagccaattgggcagttgcagattgtgcaatactgaatcaggatctaggtggtgccctttatggcatcaccaagaaaccaatgaagaaagcaactaagaaagacaggcacagcaagattcatacttctcagggtttgagggacagaagggttaggctttccattgagatcgcacgcaagttctttgatcttcaagatatgttagggtttgacaaagccagcaacacccttgactggctcttcacaaagtccaagaaggcaattaaggagcttactcgaagc

SEQ ID NO: 215881 - DNA, 562 bp, Glycine max
  unsure (1)..(562): unsure at all n locations
ccttctcataaacaacgcgttttctcttctgcttcgtatctattctttgcttttggttttggttgattcaaggccttcacagcattcgttgcggcattttaatcgatttatccaagcaggactgaatgaactaatggagtctaaaggtgggaaaaagaagtctagtagtagtagtagtaaatcattgttctacgaagctcccctcggatacagcattgaagacgttagaccaaacggtggaatcaagaaattcagatctgctgcttactccaactgcgctcgcaaaccttcctgatatccatccagattgatagttcattgcatgcaaccatagttttattaggttttttcttctttgttttcaattaggtttttgctgctctccttcaaactccgtctttccgaatcctctctttgtgattgtgttctgttctgcttcctaccgcgatagtttctcttctgaagcatggccatggcggnttctgcaattggttttgaggtttcgagaagaggctggaaatatcctttttcagccgggactttttgctgaccctgagggaat

SEQ ID NO: 215882 - DNA, 584 bp, Glycine max
gcacgcatacaaagtgatttattaaaatccattcgatgttcaaatggtaatagtagaacaataaaaggtccaaacgccctaacaatggtctaacataaaagggaaaaaacaccaaagaaaaacaatcactgtctggaaaaccggacttattttcgcaaggacataataaagacacttaagaaaactactcttcttcatcttcctctttccagcacttcagagttgatctaggtgaaccacagtcacaagtcttggcaaatttttggtagacaagagaaccacccattccaagcccttcgtggctcctctcttcgcgacagtatcccttaacatccagaaaacacgtctgatcaaacaacttgcttgcaccatccacatgaactgcaacagagaactcagttgggagaaaacatgccaataccctcttaaccatttcgttcagattcaccactttgaagtcatacccaacagtctcaaagcttgcataactgaaaccatcttctggggtaacatgaatggtagaaacagcagcaccttcaacagaagtcatttgataccacatggctcaaagtcaaagtcacaaa

SEQ ID NO: 215883 - DNA, 496 bp, Glycine max
attgcagtgatcccaaaggggagaggaatggagttgggaaggaggatgaacaggaggtgagaaagaaggtactgcagaagcttgatgcttgctttggtgggtctctgttgaaagatgctaatcatgtgagattggacagggtttcggagttgctcatgttttacttatcctcgatgtgctatatatttggttttgattcgctgtgtggccctggcagttcgttcaagtccggtaaatttatttgggcttctgatgctgctggttgtttgaaccaattagaatctagatcgtttctggggaaattggctggtcttcacactgttgttttcgttcctctgaagtctggagtggtggagcttggttcgtttgaaatggtgcctgaagagcagggtgttgtggaaatggtcaggacagcatttggggaatccagtcctggacaggcaaaggtgttttcaaagaattttgggcatgagttaagcctgggggatacataatc

SEQ ID NO: 215884 - DNA, 591 bp, Glycine max
  unsure (1)..(591): unsure at all n locations
ccactgtcactcagaccccaactgtaaccaaaaccaaaagtgttacccttagcaagactgatcctaccattatcacagtctgctaccttgccaccatcactgtcaacctcgcaaactttttactccctgtccccatttccatccaactcttcgtaaacagtatttcatgcatattcatcggtagttatagaggagccatcctccaccacactctccctgtggaagaacaaagcaagctcgaaagaatgtccagtaaagacgcctatatgttccctgtctatggatctggagtccttttcggtttatattgcctctacaaatatttcagcaaggatcttttaaacaagatcttgtccgttcacttcaccttctttggattcttcagcttgttacaactcatagcatatcatttagaaaaggttttccccgactgggaacaagttgtcatccataaggctttaagcattcccctncctgtcttgggcactaagaaattcgacttagtcgtcaagaagagtgaaatagttgctggtcttatctccacttctcctactgctctctacttcaccactaaatactggcttcttaaca

SEQ ID NO: 215885 - DNA, 493 bp, Glycine max
ctcatgataaatgtttgaaacagtatacaaaacatagatttaacatttcatatactacataaactcacaacaatcaatatcaaactttacatatctaaaaacttatatattcttcgacatatatataaattattccttcttcttctcaacagcttcattctctttctcttggtcatcgctatattcaaagacagccttgatctcattctggaacaaagcgcacaacataacagcaccagtgcaaccaggaactaagaacagaagagcaggttgagcatgattgaagatagtcatagcatagaaggtagcaatgataccaagagcatatcctaccaagcaggaatagaaataagtggtcttgaccatcttgaagtccaacttttcaacttgtccttgtaattggttaacgatagtcttgtgtacatcatacttcaagcaaagggcaacaaagacaccaggaataacgatatctcctagtcccaacatagagaac

SEQ ID NO: 215886 - DNA, 496 bp, Glycine max
  unsure (1)..(496): unsure at all n locations
ggcagaaagcaagctcatcctagagttttaaaaatggcagcagcctcctccatggctctctcttccccatccttggctggcaaggccgtgaagctgggcccatcagcccccgaagtcgggagggtcagcatgaggaagaccgtcaccaagcaggcctcctccggaagcccatggtacggcccagaccgcgtcaagtacttgggcccattctctggcgagcccccgtcctacctcactggcgagttcccaggtgactacggctgggacactgctgggctttcggccgacccagaaaccttcgccagaaaccgtgagctcgaagtgatccactccaggtgggccatgctcggggccttgggctgcgtcttccccgaactgttgtcccgcaacggggtcaagtttggagaagctgtgtgggtcaaggccgggtcccagatcttcagcgagggtgggctggactacttgggcaacccaagccctgtncacgcccagagca

SEQ ID NO: 215887 - DNA, 569 bp, Glycine max
ccttcatcacaacaaaaagaaagaaagaaacaaagatcgttcattgctttgtagtaagatcagatcatcaaaaatggttttgtcttggtcaagaaggaacgttttccgccgtgccaagaaggagaagtcacaaactcaattggaagtggaggttgtgattcccaaccactttcactgcccggtgagtctggagctgatgacagacccagtgactttatcaaccggcatcacctacgaccgtgtgagcattgagaagtggatcgagggagggaacagaacctgccccgtcaccaaccaggtgctgacaaccttcgacatcatccccaaccacgccattcgcaggatgattcaggattggtgtgtcgaaaatagttcttatgggattgatagaatccccacacctcgtattcctatctcggcatacgaggtttccgacacgtgtaccaggatcttgtcagcttgccagcgtggagatgacaagaggtgtcaggagttggtcgggaagattatgtttgcagtagagagagtgtgaggaacaagaagtgcatagttggtgctggtgctggtgc

SEQ ID NO: 215888 - DNA, 504 bp, Glycine max
  unsure (1)..(504): unsure at all n locations
cttcaccaatttccccaggaagcagtgggatctcagctggaacgattgttgcaattgtggttccaattacggtcgctgtgcttatatttatagtcggaatttgtttcttgagtagaagagcaaggaagaagcagcagggttctgtaaaggaaggaaaaactgcgtatgacatccccaccgtggactccttgcaattcgatttcagcacaattgaagcggccacaaacaagttctctgccgataacaagttgggggaaggtggatttggtgaggtttacaagggcactctttcaagtggacaagtagtagctgtcaagagactctccaaaagctctggacaaggtggagaagaatttaagaatgaagtggtggtggttgccaagcttcaacatagaaatttagtcaggcttcttgggttttgcttgcaaggagaagagaagatacttgtttatgaatatgtgcccaacanaagtctcgactatattctctttgatcctgaaaagc

SEQ ID NO: 215889 - DNA, 463 bp, Glycine max
gcataatacatatattttatttagttgaaaaataagcaactataatacaaagtgttccaaggtttcgtcatttaaaactaggagaaataagtacatggataataatacatattagaacctccaagcgatcaagcttatcgaggatccatttcgctaatcgacatgtcattcacagacattggtattgattgatcgaatggcagctcctttggcatgtttggatcagttccactgtggacgaaaaatgcaagctgcgtaggagttggtagagtaacagtgttactgtctagcataagaactattgttgccattgtgggtctggcagctggatcttcttggacacacaacaaaccaatgtggatgcctttgatgacttcattctgattataggattctcttaatatggggtccatcagtttcaaaggtgttccatccttccaaagttgccaagcatagctcaata

SEQ ID NO: 215890 - DNA, 426 bp, Glycine max
ggctgaatgaaggatcataaattacttggtgttcatggctcaaacaatacttaagggttcttatctaaggctatttagcggggttttaaacccgctttaccctctttcaaagattgtaaaagagcgttcacagttatttaatacgggacacacatttaccccacaagtttcgggagctgcagaatttgaaataaacctcccattttggtccccccttggggggataaaaaaatgatttgccaaaaccaaagggggcctttatgttactgcatatatcgaacctcaagtcgaagtctcccctttcaaacgtatttttttacaaccttgctcttcaccttgattggtggttgctccaaccctattttccttggcctccatggaacattttttgtaggggttaaaacctgttcgatgagtcttaaactt

SEQ ID NO: 215891 - DNA, 494 bp, Glycine max
gaacaacatcatgggaacaacttttatcaaagaagagggtctgtcaatgatcttgtgctcatctgttaccgccgcctaccgtgcctgtgcctgtatgggagctccattcaccgggctcaaatgcatggctgagctgcccactaggactaccaactttgacattacctgcatagctagcaccggcggaagagcacaatgcatgcaggtgtggccaccaattggcaagaagaagttcgagactctttcctacttgccagacctcgatgatgcccaattggcacaggaagtcgaataccttgtaaggaaaggatggattccttgcttggaattcgcgttggagcacgggttcgtgtaccgtgagcacaacaggtcacctgtatactatgatggacgctactggaccatgtggaagctgcctatgtttggctgcactgatgcttatcaagtgttgaaggagcttcagaggctaagactgcataccccaatggcttcat

SEQ ID NO: 215892 - DNA, 501 bp, Glycine max
attcattagttctcatccattaatttccattgaagtccgaaaacagaaaccaaaaatacaggatgatgaaatctcataaagcaaaaacaaatgggaatgtagtttaagtacaacaaacaaagtggggtggctacagatgctttgcaaatttttcaatgacttataagcctgggggcttgtaggcgatgaagctgatgcactgcacttggcgaacgttgtcaaatccaatgatacggatgaagccattggggtatgcagtcttagcctcttgaagctccttcaacacctgagaagcatcagtgcagccaaacataggcagcttccacatggtccagtagcgtccatcatagtatccaggtgacctgttgtgctcacggtacacgaaaccgtgctccaactcgaattccaagcaaggaatccatcctttccttagaaggtattcgacttcctttgccaattgggcatcatcgaggtctggcaagtaggaaagagtctcgaact

SEQ ID NO: 215893 - DNA, 489 bp, Glycine max
gtctaagactaatatacagcgttttcatataatcgatcgcttggcctatatgatgatgatcaccgaaatgccaaccatgaatccagatcgattcatatgcatgcgagccattgtgatatttatgaagttgcatgttgcagatggtgctcaagaccatgttatgtgcattgagactgagagggacgcactcatccaattcaaggctgcacttctggatccctatggcatgctctcttcttggaccacttctgattgctgccaatggcacgggattcggtgcaccaacctcaccgaccatgttctaatgctcgaccttcacggagtgaatcgctcttggagacatgcttattgcacggtcataggcagttgctcagatgctattgatgtcatggcagtcgtgaaagtgttcaagctgcatcacagatgatagctggtgccagcttgatgaggtggaaaatgcgaagagacacttctaatttggaggtgaga

SEQ ID NO: 215894 - DNA, 589 bp, Glycine max
  unsure (1)..(589): unsure at all n locations
cctcacatagggcattttaatgatcacataaaataattgttattattccacaacagcagagctgctccgtttaataataacaaaaaaaataaaatattaggggtatacatcagagaaatatcaatatccagagtgacaagatgcatcgtactaattgacctgcttcatggttgagacattaatttccaaataacctttgcaatctggaatgtgaacgtcccgtgctacgtgatttgagactcggctgcttgcccactggttgttgaggttcatcactaggaacaggtacagtcttaaccaaattcttgaatataagattatagaacatctgaatgtatctctgctttgcctccttttgttccttattcacttgtctccaaaaggtataaatgttccccatgtttaccatcttgtttgcataaatcttccaggtatagcattcgtttatgcgctgcaatccagctgcagaaatcacgttccattgtgattgattcatnttgcatttttcaaagaaatcagcaattttatggcttgattcatctccattgagggggtcaatgtggaagcccgagaccccatcaacaataat

SEQ ID NO: 215895 - DNA, 562 bp, Glycine max
  unsure (1)..(562): unsure at all n locations
gcgatctagaacctcttcggaagcggaatcgatcaatccctcacctcattgctgagatctgcaaactggctatggactacgaaccctacgacagtagcggaactgatgatgaccttccaccaacccatcaaaatagaatttccaggggaggaggaggacgtctggctgggaatgggagatctgctgttgcttcaattccttacccaaggatgtacggtgaaattgatatggagacccaaattcatcagcttgagcaagaagcatacagttcagttctaagagcttttaaagctcaagccgatgccattacttgggagaaagaaagtttgattacagagctgagaaaagaacttagattgtcaaatgaggagcacagagaacttctaggtcgggttaatgcagatgatgtgatacggaggataagggaatggagacaggcaggtggccatcagcctggtgtacttagtactggtcaaggtcttcatgattcaattcccagtcccacagtctctgcttctcgcanaaagcagaagattacaccatctgtaccaccatcacgatc

SEQ ID NO: 215896 - DNA, 557 bp, Glycine max
caaagctttcagtaacatggctgttggttataacaacgtggatgttgatgctgcaaacaagtatggtgttgctgttggaaatactcctggagtgctcactgagacaacagctgagttggcagcttcattgtctttggcagctgctagaaggatagttgaggcagatgagttcatgagggcaggattatatgatggatggctacctcatctatttgttggaaacttgctcaagggacaaactgttggtgtaattggagctggtcgaattggatccgcttatgcaagaatgatggttgaagggttcaagatgaacctaatttactatgatctctaccagtccacacgactagaaaagtttatcacagcctatgctacattcttgaaagcaagtggtgaaacccccgtgacttggaaaagggcagcaaccatggatgaggtcctccaggaggcagatataattagtcttcatcctgtcttgggataaaccacttatcatctagtcaacaaggaaagactagctaagatgaagaaggaagcattcttataaactgcagtag

SEQ ID NO: 215897 - DNA, 526 bp, Glycine max
gtagggacataaggtataacttcatttatgtttaattaatgtttgaaatactacaaacacatgatgctattattaacctgacagtctttatatgcacagtgccatcagcaccccacatacacaaaaaaaagaacagactagccacagagcccaactcaacagacaaaaattggtcatttgtgcaattgaaggcccttgtaggatagaaccatgtatgtttatagctttgaagttggcaaacccagggcttttgcattaacaatgcttggggatgcagctggtggttgagcattctcattgaggaatggttcaaccctattggcatcaaaccaaactgggtaccctttgatcttccccagcacgtttagagctgctagtgtagccattccctcacgagtccacttggaggcagatgcaatgtggggtaccacaatggcattcttcaactctgcaagcccgggtttcatgtagggctcttcctaaacacgtcaaggcctactcgaaacataggggttctgttttaaat

SEQ ID NO: 215898 - DNA, 563 bp, Glycine max
aacagattcacattgccgccatttttgacattgaagaactttgaaggattggaccttggaaagatggacaaagctgatgactctggacttgcttcatatgtttctggtcaaattgatcgtactttaagctggaaggatgtgaagtggcttcaaacaatcaccaaactgccaattctggtgaagggtgtgctgactgctgaggacacaaggatagctatacaaagtggtgcagctggaattatagtgtccaatcatggagctagacaacttgactatgttccagccaccatatcagccttagaagaggttgtcaaagctgctgaaggtcgccttcctgtatttttggatggtggtgttcgccgtggaactgatgtcttcaaggcattagcactaggtgcctctggcatatttattggacgccctgtggtgttctccttggctgctgaaggagaggctggtgtaagaaacgtgctgcggatgctacgtgaggagtttgagctaaccatggccttgagtggttccacctcactcaaggatatcactcgtgatcacattgtcactga

SEQ ID NO: 215899 - DNA, 411 bp, Glycine max
agacacacgagtctcatcatataatgcttaaaagaaattaagcgtggagtttttcaaatacaaccttaaatgagttctccgaataggaaaagaaaggaggttcatgaaacacatatagaactgcctcctccattgttctgtaccacattatacaaacttggcttaattgacgagcaaattttttataatattggcgatgcgcggggaacaatgcgagggtggtgccaatcagcgacaatgagatcactagtgatttccttgagtgaggtggtaccactcacggccatggttagcttatactactgacgtagcatccgtagtacgtttattacaccaggctgttcttcacaagtcgatgagaacaccacagggcgtgcaataaatatgccagaggctcctagagctaatgcc

SEQ ID NO: 215900 - DNA, 549 bp, Glycine max
caagaactctccaaggatcctccttcccacgagattctttggtgggaaaaatccaagaggtttgaaatttgaaggcagggaagatggattatttcaatgcaccaggaagaaaccatctctttgttccagggccggttaacattccggaccagatcatccgggccatgaacagaaacaatgaggactaccgttctccagcaattccagctatgacaaaaactttgcttgaggatgtcaagaagattttcaagaccactactggaaccccatttctcatccctacaactggtactggtgcttgggagagtgctctcacaaacacactgtctcctggggatcgaattgtatcgttcctgattggccaattcagcttgctttggattgatcagcagcaacgcctgaagttcaatgttgatgttgttgagagtgaatggggccatggtgctaagcttgatgttctggaatcaaagattgcttcagatacttcacacactataaaggcaatttgcattgttcacattgagactgcaactggggtcaccaatgact

SEQ ID NO: 215901 - DNA, 585 bp, Glycine max
acacaggacaataaaagaagcaatgcattaaagctgaaagtagaaagtacgttcatcttcaaaggagtgtaaaagagggtaatatatattttacagaatttctgaaagagcagaaaaaggaagtaaagacaagaatgatttgtgactcaaatcctggaagggatcataggaatagtgttctgtaagtatgcactggcagcagcaactccacttccaagctttacaggataacccacatctttgagtatcatctctacaccagctagacatcccaacagttgcaactcattcaagtggccaagatgtccaattctgaaaaccttcccagcaactttgttcagtccaagacctaagctcaaattgtatctcttgcatgccctcctaactatttcagtactatcaatgtaagcaggaacaagaacagcagtcacagtgtcactgtaccactctttcttttgggtgcaattcttcaaaccccatgcctctacagcaaagttggttgctttgcctaaacgactgtgccttgcgatcacattatcgagtccttcctcaaaaatcagatcaagagcagctctcagaccatac

SEQ ID NO: 215902 - DNA, 542 bp, Glycine max
ccattctctaaagagacaaggttttatttgagacccacagaaggattaaacgatcttcgggccatcttttggaggagcccaacttaaactctgtgctttattcctatgaaggacgggaacattgttttttccaattctttataagctaacacttctcctatgatgccatagactagggtttgacatcctccgagccattgactcttgacatcttgagccatgtgcgctgcttggactgccaacttgagcgacttcttacagatacactttaggcggactcaaccattccaagcttgatcccccttgtttcttttagagctggtatatatagtgattggccccaaccaagtgtgcccagaaaacaatgccaccccggtaatttgggaagctcattccaagaacagatgcaatgtcaaggtctgatgctcgaataacaactccatcttctagaacacggcatgcctcattaactactgggaagagtatcatcttcacgatctcttggtcagtaacagatataggctttccattgggcataatat

SEQ ID NO: 215903 - DNA, 510 bp, Glycine max
ctcacacacaccaatggaatcataacaagaaaaagataaacactccccagagttcaaagagcaagcactatttcctctgttgtgtcttttttcaatttgttttccctctctgtagcagcagcagcagtgatggaacgtgctcgcaggctagcaaaccgcgccattctgaggcgtctggtttcagaggcaaagcagcatcagaagaatgaatccgtgctgcactcttccaccacccccatgctgctctattcttcctccaggtgcatgtcctctgttctgcgaagcaggggatccaaaacagagacccttctgggaaggaacatcaacatgtcacgcggcgttgttgttgctgctgctggtggttttctcggcgttggctcggcccggtccatctcggtcgaagcgcttcgaccgagcgacaccttcccccggcggcacaactctgccaccccggaggagcagagcaagatggcagagtcgtgtggcttcggtagcctcgactcctcgtgg

SEQ ID NO: 215904 - DNA, 538 bp, Glycine max
atacgaattactttttttttttttcctgtgattggatgaaacttaagagcagtggattatcatcattgtcacatatgatgaagcaatattcaacaagtgcaagaactgtatgaataggaataagagtttatgtacaacgggaaatgaaaatagttgtcatttgaacacattatgctgtggcagctgcttgttcttcaacagcctgtgatgctgggagaagggtgcaaatgaggttgcggtcaccgtacacattatcaacacgtcctgtggtaggccagaactttgcagtacggagccaaggagctgggaaggctgcatattccctggagtatggttttgtccatgcatcagccatgagcagtgatggtggatgaggggcgcccttaagtacattgttggtaatgtcaacctttcctttctcaatctcagcaatttcttgtctaatggaaataagagcatcacagaacctgtctaactcggccttgctttcactctcagtaggctcaatcatgagtgtgccaggcacaggccatgacat

SEQ ID NO: 215905 - DNA, 539 bp, Glycine max
cgcattctcgtcgtaggtttggtttcggagcgaggtttggtttggactttgaagagcaacacactaagcacttggcactcactggcacttgcttcgctttaccctccatcacccgccactacaaaactatacccccacttccttcttccaacctttttctcttctctctctctcaactcaactagtttcaccacttattacagaaagttctctttgttttatcttcttctttctgcctccgaattaccactctcttgctttgctatcttacaggaagaggatcaaaataccccaccataagacaaatccaaaggaacagcaacatcaattatgggaggtttcaatggagaagaaggtgttgtgagagaaaaagaagaagaaaacaagtggccttcatggctgcagccacttctcaagacacgtttctttgttcaatgcaaagtccacgcagattcccacaagagtgaatgcaatatgtattgcttggactgtgtgaatggagccctttgctctgcatgtctcgcttcccacaaagaaca

SEQ ID NO: 215906 - DNA, 528 bp, Glycine max
ctgagggtgccacccaaggaagtggtaacaactgctgtatctttttggcataaatattgattggtaagtgacagaaaaccactatacaacattagtattctataataagccctccacccattggagctttatgtgggaaattcttttcttctcttggcagttctgtaattaaccactgttggtggtggtgttgagggtgtaaagctatggattttgtttctggcacttgcattgcttattatgccatttactgattcttcaccatcagacccatctgcctcacttaacattttcttcttccggaactttttggaggttccaacaatcttgcaaccaagagagcagaagttgaaggaatcaaggaggctgcgttcacagacttggcaggtattggtgaccccttttccaggtctaggttggggcctttcatttaagaacacaatcttggcactgtttataatgtaagtttggacccctgttatgtccagaaatttctgtatctcagacacccttatcacatcatggtac

SEQ ID NO: 215907 - DNA, 515 bp, Glycine max
  unsure (1)..(515): unsure at all n locations
gtctaacttgactcgattgcaattgatccacgacacactgttcgcttcacaaaagcttcgaatccaattcctcagtaacatctgcaagaagtcttctccttcaccatgccaccaaagcctttagactatgggtcaataaatgaaaacgtgaagaagagtcaatatgctgtcagaggtgaattataccttcgagcttctgagcttcagaaagagggcaaaaagattatatttactaatgttggcaacccacatgcattgggacagaaaccactgagcttccctcgtcaggttgtagctttgtgccaagctccattcctacttgatgatcctaatgttggactgctattccctgctgatgcaattgcaagagctaaacactatctttcattgacctcgggcggattaggcgcttatagtgactcccgcggacttacaagagtgaggaangaagtggctgagttcatactcaggcgtgatggttatccaactgatccagtgctcatatatctcactga

SEQ ID NO: 215908 - DNA, 560 bp, Glycine max
agaagaaagtgtaaggtttaagaattatctccaaggacaaatagtagaaagggaggttatgtttttcttacaaaagcacaagagtataatgcatcttttacgataattttcttacaaccttgaataacctctattgtcttcgtattgctccatgaattcatcattgaactttttgaaactatccataatagcgggcatgtcttcctcgtctggtaaaatagtagtcctcaaatggaagaccccttctctctgtccaaatcctgaaccaggaacagtggatatgccagtggcttccaaaagtttgaggcagtagaaaacatctggaacctttgcagcctgtttagcagcctctaaagctcttggcggcaaacgtatttgagggaatgaatacatggcaccttcagtaaaattacaaaccacatttctgcaactgttgaatccatcagtcattagccttgctcttcttctcagtgattcaagtattccggtgctctccctaacaaatttgtcataagaaatatctccaggttgaggtggatggagcataactcccataaata

SEQ ID NO: 215909 - DNA, 458 bp, Glycine max
tgtcgcctagtttcgtcttcgacccgcctagcgacgaagaaatcgaacactctgaacacgaagaagaagaagaatccgaagaagaaccagagtcaggatcaggaacaggatcagaatcagagtcagaaggagaaggagaagaagaagaagggcacgaagaagcgcgggttccgaagaagaagaagaagaaaacgcagtctccatgggactttgctaaatacacggaatcagtggcggaggaacacgctcgcaggagcacaacctcggtcgacgagaaaatctccaaagcactcaaacaacgttccacgccgctcgttgctgagcttgaccacagctccgagtccgaacctgatgaacaagaagattatagaccagaggaagaagatgaagaagagggtaatgatggtgatagcaaatcactttttgctccttctgatggaaccttttccatgccgatt

SEQ ID NO: 215910 - DNA, 518 bp, Glycine max
accatttttggtaatacaactaccgaactttcaacactcaatgctttgcttttgtgtgagatggcaggccgtgaagatattccagttgcacagggaagccatgagccattgaagggtggaaagcctcgtgttgctgattttgttcatggtaaagatggactagggaacacattcctacccccacctaaaggtgagaaaattgagaaaagtgctagtgagtttttggtagagaaagtctctgaatatcctggtgaagtatctgtgctagcacttggaccactaacaaatttggctttggcaatcaaaagggattcttcctttgcaagcaaagtgaagagaatagttatacttggtggtgcattctttgccttggggaatgtgaatcctgctgcagaagccaatatccatggagacccggaagccgcagatattgagtttacctctggcgcagatattgttgttattggaataaacattacaacccaagtccaattcacagatgctgatctcctcgaact

SEQ ID NO: 215911 - DNA, 567 bp, Glycine max
tttgggtgctgacacgaaagcacccacagtagattgttgcagtggtctcacacaagccatgaagaccaacaagaagtgtgtctgccttattctcaaagacagggatgatcctgatcttggcttgaagattaacatgacaattgctgttggtctcccttctctttgcaaaactcctgataatctctcacagtgctcggcacttctgcacttggatcctaaatcacctgaagctcaagcttttaatcaaattggtcagaaatccaatggtggttctatcagtccttcgcccactacttctgctgaaggaatttcccagaatggtagaaaccaggggacagatgaaacggccacagctaagaagaatagtgcgtcttatatcgggaagagattgttagaaagtttggttgcagttgcagggcttctaatttggctatcatgagcttaacttagatactacctatataataccattctcatatcacgttgaaacgtaaaccattgattagttgatagtgtaaagatatttacactcgagtgtataaaatctctgacagactcaccattgat

SEQ ID NO: 215912 - DNA, 506 bp, Glycine max
gcggagaagccgcatcaagacgatgaagcatatgcaattgcctccacaatgcctaagctcaagcatcttgaaatggcttatcatcttatcagcacttcgggtgtccttcaaatacttgcaaactgccctaagcttgaatttttggatcaaagggggtgttggggtgtgacacttgaccacatgtttttaaagcagaaatttccaaaactgaaggttttggggcctttggttcttgacacttatgagagtgatggctgggatgatttctcagatgtgtctgattcatcagagtacttggcctgggactttgtggctggtggcatgggagaatactatgttgatgatagtgatagttacgatggaatgtgggatgatgaagcgaggctagatgagcttcagttcgggttttatgaagggatagaagatgcaagaatgtattggcctccatcttcataagaagctatagctgctgcattacttgtgatcaattgtatgcttttctactc

SEQ ID NO: 215913 - DNA, 559 bp, Glycine max
  unsure (1)..(559): unsure at all n locations
ggatgcttttgttgaaaagcatggagtcaaattggggcttatgtctggctttgtcaaagctgctgtcaatgcactccaacatcagccgattgtcaatgcagtcattgatggtgatgatattatatacagagattatatagatatcagcatagctgttggtactccaaaggtttttatcagccacctttatcttttctcttttactttgtttatgtagagaaatcaatcaatcattatactatacttttgatgaaacttagccatttgcgattgacttatgtcaactattgtcatggctatggagctaatttacaagttatctagtatatagtgtctaatttagcaattttttacatggctatgaaaattatcaacatgcatgttgtatttgaacaaatattgaccctcaattgccattccagggccttgttgtaccggttatccgcaatgctgataccatgaactntgctgatatagaaaagcagattaatacttttgcnaagaggcaaatgatggatctttatcaattgatgagatggctggaggcactcttacaata

SEQ ID NO: 215914 - DNA, 549 bp, Glycine max
cgttgccattctcatcctcctctgtctctctctctccaccattgccatggatccttacaagctccggccatccagcgccttcaattctcccttctggactacaaattctggtgctcctgtttggaacaacaactcctctttaaccgttggagctagaggtccaattctgcttgaggattatcatcttgtggagaagcttgcaaactttgacagggaacgtatcccagaacgtgttgtccatgccaggggagctagtgcaaagggtttctttgaggtcacacatgacatttctcacctgacatgtgcagatttccttcgagcccctggagttcagacgcctgtaattgttcgtttctcaactgtcattcatgagcgtggtagccctgaaaccttgagggaccctcgaggttttgccgtgaagttttacaccagagagggtaactttgaccttgttggaaacaaccttcccgtcttctttgtacgtgacggcatgaaatttccagatatggttcatgctcttaaacccaatcccaagaaaccacatccaga

SEQ ID NO: 215915 - DNA, 564 bp, Glycine max
cgattttgctctctacaagggtcaacgagtgtgaaaagcagaaaaagcttggtgctttgtgccatcaacatgactatagcaacggatagtttgttgcaggtggtggaggaggaagagggtcctcctgattttgctttgcttgatcccgaggacaattctaggcctcgtagaattgctctcttcgttgagccttctccttttgcatacgtctcaggatacaaaaatcgttttcagaactttataaaataccttcgtgaaatgggagatgaggtaatggttgtcaccacacatgaaggagtacccaaggaattttatggagccaaattaattggatcccgaagcttcccttgtccctggtatcaaaaggtgcctctctctttggcacttagtccaagaataatttctgcggttgctgagtttaagcctgacataatacatgcatcatcaccaggcataatggtttttggtgcccttatcattgcaaagcttctgagtgttcctattgtcatgtcctatcacacccacgtaccagtatacattccaagatacacctttagcttgctg

SEQ ID NO: 215916 - DNA, 522 bp, Glycine max
actcattaaagtccacacacacagagcatcactgcactgtgtggaaacgaaacatggcaagagtggtggcactccaacagaaccaactatctttctctaccttagcttcctctctttctgacttcagtggaaccagacttcaaactcaacttcagttcaagagaaagcaatgccatccaaaagggtctttctacgtctccgcatcgagcaccaagaaaatcctaataatgggaggcaccaggtttattggtgtgtttttgtctaggctccttgtcaaagagggtcaccaggtgactttattcacaagaggtaaagcgcctgtcactcaacagttgccaggtgaatcagacagtgattatgctgatttttcttccaagatcttgcatttgaaaggagacaggaaggacttcgactttgtaaaatccagtctctcagcagagggatttgatgttggttatgacataaatggacgcgaggcagatgaagttgaacccatactggatgctctgcctaatctggagc

SEQ ID NO: 215917 - DNA, 519 bp, Glycine max
gttgaaaaaaatactgaacgaaaagctcatgaatatttcacgacttcataatgtagcaaatccgaacagcttttctaaatacaagtgaaatacttaaaattgaaatagaaaagtttatacgctaacaagactcttgccaagaattatgtcatctgttgagaaatcagcctctttccgatatgttcctctaccaaagtccaggttgtacgagtctgctagaccctctacaagtccaaattcaggttccaatccaagcacgctctttgctttctcaactgatgcaaagaaatgctggtcacggaatggaaatgatttctttttcccaaaatcaaaatctttagggttgtagtgaatgatctctggctctgggaacccaccagccttagcacatgctcttgctaatccatcaaatgtgacatacttatctcccgagatgttgaatacttccttgctggccttctcattaccaagaacctggataaaagcttttgccaaatccttaacatgaccaagttgggt

SEQ ID NO: 215918 - DNA, 575 bp, Glycine max
cactctcatatctgccaatgtctgagtggcttgctgaacttccggcgacatttttcagtcataattgccgaaaagcgccacaagaccggccaagagttggcggaggaagtgttgtccttggcacaaggcctactccaccttgggctcacacctggtcaagtggttgccatctctgcttacaatagtgaaaggtatctggagtggttattagccattgcatttgttggaggaatagctgctcctctgaactatcgctggagttttgaagaggcaagattagcaatcaatgcagtgaacccattgatgttagtgactgatgagagcagttacgcaaggtactcaaaactccagcaaaatgatgttccatctctgaagtggcatattttggtggattccccttcctcggattttactaagtggaatgtgttaactgctgaaatgcttaagaggcatcctgtaaaaacttctaccattgactactcctgggcgcctgaaggcgctgtcataatatgctttacttcaggaactacggggaagcctaagggagtcacccttagtcatggagctttgatcat

SEQ ID NO: 215919 - DNA, 490 bp, Glycine max
ttaaaggagattatgaatatgcaaaaggaagtcacatccaaacccatgaatctctcccatgatatagtgcctcgtgtcttttcctttctccaacacactctcaacacacatggcaagaattcttttatttggtttgggcgaaaaccaagggtgatcatcacagagcctgagttaatcaaagatgtacttaataagatgcatgatttcccaaagcctgacacgagtccgcttgtcaagttacttgctactggtcttttaaaccatgaaggagaaaaatggaacaagcacagaagaataattagcccttgcttcaatttaaaaaaattggaagaatatggtacccaatttctaccaaaggtgcaatggattaattattcagtgggaagaaatgttgtcttctgatggatcatgtgaaattgacgtatggcctttccttcaaatttatctagtgatgctattgctccgacagcatttggaagtagttatgaag

SEQ ID NO: 215920 - DNA, 544 bp, Glycine max
ggtagcaaactgctattatcattgctttataaaatttgcaattctgaaatgcaaatcaaacaaggcttgttactattattttttatatttcaactttacgtaaaatgacatgagcaccatattggggctgaagagtaaatactgtaacaggagcatgagcataagctggagaaagttcaaatgagaaatgttgtaaaatcgttgacaaagccatctttgcctccaacaaggaaaagttttgtccaatgcatattctaggaccccatccaaatggaaaaaatgaaactctgccatttgtggccttcagaactccttcagaaaatctctcaggtttgaattcattcacatcatcaccccagagttcgcggtcatggtgaaccatagttgttggtaaggaaacttgcactccagcaggtaatgataggtttccgagtttcatatctctgtcaacatttctattaaggccaactgctggtgggtatagcctaagaacctcattcaaaatcatgctgacaatcttaaggtgacttagcccatcaaaatt

SEQ ID NO: 215921 - DNA, 512 bp, Glycine max
  unsure (1)..(512): unsure at all n locations
attccaagttggaccttcagttggaatctcagctggtgatgagatttgggcagctcgttacatcttggagaggatcactgagattgctggtgtggtggtttcctttgaccccaagccaattaagggtgattggaatggtgctggtgctcacacaaactacagcaccaagtccatgagagaagatggtggctatgaagtgatcaaagcagcaattgacaagttggggaagaagcacaaggagcacattgctgcttatggagaaggcaacgaacgtcgtttgacaggacgccacgaaaccgctgacatcaacaccttcttatggggagttgcaaaccgtggagcttctgttagggttgggagagacacagagaaagcagggaagggatattttgaggacagaaggccagcttncaacatggacccatacgtggttacttccatgattgcagacacaaccattctgtggaagccatgagcaaaacctgcatgttttctccctttggatggaaagg

SEQ ID NO: 215922 - DNA, 456 bp, Glycine max
aacatgacaatttcatatattattattatacttcacaatcagcatttctttgttcaagactgataataaccattaaattattgtcattgtaacaatcggaaaacgagggaaaggaatagaagaaaacaatgaacaacccttgccagttagttgcaccaaccaacaaggcaccaaccatagtaccaatcaaaaggtaaaaagagagagagaccaaatcctactaagaaaagcataactgttcctttccatccaaagggagaaaacatgcaggttttgctcatggcttccacagaatgtgttgtgtctgcaatcatggaagtaaccacgtatgggtccatgttggaagctggccttctgtcctcaaaatatcccttccctgctttctctggtgtctctcccaaccctaacagaagctccacggtttgcaactccccataagaaggtgttgatgtcagc

SEQ ID NO: 215923 - DNA, 550 bp, Glycine max
catcatcaagtcttcttcagaaaattacaaatggattcatcacaaagtgcagctcttgggggaaatggtgggagtggtggaaatgggacgttgatttctcaaaataatgacatggcagcctctgcaacaggagctgatgattctatgcagaagctgaaccaggtcagcaattccattcagaaaaccttaggccttatccatcagctttacctcacagtttctaccttcaatgctgcctttcaaatgcctctcctccaacgcatcaatggccttgttgcggagcttgacaacatggttaaattggcagagaagtgcaacattcaggttcctatggaggttgtcaatttaattgatgatggaaagaatccagacgagtttaccaaagatgttataaatagctgtattgtaaagaatcagatcaccaaaggaaaaactgatgctttaaagagtttgcgcaaacatcttttggaggaattggagcataacttccctgatgagggtgaaacttttaaagagagtcgtgctgctgcagctgctgagttgaaacgtc

SEQ ID NO: 215924 - DNA, 420 bp, Glycine max
  unsure (1)..(420): unsure at all n locations
gctagtccaaactttaaagcaccttcactctcttaaaaacattctcttcaactcttttccattttatttcttccaaaactggaccttactttacccgaatctaaatcccaacccgaaccaaccatgttcggaccaacccaaaccgcttcccaacctccgaaatccactctcaaattcctctgcagctacggcggcaaaattctcccccgctaccccgacggcaagctccgttacctcggcggccatacccgcgtcctcgccgtcgatcgctccattccattctccgagctattgctgaagctggaggagctctgcggcgcctccgtgaggtacctccgctgccaattaccttccgaagacctcgacgctctcgtctccatcacctncgacgaggatctcgcaaacctcatcgaggaatac

SEQ ID NO: 215925 - DNA, 517 bp, Glycine max
  unsure (1)..(517): unsure at all n locations
gttcttgaggagaagaattggccgccttttttcccaataatccatcacgacattgctaatgaaattccaattcatcttcaaaaattgcaatatgttgcatttactacactgttaggattagtgttgtgccttttttggaatgttatagctgttactgcagcttggattaagggtgaaggtgtaaaaatatggtttcttgccattatctacttcatagcaggggtccctggagcatatgttctgtggtatcgcccattatatcgtgcttttaggaatgaaagtgctttgaaatttggatggtttttcatgttttatctgcttcacataggattctgcatcttagctgcagttgctcctcctatagttttcaaaggcaaatccctgactggcattctggctgccatagatgtgctgggcgaccatgctntgattgggatcttctacttcattggatttggattgctctgcgttgaaactttgatcagcatttgggttattcagcaagtatacatgtact

SEQ ID NO: 215926 - DNA, 587 bp, Glycine max
aataggtagcatgctaaacagaaaaataaataaacaaataacagctgtaaacaaaaatcatgctcagtgaaatatttttgttcacaatttctgtgtgtggcttctaatatacaacattgatccatacacaagttatccacacttccttctccacaagactgatgaatcatattgcagccctcagtgctccccttgcggcctcccgtttcatctcagcggccttcccactgccgcggaagtacatgtatacttgctgaataacccaaatgctgatcaaagtttcaacgcagaacaatccaaatccaatgaagtagaagatcccaatcaaagcatggtcgcccagcacatctatggcagccagaatgcccgtcagggatttgcctttgaaaactataggaggagcaactgcagctaagatgcagaatcctatgtgaagcagataaaacatgaaaaaccatccaaatttcaaagcactttcattcctaaaagcacgatataatgggcgataccacagaacatatgctccagggacccctgctatgaagtagataatggcaagaaaccatatttttacaccttcaccctta

SEQ ID NO: 215927 - DNA, 519 bp, Glycine max
  unsure (1)..(519): unsure at all n locations
cttaaaatatagaacacactaccctcaacatagtaaagcagctggtgcaagtgaagcaatggctcaaaccatgttgctcatgtctagtgtctctagcagttattccgtggatttggttttactaagcagaacgagctctttgtgggtcgtgttgctatgcttggttttgcagcatcattgttgggtgaaggaataactgggaaaggaatcctagcacaattaaacctggaaactggaattcccatttatgaagcggagcctcttcttctgtttttcatcctcttcaccctgctaggagccattggaggtttaggtgaccgtggaaaatttgtcgatgacgaacctactactggaggtgttattccttcaggcaaaggcttcagggaagcccttgggctcggttcaggtcctttattcggattcacgaaagcgaacgagctatttgtgggaagattggctcaattgggtttcgttttctcattgattggagaanatattactggaaagggagctctagcc

SEQ ID NO: 215928 - DNA, 459 bp, Glycine max
  unsure (1)..(459): unsure at all n locations
acagataaatcgaagtactatgattttaatttactaaaggaaaaaatgatgtctaatcatgacatcgagacgcgtgcaactattgagaaaaatgatatagaattgtttacgacgaactcaatgcattttatgatagatgaggaaacgagtattttaaacacaagcaaacaaaagggttagtgtctaatcatcctccccgtcatctgtaacgaatttgccagttccaggattcaaagcagcaatgaagaagaaaagaacgttgaacaacactaggggctcgatttcgttgattggtacccccgtctcaatgttgagttgggctagagctccctttccagtaataatttctccaatcaatgagaaaacgaaacccaattgagccaatcttcccacanatagctcgttcgctttcgtgaatccgaataaaggacctgaaccgagcccaagggcttccctgaa

SEQ ID NO: 215929 - DNA, 534 bp, Glycine max
  unsure (1)..(534): unsure at all n locations
ctctcacaaacacactgtcttttggggatcgaattgtatcgttcctgattggccaattcagcttgctttggattgatcagcagcaacgcctgaagttcaatgttgatgttgttgagagtgaatggggccatggtgctaagcttgatgttctggaatcaaagattgcttcagatacttcacacactataaaggcaatttgcattgttcacaatgagactgcaactggggtcaccaatgacttggccaaagtgagacaaattcttgattcctaccagcatccagccctccttattgttgatggagtgtcttccatttgtgctcttgatttccgcatggatgaatggggagttgatgtggcaataactggctcccagaaggccctttcccttcccactgngataggtattgtggttgcaggccctaaagctattgaggcctcaaaacatgctaaatcacttagagttttctttgactggaaagactacctcanattctaccagctaggaacctattggccatacactccttncatac

SEQ ID NO: 215930 - DNA, 424 bp, Glycine max
aagatgcaatgatttttgatatacaggacaataaaagaagcaatgcattaaagctgaaagtagaaagtacgttcatcttcaaaggagtgtaaaagagggtaatatatattttacagaatttctgaaagagcagaaaaaggaagtaaagacaagaatgatttgtgactcaaatcctggaagggatcataggaatagtgttctgtaagtatgcactggcagcagcaactccacttccaagctttacaggataacccacatctttgagtatcatctctacaccagctagacatcccaacagttgcaactcattcaagtggccaagatgtccaattctgaaaaccttcccagcaactttgtttagtccaagacctaagctcaaattgtatctcttccatgccctcctaactattttagtactatcaat

SEQ ID NO: 215931 - DNA, 580 bp, Glycine max
  unsure (1)..(580): unsure at all n locations
cagctttgtctcatcattcagagaagcagtctacaaggttaaatgcagaagtgagtcttcagatggacattcgggttctgcttttcaaggaaatgaagcccaaacagataattttatcgaaatgtaccttagaccaccttcagctagtgaagaagcaaggataaatgattggatcaaagtgcggcagtctggaattagatattatttatcacttggtgaccagaggattgttgacaagaatttcatcatcaggcctaaagctgaatttgaggttggtcgaatgacattgggtggattattggctcttgggtacattgttgttgttagttacaagcgtgcctncacaactgtcaataatggcaaggtttcaatgtcttttgaaactattgatgttcttggtgagacgttcatggtgatgagaggaactaatagaaagactgtcagaacagaagcattaaggatgggtattaatggaccttggattactaaatcatatctggaaatgattcttcagagaaaaggtgtacctcgtcttagtacaccaccacttgtgtctaatacaactgtggctggtagtcaa

SEQ ID NO: 215932 - DNA, 489 bp, Glycine max
aatctcttcatctctgtctatggacaaacagtagattttacagaaaagagacaggatgtgttgtgttcaacctaccaatgaaggttgaaactagcagcctgcataagcgggtgtgcaaagtaagcacctaacgttattgcagtaactgtcaagtatggcagtcgaataaactccttgtagaaatcttttggtaactcttgtcggccatcgaggattgctgcaaaagggacaacacttgttcgactcttaactaattcaaaatcctccccatatcttatggccagtcgcctgtctccattccagacaccaaatagatgatgtgcaatcaagccaattgaagctgcaacagccacggaatttccgatccaaatcgtatgagcaagacaccagataacctgcccaaccatctgtggatgcctggttattcttatgatcccagtttcccatagatgcaatttaggcttgtcaacagctgcaacctctaaaaga

SEQ ID NO: 215933 - DNA, 417 bp, Glycine max
cttacacgcagacttgttgaagtggttcaacacattgttgtacgtcgaacggattgtggtaccattcaaggaatttcggtgaatacccagaatggaatgatgccggaaagaatatggatacaaacattaattggtcgtgtattagcagacgatatatacagaggttcacgatgcattgccgttagaaatcaagatattggaattggacttatcaatcgatttaaaacccttcaaacccaaccaatatctatccgaactccctttacctgtaggaatacatcttggatctgtcgattgtgttatggccaaagtcctactcatggtcacttggtggaattaggagaagctgtaagtattattgcgggccaatccattggagaaccgggcacttcactaacattaagaacttttcatact

SEQ ID NO: 215934 - DNA, 615 bp, Glycine max
accgttcttggtggtatcaacacggcactgtgtcgggatatcttatccatttctccgggaaaatagatatccccggaaaatatttttaattcaatctttttttttttcttctccaatcggaccaatccccttactcgacttcttatatttaaagtgattagtgtatctacttcaacgatactattgttccgtaccattatggaagaagattctggtaaaatatgcacttcctcgggaatgaaaaaaaattgatctactttaatttggtattttgtcttaaattctttaactccttgatactcaattaaaaaatcctcttttttaaaaatggaatttatacctatagtcctatatttagtaattcccgagctctgtgttcggtattgaggatcatcgaaataagcaagaatgctatttctacgaaaaataccattgattggtatttcaatcgagatactggaagctaacattagctctttgtctcgttcttgaatcgattggaattgaaatggaataattaatctatttctccgcctctttgcttataaatccgtagtatcatggaaaatagtaggatgtgtaaaatgaccatgatctatagatatgattggataa

SEQ ID NO: 215935 - DNA, 552 bp, Glycine max
  unsure (1)..(552): unsure at all n locations
agtacacggcccaatgaaaagtctataatattggagcataatgaaattacattacactcaggtaatttagattacctgaacatacgccaaattgtttattgcacaaacaatgttatctaaggtctttctaagcttgttttctttttctcttaaaaaaagaagaaaaagaaaagcatggaataatattctcttttggtcaatgaggaacgaaaataacaagttcatagaaccataggctgagcatctgccacttttgatgttttagaatgcttgccaaccattggctcaacacccaaccatttttgaatatgttgaaacactgtttcatctcgtaatattccacggtgagaagcagcaactcccaccctttcagtggcttcaagtccatcacccttggcagattcagaaggaaccgttccatctcctccgacgtaagaatatagtggcattgtgtggcatatttcagataagtcctctattggagagttttccgaaccataacaaacatcanaaggtgtgtccaatgatgtcccataaatgttatagaaacag

SEQ ID NO: 215936 - DNA, 535 bp, Glycine max
  unsure (1)..(535): unsure at all n locations
caagacatcacaagaggaaagggtttggttgactcccttttccaagctccacaggatgctggaactcactatgcagtcatgagctcctacgagtacctcagcactggacttcgccagtacttggacaacaaaatggatggattctacattgctccagcttttatggacaagcttgttgttcacatctccaagaacttcatgaccctgcccaacatcaaggttcctctcattcttggtatctggggaggcaagggacaaggaaaatctttccaatgtgagcttgtctttgccaagatgggaatcaaccccatcatgatgagtgctggagagttggaaagtggaaatgcaggagagccagcaaaactgatcaggcagagataccgtgaagctgcagacatgatcaagaagggaaagatgtgcgctctcttcatcaacgatcttgatgcangagctggtcgtcttggtggaaccacacaatacactgtgaacaaccagatggtgaatgccactctcatgaacattgctgataacccca

SEQ ID NO: 215937 - DNA, 546 bp, Glycine max
aggacaaaaggaaaaggcaccaaattcaatttaagtggacactgtaactcaaaattatagaggaagacggtccaatatgaaaaatatagtaagatcatctcaaacttagcatcttctctttgcacctaagacattgagaatgctaagaatgttacacgcaagttccatcacaacttctagcacttggattagtacaacaaccttcacgaacagaaatatttacttgccaagtttgctttgcctccaattcaagactggaagaaagttcccctctgaatagcatcctcgttagcatttccaagagcagcctcgttcaagtacttgtcagccaattggactctcttgacattctcttgttcttggacaagcatgttaccatacagcaagagcttctccagagtcatcttgggctgctaaaggttggaggtccatcttttgagttcacaagcttcttccaacactgtcaacaccaacaccagaaatccacttcctcacttcatcatcatatactctggccctcagtgcaccaaagaaatcaatggattg

SEQ ID NO: 215938 - DNA, 479 bp, Glycine max
  unsure (1)..(479): unsure at all n locations
gctttttatttcaaatccaacattactttaactgtcttccacataaatccaccatggccgactcttcttcttcttcttccaaacgccaaaagcaacatgatgatgatgatgatgatgttgaagaacaacaacctctgatcccaggtctccccgaccacatagcagaattgtgtctctcctccatcaaccattctctcttattctcaatctcccactcctgccgccgtctcatatactccccttccttccctccctttttctctctctacgccattctctcccactcctccgccaccatccacttccacaccttcgaccccatctccgcactgggtctcccttcccttncgcaccctcccctccaccacctcctcctncgccgncacccctccttcctctcccgcagcctctccgttcagtgcgtctccttctccaaccgactcgtactcctagccgtcaccacccacaacctctccccg

SEQ ID NO: 215939 - DNA, 547 bp, Glycine max
  unsure (1)..(547): unsure at all n locations
agaaagcaagctcatcctagagttttaaaaatggcagcagcctcctccatggctctctcttccccatccttggctggcaaggccgtgaagctgggcccatcagcccccgaagtcgggagggtcagcatgaggaagaccgtcaccaagcaggcctcctccggaagcccatggtacggcccagaccgcgtcaagtacttgggcccattctctggcgagcccccgtcctacctcactggcgagttcccaggtgactacggctgggacactgctgggctttcggccgacccagaaaccttcgccagaaaccgtgagctcgaagtgatccactccaggtgggccatgctcggggccttgggctgcgtcttccccgaactgttgtcccgcaacggggtcaagtttggagaagctgtgtggttcaaggccgggtcccagatcttcagcgagggtgggctggactacttgggcaacccaagccttgtccacgcccagagcatnctcgccatctgggccacccaagttatcctaaatgggtgctgtgagggttatc

SEQ ID NO: 215940 - DNA, 387 bp, Glycine max
ttttttttttttttttttttttttttttttttttttttttttttttttttttttttttttttttttgggaaaaagcaagtaacattaagttgggttgggatccccaagaaaattcacattttttgaaggacattggaataacatattcttcaccaaacacaaatttaaaaacttttaaaagtccacaagtcatccttttttttcatgcccacttgccggggacaaaattggggggctaggcccacgcctttttgttgactgggtccccaaggggatcaaaaagggtttccaatggacccttaccggggacaatggcccgtacaaaaaaccccaaccccgggaaactggccaatcttccgctcttggggtccttccccttaagcccac

SEQ ID NO: 215941 - DNA, 533 bp, Glycine max
cggctcgagattttctccatgctaacaccttcgttcctccacgatttcgccattacgaagaaatacgcgatcttctgtgatattcagctcggattgaaccctcttgacatgatctccggtggctcccccgtcggctccgtcgcctccaaggtcccaaggatcggaatcctccctcgtgatgctaaggatgagtcgatgatgaagtggttcgaggtgccggggttcaacatcattcacgcgataaacgcgtgggaggaggacgagggaagaacggtggtgctggtggcgccgaatattctttcgatggagcacgcgctggagagaatggagctagttcacgcgatggcggagaaggttcggatcgagctggacacagggataatcacgcggcaaccggtgtcggcgcggaatctcgatttcgcagttataaaccctgcgttcgtggcgaagaagaacaggttcgtatacgcggcggtggaggacccaatgccgaagatctcgggggtggtgatactcgacgtgtcgaaggggga

SEQ ID NO: 215942 - DNA, 422 bp, Glycine max
aacggtaataatgaaaaatacaaataatttattcagctgttccttcatgattcacccatacatgaacgatgattactttgtttagctggcatagacttgcatgtaattactaattacacctcatcaattaattctgagaagcaataatggtgctatacattacattacaggacacatgtataatggacagaagcgtggaagacaagccccacacacgaaccatcatgtctcagcttcacgacaacgatactttcctcagctcactctgcttcacaaacaggccatggaacccgtacggaacccgccgaggaagcctaaccgccgggacaacatgagatttcggtgacttcgcgtccatcaccgaaaaccttgactcccccttgctctcatggtgcacgtaactcaccaagtacccatcatct

SEQ ID NO: 215943 - DNA, 529 bp, Glycine max
  unsure (1)..(529): unsure at all n locations
gtttagtgacatttgcagtagtagccagcaggacgaggaaaatgggtagtgtggccccaaggttccgcttcctcctggccactcccttccctcttctccgccgccggcaccaccaccaccaccgcaacctcttcctcctctccacccattccctccccttatcttccttctctttctctctcaaactcaaagcctcccaatcccaagcttccgcccctaacacctctccctgccctgagtggtcctcattcctctcccacatctcctccgccggctacctcccctccctccccgaccaagccttcaccgccgccgacgaacgtctctcctactccttcctccgcgacgccaccgnctgcctcgccttcgcacgtgaccgtcctaaccttctcaggttgctttctacgagagacattgcngcgctggttgagcacggctccccctttctcttccgcgacgccgacgactccgtcaggaagatgaagacctttctctcaacggtgacaccaatgtgttggacactgataga

SEQ ID NO: 215944 - DNA, 446 bp, Glycine max
atacaaacattggttttaatgcatcacttatttctggaatttcagaaactagtccgtcgacaaagataaatacttgctgtcaaaattctgttacaagtgtaaataaaaaggtttgagtagtaatgttttccatcatcttcatcatcctttttctatatttgccagcaacattttaattgcacattgaaaaattaagcaaatggagaataataaattaataatactaccacttttcagctaccttcattttctttattaattggatctgagctcacagttggaagattccttctgtactgctgagacgtcaatctcctttcaatgggtgttttcctcttgcttacaacaaatctgttcacccctttgcgcataggcattattgaaggaaaatcttcgtctggaatctgactgagctcagaaatatccttaatctgtgcgacgcgacg

SEQ ID NO: 215945 - DNA, 529 bp, Glycine max
  unsure (1)..(529): unsure at all n locations
ctgcatatgaaaattaccacaggatatttgtccctgatgggcatcctttgaaggctgcacccagagagcctttgagggttaatgttctgttccaacatatacaaaatatgctgtctggtgaaactgctgtaattgctgagacaggggactcctggtttaattgccaaaagctgaaattgccaaaggcatgtgggtatgagttccaaatgcaatatggttcaattggatggtctgttggtgctactctgggttatgctcaagccgttcctgagaagcgagtgattgcctgcattggtgatggaagttttcaggtgactgcccaagatgtatcgacaatgttacggtgcgggcaaaaaaccatcatctttctgatcaacaatggtggatacaccatcgaggttgaaattcatgatgggccgtacaatgtgattaagaactggaattacactgngttgattgatgcaatccacaatggtgaaaggaaatgctggactgccaangtgttctgtgaagaggagctagttgaagc

SEQ ID NO: 215946 - DNA, 450 bp, Glycine max
aaaaagaacgatgctttacttaagaataatcgaaatgaacaaaggggataaacaaaggggaacaaaagtgaaagaatttacacacacaaggggggagtcagtttatcataaatgtttcaagccattaacaaaggtaaattccctacaagggcatcatctcaaatgattttcactttcatagagctaaagggcaactgcagcaatttagccataggataaattctgaagattactgaggattgggaggacgggtattggcagcaaaaacccttgagccccattcaagcaattctttactggggtgatacttatgaacaatcacctcaatgaagcatatggagtctttcttgggtcctgtggctgtggcaattgcttcaactagctccttttaacagaacaccttggcagtccagcatttcccttcaccattgtggattgcattaatcaacc

SEQ ID NO: 215947 - DNA, 520 bp, Glycine max
  unsure (1)..(520): unsure at all n locations
cattttccatttcttctgtgtctgaaaaatttctctttcttgtcttcgtgttttctccttcttcttcgcttcatcgcttgccaattcaagttgcttgacatggctacgcatacgcccaaaaatatcctcattactggagctgctggattcatcgcatctcatgttgcgaaccgtcttatccggaattatccccagtacaaaattgttgttcttgacaaacttgattattgctcgaatctgaagaatctcattccttcaaaatcatctcccaacttcaagtttgtgaagggggatattggaagtgctgaccttgtcaactaccttctcatcaccgagtccattgacacaataatgcactntgctgctcaaacccatgttgacaactcgtttggtaacagctttgagttcaccaagaacaacatatatggtactcatgtcctattagaagccttgcaggtaactggccagatcaagaggttcatccatgtgagcactgatgaggtctatggagagacagatg

SEQ ID NO: 215948 - DNA, 595 bp, Glycine max
aactgaataccccacaaaaaggatataatatatgagcaataaaaagaatacatgccttccaggatgcaaaagcttttaggtaacaagaccctattttctaaggctgctcttaacagaggacgctacaaactagaataaagctacagaaatgttaacttaggaaccatatctggcccaattattatacttgtcaccctctaaacacagtaacatgatggaactatgctgaaactggaatcacttgtagctatgagaacaagaactacatggctagcttttctagtaaggttcttatcaaaacccaacgaaataacaatgaaataaagagtgatctatgtagcccgcaacaaaaatgcataatctttgatttctaaaacatgaaaccgctcaatacttttaagcagttttcttgtttggctcaaagacatacttgatcagtgattccttgatggaaagaagctcagggaactcgttcttcagtttggatgcatccatctcattgttgctccgtggagcaattatcaccttggcttgctcttcaagattgagttagtccacttgaagctggatcaatgaatccctgtcatctcgagaa

SEQ ID NO: 215949 - DNA, 522 bp, Glycine max
  unsure (1)..(522): unsure at all n locations
atcatgactttgtcttcatgggctacttcaagtgttgaagaggtagcttcaacaggacctggcattcgctttttccagctatatgtgtacaaggacaggaatgtggttgctcagcttgtgagaagagctgaaagggctggattcaaagccattgcccttactgttgataccccaagactaggacgcagagaagctgatatcaagaacagattcacactgccaccatttttgacattgaagaactttgaaggattggaccttggaaagatggacaaagctgatgactctggacttgcttcatatgttgccggtcaaattgatcgtactcttagctggaaggatgtgaagtggcttcaaacaatcaccaaactgccaattctggtgaagggtgtgctgactgctgaggacacaaggatagctgtacaaagtggtgcagctggaattatagtgtccaatcacggagctagacaacttgattatgttccagccactatatcagccttagaagaggtngtcaaagct

SEQ ID NO: 215950 - DNA, 510 bp, Glycine max
ggataaaggactcaaaattaataatatacaatgagtgaatgcagcagcagagtagccacagaagtatcatcatattaatgcttagaaattaagcatagagttatccaaatacaagtttaaatgagttgtccaaaaaggaaaagaaaggatgagaagaacaggttcatgaaacatatatagaagtgtttcccccattggaaaaagtttttcataatcttggcaaggcgcgggggatagtgcgtggttggtcccaatcagtgacaatgtgatcacgagtgatatccttgagtgaggtgcaaccactcaaagccatggttagctcaaactcctcacgtagcatccgcagcacatttcttacaccagcctctccttcagcagccaaggagaacaccactgggcgtccaataaatatgccagaggcacctagtgccaatgccttgaagaaatcagttccgcggcgaacaccaccatccaaaaatacaggaacacgaccttcagcagctttgacaa

SEQ ID NO: 215951 - DNA, 559 bp, Glycine max
  unsure (1)..(559): unsure at all n locations
ctcgagccgctcgatccgtgctattgaagttgaagtcttgcccttctctcttcaactccaaacacaagacattatcatccatggctgcctccgtctccactgtcggagctgtcaacagagctcttttgaacctgaatgggtctggacctggggtttcagctcccagttcatccttctttgggagcagcttgaagaaggttattggctcaagggtccccaacacaaagatttcctctggaagcttcaagattgttgctgtagaagagaagaaagagattgaagagacccagcagaccgacaaggacagatggaagggtcttgcctatgatatctcagacgaccaacaggacatcacaagaggaaagggtttggttgactcccttttccaagctccacaggatgctggaactcactatgctgtcatgagctcctacgagtaccttagcactggacttcgccagtacttggacaacaacatggatggattttacattgctccagctnttatggacanactngatgttcacattaccaagaacttcatgaccctgcccacatc

SEQ ID NO: 215952 - DNA, 542 bp, Glycine max
aggacaaaaggaaaaggcaccaaattcaatttaagtggacactttaactcaaaattatagaggaagacagtccaatatgaaaaatatagtaaaatcatctcaaacttggcatcttctctttgcacctaagacattaagaattctaagaatgttacacgcaagtcccatcacaacttctagcacttggatcagcacaaccttcaggaacagaaatatttacttgccaagtttgctttgcctccaattcaagattggaagaaagttcccctgttaatagcatcctcgttagcatttccaagtgcagcctcgttcaagtacttgtcagccaattggactctcttgacattctcttgttcttggacaagcatgttaccatacgtcaagagcttctccagagtcatcttgggctgctaaaggttggaggtccatcttttgagttcacaagcttcttcccaatgccgtcaacaccaacaccagaaatccacttcctcacttcgtcatcatatactctggccctcagtgcaccaaagaaatcaatggat

SEQ ID NO: 215953 - DNA, 528 bp, Glycine max
gggaagccaaagcgaaaccctaaccctaacggagagatggcggagcacttggcatcgatattcgggacggagaaggacagggtgaactgtccgttctacttcaagatcggcgcgtgcaggcacggcgaccggtgctcccggcttcacacgaagcccacaattagcccaacgttggttctgtcgaacatgtaccagaggcccgacatgaacatgaacatcatcaccaaccccgatcagccccagccccaatctctcgaccccgataaggtccaggatcacttcgacgacttctacgaagatctctttgaggagcttagcaagtacggccccattcagagcttgaatatttgcgacaacctcgccgatcatatggtctttctctccgcttccttcacgcaattttaattcttcttaaatttaattgttttaattgattattttgcttctttcgttgtttgcgcatgttggaaatgtgtacgttcagtttacggaggaagaccatgcagccaacgccctcatgaatctgac

SEQ ID NO: 215954 - DNA, 515 bp, Glycine max
  unsure (1)..(515): unsure at all n locations
cgaaatcttcggtcatcatcctcaaatcttcgctcgctcacctggaagagtgaacttgattggggagcacattgattatgaaggttattcggtgctgcctatggcaattcggcaagacacgatcgtggcgattcggaaaaatgaggcggaaaaggttctcaagatagctaacgtgaatggtgaaaaatattcactttgtacttatcccgccgatcctctccaggaaatcgacttgaagaaccacaaatggggacattattttatatgtgggtacaaaggtttccatgactatgcaaagttgaaaggagtgaatgttggtgaacctgttggacttgaagttcttgttgatggaacagtgccgacaggttctggactatcaagctctgcagcgtttgtctgctcatccacaattgctattatggctgcttttgatgtgaacttcccaaagaaagaacttgcacangttacatgtgattgtgaacgacatatngngactcaatctggtgggatggatc

SEQ ID NO: 215955 - DNA, 568 bp, Glycine max
  unsure (1)..(568): unsure at all n locations
ggtgataacaagtttatttttccattacagaaagtcgcagccataagaagggaagcgggttaaggctgcgacttaaaagccgttcggcaatattatcattatttgctttcatcgtatcaactaaaataatttaacaaagaaaatatggtaccatttaatcttactccatcagaaattgcatctaatctgtgtctagatctcaggggaagaaagtcgcagccataagaagggaagcgggttaaagaacactaaaacttgaagatagcagcaccacttgatggcttggaagcaaatacataaaggccaagatcgttcttcttaataacgcccttgtctattctagactggtagaaacattccttcaaattaaggataaattgtggaactatgctctctttcaccaaagcaacagcacaaccaccccatccagctccagtaagccttgcccccagagcaccattgttacgacaaatatttacaagttcttgcaactccggacagctgcattcatantaaacgctgcagctatgatgactctcgttcataaggtcaccaagcttctttagca

SEQ ID NO: 215956 - DNA, 544 bp, Glycine max
  unsure (1)..(544): unsure at all n locations
ccaagagcttgctgttttctagctgttgttgcattgctcagccatggatttgaaagctgaggctaacgcgggagatactgagttccaagcagtgaagattccgagacaaggaggatatagagccacatatttcatctttgcaatgatgttgctggataacattggctttgtggccaacatggtaagcttggttttatatttcatgaacgtcatgcattttgactactctggttctgcaaccaccacaacaaactggttgggtactactttcttgctgacgatcgttggagggttcatctccgatacttatatgaatcgcctcaacacttgcatcctctttggcataatccagttgttgggatactccctacttgtgattcaatcccancgacaaacacttcagcctgatccatgtttaaaatcaacatgtgtgcatggcactaaagactttgctgtgtacgcttcaatatacttgctagcacttggtggtggtggaatcagaggctgtgtacctgctctcggagctgatcaatttgatgaaaac

SEQ ID NO: 215957 - DNA, 414 bp, Glycine max
ctcgtgaaactgagttttctcatttatttttcttcattcaggggaatgttttgaaccgtggacacaaagctagtagagtagacgttttcatcattacgaggaggtggatctttgagcaacattcccgtatcaaatggtacaacactttggtatttgtaccattttgcacacatcagataaatgacaaagttaattatgctgagtatagccaaaaaccagtagaataattcaacatggtttcggttcaagtcacgtccctctagccaccctttcttgctcttggcaatcttaccagtcaccaagttgatgagctcaacaaaagctgtgctcaagtagtaaccaatggacaaggaaagaaaggaaaaggaagtggaaagtgaacgcatgccttgaggagcttctttgtagaaaaac

SEQ ID NO: 215958 - DNA, 541 bp, Glycine max
  unsure (1)..(541): unsure at all n locations
ataacctgggaggcattagattgccagttctgactcctaatttaaagggttttgaagctgctatagcggctggtgcgagagaagtagctgtttttgcatcagcttctgaatctttctcaaaatcaaacattaattgtagtattgaagagagccttgtccgctatcgagctgttactcatgcggctaaagagctctctattcctgttcgagggtatgtatcatgcgttgttggatgcccggtggaaggaccaatccctccgtcaagagtggcatatgtagctaaagaactatatgatatgggttgctttgaaatctcactcggggacacaattggagttggtactcccggaactgtagttccaatgcttttggctgtaatggctgttgtgccagcggagaagcttgctgtccacttccatgacacttacgggcaatcccttgcaaatattcttgtgtcccttcaaatggggatcagtgcagttgattcttcagttgctggtctaggtggctgtccatatgctaagggagcttcangaaatgt

SEQ ID NO: 215959 - DNA, 377 bp, Glycine max
ccttcacaactcatcaacgagagggggcattttattctttgtcaataattatggggtaaaaaagatgaaacatttggggtcctctcattgcttaaagcatccaaatataatttttttacggcagaacatattatcatatcttggaagcttcaccagttactcggctaaaggcaatggtagtctttgacccggatgggccccccaaatgcttgccgatgaactcaccagctgacatgagctttccgaaacaacgttggtcttcacaccaagcccattcagcatgtacacaacatcttgggtagctacatttcctgaagctcccttagcatatggacagccacctagaccaccaactgaagaaacaactgcgctgatcc

SEQ ID NO: 215960 - DNA, 528 bp, Glycine max
  unsure (1)..(528): unsure at all n locations
gcattacatcacgtggctctcacagtaatcttcaagcagagcgatccgacacgatgggctcagcagcgaaatatgagcttccattcaagctgaacaatccggacctcctacacaatgaatcgttcgtccacggtaaatgggtgaagtcgaagtccggcaaaactttcgaagttgcagatcccggaactggcaagacatggatagattgtccaacaaacgacgcttcagacgttgacgaagcagtcaaaagctcgcatgaatgctttctggaatacaagaagatcagtccgagacagcgtgcgcagatgctgtacaagtgggacgctttgatcaaagagaacagggaagacatcgccaccattcttgtgtacgagactggtaagccgagggctgaagcttatggcgagatcgactattccacaggctttacttggtggttcgcangagaagcagagcgcattcaggggtctgttttcacccctgcactgccgaaccgtcggatcttcaccatcaagcagccgctgggcg

SEQ ID NO: 215961 - DNA, 567 bp, Glycine max
  unsure (1)..(567): unsure at all n locations
ctcgagccgcaactacaaaggttgctgtaggagataagatattgaagtagtgctaagtgcctaacacctgcagtgaacaatggcctctgcatcagcatctcttctcaagtcttcacttgttcttgacaagtctgagtgggtgaagggacaaacacttcgccaaccttctgctgcatcagttgtgagatgcaaccccaccaccccatcaggcctcaccatcagagctggttcctatgctgatgagctcgttaagaccgcgaaaacagtggcttcaccagggaggggtattttggccatggatgagtccaatgctacctgtgggaagcgtttggcttcaattgggctagagaacactgaagctaaccgccaggcataccgtaccctccttgtgacagttccaggacttggtcagtacatctctggtgccattctctttgaggaaactctctaccaatccacaactgatggcaggaagattgtcgacgtgctcctcgagcaaaacattgntcccggtattaaagtcgnacagggtttggtaccccttgctgggttcaacgacgagtcatg

SEQ ID NO: 215962 - DNA, 357 bp, Glycine max
gccgagattcaaccatgtttgttatatattgagacataatcaatcaagtacaccactcacagcagaaggtttataagctgtaaaggtacatgtaaccataaacaaaaatagtctccaagactataaaaacattacattttagacaaattagtctttttccacttcatcctccggcaacacctactataactggtggggttgctgctgcctaacatgtatcatattcactacatacatcttagtgggagtggcctttgacgaacaactccttcttggcttcctcggattcaccctcaacggggtacttcccaagctgggcgagcgagttggacttggcacggaaaaggagtgcatttt

SEQ ID NO: 215963 - DNA, 563 bp, Glycine max
  unsure (1)..(563): unsure at all n locations
cactcctataattctttatccgttcggacaagaacacaggggaaggactaattgaaaggtgaagaattcacatactgattcgccctctttcttctcttttttagtccaatgacccccccttttttttaagataatttttctcaagtgttaaaacttgagagattttgcaatggatataagaactggtatctaattcgaataagtatcattcttttagggaatcttccaattgattgaccaatccaaataatatatggatatatatatatagatagatctatctatatatatatctaactaatataggaatcttagaaagataattagtctattcataagaggagatgagatcatatgaaaaatataaccgattctttcctttgtttgggctactggccatccgccggaagtttcgggtttaataccgatattttagcaacaaatccaataaatcttagtgtagtgttaggtgtattggttttttttggaaagggagtgtgtgcgagttgtttatttcaaagaatagattggatccaaccaaactgcactttnnntagtatact

SEQ ID NO: 215964 - DNA, 476 bp, Glycine max
cattcgaattcattttatttatatattaatattatattcaaatgaaataaaaagatattaaaagatactaattataagaatttgaaagtgaaattataaagttattaaatgattaatcaatttttttctacctgttcctgtagtaaaaagagttccatctgttcttgaatagcttccttcaaaaggacttctgcttccccagtgaatgtcttggtagaagatatgatttctttgaattgaggtttattcgtgtttaagtaagcacgtaactcaacaagaaatttccttacctgtccaatttctaatgaatcaagataaccattcgttccagtataaatagttattatctgttcttccacggtaagaggagctgattgggattgtttaagcaactcgcgcaatcgttgacctcttgctaattgattttgagtagctctatcgagatcagaagcgaattgggcaaaagcttctaattc

SEQ ID NO: 215965 - DNA, 611 bp, Glycine max
  unsure (1)..(611): unsure at all n locations
catttttctgctgagggaaaagtgatagatgtccatctggtagttgatccttggacaagggaatcccgtgggtttggctttgtgacaatggagactcttgaggaggcagatcgatgtgtaaagtatctgaatcgctcagtacttgaagggcgtgtcatcacggtggagaaggtatacatttctagcagtgccctattttgtggggcctggatttttattagctatttttttttcaaccccaatgcatggaaattatgtgggtgatttgttctttagttcctctaagttttgaaagttttgtgcttgtttccgtttgaagtttctgtggcagcaggttagctgtgtgaagcagctcttcatcaaactctcaaatcacaactaaacaaacaaatcaaatacaccaccaagtatcagatcattggggttgtatgccctgcattactctcttttttattgcatttatatcttattattttgtgcatcgtgaatatgtgattnttaagatactcctctcacaattgcagtgttcagttttctgggtttggataatatgtaacattttgacttcatattgatgctactattgcttacctacctgtgcatggcaatac

SEQ ID NO: 215966 - DNA, 413 bp, Glycine max
cgaaagtactggaaatgaaaatcaggaaattagtgatgaaggatacctatcccgaagcttggagggaaagaaggcaacagatgtaagacttgctgccattgccattgggacagcctctcgaggagggttggtgaagcttacaattcgtggatgcaattcagatcgtggggtgactagtgtaggtctcaaggcaattgctcatgggtgcccttctctaaaggtttgctctctatgggatgttgctactgttgatgatgaaggcttgattgagattgctagcgggtgtcaccggttagagaagctggacctatgcaagtgtcctaatatttctgacaagacttaaattgcagttgcaaagaactgtccaaagctggctggagtatcaatagagtcgtgtcctaacattggcaatg

SEQ ID NO: 215967 - DNA, 516 bp, Glycine max
ggacgggcttacaaattttcattcattatttttcataaaaaaaacataacagtacaaggggcatatctcagtaagtatcattacatgatatagaggttacaatgacaagttccaaaaaaaatgaagcctaaaaaacaagggctttggtagtaaaaaaaacaacccatcccccaaagggaaaagattgtgaccacagacctgtataataacttgctgccatgaccaaagctcccgatgacaaaggcttcataaaactctgaagaactgccaaagtaaccaggacaacatcaccacataaactggaacttcaacatgccccttgactaaaacttaaacccaaaaatcgcgtacagagcataagctcaaatacgttaaaaattgggtaaacaccactggaaagactcgatacatgtactgctgcaaagaaacaaggacaaggacacacatggtggcaaaaccgatacaaacagtgctaaaaacatcgggtgccaacactggaaagaaaaatacctaact

SEQ ID NO: 215968 - DNA, 304 bp, Glycine max
gttctagatcgcgagcgtccgtcctttttttttttttttggaaaaagcaagtcacaggaagctggattcggatgcacaagataattgacatgatctgaagtgcttcaccaaacacaaatgtaaaaacctttgacgagtgatctagtggttggacggtcacttagcggagacgaagttgctggcctaagcccaatcgttggtgctgacagggccaactaggtgatcggcgaggctctgcaaaggaccctttccggggactatgggctgaacaaaggagccaaacctagagaacatggcccatcgt

SEQ ID NO: 215969 - DNA, 415 bp, Glycine max
  unsure (1)..(415): unsure at all n locations
agacaatgacaacggtagctgcttctcttgatgccaaagaggtgtctacctccaaaactgaccaaaaccaagtgtgtgactgtgatccccaaactagccatgtcttcaaatcaaaattaccagatatcccaatctccaaccaccttcctctccacgcttactgctttcagaaactatcccaattcttcgaccgcccatgcctcatcgtcggacccgccgccaaaacctacacctactccgagacacacctcatttcacgcaagattgccgccggattgtccaacctcggaatccgcaagggcgacgtggtcatgatccttctccagaactncgncgagttcgtcttctgcttcctcgctgccttcatgatcggcgccgtcgtcaccacagccaatccgttctacaaccgccgcga

SEQ ID NO: 215970 - DNA, 561 bp, Glycine max
aaaaagtgaagaatagaaaggatttgataacacgaataatacaaggtctcgaaaattagtgatctaaaatcacaatacaggcatggtggtgggcaatggacacaaaaatacaatgattatgtgtaagtgcaactgcttctcggactttgacttaatgcagtgaagcattgatacgcaaattacacgtgagaaaccaataatataaataaataaaaaagaaagatattgccaaaaaaaaaggggcaggttctagccttttaaggcgtctgagtggcggcggtttctagctttgctctgaggtctttccttaatatctttcctgatggagacttgggaatagcatgtacaaaataaactttgtgcagtcttttgtaaaacactacctgtttagctataaactcttttacagcctcttcagttagatcaaagccgtttgatctcacaacgaaggcaacaggaacttcaccagcagcaacatccttttgtgggactacagctgcgtctgcaatggagggatggcttacaagaagcccttcaagttctgcagggggcacctggaag

SEQ ID NO: 215971 - DNA, 472 bp, Glycine max
  unsure (1)..(472): unsure at all n locations
ctcaaagccacagctgctgagttagtggagcagataacagcttctctgggaacatcatcatctgatggcatcccatcatcagaagcctcagacaggatcaaagctggtttcattcacttcaagaaggagaaatatgacaagaatccagctttgtatggtgaacttgccaaaggccagagccccaagtttatggtgtttgcttgctcagactcaagggtgtgcccatctcatgtgctagatttccaaccaggagaggcctttgtggtcagaaatgttgctaacattgtcccaccatatgaccagtcaaaatacgctggaactggggcagcagttgagtatgctgntntgcatcttaaggtgtctgagattgtggtcattggacacagtgcttgtggtggtattaaggggcttctgtctttcccatatgatggaacctactctactgattttattgaggagtgggtcaaaattg

SEQ ID NO: 215972 - DNA, 381 bp, Glycine max
  unsure (1)..(381): unsure at all n locations
gaacttcaaatttggaatagagggtgatggagaaatctccatatccacttttattattaggaaattcagcacatgcatgcattcataacaagggcaatattaatttcagagtacattttagataggagaatacttagggaaccaagatgaggtcattgataatggttgatgttcatacggagaaagaggatgcaaggccaaactgaaggccccagagctcaaaagatcccttaacaaagtcatagtatcctccttttagtgacaatgtcttgttcaccaagccatctctaacaaatgggtatgttagaaggtttccaagggaaacattcacagcttccttctcacagtgtgagcacaactcagcanaaggtgcatccccat

SEQ ID NO: 215973 - DNA, 544 bp, Glycine max
  unsure (1)..(544): unsure at all n locations
cccttcttcacttcccttcacattgcagaagagatggctcttgtgaaaccaatttccaatgtcactcccaaatttggcagcagccccagaatgggatcacactccaaattcagcaccataataagaatgtctgccactgccaccccaccaccaccaccctccacctccacaaagccagctgcaagcaacaagaagggcaacatcaaggagaccctcttgactccaaggttctacaccactgactttgatgagatggagaccctcttcaacactgagatcaacaagaacctcaaccaggatgagtttgaggcactgctccaggagttcaagactgactacaaccagacacactttgtgaggaacaaggagttcaaggaagctgctgacaaacttgaggggccactcaggcagatctttgtggagttccttgagaggtcctgcactgctgaattctctggcttccttctctacaaagagcttggaaggaggctcaagaaaccaaccccgtggtggcagagatnttctctctgatgtctanggatga

SEQ ID NO: 215974 - DNA, 522 bp, Glycine max
ggtaaatgtttcctcactgtcttgtacaaccatattttactttagcaccaatactagtaacactcaagatgaacattttgatggagatcaaaaggacataaggaatttaatcaatttatacacaacttcagtacacaagttgtggttcaaactctgccaaatctacagaccctgactcaattggaggcattagatatgttgccaagagttcagacaccaatgcagcaaccagtgggatcctcttcaagttcttcaccaccgctatgtcatcactctccccaacagcaataatcttctcgtttatctccaccatccggtccaacttccgcttgaactctgggttttcaacatcaagaacagctgggaaaatcctagcagttgtgcggtttgtctcgatgatgacatgcatgtcaaattcttttggtgttaagtccaatgccttcatagaaagctgtacgttggcaatcattgagatacattgtaacataaaccgatagacagaagaatcgagaccacaacttt

SEQ ID NO: 215975 - DNA, 421 bp, Glycine max
ttttttttttttttttttttttttttttttttttttttttttttttttttttttttttgtttttttttgggggaaaaccaaaaaaaaaagaaaaacaaagtccccaaggccaaaaggaagggaccccccaaaatgggggaaaaacaaccaaaaaccggtcaaaacccccaaaaagggtaaaaaggcgggaaaaatccccaacaaaagaaaaacgcttacccccaaagaaaagaagggcacaataaaaaaagaggcgggggggcgcccaaaaaacccattggggggcacaaacccgggcgcccaacccccagggaaagttccaaaaagccccccaagaggagggggggaaaaacccaagaagggggggggggggccaacaaaaaaaaggggggtggggcacccccccaaacccatggggggg

SEQ ID NO: 215976 - DNA, 422 bp, Glycine max
aagatataactaattatttttatatcttcatcaagatgcgccgagggagaaccgccgccgccgctgccgccgttgtggatcccacgccggaccaggccaaggagacgacgcggttccgtggcgtgaggaagcggccgtgggggcgattcgcggcggagattcgagatccgtggaagaagcagcgcgtttggctggggaccttcgattccgccgaggatgccgcgcgggcctacgacaaggctgcccgatccttccgcgggcccaaggccaaaaccaatttcccccccttccccggcccggcagaggcggaccaccactcgcagattccgctctaccaggcccatgggctttccaccaagttcgagcccgtcgtccaggtgaaccggcccacgagcagcggcatgagcagcaccgtggagtcc

SEQ ID NO: 215977 - DNA, 610 bp, Glycine max
acgtatcttcatcaataatcgcagaagcagtttccggtgcatctcatcgtcttccaaaatgaacgacgcagatgtctcgaagcaaatccagcagatggtgcgtttcatccgccaggaagctgaggagaaagccaacgagatctctgtatctgccgaagaggaattcaatatcgagaagctgcagttggttgaagccgaaaagaagaagatcaggcaagaatacgaacgcaaagagcgccaagtcgaaattcgcaagaagattgagtactcaatgcagctgaatgcttctcggattaaagttcttcaagctcaagatgacgtgatcagttccatgaaagaagctgcatccaaggaacttttgaatgtcagtcatcaccatgatgatcatgtgtatagaaaccttctgaaagatctcattgttcagtgtttgctaagactgaaagagccttctgtcttattgagatgtcggaaagatgacctgcacttggtagagaatgtgctggattcagctgctcaggagtatgctgagaaagcaaatgttgatcccccagagatcatttgtgacaaccaagtctatctttcacctggactcacttcatcaaattctcat

SEQ ID NO: 215978 - DNA, 560 bp, Glycine max
gattgttctttgtgaactatttttcccatgggtttagtgtttttcataaaaaactgactgataattacgtacaagggcagattaaaatcatcatcaatgaaaaaaggtatatcttggtttttcatgttcatgctcttgggtacagcttttgtgggttaaccttatcatggatacacttggggcgcttgcactggctactgaaccaccaacagaccgcctaatgcacagatcaccagttggccgaagagaacctcttataacaaatatcatgtggagaaacttgatcgtacaggctgcctatcaaatcgcagttctcctcgtccttaacttttgtggtgaaagtattctaccaaaacaaaataccagagctgatgcctttcaagtgaagaatactttaatattcaacgcgttcgtcctgtgccaaatattcaatgaattcaatgctcggaaacccgatgaaatgaatgttttccgtggagtgaccaagaacaaacttttcgtgggaattgttggagtgacctttatacttcagattatcatcatcgagttccttggaaagt

SEQ ID NO: 215979 - DNA, 487 bp, Glycine max
attgaataatatacattacattcgaattctagaaggatagttcggcaatatggagcagtaataatatatactagtatattgtaacctgtaaggcgttagcttaatatgcatggctggttatccacgcgatgcctattgtgtagcacgagacctagacctcttcaatcgcctgagtggcttcaagaagtaacgagccaatggtgttttgggaactggaataaattttccgactatagcaaggggccaactgacaaatccaataccaagagaagcaagccatagcttccaatcaagcctcaccgttgaggtgaactttccaaggaactcgatgatgattatctgaagtataaaggtcactccaacaattcccacgaaaagtttgttcttggtcactccacggaaaacattcatttcatcgggtttccgagcattgaattcattgaatatttggcacaggacgaacgcgttgaatattaaagtattcttc

SEQ ID NO: 215980 - DNA, 472 bp, Glycine max
  unsure (1)..(472): unsure at all n locations
tgcaattgaagttaaaagccttagccttccctacaactccaaacacaaagacatcatcatccatggctgcctccgtctccactgtcggagctgtcaacagagctcttttgaacctgaatggttctggagctggagcttcagctcccagttcagccttctttgggaccagcttgaagaaggttattgcctcaagggtccccaacagcaaggtttccggtggaagcttcaagattgttgctgtagaagagaagaaagagattgaagagacccagcagaccgacaaggacagatggaagggtcttgcctatgatatctcagacgaccaacaagacatcacaagaggaaagggtttggttgactcccttttccaagctccacaggatgctggaactcactatgcagtcatgagctnctacgagtacctcagcactggacttcgncagtacttggacaacaaatggatgggatctac

SEQ ID NO: 215981 - DNA, 516 bp, Glycine max
aagtggacactgtaactcaaaattatagaggaagacggtccaatatgaaaaatatagtaagatcatctcaaacttagcatcttctctttgcacctaagacattgagaatgctaagaatgttacacgcaagttccatcacaacttctagcacttggattagtacaacaaccttcacgaacagaaatatttacttgccaagtttgctttgcctccaattcaagactggaagaaagttcccctctgaatagcatcctcgttagcatttccaagagcagcctcgttcaagtacttgtcagccaattggactctcttgacattctcttgttcttggacaagcatgttaccatacagcaagagcttctccagagtcatcttgggctgctcaaaggttggaggtccatcttttgagttcacaagcttcttcccaacactgtcaacaccaacaccagaaatccacttcctcacttcatcatcatatactctggccctcagtgcaccaaagaaatcaatggattg

SEQ ID NO: 215982 - DNA, 567 bp, Glycine max
ctaaaaactttaatttatttcaaggctttatttttaatttaatattcagccaatgagatgtgaacatatgtttttatattgtttaactagtaaacttattacatgtcacaggagtcaaacttgcaggtgttccatttgtggatggcattgccgaagacatcaaagaaagaaattcgaagctgagtttgagaaatatgcacagacatgaagccttggccgtcgtagtaaaacttcatctcatctccttcgctctgtttcgtgtcacctctccatgccttcgatccaccaccacttgtcaaaaattgaactgaactgtcaaggctacttatatgttccaagcagtgatcgtgtccgtttatgtacaaatcaacattatttgccttaagaagtgggagaaaatgtattaaaagttcttgggtgtctccatgatgcccaatgcttttgattgtatgatggccaatcactaccttccaggttgctgttgattgtcttagtgccaaatccacgtccttgagaaggttagaaatataacgcttcctgggtagtatgcctcttcaatcgtagtta

SEQ ID NO: 215983 - DNA, 542 bp, Glycine max
  unsure (1)..(542): unsure at all n locations
attacccctaccagcagcagtcaaaaggaatattgatcagataccctaccacaatgtcttccagcaagggtcaattcgagcagggctaccagcccccagtccagcagcaaagtagcattcccgggaaagagtccgagctagaccctcagcctgagtacgaccatctgcccactccagatggaggcaaggagctctacaaggctgctggcaagcttaagggcaagaaagccatcatcacaggtggtgattctgggattggccgcgcatccgcaattctctacgctatggagggtgccgatagctttatcgcatacttacctgaagaggaagaagatgctcagcatacaaagaagctggttgaagcgaatggagccaagtgctatacctttgccacagacctgacggatcgcgcanattgcaagaaggttgtcgatgaggctattaagcaaatgggtggtatcgacattctcttcaacaatgctgcgtaccagaacatggtcgaggacattaaggatctcgatgaggatcagtgggtgcacacg

SEQ ID NO: 215984 - DNA, 512 bp, Glycine max
  unsure (1)..(512): unsure at all n locations
cattattgaatgtcctattcatctatataatcgtgaaatcgtaaatgcacctggcactctagatagaacaactactcgcaacagtgacttcaaggtctgagtgagcaggggcacaacatgaagtaaagacgtttaaccatttacgacggttccaccgttggggtgtaaagtctggccactgatagagctgctgtctggggcagcgagaaagacagcgacagtcgcaatctcacttggctgcgaagggcggccgatgggagcggtgaattgttcaatggccttcttagtcattgtcgcagggatgagcggagtccagacaggacccggcgncgatggcgttgacgcgaatgcccttggagaatactnggttgtgcagagcgcgagtgaaggagatgatagctcccttagttgatgtgtagtcgagtaggtcggggcggccgatgaaagcgttgatggaagcgttgttgatgatgacggagcccggcttcatgtgaggcagtgcgtactttgaa

SEQ ID NO: 215985 - DNA, 553 bp, Glycine max
  unsure (1)..(553): unsure at all n locations
ccaagaaaccaagcaaatcattgttctctctgtcctgtgttttgtgatttcccccttcaagccaccaccaatggccaacaacgagatgcaagttgagaggggtttggacttggaaaggtacatggggcgttggtatgagatagcctctttcccttcaaggaaccagcccaaggatggcgtgaacaccagagccacatacactcttaggaatgatggcactgtgcaagtgctcaacgagacttggagtaatggcaagagagggcacatagagggaactgcttttaagtctaaccgcacaagtgatgaggccaagttcaaggtcaagttttatgtccctccctttttgcctatcattcctgtaacaggggactactgngttttgntcattgatggtgattaccagtacgctttgattggccaaccaagcaggaattgcctttggatattaagcaggaaaccccatctggatgatgagatctacaacangcttgttcagagagctaaggatgtacgatatgatgtgagcaaactccacangaccccacagagcgat

SEQ ID NO: 215986 - DNA, 502 bp, Glycine max
cttattcatcttttcattcactcactctcactcatggctgaagatgggaacaacaacgatgtacccttacacaaattcaaagacagcaatccaaaccctgaagagttcgatgcaaagggttacagcctcagcggaaaaatcatgctttcagcaataatccttcttttcttcgtcgtcgttttgatgttgtgccttcatatctacgcgcgctggtacctccggcgtgctcgccgtcgacagctccggcgccaacgcgagctccgacgcacccagcttgtcttttacaacgacgacgccacccccgcagccgtgtcacgtggcctcgacgccgtcatccttgccacgctacccgtcttcaccttcgacccggaaaaaaccgggccggagtgcgctgtttgcttgtcggagttcgaacccggtgaaacgggtcgggtcttgcccaaatgtaatcacagtttccacatagaatgtattgacatgtggttccattctcatgacacgt

SEQ ID NO: 215987 - DNA, 531 bp, Glycine max
ggaacagtcgttgaggcagggctagataaatcgaagggaccatttgcttcatttattgtgcagaatggcacccttagacggggagatatagtagtttgtggagaagcttctggaaaggtgcgggctttatttgatgatggtggaaagcgggttgatgaagcttcaccttctatgcctgtacaggttattgggttgaataatgttccaattgctggtgatgaatttgaggttgttgaatccctcgatactgcacgtgaaagggcagaggctcgtgctgagtcattgcgtaatgagcgtatttcagcaaaggcaggggatggaaaggtcaccctttcttccttagcttcagccgtgtcatcaggaaagctgtctggactagatttgcatcaactaaatattattttgaaggttgatcttcagggatctattgaagctgtcagaaaagcgctggagattctaccacaagacaatgtcacactgaagttcttgttggaggcgacaggtgatgtaaacacaagtgatgtggacctt

SEQ ID NO: 215988 - DNA, 466 bp, Glycine max
ctaaaaactggggattgcaagtttaaatctaattgtaaatttcaccatccaaagaatcggatagcaagattacctctatgcaacctcagtgacaagggtctacctttgagaccggaccagaatgtttgcacatattacagacgttatggaatttgcaaatttggaccggcgtgtaagttcgatcacccagcgccctcaactatggctggacatgatcaacaatccacatatataaactcagctggtgttgatgtggctgaaaatggaggtgccgaagatgggaatcagcagtctgtgtaaaacattttctggctttgaatatgcatatcacccataatttgtaatcttatctaaaaacatgataaatttatttaatttcactagttatgctaatgtggcacaagccttacagaatagcaatatatacggctaatagaagttttattacagtaacatgtagattatt

SEQ ID NO: 215989 - DNA, 467 bp, Glycine max
aataatctacatgttactgtaataaaacttctattagccgtatatattgctattctgtaaggcttgtgccacattagcataactagtgaaattaaataaatttatcatgtttttagataagattacaaattatgggtgatatgcatattcaaagccagaaaatgttttacacagactgctgattcccatcttcggcacctccattttcagccacatcaacaccagctgagtttatatatgtggattgttgatcatgtccagccatagttgagggcgctgggtgatcgaacttacacgccggtccaaatttgcaaattccataacgtctgtaatatgtgcaaacattctggtccggtctcaaaggtagacccttgtcactgaggttgcatagaagtaatcttgctatccgattctttggatggtgaaatttacaattagatttaaacttgcaatccccagtttttaag

SEQ ID NO: 215990 - DNA, 587 bp, Glycine max
  unsure (1)..(587): unsure at all n locations
tttaattgtaacgggctatggagccactattagaccctctcaaagatagagctatcaaatcagtcaaggcacccccacatcggcctcttagtcggcaattgatgttcccagaccgtcttaagaataaaccagattggaaagttataagagatcatcttcagaaggaaggacgtatcgacaaggaggaccttataaaacttatcaacgatgctaacaagcttttcaagagtgagggaaacttgatctacgtcgaagatcccctaacagtagtcggagacatccatggacagttctatgatgccataaagattgtagaaattggtggagatccagcaaattcgaaatacttgttcctaggtgactntgtggatagaggttctttttcgattgaagtgcttgtcctgctatactccctcaagataaacttccctaaaacaataaatatgcttcgaggcaaccacgaatgtangcagatgacgacattcttcaacttcagaaactgatgcctttacnaatatgatcaagaaatctatgnattattcatggactcattngacctgatgcctctagcctgtatcatcaacgga

SEQ ID NO: 215991 - DNA, 526 bp, Glycine max
  unsure (1)..(526): unsure at all n locations
gccaaacctctcagtggttctgctaggagttgcactaaagttcacaagaagggcattgcacttggtagatcagtggaccttacaaagtacagtggctatgatgaattagttgccgaattggatcagctgtttgaatttgggggtgaattattgtcaactaaaaaagattggcttatcgtctatactgataatgagggtgatatgatgcttgtaggcgatgatccatggcaggaattctgtgccatggtttgcaaaatttatatctaccctaaagaggagatccagaaaatgagcccaggtacactgagctcgaaaaatgaagagaaccagtcggtgatggctagtgatggtgcagatgcaaaagttgttaaatgtcagccacatcaaaagtttaattcagaaaatggccttgacgcctaatgattagtagattgatttccatagctttcagattctgggatggaaagtaaggaactgtcatgaagccattcatcncagtgggaaacataacttgaagatgaaatcg

SEQ ID NO: 215992 - DNA, 512 bp, Glycine max
  unsure (1)..(512): unsure at all n locations
tatggatgccttggacattgtaaaatggaaatttgtcagtgatagccctggaacatctgtagcaactagttcagtattgttgggtctaattcttcttggaagagcagcttttgttttccccttatccttcctatccaacttggctaaaaaatcaccaaatgagaaaatcagcttcagacagcaagttatcatttggtgggctggtcttatgagaggtgctgtttcaatcgcacttgcatataatcagttcaccatgtcggggcacacttcactaagaagcaatgcaatcatgatcacaagcaccatcactgttgtgcttttcagcacagtggtgtttggtctgttgactaagccactaataaggcttttactgccccatactccacatcataaagaatcaagcatcacgataaccacagatccatctacttcaagtcccaaatcagtcactgtcccacttcttgngagtgcccaagaatctgaagtcgatattgatggccatgatattcatc

SEQ ID NO: 215993 - DNA, 499 bp, Glycine max
gaaaaaaataaaaataatttagctttagctattcaaacttttagtacaagaaatctaataatcaaatattacattttacggaagacgtagagatgagttgagatgcttatggtgcattgcacagccttctcactacccaaagagctaaacaaaatctcaggacaggattcttatacacgcattgctcactccacaaaacttatgcagtttacaaacaaattacatatttcttggcttttttctcaacgccattgatggccattacgttcagttggtgagccaggttctataggaacaaaacccctgccaccaaaaacaggacgcatgaatgcatcatcaaacttacgccacaagcgatgaacagtgtgtgttggagtggaaagtaaagcacggatgctgcttggacgatgaatatcatggccatcaatatcgacttcagattcttgggcacctccaagaagtgggacagtgactgattttgacttggagagatggatct

SEQ ID NO: 215994 - DNA, 547 bp, Glycine max
  unsure (1)..(547): unsure at all n locations
aacagagagtagaaaagatggcgcggttgatcacagtggtgtggtgcgcggtggcggtgctactgtgcgccgcggcgggcgcgtcgtgggtggaggaggcggcgaacccgatacgaatggtggcgggggtggaggcggaggtggttcgggtgatagggcagtgccggcgcgcgctgaagtttgctaggttcatgagcaggttcgggaagagttaccgaagcgaggaagagatgagggagaggtacgagatattctcgcaaaacctcaggttcatccgctcccacaacaagaaccgcttgccctacactctctctgttaatcattttgctgattggacttgggaggagttcaaaagacacagactaggcgctgcccaaaattgctctgccactcttaacggcaaccacaagctcactgatgctgntcttcctaccacgaaagactggaggaaagaaggaatagtgagtgatgttaaagatcaaggcagctgcggatcatgctggacattcagcacaactggggctttagaagcagcctatgcacaagc

SEQ ID NO: 215995 - DNA, 538 bp, Glycine max
agggcaaagtagcaaagacatgctatcttaattcttataactgataattaaagcggggcgcatcaatacaatacaatacaatatgtaactatgaactatcaatatatgatcgttatttatgtctgtgatacacacaattcaggccatgatattcttacgtgatttacagcaacttctaacttatttaatacatcataccaacccaactaggagcaattttcattatacaatgacacttatctttaaactctgaagcatgacaaggtgggtagtcaccagggaccatattcttatgcaatttatgccacaactggataagacgcacaagttgcaacaccacacatgttcttccccaattccattttgaagtagccattctcaccccaactttctccccatgaattttttatgagccaatatgggacgccattttcaactccataccccacagcaaggacggcatggttcacatccttggaagtgctaccgcaaatgtcactagtgtaaactccattctcgtagaaatggaacccattca

SEQ ID NO: 215996 - DNA, 488 bp, Glycine max
  unsure (1)..(488): unsure at all n locations
ggtttttccggcgaacgatgatcatccctcgcatgacgtggcggcggggcagatgttcgtgaaggaggtgtatgaggttttgaggaagagtccgcagtgggaggagatggcggtgttgattacttacgatgagcatggtggattntatgaccatgtggctacgccggtggaaggggttcctaaccccgatgggatcattggaccccacccttattactttgggtttgataggttgggggtgagggttcccacgtttattatctcgccttggatcgacaagggtactgtgattcatgaagcccaggggcccacaccatattctcaatatgaacattcctctatccctgccacagtaaagaagcttttcaatttaaaatccaatttcttgacaaagagagatgcatgggctggtacctatgaaaagtactnttacattcgagatactccccgtgatgattgtccagatactctttccgacatcaagatgc

SEQ ID NO: 215997 - DNA, 463 bp, Glycine max
caaacatatctcttcctcttctgtccctcaatggaaggatcaggatccggtgtggttacagtctacggcaacggcgccatcaccgagaccaagaagtcccccttctccgtcaaagtcggcctagcccagatgctccgcggcggcgtcatcatggacgtcgtcgacgccgagcaggcccgcatcgcggaggaggccggtgcctgcgcggtgatggccctggagcgtgtccccgccgacatccgggcccagggcggcgtggcccgcatgagcgatccgcagctcatcaaggatatcaagcgggccgtcaccatccccgtgatggccaaggcccgcatcggccacttcgtcgaagcccagatcctcgaagccatcggcatcgactacgtcgacgagagcgaggtcctcaccctcgccgacgacgccaaccacatcaacaaacacaacttccgcatccccttcgtct

SEQ ID NO: 215998 - DNA, 463 bp, Glycine max
ctaaaatccaattaacacggttcaaaacaccgaaaactaaaaacataaccttattataatatataagaagcaactaaaacccttaatagtccaaattgaagcgccacagagaaacaaatctgagaattattattcatttcattcagagcgattggcgaacctctcaaccttgtcatcggtcaaattgataccaaccatggcttcacccaatgcgcagctaacctccgccaaaatctcagggtcgctgtagtgagtcacggcctgaacaatcgccctggcgcgcttcgcgggatcgccgctcttgaaaacgccggagccgacgaagacgccgtcgcagccgagctgcatcatgagcgcggcgtcggcgggggtggcgactccgccggcggcgaagtggacaacggggaggcggccaagctgcttggtctgcatgacgaggtcataaggcgcaacgatgttcttg

SEQ ID NO: 215999 - DNA, 504 bp, Glycine max
ttccattccaggatacaaatctgatggagatgtacaggaagattggtagaggggaattcaaatttcctaaatggtttgcaccggatgttcgccggtttttgtccagaatattggatccaaacccaaaggccaggatatcaatggccaagattatggaaagttcttggtttaaaaaggggttggagaagcctgctattactgtgaccgaaaacgaagagctagctccccttgatgctgatggaatatttgaagcatgcgaaaatgatggtcctattgccgagcctaagcaagaacaggccaagccttgtaacttaaatgcttttgatattatctccttctcaactggttttgatttatctggtttgttcgaggacacttttctcaagaaagagacacggtttatgtcaaaaaagcctgcctcaatcatagtcttgaagttggaagaaatttgtaagcggctttgcttgaaagtaaagaagaaagatggaggcttgctcaaattgg

SEQ ID NO: 216000 - DNA, 530 bp, Glycine max
aaacacccaaattggtgaaatttgcaatttaggtacacaattgttcaagtatccatcagacaagaggaggctgaaccagccacattattctatgagtcctattaaaattaagcacttgactaagataatgacaaaagaagcacagtgcatacaaaaaccaaggggtgaaatattgatcatgaaactaagcagtatgagaaggttggtgctcttcctggactacttcatgttgctcttgctcttgctgtggtttttctccttgccaggtccaaacaatgtccttaagcgctggtcttatatcctgtttaaaaagcttctggtactccatggtgtcaccattggactttctaagttccaccatatggaagtgtggggtaatctcaaaaatctcagcatcaacacccaaagttcctttcctgccttccttggaaccttccaatttgagcaagcctccatctttcttctttactttcaagcaaagccgcttacaaatttctccaacttcaagactatgattgaggcaggctttt

SEQ ID NO: 216001 - DNA, 528 bp, Glycine max
  unsure (1)..(528): unsure at all n locations
ctttcaaccgctggtccaatatatccagctgctggtttgggaacctatgtagaggcactagtgcgcaaacatgacactgaattcaacgtggtagtaacacagatgaatggttcacatcatccaactgaatctattcatgtgcttcatgttggaaagatgaggattaaactttgtaagggaaagacaacaattgccaaagaatactattcaagttcaatgcagctttgtggagttcgcggaggtggaaatgccgctgcacaagcactattttggcagccaaagcaggggcattcttttgtattagcttttgaatcagagagagaaaggaatgctgccatcatgcttgcaaggagatatgcatctgacctgtatatcatgcttgctggaccagatgacagagcttctctagggacatgatgggcctncttacatcttaatttccccccttgtaattatgagtttcttctacctggattataagggtatttcacagtaaaatctaccttgtatattggtaagtagtaatga

SEQ ID NO: 216002 - DNA, 499 bp, Glycine max
  unsure (1)..(499): unsure at all n locations
caaactcttattcccactcagtggtgaatttgccaaaccgggataaccgtatccctattcaggaatacaatgttctcgttaagactccctattcctctcgttaaaacaccaccttctccctcttgttattattctcactattatcactatcgttatcgttatcgttgttatcatcctttccatcaccgttcccaaacacagagtcttatcgtctcgaagcgcggttccgccattgcgaagtgtcacgctgatagcgtgacacttcgtgatgacggagtctcgctcgcccaagagtcgttggagccacttccggcggaactcgcggcggagatgatgccgaagcatgtggcggtgataatggacgggaacgngaggtgggcgaaggtgaaggggctgccaccatcggcggngcaccaggcggtggtgcaatcgctgaggaaaatggtgaggcttgtgtgcagctggggaattaaggttctaacggttntcgcgttctcta

SEQ ID NO: 216003 - DNA, 521 bp, Glycine max
aagaatataataagtctacaatatcatttatcttttttccaaatacctgttaacaagtctgtagatcaatatatatataaatatctttccatgttgctttcttatgcctaaatcatggcattgataactagcaaactactaatatttatgttgcttagtatctaattaatgtatatgtttatcaaggtatatcactatatattgcaaacaaatgtttatgaatgtcgaccaccatagcgtctttgtctttgttgaaatgaacttaatgcatctacaaactcatccttcccaaaatctggccagagttcccgattaaaataaagttctgtgtaggctaattgccacaacaagaagttactcactctaagctcgccactagttcgtattagtagatcaggataaggaaactcagtacaattagtttccaattcttgttcataatgttttcgtttatgtcatccaagtgaatgtgaccatctttgactttcttggctacacttttacatgcttgcacaacatca

SEQ ID NO: 216004 - DNA, 541 bp, Glycine max
agaaaaagaaaaggatgataatagtataagaaaagcatggcaaaacaaacagggcatgtaatgtatggcagaaaatccaatattatagagatttgattatgtatggaaaataaaaaaagaaaagaaagcagcaaacagggctagctaggcatggatggagaatactaggaaggaagaggccttggcggaggagggagtagctgatggaggttgggaggagtctgattatggttgggcagcggtggagcaatgaaggggtgttcgaggagcctggaagcagaccagcggcgagagggatcgcgctgcaaacagcggaggatgaaatccttgaagtgaggtgaagcagaaggaggagcctctggaggctgagacatacaaatggcgcacattagactggcccaatcgccctgcctccctacagcgaaggggaaccttcccatgtagaactccagtatgctaaccccaaagctccatatgtcccccgcgtaagcgtcgtattgcccgtcgtttatgtccgtattgatcctctccggactcatgt

SEQ ID NO: 216005 - DNA, 591 bp, Glycine max
  unsure (1)..(591): unsure at all n locations
ctgcatttgagagcagctccttgaggttgacattcaatttctcaaaacaaccaggaaacccacaaacaacagttatccaggctacttttatgaatttgtcctccaattcatatacagattttgtttttcaagcagcagttcctaagtttcttcaattgcacttagatccagctagcagcaatactcttcccgcaaatgggtccataacccaaagtttgaaaattactaatagccaacatgggaagaaatctcttgtcatgcgtataaggatagcatacaagataaatggcaaggatacactggaggaaggacaagtcaataactttcctcatggtttatgaagcccaatgatcaggggtcattaaggtgatgcacaaaacccatcgttttccccagcactccataattattggtgcggttntcatgtttcattccttcaattgaggaaggtatggttcgaccatctggaccactttttggcttaaatttgaagtcgatttggtggcttcacatctttggtntacctttttcttttacttaggtgatttatgtacattagtacaacatattcctgtatgaaaatgccatagt

SEQ ID NO: 216006 - DNA, 604 bp, Glycine max
  unsure (1)..(604): unsure at all n locations
caaatttgggagtggaaagaatgggtttggtgggaaggcagggaaggatcatgatggtgaagttaaggagatgtgggatacaattgctgggggagattctgaggatgatcaagagggtgtcaggaatgtggatgatgacaacttcatagatgacactggagtggaacctgcttattatggtagtgatgaaccacgttctcctgttgatgctccccaggcggaggagggtgaagaggatgaagaaattaaggatcttttcaagataggtaagaaaaagaagaagaatgagagaagtccagcagaaatagcgtatttagttgagactgtcatggctgagcttgaggttacagctgaggaggatgctgaacttaatagacagggaaagcctgccattaataaactcaagaagttgaatcttctgactgaagtcctctcaaagaaacagctttaactagagtttttagatcatggagtgcttactntattgaagaattgcttgagccacttctgatggaagcttgcaaatataatatacgctcggaagtttgaagatattgatgatttcctatagactagagcagatgatgaagagacagctgaaaag

SEQ ID NO: 216007 - DNA, 525 bp, Glycine max
  unsure (1)..(525): unsure at all n locations
cgacgccattttgtttcgctgaaaagattcccgacgcatctcataacttttgacaaaggatggcttcaagattctggacccagggtggaagtgattccgaggaggaggagagtgattatgatgaggaggttgataccacggtgggtgaatctggtagtcaagcagtgacaagcaggtacctgcaggataatgcaagtgacagtgatgactctgatggccaaaagcgcattgtgaggtcagcaaaggataaacgtttcgaggagatggcttccactgtcgaccagatgaagaatgccatgaagatcaatgactgggtgagcttgcaagagagttttgacaagattaacaaacagcttgagaaggtcatgcgtgtcactgagtctgagaaggtccccaatctttacatcaaggcactcgtgatgttggaagatttcttggctcatgctntggctaataaggatgccaagaagaaaatgagcagtagcaatgctaaagcctttgactcaatgaagcagaagctgaaga

SEQ ID NO: 216008 - DNA, 578 bp, Glycine max
  unsure (1)..(578): unsure at all n locations
gggagggcatacctattcggacatatgaaattggacattttaagttggttgatgggaagttttctccggatggaacatcaattgtcctttcagatgatgttggccaaatatattttctgaacacaggtcaaggcgagtcccaaaaagatgccaaatatgatcagttttttcttggtgattatcgaccccttattcaggatactcaaggaaatgttcttgatcaggagactcaacttccaccacacagaagaaacattcaggaacccctatgtgattctagtatgatgccatatccagaaccttatcagagtcaatttcagcaacgtcgacttggtgcacttggcattgaatggcgtccttcattgataaaatatgctgntggtccagattttagtgttggtcaggactacccagtggtacctttggtagacttggaggaatggttgagccacaaccagagttcttggatgccatgttcntggagccagaatatgacattatngtaagtgatgataatgactctgaatcccatgtgaatgaggataggtctagtgcagcccgggcaaggggagtgtatc

SEQ ID NO: 216009 - DNA, 377 bp, Glycine max
ggggaaaaccctgcccgcggtccagaggaaggttagggttctgggccggttggttcccggttgcagaaaagaaccgcttcccgtgattctcgaagaggccatcgattacatacccgcgctcgagatgcaggttcgcgccatgcaagctctcgctgacttactcttaggctcttcctccggctcaacctccgtcgccgcgccgccaagttgatctcactttccggcgaatatgccacgtgtcatatattttttttcctcttcttgattattggtattatttgcctcgttttcactttcgtttatgttaattgtccagtacatacatattatatcttcttctaaaaaaaaaaaaaaaggagactatggtattggacatt

SEQ ID NO: 216010 - DNA, 340 bp, Glycine max
agaaaaaaatataatatgtatgtactggacaattaacataaacgaaagggaaaacgaggcaaattataacaaaaatcaagaagaggaaaaaaaatttttgacccgtggcatattcgccggaaagggaaatcaacttggcggccccgcggcggaggttgaggcggaggaaaaacctaaaagtaagtcagcgagagcttgcatggggcgaacctgcattttgagcgcgggtatgtaatcgatggcctcttcgaaaatcacgggaagcggtttttttttgtaaccgggaaccaaccggcccaaaaccctaacctttctttggaccgcgggcagggttttcccc

SEQ ID NO: 216011 - DNA, 476 bp, Glycine max
ggagtcatatgcaaccttgtgttcccagaatggttgattaccatgctatttgctgtttttctaacttggtctacctcaaagacctgcaacagtggagtggtgttttggaagattgagtcagaggagagaaggaaaaatgatggatttgaagggctagaaaaaggactattggaagatgagagttctgaagaaagggaagagggagttcaggtagagaaagaaaaagaaaaggtgaaaagtattgaagaacaggttatggttcctgaagaaaatataagggtgaggattccttggttgaaattagtggtcttactcttggtctggttctctttcttctccctctatcttcttcgtggaaacaaatatggacagagtatcattccaatggagccatgtggtgtgggatactggattatttcatcagctcatgtccctcttgctttatttttcactgcttggattgtatatagaaaaga

SEQ ID NO: 216012 - DNA, 465 bp, Glycine max
  unsure (1)..(465): unsure at all n locations
actagaatgcaatcatatactaaggttccgttgtttacagaaaaagagaagaaataaataataaaataaagtgtgactcacttttacactctattttaattcaaaactttcatctcatttcatttttttccactctagcaaactgtacctgattgagcaaaattgtttttcaacagggtagtttgaatcccatgtatctccctgatgtatagtctttccaagttcgaatggctccgaagctagtcattagaacaatacttaaagtcatcactatgctaaccgaaaatactattaaagatggtcttccatagctttgaattgctttctgcaccactaataacccaattagtgatgcaacaaaacatattagggccaagatgagggcagtctctatgtgatccatgcccncaataggtattgcaggctgacatggtggatgagaagaaaaccatgaaagaacatgtt

SEQ ID NO: 216013 - DNA, 562 bp, Glycine max
  unsure (1)..(562): unsure at all n locations
aagaatataataagtctacaatatcatttatcttttttccaaatacctgttaacaagtctgtagatcaatatatatataaatatctttccatgttgctttcttatgcctaaatcatggcattgataactagcaaactactaatatttatgttgcttagtatctaattaatgtatatgtttatcaaggtatatcactatatattgcaaacaaatgtttatgaatgtcgaccaccatagcgtctttgtctttgttgaaatgaacttaatgcatctacaaactcatccttcccaaaatctggccagagttcccgattaaaataaagttctgtgtaggctaattgccacaacaagaagttactcactctaagctcgccacttgttcgtattagtagatcaggataaggaaactcagtacaattagtttccaattcttgttcataatgttttcgtttatgtcatccaagtgaatgtgaccatctttgactntcttggctacacttttacatgcttgcacaacatcatattttccactgtatcccactgccacaataagtnggaatct

SEQ ID NO: 216014 - DNA, 477 bp, Glycine max
ctcagtagtgtcatttacgcttctcttctctgcagcaactatgcctaaccctaaggtcttcttcgacatgaccatcggcggtcaatctgctggccgcatcgtgatggagctctacgccgacgtcactccccgcaccgccgagaacttccgcgcgctttgcaccggcgagaagggcgtagggcggagcggcaagcccctccactacaagggctcgtccttccaccgcgtgatcccgagtttcatgtgtcagggtggcgacttcaccgccggaaacggaaccggcggcgagtcgatttatggcgccaagttcgccgacgagaacttcgtgaagaagcacaccggtcccggcatcctctccatggcgaacgccggtcccggaaccaacggatctcagttcttcattggcacggagaagacagagtggctcgacggaaagcatgtcgtgttcggacaggtcatcgaaagattgaacgttgt

SEQ ID NO: 216015 - DNA, 406 bp, Glycine max
  unsure (1)..(406): unsure at all n locations
cagccttgaacttgaactatcgtgtcttcttggctttctctgttcaggatcaacatggatattgtatcacgagctttgctatttccgttggctatacttgtgctcatattaagcacaccttgctcaggtgcttttgggaagagtggaactaatgtgaaaacagctatttttctgtcccccaagtttgaacttggaccaggatcggtagccaataaatatgattatgacgctgattttccaagaggtcatatagcacttaagagtttcaatgctgaagtagttgatgaagcagggaaccctgtgcctcttcatgaaacttatctncaccactgggttgttgtaagatactatcaacctaaatatgtgacgacacacacaaactatgatggacataggatactttaca

SEQ ID NO: 216016 - DNA, 530 bp, Glycine max
acaacaaacatgatatatatagtattacatatcacacaaccataataagcaagactggtttaagacaaacattacaaaccctcaccaatacaaataattgataatcacattactacaatccttaaacttgaaaatatgctctttgccggttcttgcgtgtgttgtcctattgctgccgaatatgagaagtatatgttccatcgatatgtatttctgtatttcttttaaccgtgatacatactgtgataccatcgatatgacactcaacttatatttgcatctcacaacttatctatcaatgaattatactatttatattcataaaaaatgaagaacgagaagaatatctgaagtgttggtgtggaagctgttctgccaccaataggtagaaaagccccattactccagtgtggccacggctgctgctgtagttagactctagagttatagtttcaccatcaattatctttacagaacctggttgaggataacatgtgctcattcctacaatgtagtctacttcgtttcct

SEQ ID NO: 216017 - DNA, 499 bp, Glycine max
  unsure (1)..(499): unsure at all n locations
cgtttattcgtttccctgcttctgtgagaattttgctgacgatcatacgctttctctttctttggctttcggtttcttggtgctgtttgagtgtttgtgcattgtacattattatctctacatgttctgatgttattttccttgcaggttgtgaattatttgcaaatctgattcaactacagtgtctattttgactcccaagattgcaagtggcagttatgggtcataggcacttacataacacatcttcattgttcgatggtgagcctgaccagaactggaatcatttgcatactgatcaacaatatgtgcaccttggtaggactaacacttcagagaatagttcaattatttatcctgctgnaaatatgtccatagatagcatatctttcccctctcattggaattcttcctcaaggtcaaatggatatgcatcctctagtcacaacattgttgtacctccttaccagtcagatgcatcangcacttctaatgatca

SEQ ID NO: 216018 - DNA, 526 bp, Glycine max
ccaaaaacaggttcgtttcctcattttttagggatgtccaaatatatacacaaaatgggattaatttatattacagaagttatttatccttcgtatcctcaggcaaagcagatactttgcagataggacataatttcttcatagatagccactttttaatgcagctcacatggtagtcatgtccacaagtttgaagtgttccaacatcgtccatattcttgtactcttccagacatattacgcagtttccttcgtcttcactttgctcagatgaacaatatattgtttccgtcaaacatttggaaagcaaatcctcagagactcctgtgttcacatagccaatcctctcaccaagtgcaagtagttcctcataactcatgttatctacatccatcctcatgtctcggtgctgatcaagcatattcctggaaccatacactgatgcacgctcaacaaccatgaaaccctcagaggaaaatcgatcatggagaccactctcctcagtcaatgatcgatatctttcact

SEQ ID NO: 216019 - DNA, 441 bp, Glycine max
gggggtaatcatccttttatatttccgtaaatgagttagtgaatagatacatgattatacaaaggctgggtagcttaacccaatatgctagctacatcaccttctggcggtaaattagtgtaacaatgaaatggttcactcaattccatctcttggcatttttcacgcctttggacttctgttttgctgcctgaaaggcctgcatcttttgtttcttccgtgcctctttctcagccttggacatcttagatttggctttcactttaggagctttgctatcaagctcagcctcgcgttcaagttctctttccctagcatcaaaattcttctctaaataataatcgtaatcacctgcataatcctgtatggtgccatctttaatttctatcactctattaactatttgctttataaagtatcggtcatgagatactgtgataa

SEQ ID NO: 216020 - DNA, 509 bp, Glycine max
cttgagggctcaccagatttgaaggctgcaaaagaggttgctgactatctaggcactgtccaccatgagtttaccttcactgttcaggatggaatagatgccattgaagatgttatctaccatattgaaacatatgatgtgactacaattagagcaagcacacctatgtttctcatgtctcggaagattaaatcacttggtgtcaaatgggttatctcaggagaaggatctgatgagatctttggagggtatttgtacttccacaaggcacccaacaaggaggagttccacagagaaacatgccgcaagatcaaagcacttcaccaatatgattgcttgcgagccaataaatcaacatttgcttggggtctagaagcccgtgtaccatttttggacaaggcgtttatcaatgctgcaatgagtattgaccctgagtggaagatgataaaaagagatgaaaggacgaatgagaagtggattctgaggagagcctttgatgatgaagagca

SEQ ID NO: 216021 - DNA, 548 bp, Glycine max
gaactgataaaggaaacacttttattaagacttcaaatcacagcattcaagataatacaatacgcaacactttttagaaagccttataactataaactataaaagctttgcccagatgaaattacactgcaggcaaatttttcattcacctttagcttagttatcttcattgtcgcccaaattattctttgtcacatctttgtattagccctggatggcaacaccaaggggagcagcatccataggtattatcttctcaatttctacacccttgttgttctggttttcataggctgaaatgtgcactccaagtgctgctctaccagagggatcaagggttgttagaccaagcagcatcccactcaacagctttggctgtgctacatgcaacacttgctcctccaggaacagtgagcctagctgagttctgagggaagaacctctaaagatcattctgtagtaatatgcttccttggtttttggggtgttgggggggtaaatggtaccagcattaagcatcattttttcagtcacatgttttgcagcat

SEQ ID NO: 216022 - DNA, 514 bp, Glycine max
tgtacatcaagaacatgtgctatatgccttgaagactattgtgttggtgagaagctcaggattctgccctgctgtcacaagtttcatgctgcctgtgtggattcgtggcttacttcatggagaaccttttgtccagtttgcaagcgtgatgctagaaccggcttaactgatccaccaccttcagagtccacacccttgctctcatcaaccccagcatctatggcatcctctgtcttatcttctgcaagatcatcactagcttcatcttcagcaatacaaattgcccggacagcatctatggcatcctctgccttaccttctgcgagatcatctctagcttcatcttcagcaatacaaattgcccggacagcatctatggcatcctctgccttacattctgcgagatcatcactagcttcatcttcagcaatacaaatttcccgggcagcttcacagaccccattctgttcccgtaaccactccatagccagtacaccttatgttcagccatctc

SEQ ID NO: 216023 - DNA, 554 bp, Glycine max
  unsure (1)..(554): unsure at all n locations
ctaatacccatttcggtaataacacaatcgcaatccgttactcactctcttccatggcgacggggttactgaagagggcggcgcagcgtgtcccctcctcgccggcgttcaagctggccattctccgggcccacgcgtcggaggcgcaggcccagcaggtggagcccaaggcccgcgaaaccccgaccctcaaaaccttccaaatctaccgctggaaccccgaaaacccctcaaagcccgagctcaaggactaccagatcaacctaaaggagtgtgggcccatggtcctcgacgcgctcatcaagatcaagaacgagatcgacccgagcctcacgttccgccgctcgtgccgcgaggggatctgcggctcctgcgcaatgaacatcgacggctgcaacggcctggcgtgcctcaccaagatcccctcggaaaaaaactccgncgncacgacgatcactcctctgccgacatgttcgtgatcaaggacctggtcgtggacatgacgaacttctacaatcagtataagagtatcgagccctggctgaagaggaaga

SEQ ID NO: 216024 - DNA, 386 bp, Glycine max
aacaaaaggggcccaggttttattaaacaaaaatttagccaaaccccccccaactttgaaaaaattcaaagtccccccccaaatgaacaaatgccaaccttatcttccctttaaaaaaaaaattttaaactttaggctgaaaggacttgatttgggaaaattgctttcctggggtcaacccctttgggcaggccccaccccagttcaatttggggggcccccaaaaaaacttgaattcctcattaagggcctccaatctctccttaaggtacccaaaccgggtggcgcttatccacctataaccggggaacaacccaccgggccccaaaaaggactcggggttccaccaatagctggggcaaaaggtgctacaactggcccaaaaa

SEQ ID NO: 216025 - DNA, 400 bp, Glycine max
agaattcaattattgaaattgaataagtaaacaatttaattggattggtcgaatggtatcaaaaaaatggagtactaactcccatttcttatttattattgaattaaccgatcaacttgctttgttatcgaacatttctttttgatttcaaaaattttccggaaaaaatttgaatctatttttatatgcgaatcaatcctactacttctggtcctgaggtttctgcgcttgaaaaaaaaaatctgggacgtatcgcccaaataattggtccggtactagatgtagcttttcccccaggtaagatgcctaatatttacaacgctctgatagttaagggtcgagatactgttggtcaacaaattaatgtgacttgtgaagtacagcaattattaggagataa

SEQ ID NO: 216026 - DNA, 298 bp, Glycine max
aggtattccgatattcggacccatcaacttgttatgaaaacacattgatagcctctactcgggtcctagctcggctaaaagctagatttgcctcaattggttggctcttgccttccgccttattcaaattagcttctgctatttcaagaggttgctgggcttcttggggatcaatggcactacccttttccgcattatttactaaaacagggatctcattattggttattctagcaaaaccgcccatcagagccatcgttaaccattggtctttaagaagacgttttctcaaaatacc

SEQ ID NO: 216027 - DNA, 435 bp, Glycine max
ggaaacaggcatagcatgctacactcgcgggcctttcttgcctagtgtttcttccaagcactctgcaccttccatttctccatcttttggcttgaggagtctgaaatcaagctctttatttggagaatcgctaagagtggcctgcaaatcaacaataaaggtttcaaagacaaagaatacttcactcgtgaccagatgtgaaattggtgacagtctcgaagaattcctcacaaaagcaacaccagataaggggttgatcaggatgttggtgtccatgggagaagcattgagaacaatttccttcaaagtgaagacggcttcatgtggtggaacacaatgtgctaatacttttggggatgagcagcttgcagtggatttgctagctaatcagcttctttatgaggccctaaactactctcatttctgcaagtatgc

SEQ ID NO: 216028 - DNA, 556 bp, Glycine max
gtctgaagatatagcatatatctttttttctaaaagcagataaaatagacaatgaattgcaggtttaacagattaagcagctgctccaacagctacaccatccttgagcctggatttaccatacagggtttcttcaaaccggatgatctcattcttggatccataagcaacttgagttctctcatcaatgttagtgatgactttgtctagcacagactgatgaccatcactgctgtaacctccggctttttcaatcaagaaccccaacggagctacctcaaacaacagtctcagcttggctttggctgatggtgatgtcacattggtgaagatgcctttttcttttacaataatctggttgacatctggcaccattcctcccgtgtatctcaatgtgtacttttcattgacatagtaatcgatcaacttagcataatcggggttgtcagatgtggctctcaaatttcctggggagaacaattttccttcaccaatttctgtggtctctttgacatgctgccattttccttcatcaagcagaagaaattcatgggtg

SEQ ID NO: 216029 - DNA, 507 bp, Glycine max
cgcacactgaattcaaaaacatcgaaagagagaggcatggccgagcaaaccttcatcatgatcaagccagatggcgttcaaagaggccttattggcgagattattagcagatttgagaggaagggtttttacttgaaagggttgaaactcgttactgtggaccgtccttttgctgagaagcactatgctgatttgtctgcaaagcctttctttagtggtttggtggattacattgtctctggccctgttgttgccatgatctgggagggtaagaatgttgttacaactggccgaaagattatcggagccacaaacccagctcaatctgagcctggaactattcgtggtgactttgctattgacattggaaggaatgttatccatggaagtgattcagttgagagtgctaacaaggaaattgcattgtggatccctgagggccctgctaactggcaaagctcccagcactcttggatctattgagtatacaaatgcctcaagttgatc

SEQ ID NO: 216030 - DNA, 448 bp, Glycine max
cccatcatgatgagtgctggagagttggaaagtggaaatgcaggagagccagcaaaactgatcaggcagagataccgtgaagctgcagacatgatcaagaagggaaagatgtgcgctctcttcatcaacgatcttgatgcaggagctggtcgtcttggtggaaccacacaatacactgtgaacaaccagatggtgaatgccactctcatgaacattgctgataaccccaccaatgtgcagcttccaggtatgtacaacaaggaagagaacccccgtgttcccatcattgtcaccggtaacgatttctcaacactctatgcacctctcatccgtgatgggcgtatggagaagttctactgggcaccaacaagggaagaccgcattggtgtttgcaccggaattttccgcactgatggtattcctgaacaggacattgtcaagcttgttg

SEQ ID NO: 216031 - DNA, 487 bp, Glycine max
caattaaaggggacactgtaactcaaaattatagaggaagacggcccaatatgaaaaatatagtaagatcatctcaaacttagcatcttctctttgcacctaagacattgagaatgctaagaatgttacacgcaagttccatcacaacttctagcacttggattagtacaacaaccttcacgaacagaaatatttacttgccaagtttgctttgcctccaattcaagactggaagaaagttcccctctgaatagcatcctcgttagcatttccaagagcagcctcgttcaagtacttgtcagccaattggactctcttgacattctcttgttcttggacaagcatgttaccatacagcaagagcttctccagagtcatcttgggctgctcaaaggttggaggtccatcttttgagttcacaagcttcttccaacactgtcaacaccaacaccagaaatccacttcctcacttcatcatcatatactc

SEQ ID NO: 216032 - DNA, 496 bp, Glycine max
ggggatgtaaatgaagtgcataaaatatgcatttcaacaaattaattttacttacacgaacgtatgatacgtaaataccaaagattgatatacacggtacagcattacaggatgccattaattttctatgcgttccatgtcgtgatttccacagcttcattcaggcactgttggagcgtacatatccggcatgacacagacatactgccccaaagcacctgtcgtgaaggggttatgctagtctacaacaggaatcctgattttattattacattaaccttcaaaattttaaccaagtaaggggagcaaatttgattctgttttgtctttatgaaagaatgtgcatcataatttaactatgattttagtgtctgcttcatgtatctaagagcagaccgcagcattgctctagcttttctatcaggagtgcatccagatgtgaccatttcttcatacacggctggaaccttttggaacttttcaacacgaatcaaag

SEQ ID NO: 216033 - DNA, 538 bp, Glycine max
aaaggaaaaggcaccaaattcaatttaagtggacactttaactcaaaattatagaggaagacagtccaatatgaaaaatatagtaaaatcatctcaaacttggcatcttctctttgcacctaagacattgagaattctaagaatgttacacgcaagtcccatcacaacttctagcacttggatcagcacaaccttcaggaacagaaatatttacttgccaagtttgctttgcctccaattcaagattggaagaaagttcccctgttaatagcatcctcgttagcatttccaagtgcagcctcgttcaagtacttgtcagccaattggactctcttgacattctcttgttcttggacaagcatgttaccatacgtcaagagcttctccagagtcatcttgggctgctcaaaggttggaggtccatcttttgagttcacaagcttcttcccaatgccgtcaacaccaacaccagaaatccacttcctcacttcgtcatcatatactctggccctcagtgcaccaaagaaatcaatggatt

SEQ ID NO: 216034 - DNA, 545 bp, Glycine max
aagatattgaggagatacttcaaataaatgatagaagggttttaggaaaggatagccaagatgcccctcaacaacatgcttcttaacttactcattctatgcttttgccagagatatcactcttagatattcattgcatgatattgattaggtcccctataacatctcggatccgtgccaagatgctctatgccactactaaagacaggtttagacgtgagctagatggtgtccattatgaaatccaggctactgaccccacagaaatggatcttgaagtgctgagagaccgtgcacattgaaatgtttaagcacttaaattcattttcatatcagaatctactaggttctacctttaatgaattacctcttcatgctttgtcatctgcagagcccatcttgccacagatatataactcgtatccaataatatgaatctgaaggctgatgggtttaaagcttttggcagctattgttgtaaatcccagtgtgctggacttgtattggatgagcgtgactctatggatccagatagattacttgga

SEQ ID NO: 216035 - DNA, 575 bp, Glycine max
  unsure (1)..(575): unsure at all n locations
aagcatctcagaagagaggctcagcgttcaagatgcagatcttcgtcaagaccctcacgggcaagaccatcactctcgaggtcgagagctccgataccattgacaatgtcaagtccaagatccaggacaaggagggcattcccccggaccagcagcgtctgatcttcgccggaaagcagctcgaggatggccgcactctttcggactacaacatccagaaggagtccaccctccacttggtcctccgccttcgtggtggtatggccaagaagcgcatgaagaaagtgtacaccacccccaagaagatcaagcacaagcgcatgaagaccaagctagctgtcctcaagtactacaaggtcgacggtgatggcaagattgagcgtcttcgacgcgagtgcccccagcccgagtgcggtgctggtgtcttcatggccgccatgcacaaccgncagtactgcggaaagtgccacctgacctacgtcttcgacgaggccaaataagcgcatcgccaccggagcacgcgacactgatcgatacgagttacggcatcaaggcatatatgggaggagctggat

SEQ ID NO: 216036 - DNA, 503 bp, Glycine max
atagccttcaaatccttcgtcggcctccgccagtcctcgccggaggccccgcatttcgccgcccagccaagacccgccactccccaccgcaaattccgcgtcttggctggaaaattcagccccaagctcaatggccggaacctccgcgtggcggtggtgggaggcggtccggctggcggggccgccgcggagacgctggcgaagggcggcgtggagacgttcctgatcgagcgaaagatggacaactgcaagccgtgcggtggcgccatcccgctgtgcatggtggggagagttcgacctgccgctggacatcatcgaccggcgcgtgacgaagatgaagatgatatcgccgtctaacgtggcggtggacatcgggaggacgctgaagccgcacgagtacatcggcatggtgcggcgcgaggtgctggacgcttacctgagggaccgcgccaaggagtacggtgcgaacgtcatcaatggcttgatcttgaaatggatattcc

SEQ ID NO: 216037 - DNA, 421 bp, Glycine max
gagaagtaaatctttgctagtactctagcattttacatcattgcagataaaaggtacaaataccggttatgggattgcatgaaattcaatcctttttcttacacatatatagttaattatcacttaattataaggagatcatgtccactaggaaaaacacaaagcaaaaatgaatgataaatatgataatgactattattgtcatacgttaagtttgttcatctccctccttatggcattggccctcactaagctcccaatggtgttaatggccaatttcagatcctccaatggattgccaggcaccactgtcttgtacaagtagctatcaaaggtcatcttctgcacatactcatcagcacacatctccacaaacgcttcccttgcagggttggacctataaaacaccttctgaagaata

SEQ ID NO: 216038 - DNA, 555 bp, Glycine max
  unsure (1)..(555): unsure at all n locations
cgcacactgaattcaaaaacatcgaaagagagaggcatggccgagcaaaccttcatcatgatcaagccagatggcgttcaaagaggccttattggcgagattattagcagatttgagaggaagggtttttacttgaaagggttgaaactcgttactgtggaccgtccttttgctgagaagcactatgctgatttgtctgcaaagcctttctttagtggtttggtggattacattgtctctggccctgttgttgccatgatctgggagggtaagaatgttgttacaactggccgaaagattatcggagccacaaacccagctcaatctgagcctggaactattcgtggtgactttgctattgacattggaaggaatgttatccatggaagtgattcagttgagagtgctaacaaggaaattgcattgtggttccctgagggccctgctaactggcaaagctcccagcactctnggatctatgagtaatacaaatgcctcaagttgatcttgaaattggcctttaggtgatccagattatctacatggtttctggtt

SEQ ID NO: 216039 - DNA, 433 bp, Glycine max
gtacgattaaaacacataaggcggatttaattaaggcatcagggtttataccttggaagcccccccttgcttttaaataaacggcaaaaaagttttcttttttagagaacttttttggccgagcaaatccatgccttgggttttgtagctgatgcttttgaagcttgtttttcaggggcttttttggaaaaagggcttgaatgcaaatttatttgggaacccaaacaacatgatccttaggaaggaaggggcaaacaggaatagttcctggtttaactttgagcacctgaaaggccaaatgtttagggttccattctgatgggtgaggggggcacactgataccgttttaaccctaaccccatttgtaccctccaaaggcacaaaataagctctgggggtctcggttttgggacacgaaaaaacagcttaggg

SEQ ID NO: 216040 - DNA, 517 bp, Glycine max
  unsure (1)..(517): unsure at all n locations
aaagccttagccttccctacaactccaaacacaaagacatcatcatccatggctgcctccgtctccactgtcggagctgtcaacagagctcttttgaacctgaatggttctggagctggagcttcagctcccagttcagccttctttgggaccagcttgaagaaggttattgcctcaagggtccccaacagcaaggtttccggtggaagcttcaagattgttgctgtagaagagaagaaagagattgaagagacccagcagaccgacaaggacagatggaagggtcttgcctatgatatctcagacgaccaacaagacatcacaagaggaaagggtttggttgactcccttttccaagctccacaggatgctggaactcactatgcagtcatgagctcctacgagtacctcagcactggacttcgccagtacttggaccacanaatggatggattctacattgctccagcttttatgggacagctnngtgttcacatcttcaagaacttcatgaccc

SEQ ID NO: 216041 - DNA, 488 bp, Glycine max
ggaaacaggcatagcatgctacactcgcgggcctttcttgcctagtgtttcttccaagcactctccaccttccatttctccatcttttggcttgaggagtctgaaatcaagctctttatttggagaatcgctaagagtggcctccaaatcaacaataaaggtttcaaagacaaagaatacttcactcgtgaccagatgtgaaattggtgacagtctcgaagaattcctcacaaaagcaacaccagataaggggttgatcaggttgttggtgtccatgggagaagcattgcgaacaatttgcttcaaagtgaagacggcttcatgtggttgaacacaatgtgttaatacttttgtggatgagcagctcgcagtggatatgctagctcatcagcttctttatgaggccttagattactgtcattgctgcaagtatgcttgctctgaagaaagtctgagctctggacattggaggtccagttgaaggtgat

SEQ ID NO: 216042 - DNA, 529 bp, Glycine max
caatggagcagttgttgatatcactgcaaagtcttcggcatatttgccactgcaagaggcgtgcatccacagggttaagcatgttgaagaagcaggcttagttcctgggttcaaagaggagtttttgatcattggtgagaactcaatagatgatagcttggtcttgagtttaaggtctcttcagtttgaccttgcatgggaacgttgtagacagcttcaagctgaagatgtcacagtcaagggtaagattgtgggggtgaacaaaggtggagtggtggctgagttggaagggcttagagggtttgttccattgtctcaaatatcaacgaactcaaatgtagaggagcttcttgataaggagcttcctcttaagtttgtggaggtggatgaggaacaatctagacttgtactcagcaaccgcaaggccgtagctggcaaccatgcacagctaggaattggatcagtggtcactggctctgttcaaagcctgaagccatatggtgctttcattgacattggtagcattaat

SEQ ID NO: 216043 - DNA, 563 bp, Glycine max
agtgataatatgaattagttctatttatttaactcacaataatacattggcatcaagacatcgttcggcaacaattgatagttagttacaaacaatattataaaaatgtaagcaaacagaaagaaaagagcacgcaattctgaatcatgattcttcagctggtggtacctcactcaaatccagtccctcttcaggcaagtctgaagtaaatggtcccaggatcccatcaccgctgatagtcaatccactctcaggctggaaccttagcatgtctgcacgagccatagcttctgcttgggctattctctgtctgaatgtctgagccatctcctccgccttctcaaagacaagctttggattgcgaatcatgtctccaggtgtgggctctaacttcttagtggaaagacttactcgacctctctctcggtcatggcttaagatcatcacctttaatatgtcaccaggttgaagcacagttgaaatatcagttacacggtcatgactgatctgactaacgtgaaggaggccattaattccaccaatgtcaatgaaagcaccatatg

SEQ ID NO: 216044 - DNA, 384 bp, Glycine max
atcggggtgaactttttttttttttttggtgggccaaaggagaggtccatatttttataattaaaagtagcataatacgggcctgcacctgaaaaacattttttggggcctaaatctccctgggcgagcgaaaaaaaaacccgctgggtcccccgggcgagagggattttccccagaaggcctgaaattaaccaagaatggctgggacattgccaaaaactgcatggcagccccagccacctgaaaagaccctaggacctgccctagaccctgccttaggaagattaatccccttggataacaacatggggagctcaaaaaacacgggtttccagaaaatccctggcggtctgataaaaggggaactttgggagaggaaaatta

SEQ ID NO: 216045 - DNA, 536 bp, Glycine max
gaacagtgctcgctttaaaggaataactgttaaagcaatggtgatcataaatcctggaaaccctactggtcaatgccttagtgaagctaatctaagagaggttttgcaattctgctatcaagaaaatttagccttgcttggagatgatgtttaccagacgactatatatcaggatgaacgacccttcatcagttctagaaaggatttgatggaattggggccacctataagcaaggaagttcagcttatttcttttcactctgtgtcaaaaggttattatggtgaatgtggacagcgaggtggatattttgaaatgaccaacattcctccagagacagtcgatgagatctacaaggttgcatcaatatcacttagtccaaatgttccagcacaaatatttatgggagttatgctcaatccacctcaacctggagatatttcttatgacaaatttgttagggagagcaccggaatacttgaatcactgagaagaagagcatggataatgactgatggattcaacagttgcagaaatg

SEQ ID NO: 216046 - DNA, 505 bp, Glycine max
caatttcagaaccaacaatcagaaattggtagagaatctcttggttgagaaaggaagactcagagattctctaccaatttcagaaccaacaatcagaaattgatcgagtccttgctcatcatactgagaaagtgagaatggagttggaggaacaaagaatgaggcaatcaaggatgttggtgagcgcaatccaagaggcaatggtgaataagctgaaggaaaaagacgaagagattcagcgtatggagaagctgaattgggcccttcaagaaagagtcaaaagcatgtgcatggagaaccaaatttggagggaattggcacaaacgaacgaagccacagccaactacctaagaagcaatttggaacaagtcttggcacatgtcggcgaggaacgcgccaccgcggccgaggtggccgatgatgctcaatctagctgtggcagcaatgatgcggcagatgccggagatgacacggcggcatccgcggcggcgaccggtcgtggtag

SEQ ID NO: 216047 - DNA, 399 bp, Glycine max
caatggagcagttgttgatatcactgcaaagtcttcggcatatttgccactgcaagaggcgtgcattcacagggttaagcatgttgaagaagcaggcttagttcctgggttcaaagaggagtttttgatcattggtgataactcaatagatgatagcttggtcttgagtttaaggtctcttcagtttgaccttgcatgggaacgttgtagacagcttcaagctgaagatgtcacagtcaagggtaagattgtgggggtgaacaaaggtggagtggtggctgagttggaagggcttatagggtttgttccattgtctcaaatatcaacgaactcaaaggtagaagagcttcttgataaggatcttgctgtaagtatgtggaggtggatgaggaacaatct

SEQ ID NO: 216048 - DNA, 518 bp, Glycine max
agtgataatatgaattagttctatttatttaactcacaataatacattggcatcaagacatcgttcggcaacaattgatagttagttacaaacaatattataaaaatgtaagcaaacagaaagaaaagagcacgcaattctgaatcatgattcttcagctggtggtacctcactcaaatccagtccctcttcaggcaagtctgaagtaaatggtcccaggatcccatcaccgctgatagtcaatccactctcaggctggaaccttagcatgtctgcacgagccataacttctgcttgggctattctctgtctgaatgtctgagccatctcctccgccttctcaaagacaagctttggattgcgaatcatgtcttcaggtgtgggctctaacttcttagtggaaagacttactcgacctctctctcgggcatggattaagatcatcacctttaatatgtcaccaggttgaagcacaggtgaaatatcagttacacggacatgactgatctgactaacgt

SEQ ID NO: 216049 - DNA, 530 bp, Glycine max
  unsure (1)..(530): unsure at all n locations
attcggctcgagcggctcgagaaagaatattcatgccctggaccctcaatctattcctacaactgcagcgatgcatagtgccaaaatagtggtagataggttgattgagaggcagaaagctgagaatgggggaaaatatcctgagacaattgcacttgtattgtggggaactgataatattaaaacatatggtgaatccctggctcaagtattgtggatgattggtgtggaaccagtggctgatacctttggcagggtaaaccgggtggaacctgtaagtcttgaagagcttggaaggcctaagattgatgttggtgctaattgctcaggagtgtttacagaccttttcatcgatcagatgaatcttctggatagagcagtgaagatggttgctgaattagatgaaccagcagagcaaaactatgtaaaacagcatgcatgataacaagctcaagcccttggagtngaagttcgagaggcagtcacaaggatcttcttcaatgcttttggctctacttctcaacataaac

SEQ ID NO: 216050 - DNA, 523 bp, Glycine max
aattatgaacttgaacctttatttgttcaccggggttggagttcagaactgcacaaaggagacttgatctcaaaaaatgagaaaaggaaaacaaaaatcacatttaaaggatgctcttctcttcactgttgtgtgctcttttcaataatagctattaacttcagcgatcaatgccttcaattttgtcttccacttctgaatacaactgcctgagcttctcaatattatcttctgaagtttcccaataaccacgtccattggcttccaagaatgtctgcaccagtttcctgaaggagtttggattagtgctcatgagcttgttcagcatttgctcatcttgaatgaaagctgtgttggcttcttcatacacccagttatcaacttggcctgaagttgcactccaccccactgtattggtgagtctcttctcgatctcgcgtacaccctcatattcagtagacaacatgccttcataccactttggattcaacagcttggatcttgcgtcaagtctaaccgtctc

SEQ ID NO: 216051 - DNA, 561 bp, Glycine max
caaaattatagaggaagacggtccaatatgaaaaatatagtaagatcatctcaaacttagcatcttctctttgcacctaagacattgagaatgctaagaatgttacacgcaagttccatcacaacttctagcacttggattagtacaacaaccttcacgaacagaaatatttacttgccaagtttgctttgcctccaattcaagactggaagaaagttcccctctgaatagcatcctcgttagcatttccaagagcagcctcgttcaagtacttgtcagccaattggactctcttgacattctcttgttcttggacaagcatgttaccatacagcaagagcttctccagagtcatcttgggctgctcaaaggttggaggtccatcttttgagttcacaagcttcttcccaacactgtcaacaccaacaccagaaatccacttcctcacttcatcatcatatactctggccctcagtgcaccaaagaaatcaatggattggccagggaaggtgtcaagcttgacaatgtcctgttcaggaataccatcagtgcgggaaaatc

SEQ ID NO: 216052 - DNA, 527 bp, Glycine max
cttaagcatgtattttgaaatactcgatatagatgctcatagttatttgcacaaaactggtaaaattccagatcaataaggattgcggcgaagccgcaaagatacaacattcattagggaaaacaggagtggggaaaaataaggggggaggggttgaggaagaatcaattgctcacagagcatgctaagacacctaaatattccacacacagttattgaaacaacccaatatagagaaaatttttctttggtgtattataatataaagcagaaccaaatgacttggaagattctactttcttataccattcacttggcaagttcgttgcggatgagttttgctgcggcaaccatgtttgtgagggctggcttcacctcagtgtacttacgggtcttgagcccacagtcagggttcacccacaagatgttcttctcgagcactgccaacaatctgttgattctgtcagcaatttcttcagttggtggtattcttggggagtggatgtcatagacaccagggccaattc

SEQ ID NO: 216053 - DNA, 580 bp, Glycine max
aagaatataataagtctacaatatcatttatcttttttccaaatacctgttaacaagtctgtagatcaatatatatataaatatctttccatgttgctttcttatgcctaaatcatggcattgataactagcaaactactaatatttatgttgcttagtatctaattaatgtatatgtttatcaaggtatatcactatatattgcaaacaaatgtttatgaatgtcgaccaccatagcgtctttgtctttgttgaaatgaacttaatgcatctacaaactcatccttcccaaaatctggccagagttcccgattaaaataaagttctgtgtaggctaattgccacaacaagaagttactcactctaagctcgccactagttcgtattagtagatcaggataaggaaactcagtacaattagtttccaattcttgttcaataatgttttcgtttatgtcatccaagtgaatgtgaccatctttgactttcttggctacactggtacatgcttgcacaacatcatattttccactgtatcccactgccacaataagttggaatctcgaattttgtttggatc

SEQ ID NO: 216054 - DNA, 518 bp, Glycine max
  unsure (1)..(518): unsure at all n locations
atcattaaattgtcgcattaatttatcacacttttttttgtacattcaagaattaaatttaaaattttcatcttttaaggactaatttgtcaacccatcacactttcaaagacgaatttggctatttacgcctaaagctatgaactaagaaagctatgtgatctgctcttccttcaatcttaaacttgccacaggtcgctgctcattgccagtaacacccctgctgctggaactatgtttcacgtcgggtatggcaaacttttgtgcttttagctgggatgcactattgttggcaagggtgtggctattagtcttagctgcaggcacatcatgattgtgttttccttcagatgttgctatgacagctttaggatccattgaagccctctcaacatgcttccgaactttgcaaccttgngtcgtgcatatgtaatagctccttggatatgggttgcctttgacaactttgtgaccatatttgcgccatcgatatccatcatctaagagattcacttcac

SEQ ID NO: 216055 - DNA, 526 bp, Glycine max
aaaaacaaaaataatatttaatcattattgattcaatcactgttattcaaccaatacctccattgactcaactaccaatccggttttaaaaacattggtttaatgagatactggatatatatggtacaatcgattatttgttgtatacaaagactgaggcaggacggtacagtgaggctgccaaaattatcacagtttaccctgctcttgcagttgttcctctgtcacaaagaaggcatggaaaccatatggaactctatgcggcaattcgacaactgcaacaggatctgctgacattgtttttgcattgatgacatgcacaaatgattttccggtattttcatcgtgtacaaaacaaatcaagtatccatcatcttcttcagaatcggtaccagggacacgagggacataaacagcttccgagccatacttccctggtcccaagtcatagagaccctgaacatttcctcctacttcaagttttgtttttccattatccggttcagcatgcaaatcaaatttaata

SEQ ID NO: 216056 - DNA, 586 bp, Glycine max
  unsure (1)..(586): unsure at all n locations
gcaagtagtacttgtgctcttctatcccttctcattctttcactctttgtggctgaaatctatggaaatagacaagttcaagctcttaacaaactgcacaagtccaccaagttcagaggaaattcacaaattgataggagtgagtttgaggtagaggagcttgtttatgatgacattgctcactctcaagagggtctcaaagagaaagatagaattgagagtcttccaggacaaccccctgtgagtttttctcagtatggagggtatgtcactgtggataaagtggctggtcgtgccttctattattactttgttgaagctcaacgttcaaaacaaacacttccacttcttctttggctcaatggaggtcctggatgttcatctcttggctatggagcaatgcaagaacttggaccttttcgagtaaacagtgatggcaaaacactacacagaaatatattttcttggaacaaagttgcaaatgttttattcttggagtcacctgctggagtaggattttcctattcaaacaaatcaaaagattatganntacatggagataagaaacagccgcagacattattta

SEQ ID NO: 216057 - DNA, 543 bp, Glycine max
  unsure (1)..(543): unsure at all n locations
gccattcgtgcagcaccggatcctctcatttctccggcgataactctcccttttccggcgaattcaccgcttcctcgatatgaatcccgagtatgactatctgttcaagctccttctgattggagactctggtgttggtaaatcatgccttcttctaagatttgctgatgattcatacattgagagctacataagcaccatcggagttgattttaaaattcgcactgttgagcaggatgggaagacaattaaactacagatttgggatactgctggacaagaacgatttatgacaataactagtagctactatcgtggagcacatggaatcattattgtttatgacgtgacagatgaagatagcttcaataatgtgaagcaatggctcagtgaaattgaccgctatgccagtgataatgttaacaaacttttggttggaaacaagagtgatctgacagcaaatagagttgtctcatatgacacagctaaggaattcgcagatcnaaatggcatacctttcatggaaacaagtgcanaagatgc

SEQ ID NO: 216058 - DNA, 459 bp, Glycine max
  unsure (1)..(459): unsure at all n locations
gttatcaggaaatgttcaacaatttgggtgaactgttgtgcaccatcactgggttcgactccttctctttgcaaccaaatgctggtgctgctggagaatatgctggacttatggctattcgtgcatatcatttggcaaggggagaccaccaccgcaatgtttgcattatacctgtctcagcacacggaacaaatcctgctagtgcagctatgtgtggaatgaaaattgtctctagtggaactgatgccaagggaaacattaatatataagagctgcggaaggctgctgaaacacacaaggataacttatctgcacttatggtaacatatccttcaacccaccgtgtttatgaggaaggtattgacgaaatttgcgatattatccatgataatggaggccaagtatatatggatggtgccaacatgaatgctcangtgggactcacacgcccggcttgga

SEQ ID NO: 216059 - DNA, 512 bp, Glycine max
aaaactttcgaaagattttatccaattgaaattttaaaaatgactgggataaacttaagaattcaattattgaaattgaataagtaaacaatttaattggattggtcgaatggtatcaaaaaaatggagtactaactcccatttcttatttattattgaattaaccgatcaacttgctttgttatcgaacatttctttttgatttcaaaaattttccgaaaaaaatttgaatctatttttatatgcgaatcaatcctactacttctggtcctgaggtttctgcgcttgaaaaaaaaaatctgggacgtatcgcccaaataattggtccggtactagatgtagcttttcccccaggtaagatgcctaatatttacaacgctctgatagttaagggtcgagatactgttggtcaacatattaatgtgacttgtgaagtacagcaattattatggaaataatcgaattagagctgtagctatgagtgcgacagattgtctaatgagaggaatgga

SEQ ID NO: 216060 - DNA, 508 bp, Glycine max
agttattccgatattcggacgcatcaacttgttatgaaatcacattgatagcctctactcgtgtcctagctcgtctaagagctagatttgcctcaattgtttgtctcttgccttccgccttattcaaattagcttctgctatttcaagagtttgctgtgcttcttgtggatcaatgtcactacccttttccgcatcatttactaaaacagtgatctcattattgtttattctagcaaaaccgcccatcagagccatcgttaaccattggtctttaagaagacgtattctcaaaatacctatatctacggctgtggcaataggcgcatgatttggtaatactccaatttgtccgctattagtagataaaatgatttccttcacttccgaatcccaaacaattcgattgggggtcagtacacaaagatttaaagtcatttcttcaaattgctctccatttctaagttcgtagctttcgcagtagcttcatcgatattacctaccaaataa

SEQ ID NO: 216061 - DNA, 436 bp, Glycine max
aaattttccagtggattcttggttaccaatttttgtgaattgtctttatcctgtaagtcaattaccttcagaagctgtcgttgtaaatgttacatgtggtagtggacgtggtggtttacccaccactgcttggattagttctgcagttaacaatcgctcctcagatatcaacaaaaggattcgcacagcacttgggagaggtaagaaaattgtttttcttactagagttgatccttttccagtagctttactggctgttctttttggcgttaagaatgaaattctgagttctaacgccactaaccctatgctgacgcgacttcttgagaactgtaagagtctcaaatatctggttgatgagtgtccttgtgcatttgtgaactagtattgaatatatcattcactgaaatagagcgcattactatgtgcaatgagt

SEQ ID NO: 216062 - DNA, 442 bp, Glycine max
aaacacactcattgcacatagtaatgcgctttatttaagtgaataaaatattacatactagttcacaaatgcaaaaggacactcatcaaccagatatttgagactcttacagttctcaagaagtcgcgtcagcatagggttagtggcgttagaactcagaatttcattcttaacgccaaaaagaacagccagtaaagctactggaaaaggatcaactctagtaagaaaaacaattttcttacctctcccaagtgctgtgcgaatccttttgttgatatctgaggagcgattgttaactgcagaactaatccaagcagtggtgggtaaaccaccacgtccactaccacatgtaacatttacaacgacagcttctgaaggtaattgacttacaggataaagacaattcacaaaaattggtaaccaagaatccactggaaaattt

SEQ ID NO: 216063 - DNA, 471 bp, Glycine max
cagcttttatggacaaacttgttgatcacattaccaagaacttcatgaccctgcccaacatcaaggttcctctcattcttggtatctggggacgcaagggacaaggaaaatctttccaatgtgagcttgtctttgccaagatgggaatcaaccccatcatgatgagtgctggagagttggaaagtggaaatgcaggagagccagcaaaactgatcaggcagagataccgtgaagccgcagacttgatcaagaagggaaagatgtgtgctctcttcatcaacgatcttgatgcaagagctggtcgtcttggtggaaccacccaatacactgtcaacaaccagatggtgaatgccaccctcatgaacattgctgataaccccaccaatgtgcagcttcctggtatgtataacaaggaagagaatccccgtgtgcccatcatcgtcaccggtaacgatttctccacactctatg

SEQ ID NO: 216064 - DNA, 542 bp, Glycine max
aggacaaaaggaaaaggcaccaaattcaatttaagtggacactttaactcaaaattatagaggaagacagtccaatatgaaaaatataggaaaatcatctcaaacttggcatcttctctttgcacctaagacattgagaattctaagaatgttacacgcaagtcccatcacaacttctagcacttggatcagcacaaccttcaggaacagaaatatttacttgccaagtttgctttgcctccaattcaagattggaagaaagttcccctgttaatagcatcctcgttagcatttccaagtgcagcctcgttcaagtacttgtcagccaattggactctcttgacattctcttgttcttggacaagcatgttaccatacgtcaagagcttctccagagtcatcttgggctgctcaaaggttggaggtccatcttttgagttcacatgcttcttcccatggcgtcaacaccaacaccagaaatccactctctcacttcgtcatcatatactctggccctcagtgcaccaaagaaatcaatggat

SEQ ID NO: 216065 - DNA, 535 bp, Glycine max
aaacatctaaactgttctgtacttgcatgatgaggaagaactacaaaccagagaaacattagcataaatgcataatattcaaattctgaaaaccctaaatacaacagatgaatgaaaaacatacatctgtcacaaaagcttttaaagcaacacttgcttgtcagtacagcatctttcataacatcattacataagggacagcggagctcgggtggtagttccccaacagaacgtgttgatggcatcccttctatttctttctcaaaagcagcctcatttggcttcaagacagctactgaaccattaggtaaagcataggaaccttgtggatttaccatcagcatggatcttggaataccagtaggttgcttgacttttctcatgtcataattcgggtcaccatttgtaggacagtgctgaataaaatgtccaggcaccttgcatctgtggcatacatagccttgtggaggtgtttttcgctccatccctgccagacctcagcatcagttgtgatcaacatattagtattaaaaac

SEQ ID NO: 216066 - DNA, 408 bp, Glycine max
agaaaggtaaaagagagtgccaaaatgcccttaattaggcatgcttttgtgtcaaccgcagaccggtatgggtcactcataggaacaaaaccacctcacatgtggatttggggagaaaacttccgactacctagagggctgaatgctacagctctccctgggagagtttcaaattataaaaagacatctattggttcctagttatcaaccgcttctacgagagttggctcatagacgatgggagcctgaaagacatgaagatgcatcacagttgcaacaacgaaggcaagcccgccggctgcaacatcattccggaatcttacaccagggggccttccgggaccaccaatatcaattggcacaggctcaagagtgtgggaagttagattctggattcttccatccttg

SEQ ID NO: 216067 - DNA, 363 bp, Glycine max
ggacccagattcctaaatacgaatgattctcgtctcttcaaaaagctttgggctgttaccaggttgcaaaggacaaaaaacacggttccccctggcatgcaatttcaggctggaaaaaaaccgggaacaaattctcgccctacaggcttaaacgtaaaagcaatttaagaagaattcccaccccacccttttccttgggggcccttgcaatccttggccccaaatcatcccccttttttcccaggggccccgggattgccaaccctttcatttttccttggggattgacaatacccccgctttttctttcgaaaaacatgtgaaggccgacctttcggccccatgggtggggctggcaaacaa

SEQ ID NO: 216068 - DNA, 247 bp, Glycine max
cggacactgattttaaaaacattgaacgagagaggcatggctcgtcagaccttcatcatgatcaatccaaatggccttcaaagagggctgattgtcgaaattattaactaatgtgaaaggaagggtagttacttgactggttcgaaactcgttactgtggaccgtacttatgctgagaatacactatgctgatcagtttgcaaagccaagctttagctgtatggccgattacattgtccatggccct

SEQ ID NO: 216069 - DNA, 224 bp, Glycine max
aaagaaacttcgaactgtggtaattcaggaccttcccttatttgacactgtgaaggggtagacttacaatgcacacgcaattgctgacgctgctctctaaaggggcatgcatctgctaagttgagactgaagcactatcactgcagcctttgatgaaacatccacattagaggacagcgatgatcgctacaaaggctctgctggaggaaagcccgacaccttca

SEQ ID NO: 216070 - DNA, 583 bp, Glycine max
aaaactttcgaaagattttatccaattgaaattttaaaaatgactgggataaacttaagaattcaattattgaaattgaataagtaaacaatttaattggattggtcgaatggtatcaaaaaaatggagtactaactcccatttcttatttattattgaattaaccgatcaacttgctttgttatcgaacatttctttttgatttcaaaaattttccgaaaaaaatttgaatctatttttatatgcgaatcaatcctactacttctggtcctgaggtttctgcgcttgaaaaaaaaaatctgggacgtatcgcccaaataattggtccggtactagatgtagcttttcccccaggtaagatgcctaatatttacaacgctctgatagttaaggggtcgagatactgttggtcaacaaattaatgtgacttgtgaagtacagcaattattaggaaataatcgaattagagctgtagctatgagtgcgacagaaggtctaatgagaagaatggaagtgattgacacaggagctgccctaagtgttccagtaggtggagcaactctaggacgaattttcaacgtgc

SEQ ID NO: 216071 - DNA, 450 bp, Glycine max
cattctcatcctcttctttctctctctaccattgccatggatccctacaagcaccggccatccagcgccttcaattctcccttctggactacaaattctggtgctcctatttggaacaacaactcctctttaaccgttggagctagaggtccaattctgctggaggattatcatcttgtggagaagcttgcaaattttgatagggaacgtatcccagaacgtgttgtccatgccaggggcgctagtgcaaagggtttctttgaggtcacccatgacatttctcacctgacatgtgcagatttccttcgagcccctggagttcagacgcctgtaattgttcgtttctcaactgtcattcatgagcgtggtagccctgaaaccttgagggaccctcgaggttttgccgtgaagttttacaccagagagggtaactttgaccttgttggaaac

SEQ ID NO: 216072 - DNA, 453 bp, Glycine max
aaaaactaacaaatacaaacgggttttattgagataggtcaacgagttgcattcatggagttatgggtacacacaacataatattgcaagaaaaggattagttttttcaggtaatccaaaatcacatccttatcggactttttgcacgtttgcaactttaacaattattttggagttggcaacaacattaaatatttggcctcgtgctgagatgaaaagctattttttggcctaaaaaacgggcagcctgagaccagtttgatatccaaacactgcggatctcatgggtgacccgggggtcaaataaagcatcaacccatcggcgagcaaatttattttgcctgtcaggtgcccaaaaccggtatttcttttcgggctggttgaaggtgttctccttctcaattccacacttttcacgccttccactgcagatagcaggaggtatggggaacc

SEQ ID NO: 216073 - DNA, 452 bp, Glycine max
caaaatattgcagaatcaaaagtagctctagtatatggtcaaatgaatgaaccgcccggagctcgtatgagagttggtttaactgccctgactatggcggaatattttcgagatgtcaatgaacaagatgtacttctatttatcgacaatatctttcgcttcgtccaagcaggatctgaagtatctgccttattgggtcgaatgccttctgctgtgggttatcaacccactcttagtactgaaatgggttctttacaagaaagaatcacttctaccaaagaggggtccataacttctattcaagcagtttatgtacccgcagacgatttaaccgatcctgcgcctgctaccacatttgcacatttagatgctactactgtactatcaagaggaatagcggccaaaggtatctatgcagcagtagatcctttagattcatcctcactatgctc

SEQ ID NO: 216074 - DNA, 437 bp, Glycine max
aggtattccgatattcggacccatcaacttgttatgaaatcacattgatagcctttactcgggtcctaactcgtctaaaagctagatttgcctcaattggttggctcttgccttccgccttattcaaattagcttctgctttttcaagagtttgctgggctttttggggatcaatggcactacccttttccgcattatttactaaaacaggggtctcattattggttattctagcaaaaccgcccattaaagccatcgttaaccattggtctttaagaagacgtattctcaaaatacctatttttaccggtggggcaataggcgcatgatttgggaatactccaatttgtccgctattagtagataaaaagatttccttcactttcgaatcccaaacaatttgattggggggcagtacacaaagatttaaaggcatt

SEQ ID NO: 216075 - DNA, 542 bp, Glycine max
  unsure (1)..(542): unsure at all n locations
aattgggacatgaggttgctttaaaatatttctctattatgtggcacatctagagtagacttaaattttactagactgtataaggtacgtacaaactacgcataatataatactaggctactttcagcagcacatacaactagattgcatgtaggatgccatgctacatgtagcagcttggagcttaagttacaagaaaagtcagctctactagactctgaatcagtgtgagcatgctggtaaatttcacgaggtattaggttgcttagagaaggccttctaactcgagacttagcttggtgaataaccttcctgtgagaatttcctctaatttctagtttgatctcttccttcctttcagaacccggggagaatatccgcacgacattgctataagaaccagttgcaaaatggagtccatcaccactaaagcagcactcgaatttgtcaaatatgcagtcattattatataactctggcaacttaggacgcagatgctcgtgaattttgatattgcgactggagatgantccatacgcatg

SEQ ID NO: 216076 - DNA, 373 bp, Glycine max
cattgttgtttatgttttcctttttttttttatttttattattttttttgtttttttggtatttttgaggcgaacacagaaccttaaataacaaggacttgctgtcactctaaaaaggctcaggcatgaaacagcctcgcacaggccaagacaacggtggcgcttgaaaaccaatttccaggtggagaaaagccggatccaaatgctcaatccccgcggtatacctaaagcctcttttgacaaggatgcccccatgaacaactgcttcggtggctcctcggatccttgccccctaataatcctcctttttttcaggggggccggtggtattcaaaccgtctatttttgctgcgggggtgacgactaccccacc

SEQ ID NO: 216077 - DNA, 521 bp, Glycine max
atatcaatcttaagacttccactaatcatacagagattattcaacttattacaattcacaaaagccataaaaatacatttggaatacgaagatcggagacttccaagttccaaccagtccgagacaccaataaacttttcatttcttaaatgagagaacaataatctagaatgaccaataacttcataactatactacctcacaagttcagtgagactgaaggaaaaataaaatctaaagctagcaaatggggtactgaaggatttaaatctaaaaagaaaaaaggaaacttcgacaaaggtatgaccaaattgaatattctcaacatgaagaatcattttgggacttagtagcagcttgtgcatgtcttgtctttgaatcatcaagataattctgataaatataagaggcaaaaccccatagagccaaaagcatagaaattatcttcaccccattcatcttatcatgaaaaactataacagcagcaataggagttacggctaaagaaactgtgcttataa

SEQ ID NO: 216078 - DNA, 563 bp, Glycine max
ctttgattctctgttctctgttttgttctgtttcgcgtattgtcttcatacaggaacttgaacaatgaagaatgcaaagggcaagggagcagcaagggcctcaaaagaatcactgaagcccgttgatgaccgaaaggttggaaagcggaaggcttccggtaagcctgggagaagtagtgcaccaaagaaggagaagaaggccaagaaagaccccaacaagcctaaaagaccacccagtgctttctttgtgttccttgaggagttcaggaagacctttaaggctgagaatcctaatgtgaaggctgtatcagttgttgggaaagctggaggagagaaatggaaatccttgtccagtgctgagaaagctccatatgaagccaaggctgcgaaaaggaaagctgagtatgaaaaacttatcaaagcttatgataaaaagcaggcaagctccgcagatgatgaagaatcagacaagtccaaatctgaagtgaatgatgaagatgatgccagtggagaggaagaggaagaggatgatgacggaggagaggacgatgaagatgatgact

SEQ ID NO: 216079 - DNA, 346 bp, Glycine max
caagtttgtgctgcacaaaatagaaagcattgatgaggcgaacttgggatacagctacagcgtggttgggggtgctgcattgccagacacggcggagaagatcacattcgactccaaattggttgctgttcccaatggagggtctgctgggaagctcactgtcaaatacgaaacaaaaggagatgctgagcccaaccaagacgaactcaaaactggaaaagccaaggctgatgctctcttcaaggccattgaggcttaccttttggcccatcccgattacaactaatcctcttcaacttacttgtcatcacttttttgcttggagacttatccaatcactctgttc

SEQ ID NO: 216080 - DNA, 554 bp, Glycine max
aattgtgaaaccaaacatgcattaaatgtatcacgtcatataccaatcttggggtttcaatgaacttttctgtacgtacttgatacgctacacaattttgaatttatgaattgctatacaactatacaagtttaaagaaaaaacctatccatcccaagtccatatcctccaagtaatattggattaaataggaacttgtttcgtgctactgttgcacactaattaatggaaggtaatattggattcatcccaagtccatatcctccaaaactacctggttctgcatgcttcaccctaccaaagtgtctaatatgacgcagaagccttgctaagaaggtattgtggcatatagtcgagctgtcacagaccaaagctaaatgtttgcgtgctcttgtgatggcaacattgattcttctgctatccccaaggaatccaacagctcccaatgtgtttgatcgtaccatggataaaattactgcatcagcttcccgaccttgaaaactgtcaatggttgcaacctcagtacctgctgcttctggaaattcatcaagctt

SEQ ID NO: 216081 - DNA, 573 bp, Glycine max
gtaaaaagcaagtaacattaagttggattcggatacacaagataatgcacattatctgaagtacttcaccaaacacaaatctaaaaactctcaaaagtcatttcgttctttgacgctcactttccggggacgaagttggtggcataggcccaggcgttgttgttgacagggtcagcaaggtgatcggcgaggttctccaatggaccctttccggtgacaatggcctgaacaaagaagccaaacatagagaacatggccaatcgtccgttcttgagttccttcaccttaagctcagcaaaagcctctgggtcatcagcaaggcccaatgggtcgaagctgccacctgggtagattgggtcagtgacctcaccgagggggccaccagcaatacggtaaccttcaacggcacccattaggataacttgtgtggcccatatggcgaggatgctctgggcgtggatcaggcttgggttgcccaagtagtcgagcccaccctcgctgaagatctgggacccggccttgaccacacggcttctccgaactttacccgttgcgggacagcaactcggaaga

SEQ ID NO: 216082 - DNA, 431 bp, Glycine max
aatattaaacaataattttggcatcataaattcttccggaataattatacaaaagtgaccagggaaaacccgatctgccagttgcccactgaataaaaacacacatcatattactatgtgttgtcatacatgcattgtaatgagtggatattccaaagcaattggtccctttatccctccttaatccttatgccgtaaatggcaccatcccttgtaaattgtaattgcttcttcagaaatagaattatacaaaggtagttgcaatatctatttgccaaactataaatgtaaagacccttcttcccaatcctagtagtgtcccaattgtatttacaaaggtgggacaagatatgtatatacaagtacaaccatgtaacataatgtaacaataatcatactttggtctttactagtgcacattacagggagtt

SEQ ID NO: 216083 - DNA, 484 bp, Glycine max
gcagcgaaacatgccgaaaaggtgtataaatataaatactagcacatacaaacggcttttattgagatagctcaacgagttgcatgcatggagttatgggtacacaactaaaattgcaagaaatggataaggtctttcaaattgatcgaaaatcacatccttattggactctttgcacgtttgcaactttaacaatcattctggggttggcaacaacattaaatatttggccttatgctcagacgagatgctattttttggcctaaagaacggtcagcctgacaccagtaggatatccagacactgcggatttcatgggtgacccgtgggtcaaataaagcatcaacccatcggcgattaaatctatattgcctgtcaggtgcccaagatcggtatctctctccgggctgcttaaagatggtctccttctgaatgccacacttttcacgccttgcactgcatatagcaggaggtatggggaacg

SEQ ID NO: 216084 - DNA, 558 bp, Glycine max
aacaactaattagtcattagacaaactgtttagtattcatttgaacaactatttttacaaccagtcactcacaatctcctatgtgtcctaataaaatttgttgtattcattgcaatggcggttgagcaagcatagactccaacagagcagagagctgcagatgccaagagaaggaccttccattgtctcccagaaagcagaattgccaacgcagttaatgcaattgccacagctgaaagagcatttttccaagcttcgaaagctttgacgacggttctacatcctttgcaatgaatcacatgcctaaaatatctgttggcaaaattaggggcatgcattgttccaatgccccccttggttggtgaggaagctgattgtcctgcgactagtccagcaggtgcgtgttcaaccacagcaggctctttaggcaaagagatagtgctgtgaccaaaatgatatggcattccatgccccgctttgtccatccacttcctgtattcagcaacccatgtgtctgatgatttcagattcaggtatagttcctttgttggaaccttt

SEQ ID NO: 216085 - DNA, 505 bp, Glycine max
ctttgattctctgttctctgttttgttctgtttctcgtattggcttcatacaggagcttgaacaatgaagaatgcacagggcaagggagcagcaagggcctcaaaagaatcactgacgcccgttgatgaccgaaaggctgtaaagcggaaggcttccggtaagcctgggagaagtagtgcaccaaagagcggagaagatggccaagaaagaccccaacaagcctaagagaccacccagtgctttctttgtgtcccttgaggagttcatgaagacctttgaggctgagaatcctaatgtgaaggctgtatcagttgttgggaaagctggaggagagaaatggacatccttgaccagtgctgagaaagctccatatgaagccaaggctgccaaaaggaaagctgagtatgaaaaacttatcaaagcttatgataaaaagcaggcaagctccgcagatgatgaagaatcagacgagtccaaatctcgagtgaatgatcaagatgatgc

SEQ ID NO: 216086 - DNA, 505 bp, Glycine max
aggtcacattgtcacaatgtggtcaccaattgttctactgttgtgccttattcctcctgtgttcttgctattcttcttccaataccgtagaaccttcaagaactcaaaccttccaccaggtcctagaggccttcccataatagggaatctccatcagctagatagctcgaatcttcatcttcagctatggaaactctcaaagaagtatggccctatattttcccttcaactaggtttaaggcccgccatagtgatttcctcatccaaagtggccaaagaggcacttaaaacccatgacgttgagtttagtggaagaccaaaattacttggccaacagaaactgtcctacaatggaaaagacatatcattttcaccaaatggtagttattggagagaaatgagaaaactttgtgttggccatgtccttagctctagacgtgtctcgagcttttcctcagtataaattgtgagggtaagcagatgatacagaaaatatctaggcatg

SEQ ID NO: 216087 - DNA, 534 bp, Glycine max
ggacccaaaattatatagattatagaatacaattttaacagacttttacatgtgacatttggccaaaatacaaagaggattcttcttatactggacaagtcctggcaagacttcagtatcgatgtcttcctttttcatccctgctggcaattcccaatcaaataaataaagaagattagcaagtataagatccaatgaggcagttgccataagcatgcccgggcaacttctacgaccagcaccaaatggaattaactcaaaatcttgccctcgaaaatctatagtgctgtataagaacctctcaggcaaaaattcttctgggtcttcccatatttcagggtctctttgaatagccaaagcattcacatatactaatgtcttggctgcaatttcataaccatctataatgcaattttcatttgtctcttttggcaaaggagtggcactggtgggtataatctcaatgtctcttttatcactgccttgaaatagggaaacttctgaatgtcattttcttctaagaaatctttctta

SEQ ID NO: 216088 - DNA, 502 bp, Glycine max
  unsure (1)..(502): unsure at all n locations
aaatacaatttttgaagtattacattgctttggattgttcccttaaacttggtcattccttttacattcataaattccttctgtaagtgcacgtttgaaccttgatatcttcgatgggcaaactttcttctgggaaggtacatgccccaatcttctcttctccctggtctggcaacagaccacaaggagcaggagtcacatcacttgaaattccagcaatatcagtgcaagtccatggaactttcttagccttctttgccagttgaatggttacattggatatgcagattccagtgaaagggtcaccagatataccctccaaccttgctgccatagtgacattctcagcaaccatatcacgataattaatgttctgaatcacaggaagtgcattaggatcatagttgtcatcagcatgagacccataatttcctgtcatccaaaatgcccatttcatgngtttcatggtcattcttctaacaaatatgtccttgacataacc

SEQ ID NO: 216089 - DNA, 621 bp, Glycine max
aaatacaatttttgaagtattacattgctttggattgttcccttaaacttggtcattccttttacattcataaattccttctgtaagtgcacgtttgaaccttgatatcttcgatgggcaaactttcttctgggaaggtacatgccccaatcttctcttctccctggtctggcaacagaccacaaggagcaggagtcacatcacttgaaattccagcaatatcagtgcaagtccatggaactttcttagccttctttgccagttgaatggttacattggatatgcagattccagtgaaagggtcaccagatataccctccaaccttgctgccatagtgacattctcagcaaccatatcacgataattaatgttctgaatcacaggaagtgcattaggatcatagttgtcatcagcatgagacccataatttcctgtcatccaaaatgcccatttcatggttttcatggtcattcttctaacaaatatgtccttgacataaccccctcttcctacagcagttttgattctgacccctgattctgaattgatggctacaatgtcctcagctctgacgtcctgaatccaccagacatctcactccctaaagcatcacagcactg

SEQ ID NO: 216090 - DNA, 512 bp, Glycine max
gacacaagttatgaatatataaggcccacttttttttacagggaaaacagttgaaacgaagttgttaataataaattgccgaaagaaatgggtaaaagaaattcccacccaagatttaataattgatctattcttagcctaggcaaagtccatcttgttgcgattgaaaggaataagaataaataagttttagctagtgtaataaagataccaattatcgttacaaaaactccatatgtttgatttatttcaaaaaagtcagaaacgaatatgtatggaatagagatatttgaaccaccaaagtaaagaactgttacaaataaggaagaaatgaataggtttaaataggaagcaacataaaatacaccaaatttgatacccgagtattcggtttgataacccgctactagttcttattccgcttccggtaaatcaaaaggtaatctttcacattctgcttgggacgagattagaaaaacagtgaaacccataggttgacgccacaaattcca

SEQ ID NO: 216091 - DNA, 534 bp, Glycine max
acaatataataataactttcaaataataattcgaatccaaagataatatacaaaccttaatttaaaaaaaaaaaacggacacaagaaccaacatctcctgtcagtattcacataacataaaaagacattcaatatgccgtgagcacttggtaactggcgtagaaaacatacgttacaacaagagggtcaataataaacttgatacctactccgggccttgcattggaaccatcatatgtcgaccctgagaattcgggtaagtaacattttgtgagaaagaaccttgatgagcaagctgagcattaggacttggctgaacatctctcttagcagatgagtctccacccttggcagagcccttcgtatcaccctccatctctcggtatctagtgaggtaaattttaagaggatccatataatcctcgaaaccgagagtggccatcgcccagagcaaatcatcgccgttaatagtctttctcttttctctctgacacttatcagaggcctcgcttgtgatgaagctgatgaactcgg

SEQ ID NO: 216092 - DNA, 414 bp, Glycine max
  unsure (1)..(414): unsure at all n locations
aaggggacactgtaactcaaaattatagaggaagacggtccaatatgaaaaatatagtaagatcatctcaaacttagcatcttctctttgcacctaagacattgagaatgctaagaatgttacacgcaagttccatcacaacttctagcacttggattagtacaacaaccttcacgaacagaaatatttacttgccaagtttgctttgcctccaattcaagactggaagaaagttcccctctgaatagcatcctcgttagcatttccaagagcagcctcgttcaagtacttgtcagccaattggactctcttgacattctcttgttcttggacaagcatgttaccatacagcangagcttctccagagtcatcttgggctgctcaaaggttggagggccatcttttgagttcac

SEQ ID NO: 216093 - DNA, 741 bp, Glycine max
  unsure (1)..(741): unsure at all n locations
cctcgcccccccccccccccccccccctagggtagaagagnntantagtaggaggnagnnntttttttttttttttttttttttttttttttttttttttttttttttttttccctccccccccccccccccccccccccccctccccccccccccccccccaaaaaaccccccccccccccccaaccccccccccccccccccccccccccccccccccccccccaacccccccccgcccccccccccccccccccccccccccccccccaccccccccccccgcccccccccccccccccccccccccccccccccccccccccccccccccccccccccccccccccccccccccccccccccccccccccgccggcccccccccccccccctctcccccccccccccccccccccccccccccccccccccccccccccccccccccccccccccccccccccccccccccccccccccccccccccccccccccccccccccccccccccccaacccccccccccccccccccgcgcgcggggcgccccccctccccccccccccccccccccaacccccccccccccccccccccccccccccccccccccccccccccccccccccccccccaccacccccccccccccccttcccccccccccccccccccgccccctctcactccccctcccccccccccccccccccgacaccccccccccccgccccccc

SEQ ID NO: 216094 - DNA, 485 bp, Glycine max
cgagaagcactccctagagcgctaccagagggaccaatgggtctacgagagcaccatccaagagggtcaatctcaaacgacgccgtttgctctctcgtgcgattcggcgtccttaagggagcacgacatagcgttgcagctaccagagctgaagaagctgcttcaggttctgagggagaagagagagtgcggtgaagaaggttgtgcccccgggaacgtgttcttggtgggaactggacccggggaccctgagcttcttactctcaaggctatgagagtcatcaagagcgctgatttgttgctctatgacaggatggtgtccaatgatgtgctggatttggatggccctgatgctaggcttctctatgtgggcaagactgctggctatcatagcagaacacaggaggagatacatgagcttcttttgagttttgcagaagctgcggcaactgttgtgagacttaaaggggtgatccattggtgtt

SEQ ID NO: 216095 - DNA, 532 bp, Glycine max
caactacaaaggttgctgtaggagataagatattgaagtagtgctaagtgcctaacacctgcagtgaacaatggcctctgcatcagcatctcttctcaagtcttcacttgttcttgacaagtctgagtgggtgaagggacaaacacttcgccaaccttctgctgcatcagttgtgagatgcaaccccaccaccccatcaggcctcacaatcagagctggttcctatgctgatgagctcgttaagaccgcgaaaacagtggcttcaccagggaggggtattttggccatggatgagtccaatgctacctgtgggaagcgtttggcttcaattgggctagagaacactgaagctaaccgccaggcgtaccgtaccctccttgtgacagttccaggacttggacagtacatctctggtgccattctctttgaggaaactctctaccaatccacaactgatggcaggaagattgttgacgtgctcctccagcaaaacattgtttctcgtattaaagtcgacaagggtttggtaccc

SEQ ID NO: 216096 - DNA, 395 bp, Glycine max
ggatggccgaaattcaaccatgttattttgagacaatcaatcaagtccacaactcacagcaaaaaggtttataagctgtaaaggtccatgtaaccataaacaaaaatagtctccaagactttaaaaacattacattttaaacaaattagttttttttcactttattcctcggaaaacacctactacaactgctggtgttgctgctgcctaacatgtatcatattcactacaaacattttagtgggagtagcctttgacgaacaactcctttttggcttcctcagattcaccctcaccggtgtacttcccaagctgggcgagcgagttggacttggcacggaaaaaaagtgcattttgtgccgccttcacattctctgggcggcctccccatgttt

SEQ ID NO: 216097 - DNA, 503 bp, Glycine max
acaagttaattgaagaaattcaattagtttaatcaaattccccaaccccctctctttttattagatcactacgtattatatgcaataaaatattatatggcagaaatattctaagctggaaaaaatggaaactaagatataggatttttcaggaagggggtaaaaaagattattttattgatatttttagaatatttctatttcgacacaaacaagaaggaataggaatcggactctaggaaaagacaaaaaatcccccctagagtaccttttccatatactaattgattttgtttcaaagtatctatctatatagatatctattttatgtttagtatcgaatccaattttattgtattttacaatcgaaatctctatagtagaactctctattatagaaaaatgaaatctgaaaaaaacagtgtcataaccataatattcgaatttattgcggggctgaaagaacaaagacaaatagacttcctgacaatatccatactcga

SEQ ID NO: 216098 - DNA, 458 bp, Glycine max
aaggggacactgtaactcaaaattatagaggaagacggtccaatttgaaaaatttagtaagagcatctcaaacttaacatctgctctttgcacctaagacattgagaatgcttagaatgttacacgcaaggtccatcacaacttgtagcacttggattagtacaacaaccttcacgaacagaaatatttacttgccaagtttgctttgcctccaattcaagactggaagaaagttcccctctgaatagcatcctcgttagcatttgcaagagcagcctcgttcaagtacttgacagccaattggactctcttgacattctcttgttcttggacaagcatgttaccatacagccagagcttcttcagagggatcttgggctgctcaaagggtggaggtccatcttttgagtgcacaagcttgttcccaacactgtgaacaccaacaccagaaatccact

SEQ ID NO: 216099 - DNA, 521 bp, Glycine max
acaagttaattgaagaaattcaattcgttaaattaaatggcccagccccctctttttttatttgttcactacgtattatatgcagtaaaatattatatggcagaaatattctaagttggaaaaaatagaaactaagatataggatttttcaggaaggggttaaaaaagattattttattgatatttttagaatatttctatttcgacacaaacaagaaggaataggaatcggactctaggaaaagacaaaaaatcccccctagagtaccttttccatattttaattgattttgtcacaaattatctatctatatagatatctattttatgtttagtgacgagtccaattttattgtattttacaatcgaaatttttataatagaactctctattatagaaaaatgaaatctgaaaaaaacagtgtcataaccataatattcgaatttattgcggggttgaaaaaacaaagtaaattgtcttcctgacatattcattactcagtttatttgtattacgttac

SEQ ID NO: 216100 - DNA, 689 bp, Glycine max
  unsure (1)..(689): unsure at all n locations
cgccgtccccccccccccccccccctagggtagaagagnntantagtnggaggnagnnntttttttttttttttttttttttttttttttttttttttttttttttttttttcttccccccccccccccccccccccccccccccccccccccccccccccccccccccccccccccccaccccccccccccccccccccccccccacccccccccccccccccccccccccccccccccccaaaacacccccccccccccccccccccccccccccccccccccccccccccccccccccccccccaccccccccccccccccccccccccccccccccccccccccccctccccccccccccccccccacccccaacccccccccccccccccccccccccccccccccccggacaagcgccggggcccacccccccacccccccgccgggccccccccccccccccccccgccccccccccccccccccccccccccccccaaccccccccccccacccccccccgccccccccccccctcccccccccccccccccgccgccccccccccccccccccacccccccccctcccccacggcggccccccccccccccccccccccccccccccacccaccccccccccccccccccccccccccccccccccccccgccccccccc

SEQ ID NO: 216101 - DNA, 480 bp, Glycine max
ttgtttttttttttttttttttttttttttttttttttttttttttttttttttttttttttttttttttttttttttttgttttttttttggtgggggggaaacaaattgggggtatacaggggaaattcttcccccctttttaaacagggggaaaccaagggcccaggccccctttaaaaaaaaacgggggggcctttttgggatcttgaaaaaacccccctcttcttttagaagaaaaaaccctctccttgtgggggacgaaccaatctttgggtgggggggggggaggggaggacctccccccccctgtttatgtttgggaaaggggggggcacccccccccggggggggggaccctcccctggggtgggcgggggaaaaatggaaaaaattttccaagaagggaaaagttttttgtgggcccccagggggggatataaaaaaaattttttttttccagggggggctctccggggg

SEQ ID NO: 216102 - DNA, 297 bp, Glycine max
  unsure (1)..(297): unsure at all n locations
ccccacccccccccccccccccccccccgaataattnngggtnangagntattagtnggnggnngnnnttttttttttttttttgaaaaaataatatgatgaggtaaatgaccccccacccctccctcccgccccccctacccccccccccccgccccccccccctgaccgctccccccccccccccccccaccccccaccccccccctctctccccctcccccccccccgcccccccccccccaccccccccccccccccgccccccccccccccccccccccgcccccccccccc

SEQ ID NO: 216103 - DNA, 595 bp, Glycine max
  unsure (1)..(595): unsure at all n locations
cagatgcaaccaaaccagattgcccaatcatgtatgccagcagtggcttttttactatgacaggctattcttcaaaggagattattggaaggaactgtcgatttcttcaggggcctgagaccgacaagaatgaagtggccaaaattcgggatgcaactagaaatggaagaagttattgtggcagacttttaaactacaagaaagatggaactccattctggaatcttctcactatcacccccatcaaagatgaccatggcaatactatcaaattcattggaatgcaggttgaagtgagcaagtatacagaaggcgtgaatgaaaaggcattacgaccaaatggattacctaagtcattaattcgatatgatgctcgtcaaaaggagaaagctatgggttctatcactgaggttgtccaaaccgttaaagacccaaaatcaattattaatgataggaatggtgatactgctgccaagcctgaagaacaagagaagttcaattntgattttgtttcgccaagtctgctgatatcgggaatacaaacacacctggtagacaagcttctccactttacatccaacgcatgagttctagt

SEQ ID NO: 216104 - DNA, 551 bp, Glycine max
cttcagatctgtttcttcatcggttgttcaagtaaatggcctttgtcaccactgctgaagtgtgtgatgcgaacccacagttaattttgagtggggagcttcgtgcccttcagccagtttttcagatttatggccgtcgacaggttttctctggacctatagttaccttgaaggtgtttgaagacaatgttttggttcgtgagttccttgaagagaaaggcaatggaagagttctagttgttgatggaggcgcgagtttacgctgcgctatattgggtggcaaccctgtggtacaagctcaaaacaatggatgggcaggtattattgtgaatggatgtataagagatgtggatgagatcaatggttgtgatattggagtgagagcccttgcttcccatcccatgaaagccaataagaaaggcatgggagagaagcacgtccccataaatattgctgggacaaggatcagtgatggggaatggctctatgcagacactgatggaattctgatctctcgaacagagctgtctgtttgatttcaattcatgaat

SEQ ID NO: 216105 - DNA, 331 bp, Glycine max
acaaaaaaacaaaaaaaccttgttttccttgccggggggggcgggattttaaacatgtcccaatttaattaaaaaaaaccgcggggataaaacccctggttttttggccccccaaaaaattaaaatctttgggggctttttttctttttggaaaggaaaaaaagaaaccggggagtgttccccccctcccactttaagcaccaaagttctgctttcgtggcactgtcccattctggccataccttccacaatactgcctatataaatttttgcagcaaatgggctagtgcatgattcttgaaactgttctttattttctcccaaacccatt

SEQ ID NO: 216106 - DNA, 583 bp, Glycine max
aacattgcacacattgtaaaatgtagacaatgtaactcaaaattatacaggataacaatccaatatgaacaagataactcattttattatctcaactcttagcttctctgcaagtggagaatgcttaggttctcagggtgtgtataagcaggatccatcatcacttcttgcagttgggtcgaagtttgaggcatttggatcagtacaaccttcaggaacgggaatgattacttgctgagctgctttgccatagaaagatcctctgttgatggaatcttgattagcatcaccaagagcagcctctttcaagtacttgtctgccaagagtactctcttcacattctcttgttcttggacaagcatgttaccatactccaagagcttgctcaaaggcatcttacggtggataaaggttggaggtccttccttggagttcacaagcttgttcccaatgaagtcaacaccaacaacagaaatgcactttctgacctcatcatcatatactctagccctgagtgcaccaaagaaatcaatagattggtccggggaggtgtcaacaagcttgacaatgtcatccttagga

SEQ ID NO: 216107 - DNA, 630 bp, Glycine max
  unsure (1)..(630): unsure at all n locations
cgcggcgccagtcacngtagacagactcgaccggaaatgatcgccggctcgacgagcgtactacgtcggcggccgaccttgactgactagttttggtgtggtgtttgttgattaacattacattgcctgccgactagtttacggtatcagcaatagcaagttggcttacacacgcacagatctgatctatctgaagctgaaaacgccgacgcccgacggtgatgatgaagatggggttctcaccttcacgatgctccttcttcctattcctcctcctcctagtggcgctcttcccctcgtcgctctccgagatccggttcttcgagatccgaaacgacgatcgctccatcgttcccttcgatcagattggattcacccacaagggtcgccttgagctcagcgtttgcaaaatatcactctccaattccaaattggacctctacaaggtgggattcttcctctgcaccctggattcctggcttcatgtcttccagcaactggaggatggcgagattcggtgcgcccttcaatccgatctgatcaagtccggctacacctttcattctctcaacggcaaggactctttcagcacgctctacaaagaagaaaccggcgccgatcagtacaacc

SEQ ID NO: 216108 - DNA, 486 bp, Glycine max
tttttcaaccgctttctttgccatctcacagagtttggttgccctttctcttctctctttgctttcttcttcatcattgtccatcaccatgcatattgccctctcaatgttcttcttcttcaccaacacaccagttttctcttcctctccccaattcattggaacttctgccccaacactcacaccaatcttcaacacttgagtaacgagcttttcatttaaaaattgatcagcaaatagaggccaggtaaccattggcactccaacacttatcccttcaagtgttgaattccaaccacaatgtgttaagaatcctccaatggcagggtgcgataatattagtacctgtggagcccaacctcgaattataaggcctctccctttggtcctttcctcaaacccttcttcactgatccatttttccaactcttggtacttacttccctccctaatgacccatacaaatggttttttactatcttctat

SEQ ID NO: 216109 - DNA, 320 bp, Glycine max
  unsure (1)..(320): unsure at all n locations
cggcgctcccccccccccccccccccccttgggtngtgagntantagtnggaggnngnnnttttttttttttttttttttttttttttttttttttaataattaaaantgcgccccaccccccactcaaagccgctctctcctctgcaacacccccggcccccctcccgcccccccccaccggccgccccccccccccccccccccccgcccccccccccccccccccccccccgcccccgccacccctcctccccccctcccacccccccccccccccccccccccccccccccccccccccccccccccacccccccc

SEQ ID NO: 216110 - DNA, 195 bp, Glycine max
ttgtttttttttttttttttttttttttttttttttttttttttttttttattttttttttttttcttttttggtttttttttttctgccggaaccctttgaaatccccaactgaggggatccacctaaaacaaaatctgaccttctaccaaaaaagggggggtcccctgttttaacccttaaattctaaaagaa

SEQ ID NO: 216111 - DNA, 521 bp, Glycine max
aaatacataaagcgacattttataagtgcagataataaaattaccggaagaagaagaagaaaaataaaagctagccactagtagagatggtggttttgttggtccacttgagaaccaaattggagatatgggcggtggaggaaccatttggagagagagccttagccgcagcctccttgagatccttgattcggtaacgaagcttcttcccttcatggccttccatgaggcacttgacaacgctggctattttctggctctggacaagtccagtgtgctcggcaactttgggcctcagcgccaccttgactttatgcatgagcataaacgcgttggtcctctgctccgcgaacagaggccaggctattaaaggcacgccgttcaccacgctctgcagtatagagttccagccgcaatggctgaagaatgctctccgtgattgatgggccacaacctgtggctgcggagcccatgacttaaccaaaaagccccttccttttgttctcttcacgaacccttct

SEQ ID NO: 216112 - DNA, 455 bp, Glycine max
cgattaaaaatgaaaaataaagaacaattcaaaacattaacacagctcttattgtaagctgtatcaaaaccttttcccaattaacacagctttgtttgacaatttttgctatggccgaactgtaagatgatgttaacaatttttgctacaacaggattgtaataactaggttgctccatgtaatgtaactccacaacaaagcttatgcatggaattaatcaactgctactggctgcatgttttcagcttcttgacgaagctcttggaacagaacagatgataggtatcgttcaccgaagcttggatgaacagtcacaataaggttgcctttgttctcaggcagctgagccaatctgagtgctgcaactgtgttagctccagatgatatccctaccatgagtcctttcttcaatgccaacaccctagccatgttaactgcatcttcgctgctaact

SEQ ID NO: 216113 - DNA, 600 bp, Glycine max
tggtcgtccttttttattattttgacaagattagcttttattaaacatgtttctgggaaaggaagttctaatagatgacagggttagactttaagcatcagatgccccctacaagactcctcaatgactgtatgcgcaatcatattaatcagtttgttgttccgttttctaggggtggcaattcaacatcttggatagcttcaagcctaacttttccacccatacatttctggaagaacttcttaccaacctctcttacaaactcccttgtctcatcctcattggatacaattacaatctgtaaaaattgaaaacctgtgattaacccacgtgcatcaatatttttatatgaaatattctgcagatcaataattccaatcaacttttcagttcctatctcccttcctttgaaagcacttgcaattgtcttgtccagtagatatacaacaaatttcttgaattgaatctgatccttggaagcaaaatgtctgttggtttgaacaatcatgacagggaatttatcctgagacaacccctgcaagaagatcttccttgcttccaattcatccggaatttcagattctgaaatgaatccatttg

SEQ ID NO: 216114 - DNA, 586 bp, Glycine max
  unsure (1)..(586): unsure at all n locations
cacaccccccccccccccctcccgataatttagggtagtgaggtagtagtnggaggaggnggttttttttttttttttttttttttttttttttttttttttttttttgaaccggccaccgcccccccttctccccccgccccccaccccccccccccccccccccccccccccccccccccccccccccccccccgcccccccaccccccccccccccccccccccccccacacccccccccccccccccacccccccccccccccccccccccccccccccccccccccccccccccccccccccaccccccccccccccccccccccccccccaggcccccccccccccccccccccccccccacaccccccccccccccccccacacggccacacggccaccccccccccccccccccaccccccacccccccccccggcgcgccgccgcccccccccgccccccgccacccccccccacctcccgccccccccccccacccccccccccccccccccccgccccccccccccccccccccccccccccccccccctcccccccgcctcccccccccccccc

SEQ ID NO: 216115 - DNA, 531 bp, Glycine max
ctgcactccacttgtcaagagcttctagcattgtgatgatgattgcatatgtagtctacattgactttcaactgtggacacacaggcagctatttgaagccgaaaatgagggtgaggatggtgaggacggtgaagaacaacaagctgagattggattatggagtggcattgcttggatggtcgggatgactgtgcttattgatgagctgcctgaatatgtggtggatacaattgaggatgcatcagattcgtggggtttgcctgtgagctttctcagcataatcttgctaccaataggtggaaatgcagctgaacatgcaggagcaatcatatacgctttcaagaacaagctggacattccattgggtgttgcattgggtgcagcaactcatattgccatgtgagaggtcccattatgagtaatcgttgctaggataatgggtatcgatatggacctgcacttcaacctcctagagacaggttcgctagcattgccataatcagaacaggctgcactttacaggatgggac

SEQ ID NO: 216116 - DNA, 530 bp, Glycine max
gcgccatgatatgtatacgaactcgaccgaatgcacgcgggcgcgagctgctaactcggctcgaggcggcctgcagcctatgctttcgcttttgccatctcgagtccaattggagtggccattggaataatattggatgccacacctcagggtcctgtgccggattgcatctttgccatatcaatgggtcaggcttgaggagcatccatctatgtatcagtaaaccatctgttggcaactgggtacgtgccccacataccatcaaaggttgactcagcctatatcaagtttctagccgtgatgcagggtgtggcagtgatagcggctgagacgatttgcgacacctcaggccggtccaagatagcttctctttacagcatgggcagaaactttgtctttctattttttccaactatttgataatgcatccgttcattacatgacaagtcgtggtagatcctaggtcaggacctggattgggatattctcgtacatatgacttcgccatcatttataggtagaaaagatga

SEQ ID NO: 216117 - DNA, 558 bp, Glycine max
gtcgtgtgcagcctatgcttttgcttttgccatctcgagtccaattggtgtggccattggaattatattggatgccacaactcagggtcatgtggcggattggatctttgccatatcaatgggtctggcttgtggagtatttatctatgtatcagtaaaccatctgttggcaaaagggtacatgccccacataccaacaaaggttgactcagcctatttcaagtttcttgccgtgttgttgggtgtgggagtgatagcggttgtgatgatttgggacacctaaggttgttccaagataacttctctttacagcatttgcagaatctttttctttttcttttttttatctttttgataatgaatacgtacattacagaaaaagttgtggtagttcctaggtcagatttggtatttggatattcttgtcagaaatgatttcgtcaatcatttataaggtagaaaagatgacagaaatttgcctcaaatgatagaaaagatgagcatgtattgagaattaagaggacttataaaagtcttgggaagaaggtagttcacatg

SEQ ID NO: 216118 - DNA, 391 bp, Glycine max
acgtggaatgaggcttataataccctatattgcttttcttcacatacgctggcagataaagtttcggaactgcagtgccctctaaacacagtcatcaaaacaccaacactataattattaaaagacattttttactcagactgcccaaacacagaaaatcctacatttagattggtgaaccctccatctaacacaagattgtgaccactaacacaccattgactaagaaatgtttcaatcttgatgaagaccgaaatggtgagatttattccaacctaaaaggtgttcatcttgtgccaaacgatgtggccgaagctgctctatatttggcaggtgatgagtcaaagtatgttagtggtcacaatcttgtgttagattggtgaaccctcca

SEQ ID NO: 216119 - DNA, 501 bp, Glycine max
gctcgcaatctccagaggttctgaataaaaactgctttgtcagcaaaaaaagtgtgcagaaaatcatgatgatgctgtgtactaatgatgtagaacaaactttacaacttcataaaatgaaatcacaattccaacgggggggcctgctcgaccaactcgtggaccaacacccgtaaacaatcctttcaaacctccatctctccacacctccatcagtgtctgtcttgtagtcattttcaatgccctaacaggatccctctctatctgccttcgagtttttgcaacatctagtggacatgtggctccagctgctaaagttcctgcaacaaacccagctccaaaatttgccccaagaacactcaatgcattggcatcatcacctccaatcaaaccaagaagttttcttctagttggttcaagtgttgaccaacatatggcagagaagggtacatcacgggcaagttgagcccccatgcccgtccacaaaacacgataaccttg

SEQ ID NO: 216120 - DNA, 535 bp, Glycine max
acgccactctagaacatcattatttatttatttatttatttatttatagctcttaacacatataattccctggatacaacatgtatactggtcatattcaactctagagagctttatctgatatgatcatccttaacatattcaaagatagctaaatacttaactgtataatatatcacacaaacgtagagtgacatatatagagtaaataataaatataagtttaatttatacacacaaactatgagtatataacatcgttatccaaatattcaacaagaatttactttattaccgcatcatgttaaaatgttgcgataaagtggtgaaatcctattgaatgcttgtgtcaagatgctttgtaggatcaaagtgtgtataaattaaactgtttatctatatatatatatatatcccacactttaattataagaaggcttaattaattaacaagttggaaagggaatcccacaagaagcaacggtttttcgggcattaggagagttaacatactgcttcaagctagcgtttttga

SEQ ID NO: 216121 - DNA, 590 bp, Glycine max
gaaaagaatcacaatatcaatatcaatatggtacatacatcgatcccatttgtgcatctatatatataaatagcccgtgtgagaaattaaaattgaaaaaaaaatgaaactctatcctagcgaattcacctgaataaaacacatcgtattttttttctttagttatttataataattcttctaaatgtaagaacaaggaagccttggtgtcgccgttatttccacttatgaaactgcggttgttcctgttccttaatccttttgaacactccttcgatggcaacatcgaaagcatcattcacaccctctaacccttgtttcgtgttcgcgtaaaccaacctcggaatgtactcaatcactttctccctcattctcctcacctactccttggtgaacctctcgagcacgtttttcacggttaaggtcccattcttcaccgcgttacggtctatgaaaaccgagtaactctccggttcacccggtaagaaccactcgtactgcaaatacgcggttcgccgtcagaaaaaaaccggaatcgaaccggccaccatgcagtcgaaaatggacccgcgcgtgaagctgtcccccct

SEQ ID NO: 216122 - DNA, 379 bp, Glycine max
  unsure (1)..(379): unsure at all n locations
cgacacccccccccccccccccccccccccttgggtngtgagntantagtnggnggnngnnnttttttttttttttttttttttttttttttttttttttgattttggagaaaagcccttcccacttcaaatcgcaacccctctacaccgcttcacatcccatcggaaagcccaacacctcacacacccccccctcccccctccccccccccccccccccccccgcttccccccccccgcatgcgaccccccccccccccccctccccgcccccccccccccccccccccctgccccgcccccccccaccccccccccccccggcacaaccccccgccccccccccacacttccccccccccgcccccccccccccccc

SEQ ID NO: 216123 - DNA, 567 bp, Glycine max
ctagccttcttcaagtgttcttcctctttaatctgtctatagaatacttacccttttgtcaagactgacctctcgatccttctcaaaagaagaaaattaaaatggcaactgaaaagcttagaggatgtgcatagtattgtgcaagctctaaaccctacttggccatgatctctatacaattcggctatgctggcatgaacattatcactaaggtttccctcaaccaaggcatgagccactatgtccttgtggtctatcgccacgcttttgccaccgctgacatcgctccttttgcctttattattgaaaggttcatagaataaacataaaccttagtgtcagcagcttgccattacactctctctttgttttgttactataaagcttagcaaattaatgcttactcattgcttcaattttccaggacaggtcaaccgaagataacattcccagttgtcatgcaaattcttatcctagctcttcttgggcctgagagtgatcaaaacttatactatgctgggttgaagctcacatccacaaccctctcctgtgcaatgagcaacatgc

SEQ ID NO: 216124 - DNA, 296 bp, Glycine max
  unsure (1)..(296): unsure at all n locations
cccccccccccccccccccccccctccccgaataattnngggtnaagagntattagtnggnggnagnnntttttttttttttttaataataaaagntttatgattgtntttcctaatccgactcgcccgcccgcacctcccaccccctccaccctatactcgctcaaccgccccacccacccacccccccccctccccccccccccccccacccgcccccccggacacccccgcccccccccgcccccccccccctccccccccccccccccccccccccccccccccaccccccc

SEQ ID NO: 216125 - DNA, 507 bp, Glycine max
gtaacataacatcaaggtgcagagagaggaattgaagctagcatgggaagaggtaaggtggttctggagagaatacataataagatcaatcgccaagtaaccttctcaaagcgcagaaatggtttgctgaagaaagccttcgagctatctgtgctatgcgatgctgaaatcgctcttatcatcttctccagccgaggcaagctttttcaatacagtcgcactgacattaacagaatcattgatcagtattgtcaatgctgcttcaacatgtctcagactggcgacgtaactgaacatcaatcggagcagtgcttataccaggagcttttgatattaagagtcaagcatgaatcactccagcggactcaaaggaatcttctgggagaagaactagagccacttagcatgaaagaattgcatagtttagagaaacagctggatagaacgcttggacaagctcggaagcacctaacgcagaagctgatatcacgaattgacgaattacat

SEQ ID NO: 216126 - DNA, 334 bp, Glycine max
  unsure (1)..(334): unsure at all n locations
cgccccccccccccccccccccccgaataattttgggtagngaggtattagtnggnggnagnnntttttttttttttttaaaaatattaatattatttttttaaaacccccccccatcacacataccctaaccaagcccccctggcccccccactataccctgacccccgagagccccccccccctccccccccgccccccccccccccccccccccactacccccccccctctccccccaccccccccgcccccccccccccccccccccccccccccccccccccccctcccccaccccccccccccccccccccgcccccccccccccccc

SEQ ID NO: 216127 - DNA, 467 bp, Glycine max
gctcgcaatctccagaggttctgaataaaaactgctttgtcagcaaaaaaagtgtgcagaaaatcatgatgatgctgtgtactaatgatgtagaacaaactttacaacttcataaaatgaaatcacaattccaacggaggggcctgctcgaccaacttgtggaccaacacccgtaaacaatcctttcaaacctccatttttccacacctccatcagtgtctgtcttgtagtcattttcaatgccctaacaggatccctctctatctgccttcgagtttttgcaacatctagtggacatgtggctccagctgctaaagttcctgcaacaaacccagctccaaaatttgccccaagaacactcaatgcattggcatcatcacctccaatcaaaccaagaagttttcttctagttggttcaagtgttgaccaacatatggcaaagaagggtccatcacgggcaagttgag

SEQ ID NO: 216128 - DNA, 325 bp, Glycine max
  unsure (1)..(325): unsure at all n locations
ccgcgcccccccccccccccccccccttgggtngngagntantagtnggnggnngnnntttttttttttttttttaaaggaaagaatttnaatttaatngttttaaaaacagccacccccgccgcgacacgccccccccttccgctcacaaaaccccccctcccgcccctccgctcccgcacacccccccccccccgcccccccccccccccccccctcacccccccccccccccccctccccccccccccccccccccccccccccccccccccccccccccccccccccccccccgccccccccccccccccccccccccccc

SEQ ID NO: 216129 - DNA, 534 bp, Glycine max
  unsure (1)..(534): unsure at all n locations
cgggcgttcanatcgcatacagaacccccgaataattccggcgtcggctgcgtactaggctcgaggcagccacgaacaccagataacaccaccgaaacacctcacggcctggtgcctatatcgacaacacccacattatgtggcggccaacagcagcagaggcgatcgcgtcactgctcacattaccctcagctctcgccgagatcagcctaagctcccagaagtctttcgctcgcactgagaacctgtgtgcgtccgacccctacctgtccatctacggagacaggcccgacgatggccctccttgtttcaactgtaaccttgacgacttcacgtgtgttcagcttgccaactgtaccaaaagcagcggcaagtgctcctgtcctactggatttggtggagaggactgcagtcagccactctgtggatctctccccgaaggaaaggacaggctatcaaggcaagggaaagagtgcgaatgacatgaatgatgggagggaataaatcgcaatgttagcacgacggacaacgcat

SEQ ID NO: 216130 - DNA, 570 bp, Glycine max
  unsure (1)..(570): unsure at all n locations
cagaaaaacttcatatatattctctcacatctattccaagaaacctacatttacacatgaacatcctacatcactcttcaacacccacaagtcaatagcttcccctcatctcaaacaacacaattatcttccccactcatctcctctccacaagcaagaaatgcaacgccgcaaatccaagcacgaaaaacgcacccgacacaactcccaaccccgcaacatcacgccacagcgccaacacatcaaaaccgaaactgctcaggatcgcactgccgggcacttcgatgttgaggccgtacttcttgtcgacgagagacaggtagcgcacttcattgacgatcaggccttcgaagccgaagtggaagatggagagcgattgcaaccacagcagacccttagggatggtctcgtggttgagcaggaagccgccaaagagcagggagaagagcatgacgagcacgccgagcaagttggctacgccctggttgcggacgacgatcccgaggaacaggcagatcatcgccgcccgtaggttgaagagcacgaggaggagcatgantttgccgaact

SEQ ID NO: 216131 - DNA, 317 bp, Glycine max
  unsure (1)..(317): unsure at all n locations
cggcgccccccccccccccccccccgaataattttgggtngagaggtattagtnggnggnngnnnttttttttttttttttttttaagtagtgaaaatnataaattcacctcatccccacctactcacgacccggcatccatattccaacaccgccgctcaccccgccccgaaaacccccccccctcccccccccccccaccctcccccccccccccctcctccgggcatcgctcccccccctcctccggcccgcccccccctcccccccccccctccccccccccccccccccgcccccccccccccccccccccc

SEQ ID NO: 216132 - DNA, 342 bp, Glycine max
  unsure (1)..(342): unsure at all n locations
cgcgccaccccccccccccccccccgataattttgggtagngaggtattagtnggnggnngnnnttttttttttttttttttttttgaaagttaaaagagagtggcccaatgccatcaatcccggcctatcttgcacctgcacactcgccctcggccactcatcccaccaaccccacccccccccctccccccccgcccaccaccccccccccccccgcgggccgcctccaccccctcccctgccccccccccccccccccccccccccccccccgcccccccccccccccccccccccccccaccagcccccccacccccccccgggacccctcccccccc

SEQ ID NO: 216133 - DNA, 477 bp, Glycine max
ctccttgaatttgataaaataattattgattcttacagtgtacaagtcagagcgtattttatagtacaaacataattctgtgacttgcgtgtatgattatgcaacatataattcggcttttccatcaatgaatagactcatgaactcttcaccatccacagtttctttttctatgagaagttgagcaagcttgtgaaggatatcaatgtgagttgagataatatgtgttgccctagaatatgctctctctaccagttccctcacttccgcatccactacatccgcagttgccatggagtaatccttttgcgatgacatctgttgacccaagaatggatttccaccaggtccaccaatggcaacttgtccaatttttttgctgaatccaaatcttttaaccatcttgctttgcacttcgtgaaacttgcatgaagtcgtttgatgctccggtggtgacatttttctggccaaaaataa

SEQ ID NO: 216134 - DNA, 458 bp, Glycine max
ctccttgaatttgataaaataattattgattcttacagtgtacaagtcagagcgtattttatagtacaaacataattctgtgacttgcgtgtatgattatgcaacatataattcggcttttccatcaatgaatagactcatgaactcttcaccatccacagtttctttttctatgagaagttgagcaagcttgtgaaggatatcaatgtgagttgagataatatgtgttgccctagaatatgctctctctaccagttccctcacttccgcatccactacatccgcagttgccatggagtaatccttttgcgatgacatctgttgacccaagaatggatttccaccaggtccaccaatggcaacttgtccaatttttttgctgaatccaaatctctcaaccatctgccttgccactcgtgaaacttgcatgaagtcgtttgatgctccggtggtgacat

SEQ ID NO: 216135 - DNA, 520 bp, Glycine max
aaaaaatccaacccaaaatttgaacacaaattatagtaaaagcaaaccaagccaaaatttgaacacaaattataaagaaaaagcaaaccaagccaaaaattgaacactacaaatagaaagttgacatttaataaaccaaagcaacacaacgcagcaaagtcctgaaactcgctgcgcttaacaaaaatgtaatcaggggttccgacaaacacaacacattaaaacacagataaataaaagcaattttgccaccgtcgatcaagaacccagttctgggaacaacagttgcgagatgatggtggagacttcaaactttgtccgaaaaacaagctacctagaaaagaagacacaagagtacagaaaagaaaccaacatttattgtaaccaacatcccctgatgaaccagcccgcacgattcacttcttcttctgggcagccttggtgaccttggctccggtaggatccttcttctcaacgttcttgatgactcccacagcaacagtttgacgcatgtccctaa

SEQ ID NO: 216136 - DNA, 642 bp, Glycine max
  unsure (1)..(642): unsure at all n locations
gtgctccttgtccacaattgcatgtccaaatatacactataagtaaaatatgtttaacagtaggagtaaaacaaattacaaaacacagaaaaacaagttttccttgttctccttgcccacatggccaagagtctgaacaagtaagaaatataagaaattatgaaggcaaaaatagcagaatgattcaatggccccgtttaatcccttcatttattggagacatttattccaaattccaatccaacacagaaattggtgaattttccccaagttccactctcggcagtatagttctgcaaaagtagcactttcacattctggccttagcaaccacaatactgcctctatcaatttctacagctcctggcctagtccatgattctttaaactgctcttcagttactccttttcccattgcagcagttgaagccacacctccctggacagtcttgagatacctatcatagtagttagcaccagcccatttctggtgagcaagtgtgtcaaccccattgttcctctcctctctctgaatcctctccacataagctagcattcccctattgcanaatcccttgcanatgtngaagtatgagtgcattagatgcagccctccactgtgatgactgcacacatacccaa

SEQ ID NO: 216137 - DNA, 637 bp, Glycine max
  unsure (1)..(637): unsure at all n locations
cgnccccccccccccccccccccctcccccccccccgaattaattnttgggtngaagagggtantagtnggnggnngnnnttttttttttttttttttttttttttttttttttttttttttttcccccccccccccccccacccccccccaccgccccccccctcccccggcccccggcccccccccccccccccccccccccccccccccccccccccccgcccccccccccccgcccccccccccccccaaccccccccccccccccccccccccccccccccccccccccccccccccccccccccccccccccccccccctcccccccccccccccccccctcccccccccccccccccccccccccccccccccccccccccccacccccaaccccccccccccgccccccccccccccccccccccgccccgcctctccgccacacacaaagacccctcccccccccccaaaccccccccccccgcgccccccccccccccacccccccccccccccccccaccccccccccccccaccccccccgcaccccccccccccccccccgcctcccccccccgcccccgcccccccctcccccccccccccgcccccccccccaccccccccc

SEQ ID NO: 216138 - DNA, 652 bp, Glycine max
  unsure (1)..(652): unsure at all n locations
cccacacccccccccccctccccccccccccccgaattaattntagggtggtgagntattagtaggnggnaganntttttttttttttttttttttttttttttttttgttttttatttttgttccccgcccccccccctccccccccccccccgcccccccccccccccccccccccccaccaaacccccacaacccccccccccccccccccccccccccccccccccccccccccccccccccccaccacccccccccccccccccccccccccccccccccccccccccccccccccccccccccccccccccccccccccccccccccccccccccccccccccccccccccccccccccccccccccctcccccccccccccccccccccccccccccccccccccccccccgcccccccacaccccggcccccccctccccccccccccccccccccccccccccccccccccccgccccccccccacacccccccccccccccggccccgcccccccccccccccccccccccaacccccccccccccccccccccggcgccccccccccccccccccccaacccaacaaccccccccctccccccttccccccccgcccccccccgccccccccccccccccc

SEQ ID NO: 216139 - DNA, 542 bp, Glycine max
gtgattatagactatctttatataataatataaataagaataaaaaaataaaaaaaaaaaaagaatctatataaatataaaaataatatatataaggtacaaatagtaaatcgaggtacccattttatgataaactttccttccatttttgttcctctagtaggcctagtatttccggcaattgcaatggcttctttatttctttatgttcaaaaaaacaagattttttagatacagaaaacaaagtaaaattctggggttttttattccccaattataatactaaattcaaaaaaaaggagagtaatgagtataatctttcgctcagacgatgtactgatatattctatggcggaggttcgaagaacaagcaatttattttgggccgttttcactttgttaggttcattggggttattgttcgttgcaatttccagttatcttggtatggatttgttctttatttctgagaaaattagtgatttttcttttattccggactttatttattttccatttattccacaaggggccacgatggc

SEQ ID NO: 216140 - DNA, 505 bp, Glycine max
attgaagatatcaaaaccaccacctatatcccaaaaaataatcgacccaaaataaaaactactaaagagacccgcgattccataaaaagccatcgtggccccttgtggaataaatggaaaataaataaagtccggaataaaagaaaaatcactaattttctcagaaataaagaacaaatccataccaagataactggaaatttgccacgaacaataaccccaatgaacctaacaaagtgaaaacggcccaaaataaattgcttgttcttcgaacctccgccatagaatatatcagtacatcgtctgagcgaaagattatactcattactctccttttttttgaatttagtattataattggggaataaaaaaccccagaattttactttgttttctgtatctaaaaaatcttgtttttttgaacataaagaaataaagaagccattgcaattgccggaaatactaggcctactagaggaacaaaaatggaaggaaagtttatcat

SEQ ID NO: 216141 - DNA, 494 bp, Glycine max
tgattttccaaggtaaaagagcccccgaccaatgatataaatactaccgttgctttagctttacttacatcaattgcatatttctatgcgggtctttcaaaaaaaggattagcttattttaataaatacatccaaccaaccccaatccttttaccgattaacatcttagaagatttcacaaaacccttatctcttagttttcgacttttcggaaatatattagctgatgaattagtagttgttgttcttgtttctttagtacctttagtagttcctatacctgtcatgttccttggattattcacaagcggtattcaagctctcatttttgctactttagctgcggcttatataggtgaatccatggaaggccatcattgaccagttttctacaaaatagtcctttttcgtttagcttgccgcacatatattgcggctcaatataatctacttagcaaacatctatatctatctacctatatctatatagatat

SEQ ID NO: 216142 - DNA, 657 bp, Glycine max
  unsure (1)..(657): unsure at all n locations
cccaccccccccccccccccccccgnanggnaagaataattttgggtagaagagntaantagtgggaggnaggggttttttttttttttttttttttttttttttttttttttcccccccccccccccctcttccccccccccctccggcctccccctcccccccccccctccccccccccccccccccccccccccccccccccctccccccccccccccccccccccccccccccccaccccccccccccccccccccccccccccccccccccccccccccccccccccccccccccccccccccccccccccccccccccccccccccccccccccccccccccccccccccgcccccacccccaccccaacacggcccccctccccccccaccaccccccccccccccgccgcccccccccccccggccccccccccccccccccccccccccccccccccccccccaccccccccccccccccccccaccccccccccgcccccccaccccccccccccccccccccccccccccccccccccccccccccccccgcccccccccccccccacccccccccccccccccccccccccccccccccccccccccccccccccccccccacacccccgccccccccccccccc

SEQ ID NO: 216143 - DNA, 392 bp, Glycine max
ctccttgaatttgataaaataattattgattcttacagtgtacaagtcagagcgtattttatagtacaaacataattctgtgacttgcgtgtatgattatgcaacatataattcggcttttccatcaatgaatagactcatgaactcttcaccatccacagtttctttttctatgagaagttgagcaagcttgtgaaggatatcaatgtgagttgagataatatgtgttgccctagaatatgctctctctaccagttccctcacttccgcatccactacatccgcagttgccatggagtaatccttttgcgatgacatctgttgacccaagaatggatttccaccaggtccaccaagggcaacttgtccaatttttttgctgaatccaaatc

SEQ ID NO: 216144 - DNA, 462 bp, Glycine max
cattcgaattcattttatttatatattaatattatatgcaaatgaaataaaaagatattaaaagatactaattataagaatttgaaagtgaaattataaagttattaaatgattaatcaatttttttctacctgttcctgtagtaaaaagagttccatctgttcttgaatagcttccttcaaaaggacttctgcttccccagtgaatgtcttggtagaagatatgatttctttgaattgaggtttattcgtgtttaagtaagcacgtaactcaacaagaaatttccttacctgtccaatttctaatgaatcaagataaccattcgttccagtataaatagttattatctgttcttccacggtaagaggagctgattgggattgtttaagcaactcgcgcaatcgttgacctattgctaattgattttgagtagctttatcgagatcagaagcgaattgggca

SEQ ID NO: 216145 - DNA, 446 bp, Glycine max
gaacaaacgtactgaacgtatatttattatataactgaagaacaagtaaagaaaacacacatgttaatgtcataaatatatctttatttaagcataggttttccatatatatattattgtgttcctttcaaactttcgatcaaatttgtttcacaaagatcctacttaagttgattggaagaatttgtgtgtctggttggcagaaacttctccctcagttcagcagcatcaacctgtccaaagtgattctcaggaatccaatttccactcttaggatctctcatccaaaacttttcctctttaatattaatgacattatcggatgctgactttgacttcatcggtgggccttctatttgcttccttaaactttccgctacaacaacataacatctcttcctgcacctgagaagaaaagaaggacagacaagaatgttggccatgat

SEQ ID NO: 216146 - DNA, 427 bp, Glycine max
agttattccgatattcggacgcatcaacttgttatgaaatcacattgatagcctctactcgtgtcctagctcgtctaagagctagatttgcctcaattgtttgtctcttgccttccgccttattcaaattagcttctgctatttcaagagtttgctgtgcttcttgtggatcaatgtcactacccttttccgcatcatttactaaaacagtgatctcattattgtttattctagcaaaaccgcccatcagagccatcgttaaccattggtctttaagaagacgtattctcaaaatacctatatctacggctgtggcaataggcgcatgatttggtaatactccaatttgtccgctattagtagataaaatgatttccttcacttccgaatcccaaacaattcgattgggggtcagtacacaaagatt

SEQ ID NO: 216147 - DNA, 474 bp, Glycine max
gtgctccttgtccacaattgcatgtccaaatatacactataagtaaaatatgtttaacagtaggagtaaaacaaattacaaaacacagaaaaacaagttttccttgttctccttgcccacatggccaagagtctgaacaagtaagaaatataagaaattatgaaggcaaaaatagcagaatgattcaatggcccgtttaatacttcaattattgaggacatttattccaaattccaatccaacacagaaattggtgaattttccccaagttccactctcggcagtatagttctgcaaaagtagcactttcacattctggccttagcaaccacaatactgcctctatcaatttctacagctcctggcctagtccatgattctttaaactgctcttcagttactccttttcccattgcagcagttgaagccacacctccctggacagtcttgagatacctatcatagtagttagca

SEQ ID NO: 216148 - DNA, 362 bp, Glycine max
gtcagatgtaacatttatccatctggacagtacacagatgaatagatatggatgagtttggaacgttgtcaactaaccgatgcagtggcttctaagcctgagaaactagacacttcagtggttgataatggagatcactggagtgtggggcagatgcagttgctatgtttagggagggctatgcttatgcaaaataggctggtgtttatggatgaggcaacaatttttgttgattcccataccgatgctgctatttataagatcataagagaggactttgtagatcgtaccatcatcagcattggtcatataataccaacgcgaatgggctgtggataagtactagtcggagatgcagggtg

SEQ ID NO: 216149 - DNA, 625 bp, Glycine max
  unsure (1)..(625): unsure at all n locations
ctccccccccccccccccccccccggataattttgggtnaagagntantagtnggnggnngnnnttttttttttttttttttatttgtataataatttaattgaaacatcccactccctcgcccccccgccccccccacccccccgcccgccccccccggcccccccaacccacccaacgcaccccccccccccctccccccccccccctcccgcaaccccgcccccccgcccccccccccccatccccccccccccgccccccccgccccccaccccccccccccccccccccccccccccccccccccccccgccccccccccccccccccccccccccccccccccccccccccccccccccccccccccccccacccccgccccccccccccccccccccccccccccccccacccgccgccccccccccccgaacccccccccccgacccctcccccacacccccccccgcctctcccccccacccccacccgccgacccccctccccccctccccaccccccccccccccgccccgccacccctccccccccgcagcaccccaccccaccctccccccccccgacccaccacgcccctccccccactcgtccccccccc

SEQ ID NO: 216150 - DNA, 445 bp, Glycine max
ctgaagttgactgactagtttggtgtggtgtctgttgattaacattacattgcctgccgactagtttacggtatcagcaatagcaagtggctcacacacgcacagatctgatctatctgaagctgaaaacgccgacgcccgacggtgatgatgaagatggggtcctcaccttcacgttgctccttcttcctattcctcctcctcctaggggcgctcttcccctcgtcgctcttcgagatccggttctccgagatccgaaacgacgatcgctccatcgttcccttcgatcagtttggattcacccacaagggtcgccttgagctcagcgtttccaaaatatcactctccaattccaatttggacctctccaaggtgggattcttcctctgcaccctggattcctggcttcatgtcttccagcaactggaggatggcgagattccgt

SEQ ID NO: 216151 - DNA, 577 bp, Glycine max
gaaacaatgggactgttgcactgactgtaggggttactgtatgctagctagagaggaagaacgaacaaaacttggcgacaagcctgtcaagtatcatggaaaatggccattccgtcgtgtttatggaattcaggaacctgtggctgttgctctgtctgccgtcaatcttgctatgcagtttcatggttgggtatcttttttcattcttgtgtactataagttgactttgaggccagataagaagacttactatgagtacactggattgtggcatatttatgggattttatccatgaacgcatggctgtggagtgctgttttccatagtagagccgtggaattaacagagaagctggatttttcttctgctgtggcattacttggattcagcctcattctagcaatattgcgagcttttaacgtgagggatgaggctacgcgagtcatgatttctgctcccttgattgcttatggacaactcatatcatgtatctgaatttctatgaacttgcttatggtttgaacagaatagtttgcacgggaatgggtgttgcccacttcttatttgggccttttg

SEQ ID NO: 216152 - DNA, 553 bp, Glycine max
gaacaggtgtataaagcattgcaattaattccactaagaaagtatgcttcatacatgaggaaaacaaaaagttacaaaatcaaaagcacagaaaccatcgtgttaagcatttcaaataaacgcctacacgaggaaaacaaattttaaaaaaaaaagttctgatgtacaaaaacaaagtaagcagcaacatatttgacatgttcttcatcagatccaacctctgccaaattgtgtctgcagcactattttaccttcttgagcatagctgtggttctaaactcagcatcatcccttataaaaccccaccaaaaaaatgtgagaggaatgcttgttgcatgccatagagcatgagcatccacatatcccatgtaaggtggaaagtcatatgtctccaacaccatagctaagcctcctccaaccactactgcccataatttccatcgcgccgggtggttcgaagcaccagcccaaatggcccaaataagaagctggacaacaaccattcccgtgcaaactattctgttcaaaccatatagcagttcatagaaattca

SEQ ID NO: 216153 - DNA, 541 bp, Glycine max
gtaggctatactaaggtgaaaaaggagagatggcagctgcaacatctagtgctgtgttaaacgggtttggatctcacttcttgtgtggaggaaagaggagccatgcccttcttgctgctagcattggagggaaagttggtgcttctgttagtcctaaaagagttattgtggcagttgctgctgcaccaaagaagtcatggatccccgctgtaaaaggtggtgggagtttcatagacccagaatggcttgatggctcgtaagttcaaccatctatctattcaatttatctcttgtttctcctttctttcttatattctttgttggaaattcaagtatgagtaattagtctcactcacattagtcaggaaatggctcaatgatagtgtattttaaactgtaacttgtttcttatatataggaccagaagtagtatgtcttaaggttttggataaagaaatagagtttgattttcttgataatcatagtcattacattagccagttaagcctccaagagtgttaagagtttgatggattcattt

SEQ ID NO: 216154 - DNA, 641 bp, Glycine max
  unsure (1)..(641): unsure at all n locations
cacgtcactccccccccccccccccccccgatttantgttaggtagaagagnntantagtgggaggnagnnnttttttttttttttttttttttttttttttttttttttttttccctcctcctctcccctctcctccttccccccccccctctcccccctcccccccccccccccccccccccccccccccccccccccccccacccccccccccccccccccccccccccccgccaaccccccccccccccccaacccccccccccccccccccccccccccccccccccccccccccccccccccccccccccccccccccccccccccccccccccccccccccccccccccccccccccccccccccccccccccccccccccccccccccccccccccccccccccccccccccccccccccccccccccccccccacaccccacccccccccccccccccccccccccccccccccccccccccccccccccccccccccccgccccccccccccccccccaccccaccccccccccccccccccccccccccccccccccccggcccccccccccccccccccgcaccccccccgcccacacccccccacccccccccccccccccccccccc

SEQ ID NO: 216155 - DNA, 421 bp, Glycine max
gtgaacagcctcaaatatatccaactctgattgactgcgggctaagacatcggttagagcatcatcgtccaaaacaggtgcagcgtatttttttttacactcacgcaggagtgcctgcaagtattctcttcgatcttgagcactagtattattgccgaaaaaaccagctgtagtgctctgtatagcaactccaaggttgtgctcagccgaagccctgactagatcttcaacagtgtgaatccggttaaaccgtataacaagaacattcctgtattggccaattctatgagcccttgctcgagctcgcaaatcaacactgtggattccagtcagggtcaaatgagatcactgggtgagcagactgaaaatttgctccaacaccaccagcccgaatgctgagcgagaaaatcaaatgtgggga

SEQ ID NO: 216156 - DNA, 592 bp, Glycine max
gactacctcaaattctaccagctaggaacctattggccatacactccttccatacatttgctgtatggtctgagagctgctcttgatctgatttttgaggaaggactcgaaaatgtgatcgcaaggcacagtcgtttaggcaaagcaaccagacttgctgtagaggcatggggtttgaagaattgcacccaaaaggaagagtggtacagtgacactgtgactgctgttcttgttcctgcttacattgatagtactgaaatagttaggagggcatggaagagatacaatttgagcttaggtcttggactgaacaaagttgctgggaaggttttcagaattggacatcttggccacttgaatgagttgcaactgttgggatgtctagctggtgtagagatgatactcaaagatgtgggttatcctgtaaagcttggaagtggagttgctgctgccagtgcatacttacagaacactattcctatgatcccttccaggatttgagtcacaaatcattcttgtctttacttccttttctgctctttcagaaattctgtaaatatatattaccctcttttacactcctttgaagatg

SEQ ID NO: 216157 - DNA, 566 bp, Glycine max
acaggacaataaaagaagcaatgcattaaagctgaaagtagaaagtacgttcatcttcaaaggagtgtaaaagagggtaatatatattttacagaatttctgaaagagcagaaaaaggaagtaaagacaagaatgatttgtgactcaaatcctggaagggatcataggaatagtgttctgtaagtatgcactggcagcagcaactccacttccaagctttacaggataacccacatctttgagtatcatctctacaccagctagacatcccaacagttgcaactcattcaagtggccaagatgtccaattctgaaaaccttcccagcaactttgttcagtccaagacctaagctcaaattgtatctcttccatgccctcctaactatttcagtactatcaatgtaagcaggaacaagaacagcagtcacagtgtcactgtaccactcttccttttgggtgcaattcttcaaaccccatgcctctacagcaagtctggttgctttgcctaaacgactgtgccttgcgatcacattttcgagtccttcctcaaaaatcagatcaagag

SEQ ID NO: 216158 - DNA, 526 bp, Glycine max
ctcggccagattcgtggcagccgctgcgtcaacgcgcacccccgatcggtgcgcatcgtttgggaacactccgccggcaacggtgccgccggtagtggggtcggcgacggagacaggcataaggtgatggggtttgtgggcattcaaaccgggttcacgtcggcggggaggagagagtccttgaggaagacgtggttcccctctgatcgccaaggacttcaacgcttagaagaagctactgggttggcttttaggtttatcattggtagaacaagtgacagagcaaagatgtctgcgcttcaaaaggaagtagcagaatatgatgatttcattttgctggatatacaagaggagtacagtaagctcccatacaaaacgttagcttttttcaaagctgcttatgctctttttgatgctgaattttatgtcacagctgatgatgacatatatttaaggccagatcgtctatcattactactggcaaaagagcgatctcatcctcagacatacataggatgtatgaaaa

SEQ ID NO: 216159 - DNA, 450 bp, Glycine max
ggataaccccaataaagaatgacattaaaatcaggaaattagtaaattaacaatgatctcttgatctattctctcatgtatataaaaaaccttccctaacgaacctttgtcatataggccaacgctaacctttccaagtttacaaggggaatgaaaactagggaaataaaacacaatcacctcttttttagtaaatggaagaaaggggaattagaaagatcaaaagaatggcagtggtagcatctttaagcaataatcaataacaagagcagcaactccttcactaccttccgagcttactttgctttggattatacccccaaattctattcatcatctgattccagagttgggctcttagagcaggtttccttttgatggagttccaacattttcttttctggattacataggcctgaacacttcggaatatcccacactgcaatagat

SEQ ID NO: 216160 - DNA, 549 bp, Glycine max
ggccgccctttttttttttttttactttcaaatttcaatattacattatcaataaaatgagagcagccatttttgcttcaagttatttaatggattaaccttagccattatgctgtattgaacacaacaatggggctcctcacttggtacttaccatcatcccaaaccaaagagcctgaaactataggtccttctagttttcccgtaattgtgagcacaaatgtttgcttttggttaagagaagtgaatggtagaacactggggttcacctcaattttcagtcccttgggagaagtcacagtagctttatatgttgactttggtgacccaacatttgtaacagtcctgttaaaactgccacttacactattggagttggagggtgggacaaagagtgcaaatgaagcatagtttagatcccttgctgaaccattctttgattcagggcagctactgttatcttctgtgatgaagttgaaagtccttgtactatacccttgtccacataaaaatcttacatagtctatttcaccagcatcatatactaaa

SEQ ID NO: 216161 - DNA, 592 bp, Glycine max
tcgcgatctagaacctcgagccgtgttaccaaggttgaattaggtaacaaaatcacctatgagggtacctcaataaatacatttgatctcaagggagaattgtatcctataatttatggtggagatgcaccaaacaaaggcgaaggcatagatggatcatcatcaaggtattgctccagcggttcgttggacaaaaaattagttaagggtaaaattgttctctgtgagagcagaagcaaagcactaggccctttcgatgctggtgctgttggggcattgatacaaggacaaggttttagagatcttcctccctctcttccattgcctggatcttaccttgccttgcaggatggtgcctctgtatatgactacataaactctacaaggactccaattgcaaccatatttaagactgatgagacaaaagatacaatatctcctgttgtggcttctttctcttcaaggggtccaaacattgttacacctgaaattctcaagccggatttagtggctcccggagtttccattctagctagttggtctccagcttccccttcttctgacattgaggtgacaacagaacattgaattt

SEQ ID NO: 216162 - DNA, 482 bp, Glycine max
gcctggtgcaaagaaggcttatatttttcacagagtgaggaagtggcttggtcaagccaaaagtctgtgctccccaaaggatgcaaaaaaatttggcttggacaatctggatgaggaaataaatatcctggagaagaagttatctgaaggatatcaagagattgttttttgtcacaatgacttacaatatggtaacataatgatggatgaagagacaagattaatcactataattgactacgaatatgccggttataatcctattgcatatgacctgcccaatcatttgtgtgaaatggaggcagattaccacagtgacacacctcatgttcttgactacaagaaatatccaggactagaggaacgttaaagatttattcgcaactatctgagttctgaaggcaataaaccaagcaatgctaaagtgaaccagttagtgaaagcttgagaaaaatacactcttgcaaaccatatattttggg

SEQ ID NO: 216163 - DNA, 575 bp, Glycine max
gtgcgtcaagagacacgtggtaccctagctagagtgccattctgtggtttctttctttctttctttctgcatcacatcacaatttgcattgcctcgtgtcctttttcttctttgctctccaaaaatctcacacacacaggtatctagcaaatgggttctcaccaacaagaaccatggctattggagaatgggaaaccaagggttttgaccaaggagaccaggcatggccgttctgcacacagaatgttctccacctctttgcgcaagaaatctagccgaactcttgtctcaaaggtttcatgtgccactctcagaaactttctttcaaatttgcaagagggtattcttggcaccaagctttccattctcatccctgctattccagctgccatcgttgctgagtgctatggctttggaagaccttggattttatattaagcttacttggacttacaccacttgctgaacgtgtgaacttcattacagaacaagacgccttctacactggtcccacaacaggaggacttctgaatgctacatgtgggaatcgtactgagctcataatagcaatattt

SEQ ID NO: 216164 - DNA, 563 bp, Glycine max
  unsure (1)..(563): unsure at all n locations
gcggggaagaggttctcccttcggccactgccacctccgccgccaccggcaatcccaccgcttcgcctcctccgctcgctgatcttgtcggtgctcccgatctcgctgctgcctcggacgacgtcgttacccaacctgaaattcacgcgctgatttcagacgaagagcacgatcacgagcatgaacatgacgatgacctcgagcacgagcacgatcagcatgagcatgaccaccaccacgaggaccgcgatgatcacgccgctgtggccgctgtctccttggaagatctcaaactcaagatcattaagcaggcggagtattatttcagcgatgaaaacctgcctactgataagtatctgttgggtttcgtcaagaggaacaaggaagggtttgttcctgtatcagtaattgcttcttttagaaaaataaagaagctcacgcgagaccatgcatttattgttgctgcactgaaggagtcttcactgcttgatgttagtggtgatgggagaagggtcaagcggctcaatccacttcgttncaatgaatctagagatcataagtta

SEQ ID NO: 216165 - DNA, 553 bp, Glycine max
gaagtatatccctagggaaaaataatttcttcacatttacaatgaagcaatccactctattcctgttcctattcctattccccctagttcatgctctttcttacgaagctgcttatattagagatggcctcaaatcctattcccagcttgatctccctcactccgtttttggttctgaaagtgtagccttcgattgccatgggaaaggaccatatgtgggagtgtctgatggtagaattctcaagtggcaagagacaaagagagagtggattgactttgcagttacctcgccacacaggaacaagaaattatgcgacgggtcacaaaatgacaagatggaatcaatgtgtggaagacccttaagcctcaaattcaacactgtaacttgtgaactgtacattgccgatgcatactttgggcttctggtggtaggaccaagtggtggtgtggcaaagcaattagccacttctgctgaaggagtcccacttaggttcacaaatgccttggacatcgacaccaaaactggtgaaagatttttcacagatagcagcat

SEQ ID NO: 216166 - DNA, 439 bp, Glycine max
ttgcctttctttttttttttttttttttttttttttgtttttcctccgtgaatttgttaaaataagggttgattcttacagtgaccaacagagagcgtcttttatagtacaaacatattcctgtgacttgcgtgtatgattatgcaacatgtattttcggcttttccatctgtgactagactcatgaacttttccccatccacagtttctttttctatgagaagacgagcctgcttgagaaggatcttaatgtgagtcgagataatccgggtggccctagaaggtgctctttttaacagttcttttactttcgtatccactacatccgtagctgccagggagtaatcctttcgcgatgacatctgttgaccgaagattggatttccacccggtcccccaatgtgaacttgtccaatttttttgatgaatccaaattttt

SEQ ID NO: 216167 - DNA, 315 bp, Glycine max
  unsure (1)..(315): unsure at all n locations
ctcaccccccccccccctccccccctcccggnagagnatgangtngattgaagagtaagtaaggtaggaattnggntagagtntgatatganaatatgattgtggttgtaatatagtgcccccacacaccccgcgcacccacaaacaccccggccccgctcccccacccccccaccgccaacacccccccccccctcccccaccccccccacccgaccccccccccccccccccccccccccccccccccccccccccgcccccacccccccccccccccccccccccccccccccccccccccccccccccccc

SEQ ID NO: 216168 - DNA, 501 bp, Glycine max
gttcatcatagattagatgcaactgtggatgccattttggcaggaaaacctccattatttgaaatccgtcaatgggatgattctgacaacgagttgccaaaatatgctccattgcccgaagaaaatcttggagaaacttctgacttaactaacaataatatcacgagttctgacaatgaacctagtgaggatgataaagatcacccacgtacttggtccacgaaatggagtaccagtggacctgtgatgacgaggagttcaccaatgcaagtttatacttacaagattcttgaagctgatctgctacaagtggccaaggtaatggggcttgaagatgtaatagatgtgactgatgacattggaactgctgaagcaattctagcatccagttctgagatacgacaaaacccatggatccgtggtgtggcaaagttccatcacgtacctgtatttgttatcaagtccaataccatggcacaaatggtcaaggcagtgcgcatg

SEQ ID NO: 216169 - DNA, 622 bp, Glycine max
  unsure (1)..(622): unsure at all n locations
ggggnnnnaaggggccagtcgatccgatacataacacgtttacgcaccgacgtagctcgaattcggtcagcggcataacatccgctacctcggctgatggtcagagaactcttgccacacctgtcgtcatggatctgtgcgtcagggagatggttgctcgcgccgccaagtacatctttgccggccacctccgaagcacagagaccttccatatctccaactccatcgcgcatttcctcaactgcttcatcggctcctctgcgaacggtggcgccgctgccatccaggcaccgcaacctctgcgacccaagctcaagaagaacggcaagtccaaggtgaaggagcccgttccttctgccgctcctttcactctcacgaggacagctctctggaacgagatcgtcgcgctggtcaaggagaaatttgcgtatgatttggcatttgattatgaggtttcacgtcccaccgttttccttcgctccttctgcttgaaggtcggcattcaagtcgccgcgcgagactacgatttcaccaaggtagacccgttcgtaccggccgatattttggatctgttccccgtcgtcaagcttattaacccgaggagtatggacggacaagatct

SEQ ID NO: 216170 - DNA, 574 bp, Glycine max
cgacaaagtagtggctgactttggatgcggttgtggtacgttaggtgttgcagctgcactgttgagtgcagaacatgttcttggcattgacattgatccagaatctcttgaaatagcttccaataatgctgaggaacttgaggttgacatcgattttattcagtctaatgtcatggacttgggatggagaggtcgaattgttgatacagttataatgaatcctccatttggtactcggaaaaaaggtgcagatttggattttctctccgttgctttgaaggttgcttctcaagctgtttattccttgcataagacttcaacaagagatcatgtgaaacgaacagcattaagggatttcaatgctagcagtgctgaagttatatgtgagcttcgatatgatgtaccgaaaatgtacaaatttcataagaagaaggaagtagatattgctgtggacctctggcgttttgtaccagcagcaagtcatcaaagcagaaatacttgatgcagacaaagatagtgtattttggaatagatgataagattgcaagtaaaaagaaaattttgggtacctaaa

SEQ ID NO: 216171 - DNA, 493 bp, Glycine max
gggttgtgaaagcagagaagtgagatacactaagttatcctcataaatacactctaattaggtggcaagataagtgtctaaccttagtaacattgccacatattgtgttcattttggaattgtgccactaaaattctattcaattcatctatggctgcctcttcttatgctatgcaatcaatcctggcaaaccctttgatccgcatttccagcgggtctagggtgaaccaatttggcgttcctgctttgcacatgagaaggaatgttggcctgagagttaggtccatggctaaggaagaacaaccaagtgagcctgcaaccccagttacaccgccaccatcagtagaacccaagccacagccagtctctgctccttcaccaaaggtgagcactaagttttctgatgtgttggcattcagtgggccagcacctgagaggatcaatggaaggttggccatgattgggtttgtggctgcaatggcagtggaagtag

SEQ ID NO: 216172 - DNA, 564 bp, Glycine max
aacgaaataattttgatatgtagattaaataaacacacgaagtacaaataaacattggtctctctaatcacaaaggagattaagtccattgtggtgtgccttcatgactgaattataccaaagtactacccttaacatactcagtaaaagccagagcaatcaaacccaacatagcaaatctcccattccacagttctgcatctgaggacatgaaccctttggacttagactccacgctgacaccttggaagagtggaatcaaggaagcaagggtaaggaccacacttgtccccaagaaccatgggatgccaccattggatatttgttctaacacaccttgccctttggctacttccactgccattgcagccacaaacccaatcatggccaaccttccattgatcctctcaggtgctggcccactgaatgccaacacatcagaaaacttagtgctcacctttggtgaaggagcagagactggctgtggcttgggttctactgatggtggcggtgtaactggggttgcaggctcacttgttgttcttccttagccatggacctaac

SEQ ID NO: 216173 - DNA, 529 bp, Glycine max
ggccgtcctttgtttttttttttactttcaaatgttaatattacattatcaataaaatgagagcatgccatttttgcttcaagctatttaatggattaaccttagacattatgctgtattgaacacaacaatggggctcctcacttggtacttaccatcattccaaaccaaagagcctgaaactataggcccttttagattttccgtaattgcgaacacaaatgtttgcttttggttaacagaagtgaatgggacaacactgtggttaacctcaattataacgcccttgggagaaggaacagtatctttatatgttgactttggatgacccaacattagtaacagtgctgttaaaactgtcacttacactattggagttggagggtggcacaaagagtgcaaaagaagcatatgtcacatgccttgctgaaccattcttatgttcagggcagctactgttatcttctgtgatgaggtgtaaagcacatgtactatacccttgatcacaaaaaaatctgacatagtctat

SEQ ID NO: 216174 - DNA, 558 bp, Glycine max
tgagcttctaaaaatgtgcataggtgcagaaggagaaaagcaacatggtttctgcagcagctatctacataaagaatgtgcaaccagaagtgctacatgttgtgagctatgtgggttacaggcttcattgtattgtcaagctgatgatgcatacttgtgtagaaaatgtgataaaagggttcatgaagctaattttttggcccttaggcacattaggtgctttctgtgcaacacatgtcaaaaccttacgcgaagatatctcattggagcatcaatagaggtggttcttccagccaacattaactggaccattggaaatctccctagcaacagaggaatccacagaaagtgctcaagaatgcataacaacctttccctcttggtataacttccatctttctttttttctccttagaatatcttttgtaatagaaaagggtagtgagtaccatctcaggtacatagggaagtgctaaatgtttttaatgtcatgatttaaaaaaaatggttggtaatagaaccgtgttcaatagaaggagggcatttgcaatgttttta

SEQ ID NO: 216175 - DNA, 538 bp, Glycine max
cggctcgagcggctcgaggaaaaccctcgtcttcgaaatcagcaacaaaaacgcgaagtgtactaagcgaagccattgcagcgtgagaatggggaagaaggcaaaagggtcaaggaagggtaagaaggcatggagagctaacatcagcaccgaagagatcgaagatttcttcgagaaatcaacgaaggacgctctttctggtggctctctacaagccgtttcttccgattctctcttctatgaagacaagtccaaagatcttgctgtgaagaagaagatcgagaaacatagggagagggtgctccgatgtgatagcctgctacagaaaaatcagtttgttaagccagtgccatcttctattctgaagaagtgttctaaaaaccgtaatgtggcctctaaatccaatatgaaagtggccaatcaagatggtgataaggatgattctgccatgtatgatctatgggatgataaaggcaaggatgacacgaaggtgaaaaaggtagcaaagcctactcttatcccagcagtagaagatgat

SEQ ID NO: 216176 - DNA, 405 bp, Glycine max
aagggaaactgccctccttctcattaccattaacacatttggaattgaagtggagtcaatttacctttctatcttcctaatttatgccccaaggaagccaaggcttacaaccatcaagcttcttctcttactgaatgtgtttggattcggagccatgcttctatcaactctctacctgtcaaagggagcaacgcgtcttgctatcataagatggattggccttgtttacaacatcagcgtctttgctgcacctctcttcattattaggcgagtcataaagacgaggagcgtcgaatacatgccatttactatgtgcatgtttttaaccatcaatgctgttatggggttcttctatggccttctcctcagggattattacgttgctcttccaaacacgcttgggtt

SEQ ID NO: 216177 - DNA, 480 bp, Glycine max
atctgttaggaaaaattcccaccttcattgaatacacaattctctaagtatgaacattataattcaaaaccaataatgttaaagataaaaaataatcttcgaaaaaaatatccagccttttgttcaatatgattgtctgggtccaggaaaagctcatgtaatatgatttctgtaggtaacatcccctcctccaaggacataaacacagagggatttgcttggatgaatgacaacctcatcctatgcaataatacaacagggattgttcaccgaaaattttcaacctcaaaagcacaagctgttccatcaaccgaggccgagacaaggtaattgcgattagaagacacagaaagagactgaatggcatcagagtgccccttcaatgtttttacgcattcaccagaccggctgtcccacaatctcaccttaccatccacacaaccagaagccacataagacgcaccaagccatgccaaacat

SEQ ID NO: 216178 - DNA, 510 bp, Glycine max
aaaacaaagaaaaaaaaaaacccttagccaacacaaccatcatggccacctctgctattcagcaatcagcattcactggtcaaactgctctgaagcagctcaatgagttcgtccgcaagaccggtggcgccggcaaaggtcgcactaacatgcgccgcaccgtcaagagtgctcctcagagcatttggtatggccctgaccgtcccaagtacttgggtccattctcggagcagattccatcatacctgaccggagaattccctggtgactacggatgggacactgctggattatcagctgacccggaaaccttcgccaggaaccgggagctggaggtgattcacagcagatgggcaatgcttggtgcccttggctgcaccttcccagagatccttgagaagaatggtgtcaaattcggcgaggccgtgtggttcaaggccggtgcacagatcttctcagagggaggccttgactacttgggcaacccaaacctgatccatgctcagagca

SEQ ID NO: 216179 - DNA, 274 bp, Glycine max
ctggggacccaaatttctaatatataaaaatataatggttctcatacagatttttctgctacacaggtgtagttacattagtgaaaatggagttaaacacaagggaactgcaaaagggagcagaagattgcattgcatgtaggcatcctcattgtcccaggacaaaagtagtggcataagccaaagcatttgtgcaacaggatcagcaacgtgggcgaaaaggtttggaatggggccttggcaaggaccatagcctggacaaaaaaaccaaaca

SEQ ID NO: 216180 - DNA, 483 bp, Glycine max
  unsure (1)..(483): unsure at all n locations
cctatggctcgtcactccttgctcttagcccttctcctcttcgccgccgtggccaccgccgcgatggcggtggccgcgtccgacgccgacgacatcctgatccgtcaggtggtgccagatgttggcgaagccgaagaggaggacaacctgctgaacgccgagcaccacttcgcgagcttcaaggccaagttcgccaagacctacgccaccaaggaggagcacgatcatcgcttcggcgtcttcaagtccaacctccgcagagccaggctgcacgccaagctcgacccctccgccgtccacggcgtcaccaaattctccgatctaactccggccgagttccgccgccagttcctcggcctcaagccgctccgctttccggcgcacgctcagaaggcgcccatccttcccaccaggatctccccaaggatttcgattggcgagacanaggagccgtcactaacgtcaaggaccaaggggcgtgtg

SEQ ID NO: 216181 - DNA, 544 bp, Glycine max
gaagtcctaagtccatagaaatttttatacatgcacaaactcaaaggtaaacgaatcaaaggtacagaagcaacttaaacattttggtatccttttgggtatggcactaccacatccataagaaccaacattgacagtggcacgtatattagtttaattatgcaataactgagacataatcagtggcaagtattcccctgttgcagtttgaaacaaccccaccccgccaatctccatagagagttgcttatcttgcaccatttttaggaccacacatttccttggatttcccacttgtatatgtcaagcatacatacagaaattacatactacataaacaacatggtcttagcagtttcctgatcctatacggagataattttaccagtaccaaatgataaagttcacaacataaatatttatacaaactccccttagtccagtatcacatcacaaccacaatcaggcatatctttgtatttaatggctggatggatatatagcagctacagttgagaccatggaatctactccacacacattt

SEQ ID NO: 216182 - DNA, 409 bp, Glycine max
ataaaggattgacttatctttggagaagaaattgaatgacgcaacaaatccagttttttacttcgcaaaagttagcaacgcatataaatccctcactgtcaattctaggcattgctttcatcttatttgatggatgttcaaagctcatgagaccatgctcactatgaaacatacccccctgataagaattagtaatttcaatggtggtttacatatcagttggaacccagtctggccattagaatcaaatgttacaaaagttgtcatagatcataaatccaagactgtcttgaagttccttgaggacctgatcagcagggtatggaccccagtcgtgaagagtttgatatgcttcggtgataaacatgacctcatttgttccctttgatagcccatactagactggaca

SEQ ID NO: 216183 - DNA, 465 bp, Glycine max
  unsure (1)..(465): unsure at all n locations
ggaattactgatattcagatcggggagacaattgctgataaagtatctgggaaaccactaccttcaatcaaggtggaagaaccaacagtgaaaatgtctttctccataaacacttcaccttttgttggccgtgagggaaagtatgttactagtaggaatttaagggacaggctttatcgtgaacttgagcggaatctggctatgaaagttgaagatggtgaaacagctgatacatttgttgtcagtgggcgtggaactttgcatatcaccatacttatagaaaatatgcgaagagaaggatatgaattcatggttgggcctcccaaagttatcaacaagaaggtggatgaaaaactgttggaaccgtatgagattgcaactgtggaggtaccagaagagcacatgggagctgttgttgaacttctttgcaagagacgaggacaaatgtncgatatgcaaggagtt

SEQ ID NO: 216184 - DNA, 587 bp, Glycine max
ccgattgaggggtctgtgaaccgagatgctgtgcttgcaagagttgcaaccgagaagaggctgtcactaatcaaagcatgggaagaaagtgaaaagtccaaagcagataacaagtctcacaaaaagctttcagccatttcagcatgggaaaacagcaagaaagctgcagcggaggcaaaagaaagttcgaaaaaagaggaggaaaaaaaaaaggaaaatgaggaaagaaaacgtatagaaatagcagaagcctgggatagcattatatttgctcaagtaataagaggtattttattaataacccaatccattcttagaaaatatattctattaccttcattgataataactaaaaatattgctcgtatactattttttcaatttcccgaatggtcggaagattttagggattggaagagagaaatgtatattaaatgcacatataatggtgttcaattatccgaaagagaatttccaaaaaaatggctaacagatggtattcagataaagatcttatttccttttcgtctcaaaccttggcacaaatctaagctacgatcccatgaaaagaaaaggatcttatgaaa

SEQ ID NO: 216185 - DNA, 575 bp, Glycine max
gcggggaagaggttctcccttcggccactgccacctccgccgccaccggcaatcccaccgcttcgcctcctccgctcgctgatcttgtcggtgctcccgatctcgctgctgcctcggacgacgtcgttacccaacctgaaattcacgcgctgatttcagacgaagagcacgatcacgagcatgaacatgacgatgacctcgagcacgagcacgatcagcatgagcatgaccaccaccacgaggaccgcgatgatcacgccgctgtggccgctgtctccttggaagatctcaaactcaagatcattaagcaggcggagtattatttcagcgatgaaaacctgcctactgataagtatctgttgggtttcgtcaagaggaacaaggaagggtttgttcctgtatcagtaattgcttcttttagaaaaataaagaagctcacgcgagaccatgcatttattggtgctgcactgaaggagtcttcactgcttgttgttagtggtgatgggagaagggtcaagcggctcaatccacttcgtttcaatgaatctagagatcataagttatatactggtttg

SEQ ID NO: 216186 - DNA, 663 bp, Glycine max
  unsure (1)..(663): unsure at all n locations
gcggggaagaggttctcccttcggccactgccacctccgccgccaccggcaatcccaccgcttcgcctcctccgctcgctgatcttgtcggtgctcccgatctcgctgctgcctcggacgacgtcgttacccaacctgaaattcacgcgctgatttcagacgaagagcacgatcacgagcatgaacatgacgatgacctcgagcacgagcacgatcagcatgagcatgaccaccaccacgaggaccgcgatgatcacgccgctgtggccgctgtctccttggaagatctcaaactcaagatcattaagcaggcggagtattatttcagcgatgaaaacctgcctactgataagtatctgttgggtttcgtcaagaggaacaaggaagggtttgttcctgtatcagtaattgcttcttttagaaaaataaagaagctcacgcgagaccatgcatttattgttgctgcactgaaggagtcttcactgcttgttgttagtggtgatgggagaagggtcaagcggctcaatccacttcgtttcaatgaatctagagatcataagttatatactggtttggtagagaatttgccagaggatcattcaaagaagaacattcaacanatattccatgaagctggaaatattaagaggataaccattcatg

SEQ ID NO: 216187 - DNA, 332 bp, Glycine max
aggaattccgattttcggacgcatcaacttggtatgaaatcacattgataggctttactcggggcctagctcgtttaaaagctagatttgcctcaattgggtggctcttgccttccgccttattcaaattagcttctgctatttcaagaggttgctgtgcttcttggggatcaatggcactacccttttccggatcatttactaaaacagggacctcattagtggttattctagcaaaaccgcccatcagagccatcgttaaccattggtctttaagaagacgtattcgtaaaatacctatatctacgggtgtggcaataggcgcatgattt

SEQ ID NO: 216188 - DNA, 533 bp, Glycine max
atccctaacgcgtgcatagcagagtcttagacagagacgcatccatggggcggagacctgcgaggtgttatatgcaaattaagaacaagccataccccaagtcacgtttctgccgtggtgttcctgatcccaagatcaggatttatgatgttggtatgaagaagaagggtgttgatgagtttcctttctgtgtccatctggttagttgggagaaggaaaatgtttcaagtgaggccctggaagctgctcgcattgcttgcaacaagtacatggccaaatttgctggaaaggatgctttccacttgagagtcagggtgcacccattccatgttcttaggatcaacaagatgctttcgtgtgctggtgctgataggctccaaactggaatgagaggtgcttttggaaagccacagggtacttgtgctagagtggctattggacaggtccttctttctgtccgctgcaaggacagcaacagccatcatgcttaggaggctcttcgccgtgccaagttcaagttccctggtcgtcaa

SEQ ID NO: 216189 - DNA, 466 bp, Glycine max
  unsure (1)..(466): unsure at all n locations
cgcaaacaaaatttaagtaaatggaatgggctgacaaaataactcaaattcactcttgcaaaactaatgttatccaaaagtctagtttttccaaattaaaagacagactangaactagttgcagtatccaaaaaggctcttccaggttcacgattggccaatggtccatggcacccaagaagctttgcattcacaccatcgggcacaattctgttctctgacttgaacttgagataatcagaacggctaaacttggggaagccccatttcctgctaactataatcttttgacgaccagggaacttgaacttggcacggcgaaaagcctcctgagcatgatggctgttgctgtccttgcagcggacaaaaagaaggacctgtccaatacccactctagcacaagtaccctgtggctttccaaaagcacctgttattccagtttggagcctatcagctccagcccacg

SEQ ID NO: 216190 - DNA, 468 bp, Glycine max
attcctaacgcgtgcatagcagagttagagacagagacgcagccatggggcggagacctgcgaggtgttataggcaaattaagaacaagccataccccaagtcacgtttctgccgtggtgttcctgatcccaagatcaggatttatgatgttggtatgaagaagaagggtgttgatgagtttcctttctgtgtccatctggttagttgggagaaggaaaatgtttcaagtgaggccctggaagctgctcgcattgcttgcaacaagtacatggccaaatttgctggaaaggatgctttacacttgagagtcagggtgcacccattccatgttcttaggatcaacaagatgctttcgtgtgctggtgctgataggctccaaactggaatgagaggtgctattggaaagccacagggtacttgtgctagagtggatattggacaggtacttctttctgtcgctgcaagga

SEQ ID NO: 216191 - DNA, 413 bp, Glycine max
cttgtcgcaaacaaaatttacgcaaagggaatgggctgccaaaataactcacattcactcttgcaaaactaaggttttccaaagggtttgtgtttccaacttttaagacaaactaaaattctttacgcccctccaaaaagtgtcttgcgggatcactgttgcctaatgggccacgggaactaaaatgttttgaattggcacaacagggcacaattttgttctataactggaacctgatatcattagagcggttgcacctggcaacaccccattttctgctaacacttattttctggcgacctacaaactttaacttggccctgataaaatcctccttaacatgatagttgtccctgtccttgtctgggccacaaataaggatttgtccaataaccgctttattacaagtaccc

SEQ ID NO: 216192 - DNA, 500 bp, Glycine max
ggaattactgatattcagatcggggagacaatagctgataaagtatctgggaaaccactaccttcaatcaaggtggaagaaccaacactgaaaatgtctttctccataaacactacaccttttgttggccgagagggaaagtatgttactagtaggaatttaagggacaggctttatcgtgaacttgagcggaatctggctatgaaagttgaagatggtgaaacagctgatacatttgttgacagtgggcgtggaactttgcatatcaccatacttatagaaaatatgcgaagagaaggatatgaattcatggttgggcctcccaaagttatcaacaagaaggtggatgaacaactgatgcaaccgtatgagattgcgactgtggaggtaccagaagagcacatgggagctgttgttgaactttttggcaagagacgaggacaaatgttccatatgcaaggagttggattggaaggaactacactacttaaatataagat

SEQ ID NO: 216193 - DNA, 460 bp, Glycine max
aaaaattattcatcgatgcctcacttaattacttggaaaaataacctccgctgcgaatattattgacctacagcctacatgtaagtgaattagaatactttcacagcgtcaatgctaaaccacgcacatcgacgtatgcacaaaggactgtccgctttcgttctttcaacatagtgcgaagactaacctttgagccttaaacccacatctgactaaccagagactgaccggggtttacatgtaaaagaaatctccccgcattgctggttaccaagtacggatctcctatgcatatgccttcgctgataggcctaactggctatactacagtgcacagaccaggctatcttggacggcagaatccggctacctttgcacccatgggatctgcctgcataggatggtaatcaccagagagcctatggagcaacgcctgcgatgggtggggtccattcttaaa

SEQ ID NO: 216194 - DNA, 542 bp, Glycine max
  unsure (1)..(542): unsure at all n locations
gctgaagcttcagtagatgctgttaactttgttttgaaagaactcgtaaggaaatcaatagctgaaacaaaggaactgaagcgcttcccaacatttcaagccgaactagctgcagcagcaaatgaggctttagaaaggttccgtgaagagagtaagaagacaactgttcggcttgtagacatggaatcttcatatctcactgtggatttcttccggagacttcctcaagaagtggagaaatctggaactcctgctgccacaaatattgaccgatatgcagaggggcatttcaggagaattgcatcaaatgtgtcatcctatatagggttggtggcagacacgcttagaaacacaattccaaaggctgttgtctattgtcaggtcagacaagcaaaacagtcattgctaaaccatttctacacccaaatagggaagaaagagggtaaacagctatcgcanatgttagatgaagaccctgcattgatggagaggagacaacagtgtgcaaaaaaggcttgaactatataaagcagcaagggatg

SEQ ID NO: 216195 - DNA, 503 bp, Glycine max
tatggatcccctaagtgggttagtactgtcgtcttttagacttgaacttggagaaacaggaaaatccatggaattagtaagagttggaagtgagcaggtgcttgttgttggaactagtctgtcttcgggtccacacacaatggccactggtgaagctgaaagttgcaagggtcgccttcttgttctttgtcttgatcatgtgcaaaattcagatagtggttcagtgacgttctgttcaaaggcagggtcatcatctcaaaaaacttcaccattccgtgaaaattgtacatatgctcctgaacagttatcgagcagtacccttggcagcagtccagatgataatagttgtgatggcatcaaactcgatgaaaatgaagtatggcagttccgattaacttttgcaactaaatggccgggagttgtacttaaaatctgtccttatcttgatcgctactttttggcaactgctggcgatgctttctatgttggggtttccctaatga

SEQ ID NO: 216196 - DNA, 509 bp, Glycine max
cttgagtccatgatggaggggtgctcagattcagatgactacagcttatatgaggagcaaactgaggggtcaaggcaaggcctattgaacaataatgcaaacacagcttcattgaatatggatccaacagtttcatcagtggattcaattgtgtcagtcgcatctccattgcatatgaatgctactattcaatcctctggtcatgttagcagccacactgaggttgatgaagttgagttcttaaacaactgcagggatgctggggtggttcacattcttggaaacacagttgtgagggcaaggagggattcaagattccacaagaaaatagctgctgattatatatatgcatttctgaggaagatatgcagggaaaatagtgtgatcttcaatgttcctcatgagagtctattaaatgttggtcaggttttctatgtatagcctctaaacctcttggtaatttctgcgtgaacattgcgtttataggcacattcaatcagaagcatgtt

SEQ ID NO: 216197 - DNA, 509 bp, Glycine max
  unsure (1)..(509): unsure at all n locations
gcagtataccctagctagcccaagcagaaaactttactttgttacgccgccccctctcctctgttgtcttacgacgttagccatggaagtctcaaaaaaagaagctcgagtccgttgttcatcctcgtctgcatcctcatcgactccaccttcttcatcatccagcccactctctcccgcatgggcccatccgaggcggcccacacattcctccctcgaaccgggcttgcccgcttcagcggcacaaggcctcgcacgggccgtattctggtcaggatcagcggcaggaggcagcgaatcatcgtcaccgacgacacgaggcttcgtggggagccacctcgtcgacaaactcatcactcgcggtgacgacatcatcgtgatcgaaaatttcttcacaggaagaaaagagaacctggtgcatctgttcgggaaccctaggttcgagctcattcgccacgtcatcgntgagccgattctgttggaggtcgatcagatctaccacctcgcgt

SEQ ID NO: 216198 - DNA, 524 bp, Glycine max
  unsure (1)..(524): unsure at all n locations
cattcaaatgatatcacaatgaatttaactttgcataaggggcaaatataacatttacacacagtatagagccaactgaataacaagcacatacatatgctttaacaattgaattccttagtctgctttaaggatagcaaatatgcggccatgaaacacgcaataccctccactatatcttcttgttctgagtcaaaacgttcactttcccaagaattactttcttctcaacaccagcaccccgatgataatccatggccaacgtctccacaatccttttcccttcatcgtaacaactcctctcaccaattggattcacatttccccagtaagtctctttctgaggatgctccaacggatcaccgtaaacctaactagtactagtaagcagaaacctagccccaattcttttcgcaaggccaagcatgttaagcgtggccatcacattcgtcttgatggtcttcatggggttgtattngtagtgcaccggcgacgcgggacacgcgaggtggtggatctgatcg

SEQ ID NO: 216199 - DNA, 484 bp, Glycine max
tggaattgctgctgccgatgctacagatgctgctagaagcgcttctgatattgtcctcactgaacctggtctgagtgtcattattagtgcagcgctcaccagcagggcaattttccagaggatgaagaactatactatctatgctgagtcaatcaccattcgtattgtgttcggtttcttgattattgcgttgatctggaagtttgattttgcacccttcatgggttcgattattgccatactcaatgatggtaccattatgactatatccaaggatagagtgaaaccatcaccactttctgatagctggaaactgagggagatatttgctactggcgttgtgctaggaagttacatggcactaatgacagtagtatttttctgggcaatgaaagataccaacttgttctcgaacaagttaggtgtgaggccattgatagatagccccgatgaaatgatggcagccttataccttcaagtcagc

SEQ ID NO: 216200 - DNA, 581 bp, Glycine max
cttaaattttccaagtttactcttggtactgtagctccacagtttacaggcgtgtctataattgaggatggaggggatggtgttacaatggagttagaaatgcaatgggatgggaacccaagtattatacttgatattaaaactcttcttggtgttgcactaccggtgcaggtaaaaaatattggatttacgggtgtttttaggttgatcttcaagccgttagttgatgaatttcctggttttggagctgttagctattcattaaggcaaaagaaaaagttggattttactctaaaagtcattggtggcgacatatcagcaattcctggattatatgatgcaatagagggggcaattcgggatgctgttgaagattctattacatggcccgtgagaaaagttgtacccattttgcctggagattacagtgatttggagttgaagcccgaggggatattagaagtaaagcttgtgcaagcaaaggaattaacaaacaaggatatcattggaaaatcagatccatatgccgttgtatacatacgggctttacgcgaaagaatgaagaaagcaaacaattaaca

SEQ ID NO: 216201 - DNA, 496 bp, Glycine max
ggcaatccgaaattttcttgaatgatattaaagaaaagagtattctaaaaaaattcatagaatttgaagaactgtttttcttagatgacatgttaaaggaatgtccggaaacacatctacaaaacctgcgtactggaatctataaagaaacaatccaattaatcaaaacgcacaacgaagatcgtatgaatacgattttgcacttctcgacaaatataatttgtttctttattctaagcggttattctattcttggtaatcaagaacttgttcttattaactctttggttcgagaatttatatataatttaagtgacacaataaaagctttttctattcttctattaactgatttatgtataggattccattcaacccatggttgggaactagtgattggtttcgtctataaagattttggatttgctcaaaatgatcaaattatatctggtcttgtttccacttttccagtcattttagatacaattttaaaata

SEQ ID NO: 216202 - DNA, 588 bp, Glycine max
  unsure (1)..(588): unsure at all n locations
accatacccgctgctgtagcattatacacattattattactcttgctcccgtcaagataaatctgaccccttcccctgttcccacctacgtatataggatattttaagaaatgaacatctctcttagtagtgggatccggggaaagaataggaaaggttatttctttatatttttgaccaggaacagggcctaccacaagaatatttttttttgtaggacgatagttttgaaaagacagattgcctatcttctctttaatctcaggcgaaatacgatcggggggtgccaattcaaaaccttccggtaaaataagaacagcccccacattcaaagctccctttttaccattagcaagaacttgtttcacttgcatatcataaggaattcgaacaactgcttcaaatacagtatcaggaagtaccgcttgtggaacctcaatatccacgggcttattagctaaatggcaattggcacagacaatacgaccggttgcttctcggngattttcataaccctgctgtgcaaaaattggatatgcgtttgaaatgggtgctcgaattatatatatatcatgatcgatatggaaa

SEQ ID NO: 216203 - DNA, 536 bp, Glycine max
acggaatgttcaaccatcgcaaaacttaaaaattggaaggcgagtgaagacacagagagagacagagagagacagagaaacaaagaaaagaagagagagagagagagagagagagagagagtaaggcatggctgggttactggcatgggcggtaggaggtggcggaggaaaagaagcggaggacgacggcatcatcccaatcctgttttctgcagatcagcaaaagtacgtcaacgaactcgatcagaaggcgagctctctccggcgttggattcatgatctacggcaaagattgtctacccaggacatatatcagagccttccacaccttcacgctcactgcctggcctacaacgccggcctcgccctacaattaaactcccactccaccacgcgccaacaggcccaacttagagaggtgacgttgaaggaagagaatgctgcgttcgaaaatgcaatatcagattgtgagaataaaataaaggagaaattgcaggaggctgatttactgagggaaaagttgaaggagatggatg

SEQ ID NO: 216204 - DNA, 557 bp, Glycine max
ctcgagccgaatcggctcgagtagagagaaagatgggtagtagtgaatatcagactctgcacattttcttctttcccttcttggctcatggccacatgataccaaccgtggacatggccaaattatttgccgaaaagggtgtgaaggccactataatcaccacacccctcaacgaacctttcatctacaacgccattggaaaatccaaaactaatggcaacaaaatccacatccaaaccatagagtttccttctgcagaggctggtttacttgatggctgtgaaaataccgagtcagtcccttccccagaattgttgaatccgttttttatggccacccatttcctccaagagccacttgagcagctactgcaaaagcaacttccagattgcattgttgctgatatgttcttcccatgggcaactgattccgccgccaaatttggaattcctaggctcgtcttccatgggactagtttcttctccttgtgtgttaccacgtgtatgccattctatgagcctcatgacaaatatgcttcttctgattctgattcgttc

SEQ ID NO: 216205 - DNA, 467 bp, Glycine max
  unsure (1)..(467): unsure at all n locations
aaacttaagttgattgagttattataaatagtatttgattttcactagataaaaaaaaattaggtcgacaggattttaaactattttagcttaaatcattaaaatttagataacaaataatcttgagagtaaatgcatgcatagtgttgatggtggtatattagtggctcaacgaacttaatccctcaattaaagctttaaaatcagagttggatgatccaccttcttccatggcccgcctagcttgatgtgaaagcacctttgctttgttcctcatttcaatggcttcttcccctgtcattatcctcttcactgccttctccactgcatcacatgaaatactatctccctgcattccaagccatgttttagcaccaacaggtaccccaattntaaggacctcaatcaccaacttctcattgaaaaattggtcggcgaaaataggccaagtgaccatgggaacccct

SEQ ID NO: 216206 - DNA, 583 bp, Glycine max
ctcgagccgaatcggctcgagtagagagaaagatgggtagtagtgaatatcagactctgcacattttcttctttcccttcttggctcatggccacatgataccaaccgtggacatggccaaattatttgccgaaaagggtgtgaaggccactataatcaccacacccctcaacgaacctttcatctacaacgccattggaaaatccaaaactaatggcaacaaaatccacatccaaaccatagagtttccttctgcagaggctggtttacttgatggctgtgaaaataccgagtcagtcccttccccagaattgttgaatccgttttttatggccacccatttcctccaagagccacttgagcagctactgcaaaagcaacttccagattgcattgttgctgatatgttcttcccatgggcaactgattccgccgccaaatttggaattcctaggctcgtcttccatgggactagtttcttctccttgtgtggtaccacgtgtatgccattctatgagcctcatgacaaatatgcttcttctgattctgattcgtttctcattcctaacttcccgggcgagaa

SEQ ID NO: 216207 - DNA, 514 bp, Glycine max
  unsure (1)..(514): unsure at all n locations
gtcccatacttcttcctttaccacatgccttggcattgcgcatgattttacaattgggtgttaaaccttcttggtttaacacttgcagtacaaccatagaaaagagacctcacttaattccaggaactccttcatctaaaggggatcttcgcacctacatgatcgacataccacctcttggcgactcagtggtgcctgagatgctcttaaaagtattggaaccatatagaaaagaaggttgcatgcttgatgatgagagagcaaagctgtatgctagtattgtggataaaggatgtgccgcacggtttgcatttgcagctataatatgtggtgaatcctcagaagctctgatttggcttcagctgcctcaggcacttaaacatttgttgaacaaggtattgagagagccttcaccaaaagaattcacagcagcacctatctctgatgttgatgatgagacatctctactatctncgatatcatcaaagggaaaaccgacggaagaacaagaaga

SEQ ID NO: 216208 - DNA, 492 bp, Glycine max
cctatgggtgctcactccttgctcttaaccctttttctctacaccaacagtggtctcactggctggtctctccacagaactgtatagagagagatggcagctgcaacatctggtgctgtgttaaatgggttgggatcttgcttcttgagtggaggaaacaggagccaaacccttctggccactgctattggaggcaaaggtggtgctgctgctgttactgttagtcctagaagactcattgcggcagctgctgctgcaccaaagaaggcatggctccctggtgtcagaggtggtggcaacctcgtcgacccagaatggcttgatggatcgctaccaggtgactatggctttgacccactaggccttgggaaggacccagcattcctcaaatggtgcagagaagctgagctgattcatgggagatgggcaatggctgcagctctaggaaactttgaggggccaggcttggagtggagttccatggtttgaagc

SEQ ID NO: 216209 - DNA, 469 bp, Glycine max
gtttgtgaccgttgcatggctgaagtgactcagcggctgactagtgcgaaagagtcatcaagtaaacctgcattgcagagtcatgaggatcttgcaaagaaacttcaggaggaactagagagaaatcaaaaggcatcaggttccaagtctgatggatctgcaagacggatgaaggaagttgcatgtcctatttgcactgtccatctgcaggttcaggtgcctagctcgggttcagagactattgagtgtggagtttgccagcacccatttcttgtgagtgctcattgagttccgataaacattaatatggatgagaaggtgtcttcgtgtttcacaagtttaaaattcatttgttttactgagctatctcttgcacattaattatcaatgattgggattgccttccttctactattatttgtgggcttgtttcatgtactaagtttaccctgcatgcatctttttttta

SEQ ID NO: 216210 - DNA, 504 bp, Glycine max
gaaaccataatgaattcaccatagctacacatatatatatacatgtatagctatgtgttcagcgtctattttatgcaaaaagataaacgaatttaagtgagaattgaacaactaacgaagcacaccaagctttaagcacaaaataaaaaaataaaaaaaagatgcatgcaaggtaaaactaggacatgaaacaagcccaaaaataatagtaaaaggaaggcaatcccaatcattgataattaatgtgcaagagatagctcagtaaaacaaatgaattttaaacttgtgaaacacgaagacaccttctcatccatattaatgtttatcggaactcaatgagcactcacaagaaatgggtgctggcaaactccacactcaatagtctctgaacccgagctaggcacctgaacctgcagatggacagtgcaaataggacatgcaactttcttcatccgtcttgcagatccatcagacttggaacctgatgccttttgatttctctct

SEQ ID NO: 216211 - DNA, 535 bp, Glycine max
accctataaaacatgagattctaattcacaacaaaagcaatacataatacattacttgacaaatgttacctacatctttggtctcacaagaagcaacaacatgtaaatataacagcagggaagtgtactctctgacagccacaagcaatgcaattcccgaaaccaccgacagctaggaagcttataggatatagtctctttgtcaatccatactaatctgggcccacatcctaggccccactaatatactagtattgtgcattccttggtgaagacaaaaaattggaagagctagggaagccagcaaacacattcgagtaggactttgtcagatatgaaaaattggtaaccggaggcagagaaggtaccctttcacccttcttcaaaagttcttgcaagttaagtctttgcaagttcaaaacagcccttgactccttccaaatgaaggcaaggataccattttctaaaacaaagagggaaccaggctttgatccagggtatctgaacccgaaccacttgcaataccctctcccac

SEQ ID NO: 216212 - DNA, 270 bp, Glycine max
tctctctctatactataggtctcgcccaatacctactctccgctcccaagagcacgcaccaccactattgcacttcttcctcgttctccctctttttcttcttcttggctaaacccttttttctatctcactcacacaacaatgggagacgagaagaagggcaagcctgctgcttccggcgtgtggtccaccatcaagcctttcgtcaatggtggagccttcggtatgctcgccacctgcgtcattcaacccatcgatctgatcaaggcg

SEQ ID NO: 216213 - DNA, 555 bp, Glycine max
tgaaaacctaacagaagaaagtgcactggaaagaaagcagaaagcagaaagcagcgatggaaatccactcagaggaggagaatggcgtagcgaacgagtcacaagcacttgagcagaaggagaagcgaaaggggaagcacgacaagcccaagccatgggacgacgacccaaacatcgaccactggaagatcgagaagttcgacccttcatggaacgacggcggcatgctcgaagtgagctccttctccactctctttcctcagtaccgcgaaaagtacctccaagaagcttggcccatggtcaaatccgctctcaaggaattcggcgttgcttgcgaactcaacctcgttgagggttctatgacagtttcaacaaccagaaagactagggatccctatattatcatcaaagccagggatcttatcaagcttctatcacgaagtcttcctgctcctcaggcgataaaaatacttgacgatgaaatgcaatgtgacatcattaaaatcagtggcatggttcgcaataaggagcgatttgtaaaaagaagacaacatc

SEQ ID NO: 216214 - DNA, 538 bp, Glycine max
  unsure (1)..(538): unsure at all n locations
tgatgttcctgttgggagataccgcagtttgatttatggacagaacttaagtgatgtggtgattacaggtgataatggaattattgatgggcagggttctgtttggtgggacctaatcagtactcattccttaaattatagccgaccacatattatagaacttgttggttctgataatatcataatctcaaatttgacatttttaaactctcctgcttggagcatccatcccgtatattgcaggtacaagtggttcatgtttgtgtcactgacttcttaaatggaactgttctgttttataagtatcttctttacacaatgtatgcagtaacattcaaatccagaagataacagttcaggcaccaaccaagttcccttacacaagcggtatagttccagattcttctgagcatgtttgcattgacaactgcaatattagcactggtcatgatgcaattgtgctgaagagtggttgggatgaatatggagttgcctatggcaaaccaacnctcaaacgtccacatcagggggtgttatc

SEQ ID NO: 216215 - DNA, 484 bp, Glycine max
gctacagtgtcgctttaccaaaacgccaaaatacagtgagattggttttaaagcaactccggcgtgaccacaacgccacttgttccagccatgcctcctgaacagacccaacaacctctgttatcggaggagcaagaagagacagcctacgattcctcggagaaggtggtggtggtcggaatcgacgaccacgacggcgacgtggaggcgccgccgttctcatggcggaagctgtggctcttcactgggcccgggtttctcatgagcatcgcgtttttggatcccgggaatctcgagggggatcttcagtccggtgccattgctgggtactcgctcttgtggctcctcatgtgggccacggctatgggccttatcatccagcttctctcggctcggctcggcgtggctacgggaaggcacttagccgaactctgcagagaagagtatcccacatgggctaagattgttctgtagttgatgactg

SEQ ID NO: 216216 - DNA, 511 bp, Glycine max
attcttattctttttctctctttctctctgcttgcggtgcttcacaagccaaatctaacttggctctgttttctccgatctagtactactatcaatggccggaaaaggagatggtcctgctatcggaatcgatctcggcaccacctactcctgcgtcggagtgtggcagcacgaccgtgtcgaaatcatcgccaatgaccagggtaacagaaccacgccgtcttacgtagctttcactgattccgagcgtttgatcggtgacgccgccaagaaccaggtcgccatgaaccccgtcaacaccgtcttcgatgctaagcgtttgattggaaggagattttctgatgcctccgttcagagtgacatgaagctatggccatttaaggtcatccctggtcctgctgacaaacctatgattgtggtcaactacaagggtgaggacaagcagttctccgctgaggaaattacttccatggttctcatgaagatgcgtgagattgccgaggcttatctc

SEQ ID NO: 216217 - DNA, 560 bp, Glycine max
tttctcatttccaccaggcggtgtaccttcactaagattaccattggtagtaaccagccatgagaccagtttgatggctcgatgccgtagagtatatgcccatgctcatgattatcatattaattctatttcaaataacagcgatggcgaaactttcatatcagctgatgatttacgaataaatctttggaacctggaaattagcaatcaaagttttaatattgttgatgtaaagcctgcaaatatggaggatctgaccgaggttataacatcagcagaatttcaccctacacattgtaatacattggcatatagcagttcaaagggttcaattcgtcttgttgacttgcggcagtcagcattatgtgattctcatgccaaactatttgaggaacaagaagcccctgggtccagatcatttttcacagagattatcgcttcaatctcagacataaaatttgggaaggatggaagatatatacttagtcgtgattacatgaccttaaagttatgggacatcaatatggattctggtccagttgcaacgtccaggttcatga

SEQ ID NO: 216218 - DNA, 557 bp, Glycine max
atttgaacgctctcatgatgggcagatcactgtgataatttacaagggaacacatgatcatcctaaacctcaaccaaaccgccgttactctgctggaactattatgtctgtgcaagaagagagatctgataaagtttctttgaccagccgagatgacaatggatcctatatgtgtggccaggggtctcacctggctgagcctgacagtcaaccagagctatcgcctgtagcaacaaatgatggtgatctagatggtttgggggttttgtcaaaccggaataatgatgaggttgatgatgatgatcccttctcaaagcgaagaaaaatggaccttggaattgctgacatcactcctgtagttaagcctatccgggagccacgggttgttgtacaaactctgagtgaggttgatatcttggatgatggctaccgctggcgcaagtatgggcagaaggtggtgagaggcaatcctaaccctaggagttattacaaatgcacgaacactggttgccctgttagaaaacatgtggagagggcatctgatgatccaaaagctg

SEQ ID NO: 216219 - DNA, 493 bp, Glycine max
ggaaggaggaaggagagagactttatatacgatgtaacagggcactgtggaattgcgcgtgtgggtgtgttgtttgaggttgttgtcgttggttgtgttgtgttgtgttgtgtgggttttatgagagtgagtttcacatggggagggtttttgttcttgaattggatggcagatcttacggatgcaaattctgcaacaccccttttgccctcgctgatcacattctctctcggaatttcaactgcagtcaagggagagcctaccttttcagcaaagtggtgaacgtaatacttgggcctcaagtggagagaatgatgatatctggactgcacactgttgaagacatattttgttgcaactgaggaaaccttcttggatggaaatatgttctggcacatgaaaagaatgaaatatacatagaagggaagtttgtgcttgagaggtggactattgttgacaatgaagaggatgaattgaattttgatgcacaagc

SEQ ID NO: 216220 - DNA, 531 bp, Glycine max
gactcataaataagatgaattatatgccctccataaatatattgcaagattcggtgcgctatgacaatatttaagacttatatatgctgcaaatgagctaagcttaagttgctctaagaagtttctatgtgaaattgtatcttgaggaatactaaaggtataatatatttgcaacctacaatactaaaggtataataataatactataatatattaattgctagctacaatacttcaaattcatgaaaaagaagccacttgctaggcgttttctgtgtcacttgagccagcttgagagccagtttgagagccagcttgtgcatcagaattcaattcctcctcttcattgtcaactatcgtccacctctcaagcacaaacttcccttctttgtatatttcattcttttcatgtgccagaacatatttccatccaagaaggtttccacagttgcaacaaaatatgtcttcaacagtgtgcagtccagatatcatcattctctccacctgaggcccaagtattacgttcaccac

SEQ ID NO: 216221 - DNA, 496 bp, Glycine max
caggttcaaaccggagcaaaaaaaacttgttacgatggtttcttccgacaaggatccacgagaggaagtccttcaagcatggtacatggatgatagtgatgaagatcaaagactcccccaccacaaagaacccaaggagtttgtctcgttggaccaacttgctgaacttggagtccttagctggaaattagatgctgataaccatgaaaatgatccagagctgaaaaagattcgtgaagagcgtggctacacctacatggatgtttgtgaggtctgcccagaaaagttgccaaattatgagcagaaaatcaaaagcttctttgaagaacatcttcacactgatgaggagatccgcttttgtgctgctggaagtgggtattttgatgttagggattgcaatgatgcttggattcgagtgtgggtcaagaaaggaggaatgatcatcttacctgctggaatttatcatcgctgtacactagatgagagcaactacatt

SEQ ID NO: 216222 - DNA, 528 bp, Glycine max
  unsure (1)..(528): unsure at all n locations
gataaatcagttaattgaatcttataaataagaataaagatagtacttgatagcataattttacaaatcaactaaatatatgacatagcttaaaatgtactataacttagatgaatatgtagttataatattatggctatctttcaaagggtcacctacacagaaacacaggcgtgggtaaaaggcttaaagggtcatctacacaaaaaccataacataaaaagctgggaccctttatttaaaggcaccattattttcatttgttcaaaccttactttagcaacacaaagtctcagtcccacgtactacgattaggcggaaccagatcttacgcggcggcatcaacagcatggttgccaacatccttttccacaaaatccttgacatattgttgtcttgcagggagatggtcatttggacgattgtgtggagtccaaactggctcaccaacaaaaaaacgcanagccttaatgtagttgctctcatctagtgtaaagcgatgataaattccagcaggtaagatgatca

SEQ ID NO: 216223 - DNA, 389 bp, Glycine max
tctctctctatactataggtctcgcccaatacctactctccgctcccaagagcacgcaccaccactattgcacttcttcctcggtctccctctttttcttcttcttcgctaaacccttttttctatctcactaacacaacaatgggagacgagaagaagggcaagcctgctgcttgcggcgtgtggtccaccatcaagcctttcggcaatggtggagccttcggcatgctcgccacctgcgtcattcaacccatcgatatgatcaaggcgaggattcaacttgagcaaggatcagctgcgcaggtcacttacaccatgcttaagaatgagggctttgctgccttctatgagggtctatctgttggattactcaggcaggctacatacac

SEQ ID NO: 216224 - DNA, 485 bp, Glycine max
  unsure (1)..(485): unsure at all n locations
gggagggagatccaaaaagagagagtggaaaagatggcgcggttgatcacagtggtgtggtgcgcggtggcggtgctattatgcgccgcggccggtgcgtcgtgggtggaggaggcggcgaacccgataccaatggtgtcttgcgtagaagcggatgtggttcgggtgatcggagagtgccggcgtgcgttgaagtttgctaggttcgcgagcaggttcgggaagagttaccaaagcgaggaagagatgaaggagaggtacgagatattctcgcagaatcttaggttcatccgctcccacagcaagaagcgtttagcctatactctctatgttaatcattttgctgatagcacttgggaggagttcaaaagacacagactaggagctgcccaaattgctctgtcactcttaacggaaccacaagctcaccgatgctgttcttncttcaacgaaagacttgagacaagaaggtttagtgagttcag

SEQ ID NO: 216225 - DNA, 567 bp, Glycine max
gctcacagaccattatttatttatttatggattttctgaatatgtctgcttcttttctatggaaacccttttgacttttccaaagtgtacatgatttacttcaggtttactatgttgctggagagaatcttaaacggatacagtgggaaaaagtttgaagttcaaatcccatagctcaaaagtaccattaacgaaatcataatgtgctcctttcaaagccagagttttgttaacaactccatctctaacaaatggatatgttaataggttaccaagtgatacgttcacagcttccttctcacagttagtacattgctctgagaaacttaagtcacttggtcctgctttaaccttggactttgctggagtacaaatttggacccattgctctatgaattcacttgcagtggtcccgtcatctgggatagacatgagcccctttatacctccacagcaactgtgtccaataactacaatattcttcacctttaaatgcaatactgcattttcaatggcagcccccagctctgaatacttcgtcttgtcatatggggaaccatgttagca

SEQ ID NO: 216226 - DNA, 425 bp, Glycine max
gttcaattaattactcgaatagtaatcgagtggctaaatttatgaacccctccaactaaagccaattattattttattttcttattaatcaacaatttcctatatagctagaacggccctcacaaattgcaaatcctaatttgttaagaattaatcgaattgaggctttcgcatcatcattagctggaaccgaaattttggggagggccgggtcacaatttgcatctgattaaacaaagtgttggaatccccgaagttatacgttctggaaaagccgtatattcttcttgttgatcgacgattattacaatatcaggtgaccccgacatatattgaatgccgacaagatatgattccgaatgagctaagcgcctcttcagtataacggcatatatttttggaaaactaggtgacctccccgtctt

SEQ ID NO: 216227 - DNA, 631 bp, Glycine max
  unsure (1)..(631): unsure at all n locations
tgcttagagcataagcantcttcganntttatgacacaacccgaagctggaattcggttcgaggggatggaagcgaagttgccagagatgnttaagctttctcatggctactaccttggggtcgcaacgctgtcactaccgtcgtcttcccgtgtttccattggcggagctccgattcgccaccaccgttctccgaaccggatcgggttgttgccgcctctcaaatgctcctctttggagccggaaaccgccccgcctcctcccttcgactggactcacaagttgatcgccggtgtcgccggcgtcggattcctcgaaacctcgtacctcacttaccttaaactcaccggcgcagacgccttttgccccgtcggcggcggcacctgctctaaaatactcgacagtgattacgccctcgatttcggtattcctcttcctctgattgagatggctgcgtatggcttggctgctgcacttggtgttcaattggcttcgaagaattttcgttntgggattgagaaaccaactgctgaagcagtgttgcttggagccacaaccttcatggcagctgctagcgcgtattttttgtacattctaaccaccagattctttgactcgtcttgctcctact

SEQ ID NO: 216228 - DNA, 542 bp, Glycine max
aaaatatattcaattttgcgtttgcctcctaaaggatgaaagatgggtcaagcatgcggttgctaccaagtcgatcagtcaaatgcgccttcaaggagcattttggaaaatttgatgatgtcctagagcctggatgtcactgcctgccttggtgtcttgggtaccagattgctggtagtctgtcgctgcgagtgcagcatcttgatgttcgatgtgagacgaaaaccaaggacaatgtttttgtcaatgtggttgcatctgtgcaataccgagctgtgtctgagaaagcatctgatgcattctataggcttaccaacacaagggagccgatccaatcatatgttcttgatgtcatcagggccagtgtaccaaagatggagttggattctgtctttgagcagaaaaatgatatagcataggctgtggaggaggagcttgagaaggccatgtcaacctatggatttgagaaagttcaaactctcattgttgatatagagactgatgttaatgtctagagagcaatgaacgagataaacgcagct

SEQ ID NO: 216229 - DNA, 500 bp, Glycine max
attgtattcataacatcacacaatgggggaagtgattataaccaccaaaaccccaaccatgaatccagatcgtttcatatcatacgtaccctactgttgatgatgttgcaggttgtacgtgctgaaaaggaaattatgtgcattgagagggatagggaagcactcctgcaattcaaagctgcccttgtggatgactatggcatgctatcatcttggaccactgctgattgctgccagcgggaagggattcgctgcaccatccttaccgagcatgttctaaggctcgaccttgacggccagcttaattattattcatatggaatggcctcgcgacgttatatcataggagagatccaccagctcgggatggggttgcaacatttaaactatttaaaccatggttcgaattattttcaaggctgaggaatcccagagttttttggttatcttagcaacctgagacaccttgaactgtgaaatttttgattttggcggaaaaa

SEQ ID NO: 216230 - DNA, 530 bp, Glycine max
  unsure (1)..(530): unsure at all n locations
acaaacttccttattttcttccaaatcnctantacccagaaagcacaaaagctacacacatgggcaatcttttctttttcttcatttcgtccaccagattcatacacaattcacgtatacgtacaattattaagtaattgatttccaccaatctctttctttgatgatcaatcattaattgatccattgttgtttacctgtaaaattcatagagatttcgtacatactagttattgatcgattcatcgattatgaatgatgatttccattatatatatgaagagattgatgatcgtgtgttgtttttgtttggaacccaaatagaaggaagagatggcaggagaatcatacgaggaagccatcacgagtctgaccaagcttctcagtgagaaagctgagctcggtggcgttgccgccgcatagataaaggagctgacggcggagcttgatgccgccggttcgaagccgtttaacccggaggagaggatcagaaccgggtttattcactttaagaatgagaaatttgagaa

SEQ ID NO: 216231 - DNA, 590 bp, Glycine max
cagaagcttgtgatttagtttttgatgctgcttgtgagggaaaacaattcttaattgtgggtacaaaaaaaaaagcagcggatttagtagcacgggctgcaataagagctcggtgtcattatgttaataaaaagtggctcggcggtatgttaacgaattggtatactacagaaacacgacttcaaaagttcagggacttgagaatgcaacaaaagacggggagactcaatagttttccaaaaagagatgccgctatattgaagagacatttagctcatttggaaacatatcttggcggcattaaatatatgacggggttacctgatattgtaataatcgtcgatcaacaagaagaatatacggctcttcgagaatgtataactttggaaattccaacaatttgtttaatcgatacaaattgtgacccggacctcgccgatatttcaattccagctaatgatgatgctatagcctcaattcgattaattcttaacaaattagtatttgcaaattgtgagggccgttctagctatatacgaaattcttgattaataatataataaaaaaattattggatttagtttgagggg

SEQ ID NO: 216232 - DNA, 504 bp, Glycine max
ggaagagttatcttgcttcctgatgcttatctacagacttcaggtgcaaaggctgctgcatgtggtcacttatcatcattgtctgcagtttctgataaagtttacagtgatcagggagtgcctgcttcttttcgagttccttctggggcagttttaccatttggatccatggaattggagctagagaagagcaattcgactgaagcattcaggtctatcctggaaaagatagaaacagccaagctggagggtggtgaacttgatgttctatgccatcaactccaggaattaatttcttccctgaagccatcaaaagacataattcaaagcattgggagaatattcccaagcaatgcacgtttaattgttcgatccagtgccaatgttgaggacttagctggaatgtcagcagctggactttatgaatcaatacccaacgttagtccttccaatccaacagtttttggaaatgcagttagccaagtatgggcttcactgtacact

SEQ ID NO: 216233 - DNA, 453 bp, Glycine max
ctcacagcccagtattcatttatttatggattttctgaatacgtctgcttcttttccatggaaacccttcagacttttccaaggtgtacatgatttacctcaggcctactatgttgctgcacagaatcttacactgatacagcgtgaaaaagttagcatttcacatgccatgactgaaaattcccattcacgaaatcctaatgggctcctttaaaagccagacgcttagatgacaactccatctctaacaaatggatatgcttatatgctaccacgtgatacgttcacagtttccttttgacagatcgaacattgctctgagaaacttaagtcacttgggcctgctctaaccatagactttgctggcccacaaaaatggacccattgctcattgaactcacttgcagtggtgccgtcatctgggatagacatgagcccctttttacctccaca

SEQ ID NO: 216234 - DNA, 550 bp, Glycine max
tgccattgaagatgttatctaccatattgatacatatgatgtgactacaattagagcgggcacacctatgtttctcatgtctcggaagaccaaatcacttggtgtcaaatgggttatctcaggagaaggatctgatgagatctttggagggtatttgtacttccacaaggcacccaacaaggagggagtccacagagaaacatgccggaagatcaaaacacttcaccaatatgaatgcttgcgagccaataaatcaacatttgcttggggtctagaagcccgtgtaccatttttggacaaggcgtttatcaatgctgcaatgagtattgaccctgagtggaagatgataaaaagagatgaaggacgaattgagaagtggattctgaggagagcctttgatgatgaagagcatccttatttgccaaagcacattttataccgggagaaagaacacttcaatgatggaagtggctatagttggattgatggccttaaggccatgctgcaaacatgtgactgaaaaaatgatgcttaatgtggtacattaccc

SEQ ID NO: 216235 - DNA, 455 bp, Glycine max
ttttcgggggtcgacgacgctcacttgtcggggggcgcccttttttttttttttttgtttctttttttaataagcacgcattcattaatttccattgaagtccgaaaacagaaaccaaaaatacaggatgaggaaatctgtataaagctaaaacaaatgggaatgtcgtttaagtccaacaaacaaagtgggggggctacagatgctttgcaaatttttcaatgacttacaaccctgggggcttgtaagcgatgaagatgatgcactgtacttggcgaacgtagggaaatacaatgatacggatgaagccattggggtatgcatgattagcctctcgaagcttcttcaacacctgagaagcatttgtgcggcctagcatttgcagggtccacatgggccacaagcgtgcatcatagaatccatgagacctgtcgcgctcactgaacacaaaaccg

SEQ ID NO: 216236 - DNA, 498 bp, Glycine max
  unsure (1)..(498): unsure at all n locations
gttacattcttacccactgcctttcactantcccatttaccccttcattattgtttcgggtcaattaatctctattcctatcccctcaccccaatcattatttagctggctttaggacatagcaaattccagtgcaagaaaaaatgaccaagatcttctttgtattgctgctatgtctaatcatagcatcttcttctgggtttgtgaattgctctgatgttgagaaggaggaaaagattggaatatttgagctcaagaaaggtgacctttctttgagggtcaccaactggggtgcttcaattttgtccctggtgattcctgataagaatggaaagttgggtgatgttgttcttggatatgattctgtttaggattacagtaatgatacaacctattttggagctactgttggccgggttgctaacagaattggaggagcttagtttactctaatggaatctattacaattattgcttatgaagaaacaatacttttat

SEQ ID NO: 216237 - DNA, 584 bp, Glycine max
ggttcagttaattagtttctctcttcgtactttctcttgtttccacaaagccatgaaaggacgttctttgcacatagcaatgtatccatccctggccatgggtcaccaaaccgcattcctccacctatgcaacaagttagccattaggggccacaaaatcttcttcatcaccccaccaaaagcacaagccaagttagaaccattcaacttgcacccaaattcaatcacctttgtcaccatcaatgttccacacgttgaaggccttcctccagatgcacaaacaacagcagatgtcacttaccctttgcagccacagatcatgacagccatggatctcaccaaagatgacatagaaacccttctcactggcctcaaacctgacctcgtcttctatgacttcacacattggatgccagccttagcaaagcgtttaagcatcaaggctgtgcactattgtactgctagctctgtcatggttggttacactctcacaccgtctagatttcaccaaggaacagacctaatggaaagtgatctcatggaaaccccagaaggtaccctgactcatcaatcaagcttcaact

SEQ ID NO: 216238 - DNA, 558 bp, Glycine max
gataatcatattaagcagaagagatggtagccattcggatcaagctcaaacttccttcttgaatacgcgctcctccggacgcacattccacaattagaggcaaaaggtgattaggagcatattctaccaaacgggtgattttctgacctactgcggatcccatactggccccgataaactgaaaatccataattacaatagctacaggaataccatttagttgaccagtacctgtttgaacaggctgaggtaatcccgcttttctttgataagaatcaatacgatctttataaggatcctcttcggaatgaaattcaataggatccagagaaaccatgtgttcatgcataggattgcacgttcccgaatcaagcaaaagttggattctatctgaactgcccattctgaaatgatatgcacagtattcacaaatattcattttcgatacaaaaaattgtttataattgaatacataacaattttctcattcaagccacaaatgcttatatttttgactttgatcgagatgattagaactttatcctatagtggaatcac

SEQ ID NO: 216239 - DNA, 571 bp, Glycine max
  unsure (1)..(571): unsure at all n locations
cagaaaaacaagtagttgagaactatgatgnatgaaatggcttcctcaatgatctcctgggcagctgttaccaccgtcaaccgtgccggtgccggcatggttgctccattcaccggcctcaaatccatggctggcttccccacgaggaagaccaacaatgacattacctccattgctagcaacggtggaagagtacaatgcatgcaggtgtggccaccaattggcaagaagaagttcgagactctttcctacttgccagacctcgatgatgcccaattggcaaaggaagtcgaataccttctaaggaaaggatggattccttgcttggaattcgagttggagcacggtttcgtgtaccgtgagcacaacaggtcacctggatactatgatggacgctactggaccatgtggaagctgcctatgtttggctgcactgatgcttctcaggtgttgaaggagcttcaagaggctaagactgcataccccaatggcttcatccgtatcattggatttgacaacgttcgccaagtgcagtgcatcagcttcatcgnctacaagcccccaggctttt

SEQ ID NO: 216240 - DNA, 555 bp, Glycine max
  unsure (1)..(555): unsure at all n locations
caacggtggaagagtgcaatgcatgcatgngtggccaccagttggcaagaagaagtgggagactctttcctacctgccagaccttgacgcatgcacaattggcaaaggaagtagaataccttcttaggaagggatggattccttgcttggaattcgagttggagcacggtttcgtgtaccgtgagcacaacaggtcaccaggatactacgatggacgctactggaccatgtggaagctgcctatgtttggttgcactgatgcttctcaggtgttgaaggagcttcaagaggctaagactgcataccccaacggcttcatccgtatcatcggattcgacaacgttcgccaagtgcagtgcatcagcttcatcgcctacaagcccccaggcttctaagtgtgaaaaatttgcaaagcatttgtagccgccaccccactttgtttgtttgtacttaaactacattcccatttgtttttgctttttgagatttcatcatcctgtattttttgggttctgttttccgacttcaatggaaattaatggatgagaactaatg

SEQ ID NO: 216241 - DNA, 372 bp, Glycine max
aggaataagtaggcggggcttcaacaaggagttaatatagtaagaaaggtacatccttggaaaaagcataaatcaaagctaatctaatggcacacacaaccatgagttcatgaaatccagtcattagttacattcgttgttggggtgacaatatcttagtaaagtactcaaaatataaattaatagatataataaagtatctaaatgatggttcccccatcagacaaaagaccagttcatgaatacgaaggcaaggcagtgattggaatcatcatcatcgagaactttccatgcaatggcctgctcataagacactgggcgaatcatacttgatacacatattcctgctggcagatatgcaaatccccgttg

SEQ ID NO: 216242 - DNA, 576 bp, Glycine max
  unsure (1)..(576): unsure at all n locations
aagcttaaaaattannnatctaaanntnaagacacgacgaagctcggaatcggtcgaggcaacatgctcgccctaagtccaactcctctgctccgctcttatcgctggcggggcaatttgcgcccgcgcccgcccgagccaggcgtggcgctaggagaacgacacgccccccgtgtacgaggttgctctgacttcgactaccagcgttcgtcggggcctgaaccaggagtggatgagctcgatctgtcaactacggtgtcgccgatctcccccgaggagttcgccgaggccggtctcggacccgatgacatctcgttgatccagtttatggccaaccaggagatcggccacgccgcgctcttgaccaacatcatcaacaacggcggccgacccgccccgaagcagtgccagtacaagtacgactttgacaccgtccgagactttgtcaacttctgccagaggctcacccgatggggagagtccggagtgtacggtttcctcccgcaccttgactcgcgacccgtcgcgcagctgcttttccagccatcaccaccgaggcgcgacagcagatggtct

SEQ ID NO: 216243 - DNA, 450 bp, Glycine max
  unsure (1)..(450): unsure at all n locations
gcaacatgctcgccctcaagtccancctcntcctgctcccgctcttcatcgctggccgggccaacgctgcgcccgcgcccgtcccgagcccaggcgtcggcgcgaggatgaacgacacgccccccgtgtacgaggttgtctctgacttcgactaccagtcgttcgtcgtgggcctgaaccaggagtggatcgagctcgatctgttcaactacggtgtcgcccgattctcccccgaggagttcgccgaggccggtctcggacccgatgacatctcgttgatccagtttatggccaaccaggagatcggccacgccgcgctcttgaccaacatcaataacaacggcggccgacccgccccgaagcagtgccagtacaaagtacgactttgacaccgtccgagactttgtcaacttctgccagaggctcacccgatggggagaagccggagtg

SEQ ID NO: 216244 - DNA, 469 bp, Glycine max
  unsure (1)..(469): unsure at all n locations
gagcgtctttagttgaaaaatcacgcttanatgcctcaagatagaatcaaaattctgaggagtgctgtaggaaattgctacaacgatgatcctgttctttcttcctgtggcatttttattgagaaacaagtgagtctgattgaaggtcgtgttcttgagacaccaaaggtatgcattgatcgattatatatttcacatttttgtgtgcacaggatatatagttgaggagagataaaagagaaaatggtgtaaaggaggtggttagtcaagtgtctgttagtgagagaggaaccacattaactagattttcaaccaagtcccaattctatttcaccaaatgactagattttatttcttttttattttatttgattaatccatttcaaatgtacttaaatatctacgcagaacattgaacggccatatactttgatagaggaggaaccacagttgagaaaatctaaccctg

SEQ ID NO: 216245 - DNA, 360 bp, Glycine max
gaccaaagcaaacaaacaaaacagccctcgtcattccaattcgaagaagaatagtagggggagagtttgttggcaaccatggcgatgccccacctcgtttctggtgccgcggcatgtggcgactcttcttcttcttcctcaaaccctctcgcttccctcgccaacgcccttattggctcttcgtccaaaactcaggagaggctgaaggagattcccacatccactcctactgaccctgcttcccaattttactccacagctctccccgccaatcagcttccccgtttccaattcgataagcctctattgaatttaaactcccaggctttggaagtttttgcataagttcccgtggcttca

SEQ ID NO: 216246 - DNA, 453 bp, Glycine max
  unsure (1)..(453): unsure at all n locations
gaactttatattcacattggatggccctcgtttcgcaaatatggncatgcttttgagggggtcaaaataattgtgactgatcctgataccgccctaagtactctcactcgtgaagttaaggaagttggccctgacgggcaagaggtgactaaggtggtgccagctgtatcagaagaagagaaggattctcttgtgaagaatattagaagacgaatgaccccccaacccttgaaaattagggcagatattgaaatgaaatgttttcaatttgatggagttcttcacatttaggaggcaatgcataaggctgaagctgcaggatatgatgactgccccgtcaaaattaaacttgttgctcccccactttatgttcttaccacccagacacttggcaaggggcagggaatattggttctcaacaatgccatagctttctgcacttgagccatagaa

SEQ ID NO: 216247 - DNA, 539 bp, Glycine max
cttgcattgcaggatggtttggcttaaataattacattggacttagcatcaacactgggggcaggatctggtaatgcccgctcagctggccacacgtgactcgaataactacaaccttaggtcggtcctcacaattgcattccaatttacctttgagaaccatttgcgggacaatgtggctgatatggctcgccagtatgtgcgtaatgttgtgcgatctgttcagagggttgccatggcaattgctccctctaggctcagtacacagttggggccaaagtcatttcctggtccaccagaggctcttaccttagcaagatggatctgcagaagctacaggctccacacctgcacagagcttttcagcgttgagttcacatttggtgatgcaatcttgaaacaactttggcaccattcagatgcaatattgtgctgatctgtaaaaacagatgcatcttcggtgttcacccttgcaaaccaagctggacttgacatgcttgaaaccactcttgttgctcttcaagacataatgcttggat

SEQ ID NO: 216248 - DNA, 529 bp, Glycine max
attttatttattctatttttttttttaataaattctataggcatacgaattcattttagggggtattaatattatattcaaatgaaatacaccgatattaaaagatactaattataagaatttgaaagtgaaattataaagttattaaatgattaatcaatttttttctacctgttcctgtagtaaaaagagttccatctgttcttgaatagcttccttcaaaaggacttttgcttccccagtgaatgtcttggtagaagatatgatttctttgaattgaggtttattcgtgtttaagtaagcacgtaactaaacaagaaatttccttacctgtccaatttctaatgaatcaagataaccattcgttccagtataaatagttattatttgttcttccacggtaagaggagctgattgggattgtttaagcaactcgcgcaatcgttgaccttttgctaattgattttgagtagctttatcgagatcagaagcgaattgggcaaaacttctaattttgcgaattgtgcta

SEQ ID NO: 216249 - DNA, 537 bp, Glycine max
gcaacatgctcgccctcaagtccatcatcttcctgctcccgctcttcatcgctggcctggccaacgctgcgcccgcgcccgtcccgagcggaggcgtcggcgcgaggatgaacgacacgccccccgtgtacgaggttgtctctgacttcgactaccagtcgttcgtcgtgggcctgaaccaggagtggatcgagctcgatctgttcaactacggtgtcgcccgattctcccccgaggagttcgccgaggccggtctcggacccgatgacatctcgttgatccagtttatggccaaccaggagatcggccacgccgcgctcttgaccaacatcatcaacaacggcggccgacccgccccgaagcagtgccagtacaagtacgactttgacaccgtccgagactttgtcaacttctgccagaggctcacccgatggggagagtccggagtgtacggcttccttccgcaccttgactcgcgacccgccgcgcagctgcttcttcagtccatcaccaccgaggcgcgacagcagatggtct

SEQ ID NO: 216250 - DNA, 584 bp, Glycine max
  unsure (1)..(584): unsure at all n locations
gcaacatgctcgccctcaagtccatcttcttcctgctcccgctcttcatcgctggcctggccaacgctgcgcccgcgcccgtcccgagcggaggcgtcggcgcgaggatgaacgacacgccccccgtgtacgaggttgtctctgacttcgactaccagtcgttcgtcgtgggcctgaaccaggagtggatcgagctcgatctgttcaactacggtgtcgcccgattctcccccgaggagttcgccgaggccggtctcggacccgatgacatctcgttgatccagtttatggccaaccaggagatcggccacgccgcgctcttgaccaacatcatcaacaacggcggccgacccgccccgaagcagtgccagtacaagtacgactttgacaccgtccgagactttgtcaacttctgccagaggctcacccgatggggagagtccggagtgtacggctttctcccgcaccttgactcgcgacccgccgcgcagctgcttctccagtccatcaccaccgaggcgcgacagcagatggtcttccgccagttcttcggcgcgcaccccatgcncgtgtggttcgagagc

SEQ ID NO: 216251 - DNA, 450 bp, Glycine max
ccagcaactaaaagatttatttgaatggatggctctcagccagggtttacagctacacccaatttatgtgtgaagccaataataactcaagcaagataaaatttactctaacagactttgaagggtcctacaacatatgctcttttacaagattgacaacactgacacctgaggatgggaaaattttccaagatgaaaagtgtgttacacatcgactgggacggcttgatcaagaacaaggactcctggaagctatttgccttccaataactccaaactggcaccaccaccagtagatatgtgggtcatgacactagcaactactactttctacacagatgcaacagaatcttctcctacaataattgtggacaccccctttccactgaggtcaaccaggttctttgcaatagcctttggtccaacagcaaacttgtcaaactcaaacac

SEQ ID NO: 216252 - DNA, 465 bp, Glycine max
ttcacacctaacacaaacccacttcccttcttttccggaggctcaaccggccaccatgggccttcttctacaccacccaacctccctcgcctagatctactcagatcacaatcccaaatctctcaaattcggcgtcgtcgttttagctcaccttatataaaaaaagcagaaaggatgccgtttcctctataattcgcttactcgcgctgtgtgctgtgtttctttctaacattcgtgttccgtgtgtgcgtttctttttttgttcctttgttctttttggagcttctttgatttttccggcgagaagaggatgacgtccgtcgcgaggcagccaacgtggaaggagcgggaaaacaacaagaggcgagagaggaggaggagagccattgcggcgaagatcttctccggcctgcgaatgtacggcaactacaagctccccaaacactgcgacaacaaccgaagttc

SEQ ID NO: 216253 - DNA, 530 bp, Glycine max
ccataattccattcaaagcagaagcataatcagttcctcataaatatccacagttttcgcaaaaaaaattaatataatgtacagcagtaaatatatatatatatatatatatatatatatatatatatatatcaaattagttagcagcctccccggcattattgtcatttccatcctccaagttcttctgttgaagttcatgttttagtctttgatcctccaagtttttctgttgaagctcatgttttagtctttgatcctccaagttcttctgtttaatctcatgttttagtctctgtatctgccgatccttctcttctaatttttcttgtaacataagaaccatttcattggatctttccacatcatttggcagtccttccatgtgcttgtgcaacccttcaaattgatttctaagttgtgaattttgggacttctgcaatgcaagtttcatccctaattcatgcatcttcccctcagacgcttgatttccaatctctttattttcctctgcaggggtctacatttag

SEQ ID NO: 216254 - DNA, 477 bp, Glycine max
  unsure (1)..(477): unsure at all n locations
tagctatacgttaacgantagtnaanntttaagaaagnacgaagcncgaattctctcgagcagaattctctgggctagatccaccctaagtgtcacatatgtaacagtgctagagagggttctttttttgatcttgtagcttaccaccccactcccaagaccaatggatcaactactgtgaggggagagacagtggccaagttgaaggtggcaatcaatggtttcggacgcattggtagaaactttcttcgctgctggcacggccgaaaagactcaccccttgaagtcgttgttgacaacgacagtggtggtgtcaagaatgctttgcacctgctgaaatatgattctatgctgggaacctttaaggcagatgtgaaaatactagacaatgaaaccattactgttgatggaaagtccatcaaggttgtttaagcaaggacccttttaagcttccatgggctgatcttggaattgaca

SEQ ID NO: 216255 - DNA, 599 bp, Glycine max
  unsure (1)..(599): unsure at all n locations
aagccaattcatctcgatccctagtanacctgtcccagaatttntcccgggctccacgcgctctctactcggcgcgcgccctttttttttttttttaaaattttttttcttccataccatgattaatttatttaggggtccacagaattcaacagcttcttcaataaagaaaaccttttggctcttccaaaaagatcatgatttacttcaagtttactatgttgctgtagagaatcttatacggatacaccgcgaaaaagcttgaagatcaacaccccctcactcaaatctaccaataacgaaatcataatgtgctcctttcaaagcctgagatgtcgataacaactccatatctaacaaaccgatatgttaataggttaccaagtgatacgttcacagcttccttctcacagttagttcattgctctgaaaaacttaagtcacttggccctgctttaaccttggactttgctggagtacaaatttggacccattgttctatgaattcacttgcattggtaccctcatctgggatagacatgagccccttttttcctccacaagaactggggtccataactacaatatttgcaccttaa

SEQ ID NO: 216256 - DNA, 476 bp, Glycine max
  unsure (1)..(476): unsure at all n locations
agggggcaccaaancaccaaatctacctcgtacaaataacttatgagctttctgagggggtaaagtttgaccttgctagagtagaagccccaaaggaagctacccttgtttaatataaccagtgcttagagacaatatctaaactggaggagagaataaaagaagttgaggataatgcattaaggattcatgagcatgctgatatagcagaaaaagaaatgaaggctttgaaattacaagtcactaaacttaatgaagaaaaggaagatgccactctccgttattagcaatgcttggagataatttccagtttggagtataagctctcttgtgctgaaaaggaggcgcgtattcttaatttcaaaatagttgatggggatgaataattacagagttctgagcaatagtgttttttttggagacataaatcacacgctgaagtcggaatacaatttttggacaataatggggtctta

SEQ ID NO: 216257 - DNA, 536 bp, Glycine max
  unsure (1)..(536): unsure at all n locations
tgtnnaaanaatggggnnnnagcagttgcaatcgnnctatactagnanaccaatnngcagggtcgaccagctcactcagtcggctggcgccctttcttcctttttttttttttttattttttaattttttgtgctaattgttttttctcggtgaatgggataaaataattattgattcttacagtgtacaactaagagcgtattttattgttcaaacataattctgagacttgcgtgaatgattatgcaacatataattcggcttttccatcaatgaatagactcatgaactcttcaccatccacagtttctttttctatgagaagttgaacaagcttgtgaaggatatcaatgtgagttgagataatatgtgttgccctagaatatgctctctataccagctccctcactttcgcatccactacatccggagatgccatggagtaatccttttgcgatgacatcggatgacccaagaatggatttccaccaggtccaccaaaggcaacttgtccaatttttttgctgaatccaaa

SEQ ID NO: 216258 - DNA, 520 bp, Glycine max
  unsure (1)..(520): unsure at all n locations
ntggctagtagcanatgacgnantnagnaannntttaaagngaganacnaagctnggaattcttttcgaggttctctctacctacacagcaagatccctgnttttttttgagccaagatggctggctcaggtattgttttcgaaggctatgaaaaaagaccccagatatcattttttgaacatggtgtgtttgctgaccctgaaggaataggcctccgagctttgtccaaagaccaattggacgagattcttaaaccagcagagtgcagtattgttgcatcactttcaaacgattatgttgactcttatgttctgtcagagtcaagcctgttcatctatccttataaaattattatcaaaacttgtgggactaccaaattgcttctgtccatccctgtcatcctcaagatggctgatgctcttgacattgctgtgaaatctgtgaggtacacttgtggaattttattttttctggggcacagtctttttctcaccgcaatttttaagaggaggtttttgt

SEQ ID NO: 216259 - DNA, 569 bp, Glycine max
acactgtataatcccccacaacccttattttttttcaggatccagccctctctctctttggaagtgttggaatttgttttcaactggcccacgggaaaaaaaagtcaaaaaacaagaaaaaaaaggggaatatcgtttttgacttttgtatatatcaagacaaaatcgagtttttattataaagtggggtattttacaattatgaatatgtaccaattgcaacagtttcatattcaacccatgatgaagatggataacacgatgaggaagagggagagaagcaaagccatggagaaagagaggcttcaagtgatggacttgagtggcatgtccttggagtttcttcccaaaccttcgcttgatttagccaccatttgcaagttggacctatctaataacaatctccaggaaattccggaatccttaacggctagacttctaaacgtggaagtgttggacgtgcgttccaaccagctaaactcccttcccaattccattggctgcctctctaagctcaaggttttgaatgtctcaggcaacttcatcgaatccctccccaaaccattgag

SEQ ID NO: 216260 - DNA, 598 bp, Glycine max
gtgaggttttacaaggaggaagaaaagatttgaccccgagcatgcaaaaaagcttgcctgggtggcagatctgtatgtgaatgatgcatttcctcctgctcacagggcacatgcatcaacagagggtgttactaaatacttgaagccatctgttgctggttttcttttgcaaaaggaacttgattaccttgttggggcagtatcaaaccccaaaaggccatttgctgccattgttggtggctccaaagtctcatctaaaattggagtgattgagtcacttttagaaaaagttgacatccttcttcttggtggaggaatgatcttcacattttacaaggcacaaggtctttcagtgggttcatcccttgtagaagaagataagttggatcttgctacatcactacttgcaaaagccaaggaaaagggggtgtctctcttgttaccaagtgatgtggtgattgcagacaaatttgctcctgatgctaatagcaaggtcgtgccagcatctgccatcactgatggctggatgggattggatattgctccagattctgttaaatcattcagtgaagcattggatactacccaaccatcttat

SEQ ID NO: 216261 - DNA, 483 bp, Glycine max
aattggtcttggatcctcaattgtagttgtgtttacaccaagtgatgacctggcaagggaagtttttgatgcttctgaagcgagtggggacaaactatggaggttgccgctagaagaaagttactgggagtcaatgaaatcaggagtagctgatatggtgaacactggtggtcgaccaggtagtgctattactgcggctcttttcttaaagcagtttgttgacgagaaggttcaatggatgcatattgacatggctggtccggtgtggaatgaaaagcagcgctgtgcaacaggatttggtgttgctactttggtggaatgggttttgaggaacgcatcttaaatgcgaactgacatgaaatcttgttcaatcgtagtgggatatatatactaataacttatctgaagggatataaaaggtgtgtgccccgaggcagatcttagccatatttcagtgtatttaaaatgtttttattaggatgc

SEQ ID NO: 216262 - DNA, 589 bp, Glycine max
gatttaaccaaatatgtgaaaagattgattgagagtcttatgtttataacctttatgcgatcattaaccattatggtggtctaggccccgggcattatactgcgtattgtaagttgatcgatgacaataaatggtgccatttcgatgatagtcatgtctctcctgttactgaagccgaaattaaatcttcagctgcatatgtgttattttatcagagaaatagaagtaaaggccagatggaaggagagacatctcaggttcatacagtttagatcatgattggacattttgttgcttgatgcctactttatatgcttagcagttagcacaaagccaagcttatgtcttagatagttattttacctcgcagtgctagactgcaaggtaatatattgagacaaaatgttaccgtagtgaaagagcaattaaacaaaaatgtttaggtgaggctctagttagttttaagttcttaatcactacatgaatgatatcattttttgatagaaaaaatttggcagtctatgaacttaaaaaatttctgttatttcattttattggaggttaaacacatcatgaattcaccataatt

SEQ ID NO: 216263 - DNA, 507 bp, Glycine max
aaacacactcattgcacatagtaatgcgctgtatttaagtgaataaaatattacatactagttcacaaatgcaaaaggacactcatcaaccagatatttgagactcttacagttctcaagaagtcgcgtcagcatagggttagtggcgttagaactcagaatttcattcttaacgccaaaaagaacagccagtaaagctactggaaaaggatcaactctagtaagaaaaacaattttcttacctctcccaagtgctgtgcgaatccttttgttgatatctgaggagcgattgttaactgcagaactaatccaagcagtggtgggtaaaccaccacgtccactaccacatgtaacatttacaacgacagcttctgaaggtaattgacttacaggataaagacaattcacaaaaattggtaaccaagaatccactggaaaatttccatcgaagaattcttgtgtgttagccaacacaagcttatcataaaaaacaatcttgtttggaaa

SEQ ID NO: 216264 - DNA, 518 bp, Glycine max
  unsure (1)..(518): unsure at all n locations
tgcccttagcccgtagcnntctttnaanntncaagnacaacngaagcncgaattctgtcggccttacgaaaatcaactaaagaaactantttggcgctccctactccatctctgggttacctcacactacactctcctcccccccaccaaaccccataaagttaacccctttcccttttcctcgaaccgaaattcacaatttttaacgaaacaaacgcgacccagaagcagaagaaacctctccctaacccctgcacgcgttgcggcgccaccctcaacggttgaagccgatcgattatacccagaggccgaaaataacgaaactgaggaagagtttagcgacgagagctcttcctctaaattcacttggagggatcactggtaccctgtctcgttaattgaagatctgaaccctctcttgcccacaccgatttagcttctgtgtcgagaaattgtgctctggtacgacaagttcatttcccaatgggttgcttttgatgacaaatgcccccatcgtc

SEQ ID NO: 216265 - DNA, 408 bp, Glycine max
  unsure (1)..(408): unsure at all n locations
ntgggctatcatgtcgctgagtangctgtccagaatattttcccgggctaccacgagcatctctactcggcgggcgcccttttttttttttttttggaactatttttttttatatttcaactttacgtaaagtgagatgagcaccatattggggctgaagagtaaatactgtaacaggagcatgagcataagctggataaagttcaaatgagaaatgttgtaaaatcgctgacaaaaccatttttgcctccaacaaagaaaagttttgtccaatgcatattctaggaccccatccaaatggaaaaaatgaaactctgccatttgtggccttaagaactccttcagaaaatctctcaggtttgaattcattcacattatcaccccagagttcgcgggcatggggaacca

SEQ ID NO: 216266 - DNA, 471 bp, Glycine max
atacggagttccgcaagggcaaggaaaattgacatacacttgtaagcaagatacaaggacattacaacataaatataaacaataaaattgagttattaactagaataaatcaaggtatacacgattctacgtctaagcatttaccattttatgtccaagctgacatgatattgatgacacatattggtgaatcgaaatataaacatctaagctgatacaattactgatgaaaataactagtaagaatacatgtgatcttatctttgagcctgatcagcactgtggttgcttgctgtatatgatgatcctgccctaccattcaatattccattgtgcataggtggggaggttccccacttaccctctgattcgatccgttttattactttgacagatgcattcgtaagcctaacaacaaactgattaagttctataggatggacagcaaccacaagaggatacacaccttga

SEQ ID NO: 216267 - DNA, 546 bp, Glycine max
atgacattgcattcaatggggaaaatcctggcctggagtcatcattaacaaaccagggggaggttatgtttataaaggagttccaaccgattacaccggcgaagatgttactgttgataacttttttgctgctttacttggaaataagtcagcactgactggtggcagtgggaaggttgtggacagtggtcctgatgatcatatatttgtatactatactgaccatggaggtcctggggtgctcgggatgcctgctggtccttacttatacgcggatgatctgattgaagtcttgaagaaaaagcatgcttctggaacatataaaaacctagtattttatctggaggcatgtgaatctgggagtatctttgaaggtcttcttcctgaagatatcaatatttatgcaaccactgcttccaatgcagaagaaagtagttggggaacatattgccccggggagtattctagtcctccctcagaatatacaacctgtttgggtgacttgtacagtgtcgcttggatggaagacagtgacagacacaattt

SEQ ID NO: 216268 - DNA, 589 bp, Glycine max
  unsure (1)..(589): unsure at all n locations
cattacacaagaactctccaaggtattttcttcccacgaaattcatttggtgggaaaatccaagaagagggtggaatttcaagccagccaagatggattatttcaatgcaccaggaagaaaccatctctttgttccggggccggttaacatcccggaccagatcattcgggccatgaacagaaacaatgaggactaccgttctccagcaattccagctatgaccaaaacactgcttgaggatgtcaagaagattttcaagaccataactggaatcccatttctcatccctacaactggtactggtgcttgggagagtgctctcacaaacacactgtctcctggggatcgaattgtatctttcctgattggccaattcagcttgctttggattgatcagcagcaacgcctgaaattcaatgttgatgttgtagagagtgaatggngccagggtgctaagcttgatgttctggaatcaaagattgcttcagatacttcacacactattaaggcaatttgcattgtccacaatgagactgcaactgtngtcaccaatgacttggcaaagtgagacaaattctcgattcctac

SEQ ID NO: 216269 - DNA, 560 bp, Glycine max
cattacacaagaactctccaaggtattttcttcccacgaaattcatttggtgggaaaatccaagaagagggtggaatttcaagccagggaagatggattatttcaatgcaccaggaagaaaccatctctttgttccggggccggttaacatcccggaccagatcattcgggccatgaacagaaacaatgaggactaccgttctccagcaattccagctatgaccaaaacactgcttgaggatgtcaagaagattttcaagaccataactggaatcccatttctcatccctacaactggtactggtgcttgggagagtgctctcacaaacacactgtctcctggggatcgaattgtatctttcctgattggccaattcagcttgctttggattgatcagcagcaacgcctgaaattcaatgttgatgttgtagagagtgaatggggccagggtgctaagcttgatgttctggaatcaaagattgctttagatacttcacacactattaaggcaatttgcattgtccacaatgagactgcaactggcgtcaccaatgacttg

SEQ ID NO: 216270 - DNA, 559 bp, Glycine max
  unsure (1)..(559): unsure at all n locations
ggggnanaacaggggnnnagagcggatccgatcagctatactntgnanaacnatttanaaggttagaccggctcactcatcggcgtggcgcccttacgttcttttttataatgttatttttttttttttaccatctaataactgtttgggtgtcggggtaaaaccctttagctgtatgatctatctttttttacaagccaatttggggtcaaagctgctcaagcatattgcaaaagcttggaatgcagataaagggtaccgattattcatggtgaacatgtctttaccaactttgccaaattgaagaatgattttattatgctccggtggagcttgttgatatggagttggtgcaccaacgggtggttgggtggcatcaatcaactgaaagtttttaacagacgcaactgtttctttgtcacggaaattaaagcaccaacattgtaactgttcgtgccatcttggaggcttgtttttagaaccaaggggttcatcttgccatcatcatccttgatgatagattccccaatctcagaaaatcgtgaactggtgaacttaa

SEQ ID NO: 216271 - DNA, 254 bp, Glycine max
gaaaaataaaaaaaaaaaaaaaataaataattaaaaaaaaaaaaaaaaaaaataagaagaagaaatttaaaaaaaaaaacaaaaaatccccccaattaaacaaaaattaaataaagtgaaaataaaaaaagaaataaaaaggaaaaaatgtaaaatatttaaggaaaaataaaataactaaacatagagaattataaatgaaaaatataaagattaaaaaaaaagtagaaattgatttaattattcgatataaa

SEQ ID NO: 216272 - DNA, 619 bp, Glycine max
gctgatgtgcctaccatagcacatattgaagagttccattcgatgcagaggatgatgaatgctcctgattcaaatgataatattgatctactgttgagcattgatttgttgggtttacaaggagcaggtaaagcttttccaaacaagattgtttttgatgataagcttgtgttggctaacacacaagaattctttgatggaaattttccagtggattcttggttaccaatttttgtgaattgtctttatcctgtaagtcaattaccttcagaagctgtcgttgtaaatgttacatgtggtagtggacgtggtggtttacccaccactgcttggattagttctgcagttaacaatcgctcctcagatatcaacaaaaggattcgcacagcacttgggagaggtaagaaaattgtttttcttactagagttgatccttttccagtagctttactggctgttctttttggcgttaagaatgaaattctgagttctaacgccactaaccctatgctgacgcgactttttgagaactgtaagagtctcaaatatctggttgatgagtgtccttttgcatttgtgaactagtatgttatattttatttacttaataaagcgcatt

SEQ ID NO: 216273 - DNA, 254 bp, Glycine max
gaaaaaaaaaaaagaaaaaaatataataattgaaaggaaaaaaaagcgaagaaaggaggcggaaataaaaaaaaaaaaaaaagaaacccccccgaaaaaagaaaaataaaaagagagagagagaaaaaaaaggaagatagaaggaaaagaaaagataaggaaaaagaaaaaaaaattaataaaaaaaaataaagagagaagaatagaggaaataaaagaaaaaaaaaagggagggcgaaaataaaagaacttgg

SEQ ID NO: 216274 - DNA, 464 bp, Glycine max
gacatatgaaaaacaccgtgtaacattatgtccttaaatcatcatacagatttggcaacaaaatcatacaattcctttcaacccagccacataatttaattcaacctggcctgcatggatgcgaagtacaaaaatagacctgagtagcaatggaatcaagctcatcaaagaagaggacacgtggagctgattgtttggccttgtcaaaaatttctcgaacattggcttcactttcaccaaaccacatagtgagcaattctgggccccttacactgatgaagttagcttgacattcattagcaattgctttggccaacaaagtttttccacatcctggaggaccatagaagagaaccccttttaatggtgacataccaaacttctcaaatttttctaggtgctccacaggatattgaacagtctcttgcagctcacgcttgacattctcaaggcctccaatatcc

SEQ ID NO: 216275 - DNA, 514 bp, Glycine max
ataacatcattatttctcaatttatatgggggtttaaccataattccctggatacaacatgtatactagtgtatacaccatattcaaagatagctaataaatacttgactgtataattaatatcacacaaacgtaaagtggcaatatatagtgtaaatatatataagcttaatttatacacagaaaccatgagtataaagcatctttatacaaaatattcaacaagaatttactttattaccacatcattatagtaaaatgtcatgataaaggggtgaaattgtatggaatgcttgtgtgaagatgtttttataggagcaaagtgtgtatataaagtaaactattttttaatcaatatatatatattgttcacacattttatatatatatataagaggtgcttaacaagttggataggcaataccacaagaactaacggtttttttggcattaggagagttaacatactgtttcaagctagggtttttgaggtagccacagaagcatggctttt

SEQ ID NO: 216276 - DNA, 561 bp, Glycine max
  unsure (1)..(561): unsure at all n locations
cccaaagaagaagcaccagaggtncctcntagccgccttgcttccctcaacaagccagggattccagttcttgtgattggatctgtacccgccatagcaaatggggttatatttccaatatttggcgtgctgatttccagtgtcatcaagacattttatgaaccatttgatgagatgaaaaaggactccaagttttgggcactgatgtttatgatccttggtcttgcatcatttcttataattcctgcacgaggatacttttttgcggtggcagggtgtaagttaatccaacgtatcaggcaaatgtgttttgagaaggttgtcaacatggaggttagttggtttgatgagcctgaaaactcaagtggtgccattggtgcaaggctctcagcagatgctgcttctgttcgtgcccttgtcggagatgcgctgtgactattggttcacaatttcgcaactgtactggcaggtttgattattgctttcgttgcatctggacgtggcattaatattcttgcttgttcctttgatggagaaattgatatgttcaatgaaatcatg

SEQ ID NO: 216277 - DNA, 524 bp, Glycine max
aacttcttaaacatattactttggtttcgaactgaaacaactttaagaaaagaatgtggaaaacattaatgcaccaaaaggaaaatgggatcaaggtacccccttccctctttatgcctttcttctgttttccggttcccctgagacagttaaggaactgaatgatatccctaaatatttacggacacaaattgcaaagacaaacagaggaaatgaaatgccagatattgcctgtgatgtttacatccacatatttacagacacaaggcaaataaataaacattgcagttttaaagacaacctaaagttgctggtttcagctacttgtggaagggccaaagtacatacagattgggggatcaatcctcaaaatagaaaggattgcataaggaattgtccatatcccgtcaccgcatatcagtccagaagcaactgctccagcatagtcttctgcatcctttctattcacctctcccatacaaacaatatcacagttccaacaaacatatcaactgcaaagtaag

SEQ ID NO: 216278 - DNA, 570 bp, Glycine max
  unsure (1)..(570): unsure at all n locations
atgacattgcattcaatggggaatatcttggcctggagcatcattaacaaaccagatggaggtgatgtttataaaggagttccaaaggattacaccggcgaagatgttactgttgataacttttttgctgctttacttggaaataagtcagcactgactggtggcagtgggaaggttgtggacagtggtcctgatgatcatatatttgtatactatactgaccatggaggtcctggggtgctcgggatgcctgctggtccttacttatacgcggatgatctgattgaagtcttgaagaaaaagcatgcttctggaacatataaaaacctagtattttatctggaggcatgtgaatctgggagtatctttgaaggtcttcttcctgaagatatcaatatttatgcaaccactgcttccaatgcagaagaaagtagttggggaacatattgccccggggagtatcctagtcctcccncagaatatacaacctgtttgggtgacttgtacagtgttgcttggatggaagacagtgacagacactaattgcgaacagaaactctgcaccaacaa

SEQ ID NO: 216279 - DNA, 587 bp, Glycine max
cggctcgaggagagggagtaagtggttataggaaagaaaactaaagaaacaaacctaggacaacacaaatccttgaaacgacgacggacatggccgtttcgagctcgcacatgcgtttcacctttgagtgccgctccgatcccgatttctcgccccccccgccgtccttcgacaacctccgccgccgaaacttccgctcctccgcaggatccggcgcggcgtttcacggcatctcctccctcatcctccgcttccctcccaacttccagcgccagctaagcaccaaggcgcgccgcaactgcagcaacatcggcgtcgcgcaaatcgtcgccgcttcgtggtcgaacaacagcgacaactcttcggccgccggggcttcggcgccgcccgcggtcaccgacacggacgccgctacggtgcctctccccgtcgtcgtcgccgccaacgaggacgtcgttgtctccgccgcggcagacgagaacggtgctgtacagttaaacagtagttcttattcttcatttttgaaatccgatgcaagcaaaacgattcatgccgctgaaagactgggtaggggtattgagactgat

SEQ ID NO: 216280 - DNA, 489 bp, Glycine max
  unsure (1)..(489): unsure at all n locations
aagtcctatcatggctnntagtacntctccgcaaaattattcccggggtacacgagcatactactcggcgcccgcccttttttttttttttttttaacttttttaaagtaatctctcaaagtatttaataggaaaatactctccataaaagtttctgggatttcattttcctacgagggaggacactatcatcgtaactctatgtattatagagtataaacaccctatgccacattgattcctcattaatcattcaaacaaaggagtatttgtgttataccaatgtgcttacgcggttctttaagctaccaaggctttctcatattcttcaatggatttgaaaagctcaaaaaaattgactttaccaaaacccccacatgcacccttttggtacaccttcctttccttattctgcaccatgcacccaatcctgggaattatttttatgaatatcggtggcctgtgaatttaacacaaaacacatttaac

SEQ ID NO: 216281 - DNA, 598 bp, Glycine max
  unsure (1)..(598): unsure at all n locations
cctgtgttctttttgacaaatggnggtcgttaaatctatgaagatgtgaggaggaactcattgtatgaggccatgaagctctgtttcccgaatggattggaaggaattgtctcatagatcaagggaatattcagaaatcctggtgcagtaaccaagatcaaagagtccaagctttctctactttcttatggaaaattaaacaatgttccagaggcagtttacatgcaacatctaatgggaatcgatggggtaattgtggatttggttcaagaaataactgaggcagttgcggatatgataaagccaacaaagggtggtgaaggagagggtttggttgagggttgtgggaaggtgcacggaaactcaaagcctcaattttcacagcaggagttgtctttccttttgaagctcattccacagctgatacaaatttgaatagcagaagagaagacatttcttgaggctttttaattaatttcacaatatgtactgtgtggcccttccaaaatcagtggacccgcttgggggggtcctataaagcttaacctttgacatattttcttcttttactttgtaatataaagaaagatgatcatgt

SEQ ID NO: 216282 - DNA, 548 bp, Glycine max
accaaatcaacatcagactcacatttttatgtctgaagatgggaatggctgtggcgagtgatgatttgctgagcgagaaagctgctgcgatgagagcgtctatggagagaagccaggccatcacggacgacgccgttttgattctcggatccttcgatcaccgtctctacgccctcgaaaccgccatgcgccccacccagatcagaacgcattctattcggaaagcccatgagaatattgataggactttgaagtctgcagaggccatattggctcactttgatcaatattatcacgcggaagcaaaaatagttaaaggaccccatgaagatgtgaagaactatcttgaagcaattgatcagctgagaagaaacattatattttttggcaataagaagggttttaagaatgatgatggtgttggcatccgtgccaacaatttgataagcgaagctatttctaaactaggaaatgaatgcaagcggctattgtcgtcttacaaggcaaagtcatttcattagatgaatcaatctttaaagcgaaaatga

SEQ ID NO: 216283 - DNA, 433 bp, Glycine max
gggaaagaaagagatccgggaatatatttttttttttcccgggcaacccctttaaacgaaaaacacaaaataaaggttttggattgcattattcagagtaaaataaagcccgatcagattcaattttttatgcaaaccaccaagcatttttatccttccctattaaaaccatttttttttactagcaaaggaaaggccttccttagcaagttgatctacatttgcaaccggggggtggaccttagcaactttagcaatagcctggttcttttcaggagttccaccttccaaaaagaccccaacaactttcccatttttaatccagtttgtcccaaacttaggctttgacgacccaggattgttgtctccgaatagaactgggtcgccgacattgtcgccataaaattgccaagacagatcaaatgaacgggaa

SEQ ID NO: 216284 - DNA, 522 bp, Glycine max
  unsure (1)..(522): unsure at all n locations
ggctcgagtcaaattctctgtgtagatanttgtacttgtgttaattgtgttgttggggggggaaatttaagtgaagagagaatgatgcacccacacgtctgctctgtgtgcattggtgcttgtggcactggttgtggttgaagtggggcccatggctgaggctgcggtgacttgcaacccaacacagttgactccttgtcttccggcaattaattcaggttctgcaccttcgagtgcttgttgccagaagctgaaggagcaaaagccatgcttttgtggctacctcaaaaaccctagcttgaagcagtatgttaactctcctaatgccaaaaaaaccgttagtttttgtggtattgcctatccaacttgtttagcaccttttatatatatatataaaaatgtgtgaaccatatatttatattgattaaaaaattgtttaatttatatacaccctttgatcctttaaaaacatcttgacacaagcattcaatagaatttcaccactttatcatgacattttac

SEQ ID NO: 216285 - DNA, 525 bp, Glycine max
ggttggtggtgagtgctgtgttggtgtgcttgttctgcatcatcacccacaagctaaatctcaccgttgggatcatcccttctcttaatgctgctgctggcttgttggggttcttctttgtgaggacctggactgggttgttgaccaagatgggatttttcaccaagccctttactaggcaagagaacactgttattcagacctgtgttgttgcttgctatggccttgccttcagtggggggtttggttcatccttgattgccatggatgagagaacatatgaactcataggccctgattaccctggtaatagagctgaagatgttaaagacccaggcttgggttggatgatgggttttatgtttgttgtcagtttccttggactttttagtcttgtaccacttcgtaaggttatggtcatggattataagcttacatatcccagtgggacagccacagctatgctaatcaacagtttccatacaaaaactggagcagaacttgcagagaaccaaagttcgcagc

SEQ ID NO: 216286 - DNA, 536 bp, Glycine max
tgccaacattggcgtttttgatgcaatagtttgaggctcagatgtcgtattgcacgggggatatgcttgtcaccggcagctttaagccccagccaaggtgtgtatcctcttgtggttgctgcccatcctctagaacctaatcagtttgctgttgggctgacggatggatctgtcaaagtgatagaaccgaacgaatcagagggtaagtggggaaccttcccacctatggacaatggaatattgaatggtagggcaggatcatcatctacaacaagcaaccacactgctgatcaggctcaaagataagatcaaatgtattttactagttattttcatctgaaattgtatcagcttagatgtttagatttcgattcaccaatatgtctcatcaatatcatgtcagcgttggacataaaaaggtaaatgcttagacgtagaatcgcgtataccttgatttattctagttaataactcaattttattggttatatttatgatgtaatgtccttgtatcttgcttacaagtgtatgtaaat

SEQ ID NO: 216287 - DNA, 560 bp, Glycine max
aaaagataattaagaactattattgtcttagacaacatgtgggtaaacagtaagcattaccaaactaattaattaaagtgcaacaatttcacttgtttccacaaacatgacaaaagtaattaataaactcgcgatgatttcagctagctaactagccaatgccaaatcactctaacaaaatcaaaacacgacatagatagatggcattagaagagcaatggacaagattacattatgatatatatcgatcattcgatctctccatccttgtgtgtctcaatgacaacgtctgacctaggtagagcaacacaggtgagaacccatccactttctatttgttcatcatcaaggaagctaccatctgactggtccacgtcacctttcacaattttcccaacacatgaaacgcaagaaccagccctgcacgagtagggaagttcaatgccttcttccttagccttgtcaacaatgaaaacatcatctgggcattcaaactccacttctccttctggggttatgagctttaccttgtacgaagccatgcaagttacacgaccacc

SEQ ID NO: 216288 - DNA, 487 bp, Glycine max
  unsure (1)..(487): unsure at all n locations
gatttgcaggcaatggtttctgacgtgnttgtgattggtgaggccaatggagtgctgagtgggcttggtgaggctgcaaaagggactcctgctgagtttgagaattgtattaggaatgagacttccaagaagccggtcataaccggggatgttcatcctttgcctcgttatgttatgaattatctcaggttgcttgttgattatggtgaccctatggattcacttctggagcttagtgaggaggatctctatcggtttaaaaatgatcttggtggtgatggttcgcagttagaggccatgtcgcccttgggacagtggattctgctgctcatgtctgagcttgagtacaatcttgaggagaagtcaaagctttatgaagacagtgcgatgcagcaggtgtttttgatgaacaatttgtattacctcgtgcggaaagtgaaggactctgaccttgggagggtcttgggggataattggattaggaaac

SEQ ID NO: 216289 - DNA, 450 bp, Glycine max
accaaagcattcaattttcatatacttgaaatctgccaggaactgtaaactaaataacattaccagccaaaacctaaagggaaattaatcacgcagttataactgcattatccaaacaaaagatataccaagcacaaattatagaacctctactaccataaattgcactactgttgagcacattgcactcggtgaccagatggctgatgatcatcgtcgacgtatgcctcgcggtgttgctgttgctgctttcgtctcatctcctccttaaaggtgacatcatgcaaagcggacttctcacaatcatccagctacatatgtgagacgtgcttgctggtattctgaggcaacaccttttacaataactggcattggtcaggggaaagaaaccctgagtcggggaaatcaacattaaattggatgtaaaggcgacccttaatgaatggccta

SEQ ID NO: 216290 - DNA, 536 bp, Glycine max
  unsure (1)..(536): unsure at all n locations
tgctttgttatcgaacatttctttctgatttcaaaaattttccggaaaaaatttgaatctatttttatatgcgaatcaatcctactacttctggtcctgaggtttctgcgcttgaaaaaaaaaatctgggacgtatcgcccaaataattggtccggtactagatgtagcttttcccccaggtaagatgcctaatatttacaacgctctgatagttaagggtcgagatactgttggtcaacaaattaatgtgacttgtgaagtacagcaattattaggaaataatcgaattagagctgtagctatgagtgcgacagaaggtctaatgagaggaatggaagtgattgacacaggagctgccctaagtgttccagtaggtggagcaactctaggacgaattttcaacgtgcttggagagcccattgataatttaggtcctgtagatactcgcacaacatctcccattcatagatctgcgcctgcctttatacaattagatacanaatagccatttttgaaacaggaataaaagtagtag

SEQ ID NO: 216291 - DNA, 394 bp, Glycine max
gagagagagtcctgaaacttgggcgtgattccttcactcacaacaacaacacatcaggatggctgttatgagtcgagcctcttcacgcctccctcagatggtttcccctcaaagggtaggtacactacacacaacgctcccatttgtgaacgcatccacatccacaggcacgcctacaccatatgccccgccaccggctgcgttcgcttcctctcccgccggtgtttagaaggcggaggagttcgtgatctcgaaggtggacgatctgatgaactgggcccgccgcgggtccatctgggccatgaccttcggacttgcctgctgcgtccggcaaatgatgcacaccggcgccgcccgctacgatctcgaccgcttaggcatcaatttcaggccc

SEQ ID NO: 216292 - DNA, 473 bp, Glycine max
gagagagagtcctgaaacttgggtgctattccttcactcacaacaacaacacatcagggtggctgttatgagtcgagcctcttcacgcccccctcagatggtttccactcaaagggtaggttcagtacacacaacgctcccatttgtgaacgcattcacatccacaggcacgcctacaccatatgccccggcaccggctgcggccggttcctatcccgccggcgtttataaggcggaggagttcgcgatctctaaggtggacgatctgatgaactgggcccgtcgcgggtccatctggcccatgaccttcggactctcctgctgcgccgacgaaatgatgcacaccggggccgtccgctacgatctcgaccgctgaggtatcatttacaggcccagccctcgccagtctgattgcatgatcgctgccggcgctcttaccaacaagatggcttccgtcttcgcaaggtgtatga

SEQ ID NO: 216293 - DNA, 469 bp, Glycine max
  unsure (1)..(469): unsure at all n locations
tgcctagacgtggaccantcagcnanntttaagnnannaacgnaagcnggaanacggnnngagganactgaaagaagaagggaaatggctcagttttcggtggagagacacacacattatgatgagctgttgggccaacaatcaatcttcacccccaaaaagcttttgcagatctacagcaaatgcaaactgttcatattgagaagcttattgacatacagtgtcagcctgagtctcagctcaagtacataactgaagcctggctacaaataattgagtgtagaagagtgctgaaatggacatatgcatatgggttttatttgccggagcatgagcatgcaaaaaaacagttccttgagtacttacaaggtgaagcaaaatttgggttggagagactttatcaatgagcggaaaaggaactacagtccgtcttatgtgctgatgatccatctagagaattctatgactt

SEQ ID NO: 216294 - DNA, 582 bp, Glycine max
aaaattgaacattaaaagtgataccttttcctttatttaaatggaaattgcaacattgggaaaataaattactaaaaggagaaatagtgttcgttgagtttcgccaaatggtcataaagaaataaattacaccgctgaaaatttcaattcgtagaaatgcttctcttcatatttgagtgaccatcctgatcctccatatgagtgccgcatagactcttcaacagttcttgtctgattcaatcaataggcaggcaattcctaagaatttctgaaggaaggtgatggtgatgcaggaggcttcaagtcttcatacctggatgttcatttgaatgaaatcagaatgttaacaatgcctccaagaaacctaagacaaatatagattaaataagaaatgtagttagatttgcttaaaaccaattgatactaagtgaagttactcaatagatatgtaagctacagtccaagaattgagacaggcaatgtggaacttcgtaacacctctccttacaaatgtctatagacaggcgagcctaatgataggcgagaaccatatgggcttagactctgatatatgttagattt

SEQ ID NO: 216295 - DNA, 564 bp, Glycine max
gtaagcgggaaacaatggaattctcatgttgagggctgcaatgatttctcattggcaatctcaaccactcattcattccatatctgctatttatgaaaccgctaagaggaggaagagagtggtgttctcttcttcttcttcagaacttaaccctgtaattcggtcagaggtatcattttgtgttgggacttgcctcattccacatccaaaaaaggttaacacaggtggggaagatgctctctttgtgagcaactataatgggggagttatggctgatgccgatggtgtctctggttgggctgaagaggacgtggatccttcagtgttccctcgtgaattgcttgctaatgctcccaattttgtaggagacgaggaggtgaactatgatcctcagattcttattaggaaagcacatgccgacactttctccacaggctgagctactgtcatcgttgctatgctggagaagaatggaactctgaagattgctaatgttggagattgtggattaagactcatccgtgatggtcatgtagattatttcacttcttcacaagagcacta

SEQ ID NO: 216296 - DNA, 195 bp, Glycine max
aaatatataaaaaaaaaacaaaataacaagaataagggtaaaataaaaaaaaaaatctcaaatataacaaaaaaaatataaaaaataatataaaaaatctaaattaaaaatcttataaaaaaattaaaaataaaaaaataactttatttaaatattaaataatcattaattaaatttccattaaataaaaatttt

SEQ ID NO: 216297 - DNA, 539 bp, Glycine max
attgcgtaagttgctgtgctaattgttttttctccttgaatgggataaaataattattgattcttacagtgtacaagtcagagcgtattttatagtacaaacataattctgtgacttgcgtgtatgattatgcaacatataattcggcttttccatcaatgaatagactcatgaactcttcaccatccacagtttctttttctatgagaagttgagcaagcttgtgaaggatatcaatgtgagttgagataatatgtgttgccctagaatatgctctctctaccagttccctcacttccgcatccactacatccgcagttgccatggagtaatccttttgcgatgacatctgttgacccaagaatggatttccaccaggtccaccaatggcaacttgtccaatttttttgctgaatccaaatctctcaaccatctgccttgccactcgtgaaacttgcatgaagtcgtttgatgctccggtggtgacattttcctggccaaaaataaccttttcggcaacccttccacccagggcaaca

SEQ ID NO: 216298 - DNA, 580 bp, Glycine max
  unsure (1)..(580): unsure at all n locations
agcctaagctttagcnntcataaanntnnagggagccccgaagctcgaattcggtcgaggccgaaaatgttgtttgtctctctcnatggttgcattaaatgccgtgatgggggggctatatacatgagctgtttcattgccccaaaatggtatctgttgagaggatcaaacagttcacaaatattccatcggaagcttcatggaacattaaggatcgcctgccttctgcaaattggcccggggaaggccatgttgatatcaaagacttgcaggtcagatatcgtccaaacactcctttggttcttaaaggcatcaccctaagcatcaacggaggggaaaagattggagttgttggtcgaacaggaagtggaaaatcaactttaattcaagttttcttcaggctggtggaacctacaggaggaaaaataatcattgacggcatggacatatacgtcttggggctttatgatcttaggtcacggtgtggtatcatccctcaggagccttgcctttttgaaggaaccgtcagaagtaacatcgatccaactggacagtacacagatgaagagatatggaagag

SEQ ID NO: 216299 - DNA, 548 bp, Glycine max
gccagaaaatgttggtttgtctctcttgatggcttgtcattaaatgccgtgatggggtgggctatatacatgagctgtttcattgaaaccaaaatggtatctgttgagaggatcaaacagttcacaaatattccatcggaagcttcatggaacattaaggatcgcctgcctcctgcaaattggcccggggaaggccatgttgatatcaaagacttgcaggtcagatatcgtccaaacactcctttggttcttaaaggcatcaccctaagcatcaacggaggggaaaagattggagttgttggtcgaacaggaagtggaaaatcaactttaattcaagttttcttcacgctggtggaacctacaggaggaaaaataatcattgacggcattgacatatgcgacttgaggcttcatgatcttaagacacggtttggtatcataccttaggagcctgtactttatgaaggaaccgtcagatgtaacattgatccaactggacagttcacagatgaagagatatggaagagtatggaacgttgtcaactaaa

SEQ ID NO: 216300 - DNA, 434 bp, Glycine max
gagatcacatactgaaacgggtttgttatattgttacttgcaccaccatgctattactatggctgtcagaagcccatcacatcgcatcatggctagcaccaagcctaatcagatggtttgcaaagtacacacaccggaggaatttgtggtcgcaccaatatctacagggatagctataacatatctcatggcagctgctgcgtgcggttcctaagcccaccctgctgatacagctgatggggaagctatctatgaggtggacaagccgaagaactgcacccatcgcgtgtcctacaaggcaaagagcttcaaactatcctgctgctcagagtggaagacacacaccgaggccgagcactcagatcaggaccgttgatatgaggataacagggccacacccacccacgcggatggcatgatcgctgccactgata

SEQ ID NO: 216301 - DNA, 411 bp, Glycine max
  unsure (1)..(411): unsure at all n locations
tggggnnnnnnaaggggnagcggctttccctantgtactagtagnaaacaattnnanggattgacgcagctactcgtcggcggccgcccttttttttttttttttttttggcagtttttaaattttttattcgaatttatggctctgggccaggggttacagttacacgcaatttatgtgtgaagccaataataactcaagcatgataaaatttacactaacagactccgaagggtcctacaacatatgctcttttacaagattgacaacaccgaaatctgaggatggaaaaattttccaagctgaaaattgtcttacactgcaactgggacggctttatcgagagcaaggactcctggaagctctttgccttccaataactccaaagtggcaccaccaccagtagatatg

SEQ ID NO: 216302 - DNA, 433 bp, Glycine max
  unsure (1)..(433): unsure at all n locations
tggctatgaccgtagcacttatnnnnntttaagnnangacgaagnngnaanntnntagagcagtacagatcgcgagcggtccctcctttaanaaaaacagacatgaagaaagcgtttttaataataagataacagacccccatgaaatttgtgaattaaaaaaagatatgatactaaatttcaattaggatttgaaaaataatatagtttatataagaagactgtatttttattgtgagtagattaaaggctaaagtaatttttagtttgtaaaaaaaaaaatacatataaaatggattaatatgaagtggaaatcataggttatatctagttaaatattattatttttgttgaaggaaacttaaagttttttatatagaagttaaaaaaaactattttagatatgaggatttgagtaaaagtaaaaatatat

SEQ ID NO: 216303 - DNA, 580 bp, Glycine max
  unsure (1)..(580): unsure at all n locations
aaaattgaacattaaaagtgataccttttcctttatttaaatggaaattgcaacattgggaaaataaattactaaaaggagaaatagtgttcgttgagtttcgccaaatggtcataaagaaataaattacaccgctgaaaatttcaattcgtagaaatgcttctcttcatatttgagtgaccatcctgatcctccatatgagtgccgcatagactcttcaacagttcttgtctgattcaatcaataggcaggcaattcctaagaatttctgaaggaaggtgatggtgatgcaggaggcttcaagtcttcatacctggatgttcatttgaatgaaatcagaatgttaacaatgcctccaagaaacctaagacaaatatagattaaataagaaatgtagttagatttgcttaaaaccaattgatactaagtgaagttactcaatagatatgtaagctacagtccaagaattgagacaggcaatgtggaaccncgtaacacctctccttcacaaatgtctatcagaacaggcgagcctaatagaataggcgagaccaatatgggctatagactctgaatcatg

SEQ ID NO: 216304 - DNA, 414 bp, Glycine max
tttcgtcattttttttattttttttttttttttttttctttcccaggacaaaaggggggggcgggaaattcaatttaaggggtctcttcaacctaaaattattaaggaagaccgtcccttataaaaaatatagtgagaacaactaaaacttcccatcttttatttgcacctaaaacattgagaaagctaaaaatgctccaccctagttccataaaaacttctatcacttggattacatcaacaacctttacgaacagaaatatttacttgccaagagtgcttttgctccacatcaaaactggaaaaaaattcccctttgaatagtatcctccattgcatttccaagaggagcactcttaaaaaacttgtcagaccaatggactctcttgacattctttcgcttttggacaagca

SEQ ID NO: 216305 - DNA, 513 bp, Glycine max
  unsure (1)..(513): unsure at all n locations
gtgagattgttgcaatggtgtgtgcatacncatcatcaccgttctcaactctctcgggggggcgtctcgtcgagagcaatgcgacggcccctccgtgcaagccgcgtgccgtgaaactcttaacggcgcttccgagcgcggggcggaggcagttgctgttttttctaacggcgacgacagcgttcacggcgagggaagcggcatccgtggcgcaggacattcccttgttcgggatacggaagagtctaaagaaggtggaggaggaagcggaggagattgtgaaggagggatttgaggctgcggacaaggggttggtggcggcggataaggggctggagacggcggagaaggggctggtggcggcggagagggagattgaagaggcggtgagttctggggggttggcgcaagcgggagcagtggcgggagcggaggtttttgggattttggttgcaacggcggtggtgaacggttattttgggcctgaagctcaaaaatcgtgacttggtgagt

SEQ ID NO: 216306 - DNA, 481 bp, Glycine max
accatcatcataactgtttcattagctgacttaaaaccctttagcttcatgatttatctttattcacaagccaatttggtgtcaaagctgctcaagcatattgcaaaagcttggaatgcagataaagggtaccgataatccatggtgaacatgtctttaccaactttgccaaattgaagaatgattttatcatgctccggtggagctggttgagatggtgtaggtgcaccagcgggtggttgggtggcagcaatcaactgaaagtttttaacagacgcaactgttactcgtccacggaaattaaggcaccaacattgtaactgttcgtgccatcttggaggcttgtttttcagaaccaagggtctcatcttgccatcatcatcctcgatgatagattccccaatctcagaaaatcgtgaactgctgaactcaatcgaacgatctagagactttgaaaacgagatgctccgaaacgagtcct

SEQ ID NO: 216307 - DNA, 600 bp, Glycine max
ccaaaacttgcctcttgagatagtagaggcagccaaggcaatcaattaacaaaaggataatacagttatctcatgttcccaagacacaaatttttcctcatcatattcataggcatgcgacaattgatatacaaactgcagtatatgcccaatagtccttcctacaagcgagaacctgaaatttttttaagcacttcctgaatctttaatatctcagtcgtataggccattttgctcccatatatccacaagaaaatctaccatttcagcaagagggataggctgacggaatggcttgttgctcccaagtaaactttcatatgttgcattccaactcaatttaggatcttgtaattggtgtgtttggttctcaggctttttatttccaacccaacgttgccgagtctgattccaaagaattacaccgtgatttacaaattcagtggggttggtgctgcttttggaagaaccagcatgagaaaccacagcttggtttgttagactggctgaagagatgctcccttgtgactgaacagcgctgttgtccatatcatgcgtgctggtggtccaaaaatcctctgatgaactcggttcctcact

SEQ ID NO: 216308 - DNA, 425 bp, Glycine max
acacatcacaatatcttattcattattacacgtccatttacttacattggagcccgaggacagaagccaaatataccgggtgatgaaattttgtacagcaaaatgaaatggcaacgtattataagatctacatacaaaggggggtggttacaaatgcttggcaaatctttaaatgacttacaagcctggcggcgttggcggcaatgaaaacttgtgcactgcacttgccaaacggtgtcaaatcgaatgataccgatgacgccattgagggatgcggcattagtctattgaagctccttcaacacctgagaaacatataagcagtcaaacatatgctgattccacatggtgcaagttcgtccatcattgaatccatgtgaccggttgtgctcacggaacaccaaaccgagctttatacgaaccct

SEQ ID NO: 216309 - DNA, 276 bp, Glycine max
agcatctaaataaacagcaaaaaagtatacatatctagagaacgatatagtgcgagcaaatacatgcatcgagttctgtagctgatgctattgaagctagttattcaaggacatatatggaaaaaggacttgaatgcaaatctacttgggaacccaaacaacatgatcctcaagaaggaagtggccgaaaaggaatagttcctggcttaactttgagcacctgaaaggccaaatgtttagggttccattctgatgtgtcagtgtggcacactgcta

SEQ ID NO: 216310 - DNA, 150 bp, Glycine max
cttccttctccttctcttcgtcaacatcctccaccttaccctcctcatccttcttctcttcctcatcctcatcatcagagatctccttctcagtagttttctcaatccaaagagaaattgggtagctaatgaactcagaatgcttttgga

SEQ ID NO: 216311 - DNA, 561 bp, Glycine max
attactagtatagtaatcgattccctaaatctatgaacccctccaactaaatccaataatttttttattttattattaatcaagaatttcgtatatagctagaacggccctcacaaattgcaaatactaatttgttaagaattaatcgaattgaggctatagcatcatcattagcttggattgaaaaattcggggaggcccgggtcacaatttgtttcgattaaacaaattgttggaatttccaaagttatacattctcgaagagccgtatattcttcttgttgatcgacgattattacaatatcaggtgaccccgtcatatatttaatgccgccaagatatgtttccaaatgagctaaatgtctcttcaatatagcggcatctctttttggaaaactattgagtctccccgtcttttgttgcattctcaagtccctgaacttttgaagtcgagtttctgtagtataccaattcgttaacataccgccgagccactttttattaacataatgacaccgagctcttattgcaggccgtgctactaaatccgttgcttttttt

SEQ ID NO: 216312 - DNA, 528 bp, Glycine max
attactagtatagtaatcgattccctaaatctatgaacccgtccaactaaatccaataatttttttattttattattaatcaagaatttcgtatatagctagaacggccctcacaaattgcaaatactaatttgttaagaattaatcgaattgaggctatagcatcattattagctggaaattgaaatttggggggggtccggggcacaatttgtatcgattaaacaaaattgtgggattttcaaaggtatacattctcgaagagccgtatattcttcttgttgatcgacgattattacaatatcaggtaaccccgtcatatatttaatgccgccaagatatgtttccaaatgagctaaatgtctcttcaatatagcggcatctctttttggaaaactattgagtctccccgtcttttgttgcattctcaagtccctgaacttttgaagtcgtgtttctgtagtataccaaatcgttaacataccgccgagccactttttattaacataatgacaccgagctcttatt

SEQ ID NO: 216313 - DNA, 543 bp, Glycine max
aaaataacacactcttcacacatcattacgacaattaaaagaggtgtggaaattttcaaatagacagagcatactcaacaagagggtcatgtctaatttcctttattgaattaaacaaacgaacaaacgaaagaaaacacaaattccagatcatgcagaggattcccgattttcaaaaaaatttggcagtagcctgtggaacagaaaaagcttgcataagagttttacccagcaattcaaaatcttgagaaattcccaagagaatatcaaaaactgtagactgtttgggattgtcaataaggaaaatcaagtgccatgaagtttgatttgcccactcagaactccacatttcaaaaccattattaggaccacatacctctattgggaagatcaattcccaggaatgtggttccgattttgtccacttacatgcatcgaaatgctctgtactgttgctgtttgttaaaaacacttgtaccaatgaggcccaatcactccttttgactgctgcattcccagacatcacaattttaaccattaaac

SEQ ID NO: 216314 - DNA, 424 bp, Glycine max
aacgcaacacaatgtcttattcattcttactcaagcattaatttccattgaagcccggaaacggaatccatgaataccggatgatgaaatctgatctctcgaactcataagggaatgtaccttaagttctacaaacacataggggtggttacagatgctcggccaatttttcaatgacttacaagcctggtggcatcggaagctattgaaaccgaggcactgttctcggcgaacgttgtcaaatccaataatactgatgaagccaccgccgcctgcagcactatgctcttgaagctacggccacaccggaaaaaaatcgccgcagtcaaacatatgcagattacacatggtgcaacaacgtgcattatttggtgctagtgatctgttgcgctgacagcacactaaagggtgctatttacataca

SEQ ID NO: 216315 - DNA, 267 bp, Glycine max
ataaacagcaaaaaagtatacatatctagagaactatatagtacgagcaaatacatgcatcgagttctgtagctgatgctattgaagctagttattcaaggacatatatggaaaaaggacttgaatgcaaatctacttgggaacccaaacaacatgatccttaagaaaggaagtggcagacaggattagttcctggcttaactttgagcacctgaaaggccaaatgtttagggttccattctgatgtgtcagtgtggcacactgcta

SEQ ID NO: 216316 - DNA, 515 bp, Glycine max
ggaaatctggcaaaactaaaaacgtagattatgatagggaagaaacaacataatacaaccataactctactcatctaacaaaacaggaaatcacattctcagaatgactactacaattatatttgtgaggaagattatctaaacctatacagggatacttctagctgagaatctttcgttttgtggacaaaactgcacttcccattttcagtgaatggccaaaactgtgaagaaatttattgccggtgttgtacgacggaacattgagcaagatactcaattaaccatcaccgtaaagcattcacgaatgccgtcaatgaatcaacatctctcttttccgaagggtacttaattggttgagaagagtgtttggggaagagaagtattgtggggaagctttccaactgcagttcagtctttgcatattccttttggtcttcattcgctctgaattttggaaccttcacttctgacccagctaactgttttgccaaatcaacatatggattcttcat

SEQ ID NO: 216317 - DNA, 521 bp, Glycine max
ggaaatctggcaaaactaaaaacgtagattatgatagtgaagaaacaacataatacaaccataactctactcatctaacaaaacaggaaatcacattctcagaatgactactacaattatatttgtgaggaagattatctaaacctatacagggatacttctagctgagaaatcttcgttttgctgtcaaaactgccattcccattttcagtgaattgccaaaactgtgaagaaattattgcccggattgtacgacggaacattgagcaagatactcaattaaccatcaccgtaaagcattcacgaatgccgtcaatgaatcaacatctctcttttccgaagggtacttaattggttgagaagagtgtttggggaagagtagtattgtggggaagctttccaactgccagtcagtctttgcatattccttctggtcttcatccgctctgaaatttgcaaccttcacttctgacccagctaacttttctgccaatcaacatatgattcctccatagcctgac

SEQ ID NO: 216318 - DNA, 634 bp, Glycine max
gactagttctttagatctagataatccgaagcgatgcgttggttattagttcttttttaattcatttatacgatgaaccggtttataaatttgttaaattggaaccgttctaaaaaactaacgagtcgcacactaagcatagcaatactatcaatatgaaatgattcatttcattttttaagcgatttaattcttataaaattgatcattttggagaaataaaaatcgagtaatttttcattttttgttttctaaaaaaaaatatagcacatttaagataaaatatagcacatttaagataaagaataatatatttttctttatttagaaaatatccaaactttgatccctaaaaccccataaatagttcgaactgtatagcaacaataatcgattttcgctcgaatggtttgtagaggaactctaccttctctgatccattcaacacgtgcaatttcttttccgtcgatacgtcctgcaatttgtacttgaactccttttgtacccgcctgttcagttaattcaatagcttttttcattgctttacgaaacgaaactctattctttaattgtccagctataaattctgcaataatattaggggtttataagcatttgcaacttttacaatagc

SEQ ID NO: 216319 - DNA, 465 bp, Glycine max
cattatgaactgataagggaaacacttttattaagacttcaaatcacagcattcaagatgatacagtgcgcaacactctttagagagccttataactataaactataaaagcttggcccagatgaaattacactgcaggcaaatttttcattcacctttagcttagctatgttcattgtcgcccaaattattcttagtcacatcgttcgtttaaccccggaacggcaacaccaaggggagcggcatccataggtgtaatcttctcaagttctacacccttgtagttctggtgttcataggctgaaatgtgcactccaagtgctgctctaccagagggatcaaggttgttagaccaagcggcatcccactcaacagctttggctgtgctacatgcaacacttgctcctgcaagaacagcgagcctagctgtgttctgagggaagaacctctcacagatcatgctgt

SEQ ID NO: 216320 - DNA, 571 bp, Glycine max
ggaaatctggcaaaactaaaaacgtagattatgatagtgaagaaacaacatagtacaaccataactctactcatctaacaaaacaggaaatcacattctcagaatgactactacaattatatttgtgaggaagattatctaaacctatacagggatacttctagctgagaatcttcggtttggtgtcaaaaactgccattccaattttcagtgaattgccaaaactgtgaaaaaaattattgcggtattgtacgacggaacattgagcaagatactcaattaaccatcaccgtaaagcattcacgaatgccgtcaatgaatcaacatctctcttttccgaagggtacttaattggttgagaagagtgtttggggaagagtagtattgtggggaagcttcccaactgcagttcagtctttgcatattccttttggtctccatccgctctgaattttgcaaccttcactcctgacccagctaacttttctgccaaataaacatatgattcctccatagcctgacagaagcggcaccatggtgcatagagcacaacaagccagggttcttttcg

SEQ ID NO: 216321 - DNA, 435 bp, Glycine max
gtggaaatctggcaaaactaaaaacgtggattatgatagtgaagaaacaacataagtacaaccataactctactcatctaacaaaacaggaaatcacattctcagaatgactactacaattatattggcgaggaagattatctaaacctatacagggatacttctagctgagaattttcgatttgcttgtcaaaactgccttccccatttgtagcgaattgccaaactgcgaagaaatgtatggccgggatagtacgacggaacattgagcacgatactcaattaaccatgaccggaaagcattcacgaatgccgtcaatgaatcaacatctctgttttccgaagggtacttaatagggagagaagagcgtttggggaagagtagtattgtggggaagcttcccaactgcagttcagcctttgcatattccttct

SEQ ID NO: 216322 - DNA, 587 bp, Glycine max
agggagaacccaatattaaagttgatataactatgtgtaactcatacagagaaataacaacgcaacacaatttaaagctatccaatacaaatctctcatacaagaggagaggggcatataagtggagccctcatcaccctcgatcttattcttaatattaataatgctactcatatactagtgagtaggtttcggttttccggcgtccatgactttctcttcaaaccttgatggtagcgcagttggaggaggtgctgatcttgtaggggatggagactccgcatttgccggggagcgaggcggcgttgttggctttgaagccggagatttggctggcggccgacttgaggcagttgcacgccgtctggcggtcggcggaggtcttggcggcggcattgaggctcttcactccgttgcagcatcccgacggcggcgttcctccgttctggaggtaaccgatgcaattgatcaggctattcgtcacctgcccgcacgtgatagctgcatgtgccatgggtgcactcaccacaaccatgcagagcactgcagccaataatgcaaccttgatgctagccatggaaactgaa

SEQ ID NO: 216323 - DNA, 466 bp, Glycine max
agggagaacccatttttaaagtatatataactatgggccactcatacagagaaataacagcgcaacacaatgtaaagctatccaatacacatttatcatacaagaggagaggggcatataagtggagccctcatcaccctcgatctgattcttaatatgaataatgctactgatatactagtgagtagcttgccgatttctgggtacatgacttcctattcaaacttagatggtagcgctgtcggcggaggtgctgatctcgtccgggatggacacttcgcatttgtcggcgagcgaggcagtgtcaacggttttgaagcccgagatttggctgacggccgacttgaggcaagtgcacgccgtctggcggacagcagaggtctaggcggccgcattgaggctctttacttctgtgctgaatcacgacagctgcagatgtccgacctggaggttgccgatgcaattg

SEQ ID NO: 216324 - DNA, 650 bp, Glycine max
aacaaagtgtcctcggcatgcacaagcttatgcaatccgttgaaggttatatgccaccatatcctgaagggctaaacgaaacacactctgaggtaggcattggagactttgaattgcaagatcagctttctcttttgctaactcttgtgctctttcaatgcccccacaactcttgaccaaattgatggccttcgtaaggcgaaccaacctcactgaattcagactcaatgatatccctcaattttggttctttcttccaggaaaaaatcactggtgcagtcaggttgcccttggcaaggtcactgccagcaggctttcccagttgctccgctgattgcgtgaaatccaatatgtcatccacaacttgaaaggatagaccaagattctttccatattcatacattttctcagtgacactgctgtcagaaccactaaagatcgcagctccttttgtgctggcagcaatcaacgacgctgtcttgtaatagctcttaattagatactcatcaagttgtacatcacaatcaaacaagcttgaagcctgctttatttccccacttgcaaaatctttgatcacctggctgataagtttaatgacttcaatattttcaaggttgctagataccatgatgactgtgcaaacatgaagt

SEQ ID NO: 216325 - DNA, 545 bp, Glycine max
aacaaagtgtcctttttatgctttagcttatgcaatccgttgaaggttataggccaccagtatcctcaagggctaaacgaaacacactctgaggtaggcattggagactttgaattgcaagatcagctttctcttttgctaactcttgtgctctttcaatgcccccacaactcttgaccaaattgatggccctcgcaaagcgaaccaacctacttgaatcaagactcaatgatttccctcaattatgggtttttcttcagtgcaaaaatcactggtgcagtcaggttgcccttggcaaggtcactgccagcaggcttttccagttgctccgctgattgcgtgaaatccaatatgtcatccacaactttgaaaggatagaccaagaatctttccatattcatacattttctcagagacactgctgtcagaaccactaaagatcgcaatttcttttgtgctggcagaaatcaacgacgctgtcttgtaatagcttttaattagatactcatcaagttgtacatcacaatcaaacaagctcgaagcct

SEQ ID NO: 216326 - DNA, 541 bp, Glycine max
aaaataacacacacttttttacatgattacgactattaaaagaggggtggaggggctcaaatagaccgagcattctcaacaagagggtcatgtctaatttcctttattgaattaaacaaacgaacaaacgaaagaaaacacaaattgcagatcatgcataggattccgccttttcagaaaaacctggctgtttcctgaggaacaaaaaaagctggcataaaaggtttaccagctatttcaaaatcttgagaaatttccaagagaatatcaaaaactgtaaactgtttgggattgtcaataaggaaactcaagtgccatgaatgttgattagcccactcagaactccacattttaaaaccattattcggaccacatacctctattgggaagatcaattcccaggaatgtgggtccgattatgaccacttacatgcatcaaaatggtctgttctggtgccgtttgttaaaaacacttgtaccaatgaggcccagccactacttttgaccgttgcattccgggcatcacaattttaccattaac

SEQ ID NO: 216327 - DNA, 552 bp, Glycine max
aaaataactctacacttttcacatcattacgacaattaaaagaggggtggaagggttcaaatagacagagcatactcaacaagagggtcatgtctaatttcctttattgaattaaacaaacgaacaaacgaaagaaaacacaaattccagatcatgcataggattccgcattttaaaagaacctggctctttcctgtggaacagaaaacgctggcataagagttttaccagcaatttcaatatcttgagaaattcccaagagaatatcaaaaactgtagactgtttgggattgtcaataaagaaactcaagtgccatgaatgttgattagcccactcagaactccacatttcaaaacctttattaggaccacatccctctattgggaagatcaattcccaggaatgtggttccgattttgtccacttacatgctataaaatgctctgtactggtgctgttagataaaaacacttgtaccattgaggcccagtcactccttttgactgctgctttcccagacatcacaatttttaccattaaacagcctttct

SEQ ID NO: 216328 - DNA, 520 bp, Glycine max
actacaaagggtattaatatcgcaatcgctgaacaatgttattcaagaaaaggatcgaccacaaataaaaacaacccaactccaatcatcatcaccacgtgcagcaaaatacattcaaaagctatctaaaaatttgaggaacccacagtggcgcattagaaaccatgaccatagaatttatgagagaaatattatgggcaccgtgcctctccaacaatacccaaaacgttgcttacgcttcagcaaacccaagctcagaaagcttttggggagcctcagcgtaaacagcgaagaaagcatcttcgtccgatgcatatttctaacaagagggcggtacacagggtcagacaaaagtgccttgtcagaaggtagctgaaggaggccttctttctcaccactcaacaactacttgaagtatgagttgaccgaaataacaggattagaggtccagggaccctcgaatgcagagcgctccttgtgcgcaaatgcgatagtgtgacccccagacagagcaacgata

SEQ ID NO: 216329 - DNA, 567 bp, Glycine max
actacaaagggtaataatatcgcaatcgctgaacaatgttatttaacaaaaggatcgaccacaaataaaaacaacccaactccaatcatcatcaccacgtccagcaaaatacattcaaaagctatctaaaaatttgaggaacccacagtggcgcattagaaaccatgaccatagaatttatgagagaaatattatgggcaccgtgcctctccaacaatccccaaaacgttgcttaggcttcagcaaacccaagctcagaaagcttttggtgagcctcagcgtaatcagcgaagaaggcatcttcgtccgatgcatatttctcaacaagagggcggaacacagggtcagacaaaagtgccttgtcagaaggtagctgaaggaggccttctttctcaccactcaacaactccttgaagtatgagttgtcgaaaataagaggattagaggtccagggaccctcgaatccagaacgctccttgtgcgcagctccaatagtgtgacccccagacagagcaacgatatctcggtcactaagccccatagctttgccaaacacatctctcaaat

SEQ ID NO: 216330 - DNA, 512 bp, Glycine max
gtaagaaaaaagaaagttctagggattaatgaattatatctatttttatatatatacagatagattttctatttcttttatcttaattaatatttgacccctccttataagggggtatagctttctttatttttaggaacttatccattccttttttaatgggccccacaatcccaaagaattttggggggaggggccaattcggttttgatctaaaataaatagagcttccagaattgggagaatgaagaatccccacgagaaacactatgcccatccataatgatgtcccggaaaatacaacatttttgttattcgaccaaccttcaggagaagcaaattcaacgggtgcacttactaataaaataaatgaaatagcaattaatgcaaaaaccgctaattggaaagcaatagtcatgtgtctaatcctccaatttaccaacaaaagaactttaccatttgagcccccaaccccttgatccctttattgacaaaaaagattataataaaaa

SEQ ID NO: 216331 - DNA, 557 bp, Glycine max
actacaaagggtaataatatcgcaatcgctgaacaatgttatttaacaaaaggatcgaccacaaataaaaacaacccaactccaatcatcatcaccacgtccagcaaaatacattcaaaagctatctaaaaatttgaggaacccacagtggcgcattagaaaccatgaccatagaatttatgagagaaatattatgggcaccgtgcctctccaacaatccccaaaacgttgcttaggcttcagcaaacccaagctcagaaagcttttggtgagcctcagcgtaatcagcgaagaaggcatcttcgtccgatgcatatttctcaacaagagggcggaacacagggtcagacaaaagtgccttgtcagaaggtagctgaaggaggccttctttctcaccactcaacaactccttgaagtatgagttgtcgaaaataagaggattagaggtccagggaccctcgaatccagaacgctccttgtgcgcagctccaatagtgtgacccccagacagagcaacgatatcttcgtcactaagccccatagctttgccaaacaca

SEQ ID NO: 216332 - DNA, 557 bp, Glycine max; identical to SEQ ID NO: 216331

SEQ ID NO: 216333 - DNA, 530 bp, Glycine max
ctatccgcattcgaattcattttatttatatattaatattatattcagagggagtaaactgatattaaaagatactaattataagaatttgaaagtgaaattataaagttattaaatgattaatcaatttttttctacctgttcctgtaggaaaaagagttccatctgttctagaatagcttccttcaaaaggacttctgcttccccagtgaatgtcttggtagaagatatgatttctttgaattgagggttattcgtgtttaagtcagcacgtaactcaacaagaaatttccttacctgtccaatttctaatgaatcaagataaccattcgttccagtataaatagttatcatctgttcttccacggacagaggagctgattgagattgttaagcaactcgcgcaatcgttgacctcttgctaattgattctgagtagctttatcgagatcagaagctaattgcgcaaaagctcctaattctgcgaattgtgctaattacaattctaatttaccagctacttgtctcat

SEQ ID NO: 216334 - DNA, 546 bp, Glycine max
  unsure (1)..(546): unsure at all n locations
naattgagtgctaattctcgatnacnggttgnaaggtcagctcctaagctcactagcgctcggcacgctcctatcttttttgctgtgatctgactagtctattagatttagataaaccgaaccgatgcgtaggggggtagttgttttttaattcatttatacgatgaaccggtttataaatttgttaaattggaaccgttctaaaaaactaacgagtcgcacactaagcatagcaatactataaatatgaaatgattaattttatttttaagtggattcactctaataaatattgagcatttttggagaactaaaaatcgggtaatttttcattttttgcttcctaaaaaaaaatgtagcacatttaagataaaatatagcacatttaatacaaagaagaatatatgtttttttatttagaaaatatccgaacttagatccctaaaaccccatcaatagttcgaactgtttagcaacaataatcgattttcgctcgaatggtttgtagaggaactctatcttctttgatccatttaacacgtgcaa

SEQ ID NO: 216335 - DNA, 451 bp, Glycine max
gaatggaagaaggcttttctttaaattgaattgatggggcggaaaacgggagtgtaaagatttccaatcatacacaatcttgcaacaacaaaaagaattttcaaaaaaaaagactttctttttttactttgtttacccaaaacctaagcaaaatgtaaaaacagacgacacttttttttagactctataaatccaaacgctgatcacaatcaaaagcaatggcgttatttatgaaagctccataagacttcaaacgaccaaaagccggcgactccattgatgttctctgcaaacatgaatgtactcttgaatagcaaggggcagcagactgagccaatttgcggtacttgagagcatagaacatctcgaggttacgtttgctatcacggcgttcaagattggtcacgtgcttgcagaggccatacacaccaatgagtgtaaagagcctgtc

SEQ ID NO: 216336 - DNA, 454 bp, Glycine max
accgaaaactgatatttttttatcattcaagttttgcttccactgcgtgggtatactaaataccagaaactgtggatccaaaattacaacacaacacaagacataactctggattatcccaaccactcatactagttatatcctcgagttttattcattcattcattccatataatgatataaattacagggaaatacaaacaaagacgcacatgagaaattaaacagaagcagcaagaagagaatgaataaaattcaaggcacaatcttataagccttggtcttgtctatccaacttatgaaccaattcttggagttcctgaatcccaaaaacccatgttccttggccttgttcatgctatccaacattccctcccctgagaaaataagatccacataccacccaatagcaacctcgtcaagcttggtaggcataaactgatttcactcacaa

SEQ ID NO: 216337 - DNA, 538 bp, Glycine max
agagacaaaagcgtaggtttattagaaaaccatctcaaaaccgtgcatcacttcaagttcagagatttacaatacccattagcaggccaaatatatatgacatttttggaacaaccccattttcaagcattgatacaatacagagtgaagaaaagggaaaagaaaaaagaaaaaattaaggggattgatcatgtgatcatgatcatgtggcggagtctaaaaagaccttggctttgccacaaaggtggaatgcttgagtatgtgcaagctaaattgccctcctttctcactagtgtcaatctgtgactggtcagggggaggcaagagctcaaagttctggaccaaacgtcccaaagtgatgccaagaattggcaatgcaagaatgagtccagggcagcttcttctgccaacaccaaagggaaggtacctaaagtcattgacattggcttcaacaagcgactcctcctagaaaaacctctcaggccggaactactctggcttcttacagtgtgcatggttgatggccagccaccatgca

SEQ ID NO: 216338 - DNA, 487 bp, Glycine max
agatggctgaccattacacatctgttatattggttgacggttgaccaacgcgagggaatcttaaatgaagcatgctcacttgcccgtcactgcggtatatgaaagctcattgctttatatgaggacattcacatttccattgatggagacactgagatcgcattcactgagaatgctgatcagcgtatagaagcactcggatggtatgcaatgcgggtgaagaatggccatactggatatgatgagactcgtgctgccattaaagaagccttggctgccagagacacacccactttgatgaaagcaaccactaccattggatcctggtctccaaacaaggctaattcctacagggtacatgggagtgcattacgtactagctaagctgatgctacatggaagaatctagcatggccatactagcctttacatgtgccacaagacgtcgagaagcattggaggcggcatacacctgatggtgctaaac

SEQ ID NO: 216339 - DNA, 359 bp, Glycine max
  unsure (1)..(359): unsure at all n locations
gtgaaagatatcgatcattggctgagagtggtctgtatgatcgtttctcctctgagggtttcatgggtgttgtgcgtgcatcagtgtatggttccaggaacatgctagatcagcatctacacatgacgatggacgtagataacatgagttatgaggaactacttgcacttggtgagaggattggctatgtgaacacaggaatctctgaggattcgcttaacaaatgcttgacggatacaatatattgttcatgtgatcatatccaagaccaacgaaactgcataagatgtctggaagagtacaacaccatggtcgatggtggaacacttatnacatgtgggcatgactaccatgtgagc

SEQ ID NO: 216340 - DNA, 453 bp, Glycine max
caaggcttgcgttattgagatcgaagccggaaacaaagggatggacataatgcaatattcctgttccaacatttccaaaagcaatatgtttcctcaattttgagggatgttcaaatataaacacaaaatgagattaattttatactagagcagttatttatccttcgtatcctcaggcaaagcagatacttagcagataggacataatttccttaaagataaccattttttaatgcagttcacatggtagtcatgcccacatgttttaagtgttccaacattgtccatgttcttgtactcttacagacatattacgcagtttcctttgtcttgactttgctcaaatgaacaatatattgtttccgtcaaacatttgtaaagcgaatcctcatagattcctgtgttcacttagccaatccttttaccaagtgcaagtcgttcctcataactcat

SEQ ID NO: 216341 - DNA, 322 bp, Glycine max
ctaatattatcgcagaatttatagctggtcaattaaagaatagagtggttataagcatttgcaacttttacaatagcaatgatcataaacaccctaatattattgcagaatttatagctggacaattaaagaatagagtttcgtttcgtaaagcaatgaaaaaagctattgaattaactgaacaggcgggtacaaaaggagttcaagtacaaattgcaggacgtatcgacggaaaagaaattgcacgtgttgaatggatcagagaaggtagagttcctctacaaaccattcgagcgaaaatcgattattgttgctatacagt

SEQ ID NO: 216342 - DNA, 481 bp, Glycine max
catcttaaagacctctttccttgggttctaatttattaccctgaagtaatgaattgagttcgtataggcattttggatgatgctattgaaatagcctgtcttgctatattttctggcaccccacccatttcataaagttttttcccaggtttaacgacagctacccaatattagggagaacctttttctgaacccatacgtgtattcagtaggtcttactgcaaccgggttgtgtggaaatatgcgtacacatattggtccaccttggcgaacatttcgggacattgcccgccgtcccgcttctatttgtctagatgttatccacgctggctcaagtgcttgaagagcatatcttccgaagcgaatatgattccctcgataggatattcctttcattcttcctctatgttgaatacgaaatctggttctttggggactaagcatagcgatactatcaatatgaaatgatgcatttcatttt

SEQ ID NO: 216343 - DNA, 362 bp, Glycine max
atattttttggttgcaacttggtgttgttttaaaatatggtatacgcaggaacaacgcaggagggcttggcttgagacaaaacagtcaatctggttgttaagttgcccgttgcttaccttgtgaaccataaggtttgctttagatgccaccaccgctgaggaacactcaagcataagatctataactcttttgaaggagatatttactgcatgccgcactatgaccaactggaaaaaagaactcatttttttgacaaatgcttcgaagggacacctattattgctccaccagagaaaacctgggaagttaatcctgtaccagccaaagtctcaagtgtgtttggtggaactagatataaatg

SEQ ID NO: 216344 - DNA, 240 bp, Glycine max
gcgacttcttccgtgttgatccacagaaacatgagggactaagttatgtgggaattcgcattgcactttgtatattccaagcacatgacatggatgaggtggctcctttagccgcccactacgccaccggtgagctcaagttctcagcggagtatacgattatcatctgaaaggccgaccataccataattgatggattgctcaatgaccctctgccgaaggggacattctcaccctaac

SEQ ID NO: 216345 - DNA, 428 bp, Glycine max
ggacaaataaagctataatgtgtagaggggttaccaccctcaccttctgccaaaccaaacccacccttttctgtcttcaagctactatcgataaatcagtttaaattttggtggggtagtaataattgtaccatatcgaggtaccttaaaaaggatctggggtttgcatatgttacttgcaaatctctcgactactttggcttggctttctgaattttggtttttcagtgctgagagctgaacaagaagatggggggtggaaatgaagaggcactcaagcagctgccgaccctgatggaaaatgtggatgatgagcacctgaagaatacattccatattatgcaccagggttatcaaacggaaacgtgaataccgtttctcaaagctagggactggagctgccccaaagtccataaaatgttaattga

SEQ ID NO: 216346 - DNA, 503 bp, Glycine max
ggacaaataaagctataatttttagaggggttaccaccctcaccttctgccaaaccaaacccacccttttctgtcttcaagctactatcgataaatcagtttaaatttttgtggggtagtaataattgtaccatattgaggtaccttaaaaaggatctggggtttgcatattttacttgcaaatctctcagctactttggcttggctttctgaattttggtttttcagtgctgagagctgaacaagaagatggggggtggaaatcaagaggcagtcaagcagctgcagaccctgatggaaaatgtggatgatgagcagctgaagaatacattccagattatgcaccagggttatcaaacggaaacgttaatacggtttctcaaagctagggactggagtgttgccaaagcccataaaatgttaattgattgtatgaactggagggcggaaaatgagattgacaatgttttaaggaagcctatccctacggatttgtacaaagc

SEQ ID NO: 216347 - DNA, 492 bp, Glycine max
gaaaggaataccaagattaccaccacatagcaatgggcggtatactttctgcgcttcttggcggcgacgcggcggcggcggcgtcttcgccggagagttctacttctagagtctcctccttccactcgtcgccgcgctggcagctctacttcaacgagatcaaagataccgataagctcgttgtgatagatttctcggcgtcgtggtgcggtccttgcaaattcatagagccagcgattcacgccatggccgacaagttcaacgacgttgacttcgtcaagatcgacgtcgacgaattacctgtgattttcgcttcctaattcttcttaattgactccaatttttgtttccgcgaataattctgaactttttatattctgttttggattatttttttttgggaataggatgtggcgcaggagtttcaggtgcaggcgatgccgactttcgtgttgtggaagaaagggaaggaagtccacaaggttgtgggcg

SEQ ID NO: 216348 - DNA, 421 bp, Glycine max
tgcgtggttcttgaatctggaactggaagtggatcgttgactacttcgcttgcaagggcagttgctccttcaggacacgtctatacgtacatgataacaaagctaatatctgccctgtgcccttgctgtttccttcgctaccgtgccaggtgttgagggccttgtgcgctgagattagctggttgggtacgccttcttcttccttcttcacactggggttgatctatgtaacgagacctggttggatgatgagatcaagtcatggctagctgttgctgcctaatacatggctgatgttatacgcattgtctaaagcattgtctggccacaaggatgaggccttcttttttggtgacgctgctgctctggcttaaaggtagtcttcttcacgagtgaccaacgtggatgttcagaaggctgc

SEQ ID NO: 216349 - DNA, 540 bp, Glycine max
ggagtatctgttatactttttccagcgtttagatcccctgcaagatcttgatcgaattttgggaagggtaacaactgaatttgaagaaagttgggctgttggaaaggtacagggatgggaaaatgacaatcaggaaaatggacatgtacttgctgagcatgctaccattgatcttgattattatagtacagttgaagagctgatggaagtcggtcctgaaaggttaaaggaggcactggctgcgttggggctgaagactggtggtactgttcagcaacgtgcagagaggctcttcctcacaaagcacacacctcttgaaaagttggacaagaagcattttgctaagggtgcacgtggtgtacaaaagaatggggttgctgcagtttcacaagaagatggaaattctaaagaaattgcattgatggaagccaaaatgacagaactttgtgatttgttagaggagacatttgctcgaacaaaagacaatgttgtaaagatgcaagccctaacatatgatgaaatggaagcagagcgcgagga

SEQ ID NO: 216350 - DNA, 379 bp, Glycine max
ctcactacacaggccgtgcagcacattttgtttgtttacttatcaacaccgcataagcgatggggcatttgataaggatgggactctcccaaaggacggagaggcgatccctcttaaagagcgtgaccttgttggttgggaatggtgtactgccacggcaaggagattgagctcggctgtacctttggtgctctctgcccttggggagcctcacctcaacatctgcaagctcgtgctgcgctaggcaaacatagactgatcttgatcgacccgaagagggcatttcatctctttcataatacaaagaggacactgttagaagagatgtacaagacttgtgtaggagaagttgcataggaatattgaaggatgtcgtgct

SEQ ID NO: 216351 - DNA, 542 bp, Glycine max
  unsure (1)..(542): unsure at all n locations
agtgccagagagagaaagacgtgtgaagtgtgagtgaagaagctcttgatgttttctcttgcaacctctgaatctgtaggcttcagttgtgctatttaacagtgtagggcactgcgtgtttacgaaataataagtttgtataattactgtaattaatatcagtatgggtgaggaagaaccagcgaatgaagtttccaagactgattcaaatggaaagagcttgcaggagaaaactttggatgaaactactgagaaaaaggacttggaaactgatggaggaaaagtcttggagaacaatggaatcaaagagaatattgtaaaagaaattgaagataagaaagctgatggtgtggaaaaggtagaagaggacaagaaaattgttgttgtgaaagaagcaaaagaggataagaaagaagatggtgtgaaagaagctaaagaggataagatagaagaaggggtggaagaagtaaaaaaggataacaaagaagatggagtggaagaagcaaaagaggatacgaaagaatatggngttgaagaagtaa

SEQ ID NO: 216352 - DNA, 459 bp, Glycine max
accttcaattgtttccttaaccttggtgccttcatccattttatcagtctcagatatatgatcatctttcttatcctcttctatttctttcaactcatcaccttttttatctgctactacttgtttcacaccatcaattgccttatcctacttgacttctttcacatcatcaacttccttatcctctatgacttctttcacaccatcaacttccttatcctcttctacttcttccaccctatcttgtttcttatcctcattgactgcttccaccccatcttttttatcctcctttacttgttcaaccccatattcttacgtatactcttttgcttcttccactccatcttctttgctatcctttgctacttattccaccccttcttctatctgatcctgtttagcttgtttcaccccatcttatttgttatactctttcgcttctctcacaacaccaat

SEQ ID NO: 216353 - DNA, 514 bp, Glycine max
cagaacagttgaagttccctcctttacttttggagtcgaaacgtttggtagaacagtggcatgcacagcgtcgccgatgacggttcaggcgggtcgggttcggaccctgaaagaaggttctcgcggagaatcgggtttgggtccggtcgtgtactggatgttcagagaccaacgtgtgacagacaattgggctctgatccacgctgttgctgaggccaacaaagccaacgttcccgttgccgttgttttcaatctcttccacacctttcttggcgccaaatcccgtcatttagggttcatgctcaggggcttgcgccaattgtgccaccgtatgcaacactctcttcaaatcccctttctcttgttccagggagaggcagaggagacagtgccaaagtttcttagagaatgtggagcttcacttttggtgacggatttctcacctttgcgggaagtacggaggtgtaaagaggagatatgcaagagggtaagcgattcggttgctgtgcatgaa

SEQ ID NO: 216354 - DNA, 531 bp, Glycine max
cttggagaatgctcttggtaaatttgatgatgggccattcttgcttggccaattcaggttggtggatattgcttatattccatttgatgaaagattccaaattgtctttgctgaggggttcaaacatgacatcacagaaggaacgcctaaacttgcaacatggtttgaggagttgaataagctaaatgcttataccgagactagagtcgatcctgaggagatcgttgatcttttcaagaaacgcttcctgcctcaacagtgaacgttgtattgctgcaggcttcctctaaaatgtagactctgcccatatagcgtcctttcattcacgggatgggatgcatctgcagacaaatgtcggttgtgtttatctgccagagttgcaggatagtttgaagtcataatcacgttcatttctcagcttgtttgtttgatgtcataataatgtttatgtgccagtttgtgatcactgatcaatatgatataatgaccaatatggtattattatcctattcgaactatgttatatcacgt

SEQ ID NO: 216355 - DNA, 321 bp, Glycine max
ccttcgagatttctcacacgcttacaaccactttctatctctttatacaccaacataactcgcaggtgggtctcattatatttaactatacctctttcaccaattctaaagcgcaaatgtaaacttatctcaatcatcaatcaatcttttactacctgtacctgtaataaaaagagctccatctgttcttaaactccttatttcaaaaggacttctgctcgcacagagaatggattgttagacaatatgattcttttcaataaaagactattcgtgtgtgagaactacgttactcaacaaaaaatcttccttacctgtcca

SEQ ID NO: 216356 - DNA, 467 bp, Glycine max
caagaagattctagtagtggagaaactaaaaggccattaaaaaatttagacaatgaaattgctcagataacaaagttgaagtcaacaccccatcaacaattagtccaagttggaactggaaggccagaattgccagtttctcctgtgaagatgctggcaggtcgagagtctaattactcggacggggaaggttttcttcagccgatcgttgtcatcttttgagcagatatttgcctgtaaatggtccctggcttattgaccaaatgtctagtagggcttatgtctcccagttttcagctgatggctctctttttattgctgggttccagggaagtcacataagaatatacaacgtggacagaggttggaaagttcagacgaacattctagctaaaaatttgagatggacaatcactgatacatctctttcacctgatcaacgctatctagtttatgccagtatgtca

SEQ ID NO: 216357 - DNA, 497 bp, Glycine max
  unsure (1)..(497): unsure at all n locations
aatcaacaaaagaagagtagagcgagagtggaatagaacaaagaagatgagcggcgccagcagcactataaggctatcgccgatggtgagcgtgtccccgaattgcaattgctcatcgatgatggtgatgaagaagacgacgacggcggtggctcctttgtggatgaaaagcaagagcgctaggggtggtattaggtgcgaggtggctattaatgcggtggatgagtcgacgacgtcaccggagtcgaagattggagcgcgtgtgaaggtgaaggcgggtgtaaaggtgtaccacgtccccaaagtagccgagcttgacctcacgggtctggaaggcgagatcaagcagtatgttggcctctggaacggtaagcgaatctccgccaatcttccttacgaggttcagtttctcaccgacatcccagctcgtggtcctgtcaagttttttgcccacctcaaggaagatgaattcgactatctntagtcaatcacccact

SEQ ID NO: 216358 - DNA, 378 bp, Glycine max
aagtctttgagaactaagaaggagaattaaatggcttcctcaatgatctcttccccagctgccaccactgacaaccgtgccggtgccgccatgggtgcttcattcactggcctcaagcccatggctggctatcccaccagaaagaccagcagcgacattacctacattgctagcaacggtggaagagtgcattgcttgctagtgtggccacctgggggcctgaagaagtatgtgactctttcctacctgccggaccttgatgatgctcaactggcaaaggctgttgaatacctgattacgatgggccggattccgtgctcggcattcgagatggagcgctgcttccagcaccgcgagcacaccagggaacctggatac

SEQ ID NO: 216359 - DNA, 342 bp, Glycine max
gaaacaaagcaacacaacacagtagctgattcattagttctcatccattaatttccattgaagtccgaaaacagaaaccaaaaatacaggatgatgaaatctcaaaaagcaaaaacaaatgggaatgtagtttaagtacaaacaaacaaagtggggtggcggctacaaatgctttgcaaatttttcacacttagaagcctgggggcttgtaggcgatgaagctgatgcactgcacttggcgaacgttgtcgaatccgatgatacggatgaagccgttggggtatgcagtcttagcctcttgaagctccttcaacacctgagaagcattagtgcaaccaaaca

SEQ ID NO: 216360 - DNA, 500 bp, Glycine max
ggaaatgatggcaattgggtttatgtttgttgttggctccttcacttcctgctatgggacaacaggtttttctttgtgacctaaaaaccttttcaaaaggctttcctgatggctaatgaaacaaaagacttccacatatttaaactgtgaaattcaggtgctttctctcggtcagcagttaacaacaatgcaggcgcaaaaacagctgtgtcaaatgtagagatgtctgagacagtcatggtgacactcctttttctcatgccattgtttcaatacacgcctaatgtcgtgctgggcgcaatcatagtcacagcagtaattggcctcatcgatctccccgctgcttgtaacatttggaagatcgacaaattcgattatgctgcgatgatgactgctttcttaagtgttcttttcatctctgaccaaggacgccttgctcttgctgttggattatcaactttgaagatactcttgcatattacgagaccgaaaacagtgat

SEQ ID NO: 216361 - DNA, 317 bp, Glycine max
gcagacttattttatcaaggatgtgacacaatcgcgtgtgccccttctgtcatggttgatgattggcctttcattgctgaagaaagtgaagctacagcctctccaactgtcaagaaaaggttatctgctcttatgaaatcattagcttcatctgcttttataagcttttctatgacctcagcaagaggattgaccaacacaagctcaacacctttcttttgcagtgttgctttcaactccttgaaaagtgagattccacttggagtaacagccctcacaggtgaaaacttcaaagagatactcttttttttcatgat

SEQ ID NO: 216362 - DNA, 574 bp, Glycine max
  unsure (1)..(574): unsure at all n locations
gccgtaaacagatgtgaacggttccttcctccttcattgttcgcctcatcaacattacctccttcttccaccgtatcataggataggaccactcctaacacgtttttgcctttttaattaattcctttctttttattcttcccttccctgagtcttccacattattttccttcttctcatcaagaaattttggtggcagaccctgtgagaaatattaaagacgggccactttcaaaatataccatggagccacaattagaatcccctttgggaagaaaagattctacaggaagtgccgattcttctaagccttcaaagcatgtcattgagacagctgcgccctttgaatctgtcaaagatgctgtgtccaagtttggaggaagaattgattggaaatctcgtcgaacccagagtctggtggaggagagaagcaagctcgtagaagactttagaaaggaagaaactgcagaggaattggaaaacactaagaagcttatagaagaactcanaactagcttagaaaagatagaaaaagatgagcttcaagcaaaagaagaggctgacgtgtgattct

SEQ ID NO: 216363 - DNA, 463 bp, Glycine max
gaggctgattcagcttcagtgttattggaaggaacttttccctttgggcttgatgaatcatgtgcaggctcagttggatcagaagtttgttcattcaattcagtagccttctcttgttgcttttgttcagccctccatgttcttaattcatgttctacagctaactttccttcattggccttttcggaattcccagttgcaattttcagagattctcttcttacagacaactcctcattcagttcttctaacttctccaggcttcttaattcagactcccttgctatctgaatctgagaagtagcagcttcgatcctcgcattggcttgctcctctgccttataggctctcctgctgagctcatgatattcttctagtgtgagtgtcaccattgaggaagagtccttgtcatttttgttgcctttagctgattcactcttctccatgctgtgattgcatctct

SEQ ID NO: 216364 - DNA, 353 bp, Glycine max
cttctttatacggatggcagcaccattggcatgtcttgttgggagtggtttatctatacagagtaataaattaactcttggcaaggacgtcaatggaagatatctcttctcatatcataggctttcagcacagagtaaggagtcaaagacaatatgcataaaggcatccttggatcaaaggaagcatgaagggagaagaggatttctgaaattgttgaatgtgggagttggcttacctgtattattaggaggtgggaaagcgtatgctgatgaacaaagaccttccttcttcagaatgtcttaattcaaaattcttgagtatttgggatagggtagaggtaaaaaaggggatc

SEQ ID NO: 216365 - DNA, 412 bp, Glycine max
aaaaagaagccagctgggatcttttgtcattgctaaaattaaaaggcaggggttttttacaaattttttacaatttgaaaaaaattcagtttggggggagctacactacattgcaggggcatttaggctattaaaacaacaactggggagggcgttgaaggagggccccttttttcaacagggatttaaacaaactcggacaggagagcccggaatttatttccaaactttgtgttcttctccaatggaacttccacaattttgtcaattgcctcacgggtgctccttatttggcccaatgctatttcatatgcttcatctgagagccttttgaccgccgcttggatgtcttgcgcaagcttttatgacattgagtttcttgccatcattctcatgataacatcactttggg

SEQ ID NO: 216366 - DNA, 490 bp, Glycine max
gtcgcccttttttttttttttttaccttttcaatggtacatcattgtaaatatcagcatggggatcatccaacagaatatcaaaattttcccagataaactagttattggagtaacttaatcattctactcgtcatcttcatcgctgtcttcataatcaaaatctgattcatcacttcttggttgcgtcagtgaattcatgtcaaatgatggttccatttccatctcttccatgtcaatagtgtcatagtccattcgttgctcaaatttctcattagaacaattaagcatccatgacagagaacactttaaccctttcttgacaaccatcttatgcctaggttttatagttgactccaaaccgtaagtgaagaatgcagggaaagtaactaagtcttccaaaggccttttcataaccatttggaagtaatcaaagctaagtttcataatgtcaatgtttaaagcaagtaattgagggcatccaacaacca

SEQ ID NO: 216367 - DNA, 481 bp, Glycine max
gggaggaaagtgaagtccacatagttgactttcacattggccagggaacccagtgggtgagcctgattcaagctcttgctcgccggcctgtaagccctccgaagatccgaatatcaggggtagatgactcctattcggcctatgccaggagaggagggcttgatattgatgggaaaaggttatccggacttgcacagtcatgtcatgtaccctttgagtacaatgctgaaagagtacctgctactgaggtgcaacttgaagaccttgaacttcgcccttatgaagcatgggcagtgaactttgccattagtctgcaccatgtgccagatgaaagtgtgaacagtcacaatcatcgcgaccgattgttgagattagctaagcaactgtctcctaaggtggtgactctggttgagcaagaatttaccaccaacaatgcgccgttcttgcagcgcttcggtgagacaatgaactactacttggc

SEQ ID NO: 216368 - DNA, 492 bp, Glycine max
ccacattcattttaatcctaattctgctctttttgatcattcgatttttctcctcaagatgcagatattcgtaaaaactttgaccggcaagaccatcacccttgaagtggaatcctccgacaccattgacaccgtaaaagctaatattcaatacaaggaagggatcctacctgaccaccagagacttatctttgcgggtaaacaacttgaggatggtcgaacccttgtcgattacaacatccaaaaggaatcaaccctccatcttgtgcttcggctgatgggtgtcatgccaatcttcgtcaagactttgaccgtgaagaccatcacccttgaggtggaatccttgaacaccattgataatgttaaggccaagatccaggacaaagagggcatccccccagatcagcagaggctgatttttgccggtaaacaacttgaggatggaagaacccttgctgattacacattcagaaggaatccacccttcacttg

SEQ ID NO: 216369 - DNA, 502 bp, Glycine max
  unsure (1)..(502): unsure at all n locations
cccatccaacaaaaatcataaaagttaaaattcaataaaaaagcatcaaataagttttaaacagataaatggatgaaagcaactacacatttagtccacttcctcaatcttggggccagcaccacttcctcggctgccccagcaccagcaccacccatgtcaggaccagcaccaccttggtacatcttggcaatgataggattgcagatgctttccaattccttcattttgtcctcaaattcatctgcttctgcgagctggttgctgtctagccactggatagcttgctcaattgcgtcctcaatcttcttcttgtcagtaggatcaagtttctcaccaattttgtcatccttcacagngttcctcatgttgtatgcatagttttccaaagcattcttggcctcaaccttctttttgtgctcttcatcctcagatttgtacttctcagcctcttgaaccatcttctcgatatcttcctttgacagtctacccttgtcattgg

SEQ ID NO: 216370 - DNA, 495 bp, Glycine max
caaaaacaaagaaaaaaaaaatcccttagccaacacaaccatcatggccacctctgctattcagcaatcagcattcactggtcaaactgctctgaagcagctcaatgagttcgtccgcaagaccggtggcgccggcaaaggtcgcactaacatgcgccgcaccgtcaagagtgctcctcagagcatttggtatggccctgaccgtcccaagtacttgggtccattctcggagcagattccatcatacctgaccggagaattccctggtgactacggatgggacactgctggattatcagctgacccggaaaccttcgccaggaaccgggagctggaggtgattcacagcagatgggcaatgcttggtgcccttggctgcaccttcccagagatccttgagaagaatggtgtcaaattcggcgaggccgtgtggttcaaggccggtgcacagatcttctcagagggaggccttgactacttggcaacccaaacctg

SEQ ID NO: 216371 - DNA, 420 bp, Glycine max
gaactagttaacttgaattccaaacgtaagagttgatattttctggggacccaaatttctaatatataaaaatataatggttctcatacagatttttctgctacacaggtgtagttacattagtgaaaatggagttaaacacaagggaactgcaaaagggagcaaaagattgcattgcatgtaggcatcctcattgtccagggacaaagttagtggcataagcccaagcattgttggcaacaggatcagcaacgtggtcttaaaggttctgaatagggcccttgccagtgacaatagcctgaacaaagaaaccaaacatggagaacatagccaagcgaccgttcttgagttccttgaccttcaactcagcgaatgcatcagggtcatcagccagaccaagagggtcaaaagcaccaccag

SEQ ID NO: 216372 - DNA, 472 bp, Glycine max
agacaatatctatattttcgtgcggcattggcaaacataatggttaaaaaaatcaagactttcttcaaaatccctagaaaaggaatagtaacttaaatcattttcatctggacacaaaattaataacattacaacttgcaaatctaatctgaaaccagctcccaaagaagatacaaaaaacgccactgtatacttagccattaaaaggaaactcaatcagccggacttggaagatcactcaagttaccactcaaaacgagctaggtttaggcctttgggctgcaacattcactctgattgcccttccatccaaactctgaccatcaagggcagcaattgcatcattcatatcactctcactggacatcgtgacaaagccaaaaccacgtgatcgaccagtctctctgtcatagaccacccgagcatgcctaaccttaccatgttcactgaaaatttgcttcagccgagaatt

SEQ ID NO: 216373 - DNA, 556 bp, Glycine max
attctaatgtcctaaaaaaactcttatctatgcctatgtctgtgtctctgtcaaccgtgcctgcgttcaattctctcacaatggctgaatcctgcctcctatctctcccttccctcttctacgccaaaaacaaaaccctttctctctcaattcccactaatcctctcaacctgcaattcccatgctcaaactcttcgctttttcccctcaccaccaagactacgcgccactcttctctcctcacattcgtggctcagacatctggttgggccaaagaaggggaggaggaagaagccgcgtgggagaaccaaggcgacactgcgtggggaactgaagaaggtggcgatgatatagaagatggcggcgaagggggtttcgctgaagaagaagctgaagaagttaagatcttcgttgggaacctgcctttcgacttcgacagcgagaaattggcctcgcttttcgaacaggctggcaccgttgaggttgctgaggttatatataatagggccactgaccggagtcgcgggttcggatttgttaccatgagtacaatcga

SEQ ID NO: 216374 - DNA, 467 bp, Glycine max
aagctaaaagacaatatctatattttcgtgcaacattagcaaacaaaatggttaaaaaaatcaagactttcttcaaaatccctagaaaaggaatagtaacttaaatcattttcatctggacacaaaattaataacattacaacttgcaaatctaatctgaaaccagctcccaaagaagatacaaaaaacgccactgtatacttagccattaaaaggaaactcaatcagccggacttggaagatcactcaagttaccactcaaaacgagctaggtttaggcctttgggctgcaacattcactctgattgccctcccatccaaactctgaccatcaagggcagcaattgcatcattcatatcagtctcactggacatcgtgacaaagccaaaaccacgtgatcgaccagtctctctgtcatagaccacccgagcatcctcaaccttaccatgttcactgaaaatttgct

SEQ ID NO: 216375 - DNA, 462 bp, Glycine max
caccgctcccaggaagtgaccaattatgcttcacaggaggacgaacagcttgtctttccttattgaatacttttgattgatccatagcattggctgatctttcaatagaatttccactcgaaccaacagaaagcttaggaacgagaaaactagccattgcaccaaatgcacttggagtggctacagaacctttctcattgtctgcaccagtttgtccaaaaactgcttcaatatggtaaacagtctttgatatgttatcaatatcccccacaatgtacaaggtagcatttgcagggaaataccaacgctcatgaaacttccttattttatctgcatcccacttctttatctgttcttctaagccaatgggaaaccttgtgctgagcttattttcagaatgcagatgctgtaacaactgggcatcaactcgatactctattgtattcatcatttgaagctctg

SEQ ID NO: 216376 - DNA, 467 bp, Glycine max
  unsure (1)..(467): unsure at all n locations
ccaaattcattttaatcctaattctgcttttcttgagcattcgatttttctcctcaagatgcagatattcgaaaaaactttgaccggcaagaccatcacccttgaggtggaatcctccgacaccattgacaacgtaaaagctaagattcaagacaaggaagggatcccacctgaccagcatagacttatctttgcgggtaaacaacttgaggatggtcgcacccttgccgattacaacatccaaaaggaatcaaccctccatctcgtgcttcgcctcaggggtggcatgcaaatctttgtcaagactttgaccgggaagaccatcacccttgaggtggaatcctcggacaccattgataatgttaaggccaagatccaggacatagagggcatccccccacatcagcagaggctgatttttgcctgtagacaactngacgatggaagaacccttgctgattacaaca

SEQ ID NO: 216377 - DNA, 496 bp, Glycine max
agccaaaggaatgggaggaacagtaaagaaggcttatgaacttttggaaaacacaccaaatgctcacatgctgcaacaattttcaaaccctgccaatactcaggtgcattttgaaacaacaggtcctgagatatgggaggatacaaatggacaagttgacatatttgttatgggaataggtagtggaggcacagtctctggggttggacaatatcttaaatccaaaaatcctaatgttaagatatatggagtggagccaagtgaaagcaatgtgctgaatggtggtaaacctggtcctcatcatataactggcaatggggttggattcaaaccagacatattggacctggatgttatggaaaaagttcttgaagttagcagcgaagatgcagttaacatggctagggtgttggcattgaaggaaggactcatggtagggatatcatctggagctaacacagttgcagcactcagattggctcagctgcctgagaac

SEQ ID NO: 216378 - DNA, 511 bp, Glycine max
cgattaaaaatgaaaaataaagaacaatacaaaacattaacacagctcttattgtaagctgtatcaaaaccttttcccaattaacacagctttgtttgacaatttttgctatggccgaactgtaagatgatgttaacaatttttgctacaacaggattgtaataactaggttgctccatgtaatgtaactccacaacaaagcttatgcatggaattaatcaactgctactggctgcatgttttcagcttcttgacgaagctcttggaacagaacagatgataggtatcgttcaccgaagcttggatgaacagtcacaataagtttgcctttgttctcaggcagctgagccaatctgagtgctgcaactgtgttagctccagatgatatccctaccatgagtccttccttcaatgccaacaccctagccatgttaactgcatcttcgctgctaacttcaagaactttttccataacatccaggtccaatatgtctggtttgatccaacccca

SEQ ID NO: 216379 - DNA, 405 bp, Glycine max
  unsure (1)..(405): unsure at all n locations
gttcactataacctcgggaacatcttcagtaacaagatactctgcttgagggcatgcagccacttgcatggctatatcatcgacaagctctttaaaaatttcacctcgtgagacaaaatctgactcacagtttacttctaccaaaacacctatcctgctgtcatggatgtaagaacctatccttccttcagcagtgaccctgcttgctttcttgtctgcactcgataagcctttttttctaaggcactcttgtgctctaataaagaccccaccggtctctgatagtgcttagttgcaatccatcattccagctcctgtatcttgccgacgttgcttcacatgagctggagatatacctgctttacttaagccttctcctgaagtagcgccagtttgngcatcaga

SEQ ID NO: 216380 - DNA, 327 bp, Glycine max
acacacttataactaacaaggaaattctaatggcaccctcaacgatttctaacccgggggcgggctttgttgaccgtgccgtgccctccatgattgctacaatcactggcctgaggatcatggctggcttccccaccagaaagaccaacaaggacacttaccttcattgattgcaacggcggaagagtgcactgcatgcacgtgtggccaccagttggcaagaagaagtgcgagaatctttcctacctgacagaccttgaagatgcacaatgggcaaaggaagctgaataccttgttagagaagggatggatattaacgctaggaat

SEQ ID NO: 216381 - DNA, 498 bp, Glycine max
atttggaaacatgtgaagtctgtactggtactggagcaaagataggctccaagatgagagtatgttcaacttgtggtgggagaggtcaagtgatgaggactgaacaaacaccttttgggttgttctcacaggtttcagtatgtcccaactgtggaggggatggtgaagtcatatctgaatattgccgtaaatgcaatggtgaaggacgaatacgggttaataaaaatattaaagttaaagttcctcctggtgttagctcaggcagtattctaagagttacaggggagggtgacgctggaccaagagggggccctccaggagatctgtacgtatatcttgatgtgcaagtgatacctggaattcaaagagatgacattaatctcgtctcaataatatcaatcagttatctagatgctatactgggggctgttgtgaaggtaaagacagttgaaggcatttcagaactacaagtacctgctggtacccaacctggagatg

SEQ ID NO: 216382 - DNA, 480 bp, Glycine max
aggtaattcattcactcgtgtagaagagcttagacttgctaccagatatacactagctttctcttagtgcaacctgctcatggagtacaatttgagatccttgaacaagttattctgtgtaaattgactggtgccaaaatttacaaatcaaaaacaaataaaagaatctgcatcactacttatttgatttcgctgggtagctaaaaattcagttaaagcatttcaagaaaatgtctgcattagtccctttccttccagtaactgttggaatcatgagaactctaacccacattaggtaaactacatcttgaagattctgctccacccaacaaccccataggactagagattatctttaaaccactttaaagctccatttgccacagatccagcaaagtccttcaatttattccatacatcattttcatcttctgatttttcagtttttttcttcgactgttgatgttgtactttcatcct

SEQ ID NO: 216383 - DNA, 484 bp, Glycine max
gctgcacacaaggagcgttctggatttgagggtccctggacctctaatcctcttattttcgacaactcatacttcacggagttgttgagtggtgagaaggaaggtctccttcagctaccttctgacaaggctcttttgtctgaccctgtattccgccctctcgttgataaatatgcagcggacgaagatgccttctttgctgattacgctgaggctcaccaaaagctttccgagcttgggtttgctgatgcctaagcaacgtttaggggattgttgaagaggcatggtgcccataatatttctctaaaaaattgtatggtcatggtttttaatgccaatgtgggttccccagattttagatagcttttgaatgtattttgctggacgtgacgatgattgggaagttgggttgttgtttttatttgtggttgatacttttgataaataacattgttcagcgataatgatagtgatctttcggacc

SEQ ID NO: 216384 - DNA, 345 bp, Glycine max
agggcccaaagagcactttcattctccctggacaatggtttttaaccaaattttaatcccacaagagataccgcagcccatctttctaaatgtttcaacgtacgggaaaaatcattgaaaaggtttctaaaatttggggaacccgcattggttttaaaaaccatggccattccattttttagagaaatattatgggggccaagcctttttaacaatctcctaaacgtggcttaggcattagcaaacccaagctcggaaagatttaggggaacctcaactaaattagtaaaaaagggcttttcgtccgtggtgtttttatcaacgagggggctgtatataaggcct

SEQ ID NO: 216385 - DNA, 527 bp, Glycine max
  unsure (1)..(527): unsure at all n locations
gtcccattggtaattcccgaagtgaaccctgaagcaatgcaaaacatcaaagccgggactggaaagggcgcactcattgctaaccctaattgctccaccattatatgcttgatggctgctacccctcttcatcgacgtgccaaggtgttacgtatggttgttagtacctatcacgctgctagtggtgcgggtgctgctgcaatggaagagcttcagctgcaaactcgtgaggtgttggaaggaaaaccgcccacttgtaaaatatttaaccgacagtatgcttttaatctattctcgcataatgcgtctgttctttcaaatggatataatgaagaagaaatgaaaatggtcaaggagaccaggaaaatctggaataataaggacgttaaagtaactgccacatgcatacgagttcctgtcatgcgagctcatgctgagagtgtgaatcttcaatttgaaacaccccttgatgaggacactgcaagagatattctgaagaatgctccangtgtagtggttattgatga

SEQ ID NO: 216386 - DNA, 513 bp, Glycine max
gcctccaagtgtgacagctattgcagctgctacagtagctgctgcaactgcatggcgggctgcccatggactgcttcctttatgtggtccactccatacagcttttgcctgtcctcctgcatcagcaactacagcttcatcaatgattattgatgaatcaccacataaaacagagcgaggagagattaaaccacaaaatcctcctctgcaagatcagataccggatccagaacactcggaagctcaacattcagctcctaagtcaccagctgtttcttcatccaaatctgaggataggggagacgccaatttagatacttcaccaaaggctactaatcatgagatgaaccaagcaatttctgagaaccccgattccaacaaaatgaagggcagaaaacctgtagaccgttcctcatgtggttccaacacaacctctatcagtgaagagactgagttactagagaaggatgagaaagaaaaggaagagcccagaacacctgatgcgaacgtttt

SEQ ID NO: 216387 - DNA, 499 bp, Glycine max
atggccttgggcaccagcgccttgatcggaaggaaggatgtcgtctcacccccaaccggcaaaacaaccaaatcatgtactccgctacaattccttttcaagagaagcatcttaaatgctcacaattcacaagctgctctagctgcccttatcttttcctgcgcgagcctctctgtgaccccacaagcccttgccgctgataacgtcacccctccccctgtaattgaagcccaacagagccaattaaacccctccaactcatcctcccctttctcacagaacctactcctcacagctccaaagccacaagcctcctccgacctccccgaaggcaccaactggcgctacagcgagttcttgaacgccgtcaagaagggtaaagtcgagcgagtcaggttcagcaaagacggttccgccctccagctaaccgccattgacggccgtcgcgccttcgttattgtccccaatgacccggacctcatcgacatcctcgccatga

SEQ ID NO: 216388 - DNA, 463 bp, Glycine max
  unsure (1)..(463): unsure at all n locations
aagggacgttgagatatgatgncgnancncgtccggaatagtttccaggagcgtactgctcggtggccgccctttttttttttttttaattgttttttctccttgattttgataaaataattattgattctgacagggtacaagtcagagcgtattttatagtacaaacataattctgtgacttgcgtgtatgattatgcaacatataattgggcttttccatcaatgaatagactcatgaactcttcaccatccacagtttctttttctatgacaagttgagcacgcttgtgaaggatatcaatgtgagttgagataatatgtgttgccctagaatatgctctctgtaccagttccctcactttcgcatacactacattcgcagttgccatggagttatccttttgcgatgacatatgttgacccaagaatggatttacaccaggtccaccaatggcaactt

SEQ ID NO: 216389 - DNA, 498 bp, Glycine max
cagccttgaacttgaactatcgtgttttcttggctttctctgttcaggatcaacatggatattgtatcacgagctttgctatttccgttggctatacttgtgctcatattaagcacaccttgctcaggtgcttttgggaagagtggaactaatgtgaaaacagctatttttctgtcccccaagtttgaacttggaccaggatcggtagccaataaatatgattatgacgctgattttccaagaggtcatatagcacttaagagtttcaatgctgaagtagttgatgaagcagggaaccctgtgcctcttcatgaaacttatctccaccactgggttgttgtaagatactatcaacctaaatatgtgacgacacacacaaactatgatggacataggatacttcacaactctgaccatatatttgtgaggaacagcggcttatgccagagagatactctaagacaatactatggccttggatctgaaacacgaggaaca

SEQ ID NO: 216390 - DNA, 531 bp, Glycine max
acaatcaattttgatatatatagtattacatatcagcacaggataataagcaagactggtttaagacaaacattacaaaccctcaccaatacaaataattgataatcacattactacaatccttaaacttgaaaatatgctctttgccggttcttgcgtgtgttgtcctattgctgccgaatatgagaagtatatgttccatcgatatgtatttctgtatttcttttaaccgtgatacatactgtgataccatcgatatgacactcaacttatatttgcatctcacaacttatctatcaatgaattatactatttatattcataaaaaatgaagaacgagaagaatatctgaagtgttggtgtggaagctgttctgccaccaataggtagaaaagccccattactccagtgtggccacggctgctgctgtagttagactctagagttatagtttcaccatcaattatctttacagaacctggttgaggataacatgtgctcattcctacaatgtagtctacttcgtttcct

SEQ ID NO: 216391 - DNA, 499 bp, Glycine max
tttaaacctaattctcatttcttcatcgttcgattcttctcctcctaaagatgcagatcttcgtgaaaactttgaccggtaagaccatcacccttgaggtggagtcctccgacaccatcgataacgtgaaagctaagattcaagacaaggaagggatcccacctgaccagcagagacttatctttgcgggtaaacagcttgaggatggtcgaacccttgccgactacaacatccaaaaggaatccactctccacctcgtgcttcgcctcaggggtggcatgcaaatctttgtcaagactttgactggcaagaccatcaccctcgaggtcgaatcctcggacaccattgataatgtcaaggccaagatccaggacaaggagggtatccctccagatcagcagaggttgatatttgctggtaaacaacttgaggatggaagaacccttgctgattacaatattcagaaggagtctaccttacacttggttcttcgtttaag

SEQ ID NO: 216392 - DNA, 522 bp, Glycine max
aaatagaatcttaattttcttaagattggttaatcaaatattaaacaactaactaactgtgaaacgatattgatatttaaaataaaaacataaacaacatactttcgctgaaacgagttcaatacatcattttaaaacataataaacagcagcacttaaaccagagatgcaaagcacaagttcaagggagacactgaacaaacagataagacatatgagaacacttcataaaagggattccccttagcaaccaccacgaaggcgaaggacaagatgcaaagtggattccttctgaatattgtaatctgccaaggtacgaccatcttccaattgcttcccagcaaaaatgagcctctgctgatctggagggataccttccttgtcctgaatcttagctttcacattgtcaatagtatcagagctttccacctccaaggtaatggtcttccctgtcagagtcttcacaaatatctgcataccttcacgaagcctcaacaccaaatgcagagtggactccttctg

SEQ ID NO: 216393 - DNA, 496 bp, Glycine max
acctaacttcttttctctctggggttctttctccatttccattggctttcaaaagtcaccaacacaattctcccttcagagtttcaatggctgtttcaacaagtttccctggtgcaaagttggaggctttgttgctgaaatgtggctcctccaatgctgccactgccactgccaccaccaccacccatttgtcatgtttttgcaaaaccagaaagacacttgttcagagtcagagagggcctattcgctgtgaggcttcttctgcttctgatgttgtggctgatgccactaagaaagctgctagtgtctctgctcttgaacagcttaagacctctgcagctgataggtatacaaaggaaaggagcagcgtcatggttattggactgagtgtgcatagtacgcctgtggaaatgcgtgaaaagcttgccataccagaagcagaatggcctcgagccattgcggagctttgtagtctgaatcacattgaggaagcagc

SEQ ID NO: 216394 - DNA, 492 bp, Glycine max
  unsure (1)..(492): unsure at all n locations
gaattttaaaaatgaccctactgtcaaaattcctcaggtttacaaacaattttctggtcaacgtgtgctggtaatggaatggattgatggtatcaggtgcaccaatccacaggccatcaaagaagccggtattgatgttgatggatttttaacaattggagttagtgctgccctacgacaattgttggaatttggattatttcatggagaccctcaccctggaaatatttttgccatgcgtgatgggagaattgcatatgtggactttggcaatgttgctgttctcagtcagcaaaataaacagattttaattgatgctgttgtccatgctgtgaatgaagactatgctgagatggctaatgattttaccagattaggcttcctgtccccagggacggatgtgactcctataattcctgctttggaagcgatttggcagaactctgctggaaaaggactgtcaaattttaattntcgtagtgtcactggaaa

SEQ ID NO: 216395 - DNA, 440 bp, Glycine max
  unsure (1)..(440): unsure at all n locations
ccacttataaacaaaaatgatacaggagatcaaccaaaggattttctaactttacaaatacattcgtgtaagctgttagtgatctgaattttgaataactaagaatttaattaaaacagttatagtataagagttttttacactaatatccaatcataaattgtcaaatataataacattattggcttacagaaattaaattactttaaaagtcatctatacggngatttttattagttgatgtgaaaatttttacaccaacagaatatgaaaattaaacataagatagattttattcaataaataaagttgaaggaagctcaacgactacgtgaattttttggaattttttggacttttccccgtgaaattacaacttgatatttactgagcaaaataacgtttcctacacagatgtagcactgattttctacacaaat

SEQ ID NO: 216396 - DNA, 482 bp, Glycine max
gacgactggggcacaattttgttggaacggaacagattctattgggtcttattggcgaaggaaccggcattgctgctaaggttctgaagtcaatgggaattaatcttaaagatgctcgggttgaagtggagaaaattattggaaggggtagtggatttgttgccgttgagattccgtttactccccgggcaaagcgtgttttggaattctcactggaggaagctcgccaacttggtcataattatattggatctgagcacttgcttcttggtctccttcgagagggtgagggtgtagcagcacgtgttcttgaaaatttgggtgctgatccaaacaatattcgtgctcaggttatccgcatggttggtgagggtgctgacagtgttggtgctactgttggccctggaagtagtaataacaataagatgccaactttggaggagtatggcacgaatttgaccaagctagcggaagagggaaaa

SEQ ID NO: 216397 - DNA, 476 bp, Glycine max
aacagaaataatgtcattttttcattccacccaaaccttgctgtgttcattatgttatgggcaaacgtggctgaggccatcagcattcaattaaaagcttgatgtctattggcaacttaaacaaactattgctatgttttcttttaacaaataaaagagagaaaaaaatacaactcaactaactaagacaaccacgttacacaggaagagcttcttctaatgaatctggggcaccactactaccgttgagcacaatcacattaccatcggagtcagcatcaactataactgagtcaccctctttaatctctctagcaagcatcttctcagccatgctgtcctccaaaagtcgcattatagctcttcttagaggcctagccccataactcggattatatccttcgtcaaccaccctctccctaaatctttctgttactgagagatcaatttccttggctttcagtctatcaaacacc

SEQ ID NO: 216398 - DNA, 413 bp, Glycine max
gggtaaataatgtagaactgaacatgggtttctctttctctctctctgtctgcttcttcactttctctcgattcaatcgaaaaaaatcatggccagaaaattcttcgtcggcggcaactgggaatgcaatgggaccactgaggaggtgaacaaaaaagggactactttaaatgaatctgaagtccctgcagaagatggtgtaaaaggtgtatgtgagccctacttttgggatccttactttagcacaaagtctgctgccccctgatttccatgactcggaccaaaacatgccggcttcgcaaaggtggggcttatactggagaggccagtgctgagatgctaggccactgggcaatatctcgggaccttattggtcactctgaacggaggcatgcttcgtatgaatcaaatga

SEQ ID NO: 216399 - DNA, 478 bp, Glycine max
tcttcctttttttttacagtcaagttcaacattttttacccaccaaatgttatggtagggacagtatttttgcaatcagaaatttaatcaaaatccaatcgatcgcctatggatgagatcactggaaagcatgtttattcaggtactaaacagagtacaatacattgtccacaaagcacagatccaaaactcaaaaacagctatttccgaagcagcttgaaaggcaacattatcagttcctaactacgaatgtcaattcttcttcacagcagcagcgtttatgatgtccacaaattccgcctcgagggaggcaccaccaaccaaaaatccatgaacatcgggctgcgccgccaataatttgcagtttcctccatttacagagtctccatagataattcttacagatgcagccctcttcagcactcacattgccatgaacccatttccttaaatcagcatgaacctcttgagcctgagc

SEQ ID NO: 216400 - DNA, 518 bp, Glycine max
gttctgtaataaagatggaattgagaaacaaccatcaattataacccccaaagaaccagatttcgtaaacaacatagaggaagaatgaaaggaatatcctatcgagggaatcatatttgcttcggaagatatgctcttcaagcacttgagccagcttggataacatctagacaaatagaagcgggacggcgggcaatgtcacgaaatgttcgccgaggtggacaaatatgggtacgcatatttccagacaaaccggttacagtaagacctactgaaacacgtatgggttcaggaaaaggttctcccgaatattgggtagctgtcgttaaacctgggaaaatactttatgaaatgggtggggtaccagaaaatatagcaagaaaggctatttcaatagcatcatccaaaatgcctatacgaactcaattcattatttcagggtaataaattagaaccaaaggaaagaggtctttaagatgaaaacaaaaaatgcaaatgtaggttcctttctttgaaca

SEQ ID NO: 216401 - DNA, 389 bp, Glycine max
acgttctattatatatatatctatctatattctatatatagatgtattggttaggttatcaagtattaatctgaaataaataagaattgctgcttctaatacttataataattactacaaattctaataattactacaaaagggatatatgttagataaaatagattaattaatctatttcacaaaaaaataatgtctccatagcacagatacgtcttataatacctcgggtgctaatgaaactattttagtgaaatataactgtctcaattcccgggcgattgcacaaaagattcgagttccttttggatttccttcttgatcaatgacaactgctgcattatcatcatactgaataattataccgttgctacgtttgagttctttac

SEQ ID NO: 216402 - DNA, 492 bp, Glycine max
gaaaaaccctgacctaaaaaggatagattattatgtatcgattgaatcaatgactattcatgattccataattgaatcaattacatactggatccaagctaaaggaatgttatggtaaaacttcgtttgaaacgatgtggtaaaaagcaacgtgcgacttgaaagacatgattagattagctgtggattcttacatccgccattttttctagtatatagaaatgaacatgctcttgactcgacatcgtttgttctgttccactagaacttattgttttggggacgggaaagcagttgatgatgtaagttgatgatgtaaatagtacatgatggagctcgagtttattcatttatcaggggcaagtatctaaggttagtaaaaattaataagttagaaaaacttcgtaagtttatttttgatagaaaaatagaaaggatccaatttgagcaaggttcacaaaaatggttggaattagtaaaactgttttgatc

SEQ ID NO: 216403 - DNA, 579 bp, Glycine max
  unsure (1)..(579): unsure at all n locations
ctttgtcggggaggcgatagctgctacgcaacgcgaataattnccgggccgacgagcacaagtctactaggccgccctttttttttttttttaatggaatttcgtttgttgattcgagctaagttccataaaaacaccagccctttttaaaatgtcctgaacagttcctgtaggttgagcgcctcgttcaaggaaatatagaataacaggaatatttaaataggtttgattctttattggatcataaaaacccactttccgaagatctcttccctctctttgagatcgaacatcgattgcaacgattctataaacggctcattgggatagagatagataaataatgcaccccccccctagaaacgtataagaagttttatcctggtacggctcgagaaaataaaaaattataatgtatgtagaaaattatgatgtcaaatacgatcaataagatcatcagatgaattaaactatgacttaagtatttttatttcgtatgatctttttgaaaaaaacactcctcatattgataactacataactcaaattggataattatcaaataactaaaaagagaac

SEQ ID NO: 216404 - DNA, 509 bp, Glycine max
gagcagcagcagcagcagcagcagattgtttgagaatgggtgaagtgccggctgtgatgcaggcgacgcagggggaacagagcaacaatgcctccgctgttcattgggagcgctttctgcctcggatggtgcttcgggtcttgcttgtcgaagctgatgattctactcgacagatcattgctgcacttctccgtaaatgcggttacaaagtgatgtcttctcatgattcagtaagcatggtgtttaaatgcatgttaaaaggtgcagctgattttcttataaaacctgttcgcaagaatgagctaagaaacttgtggcagcatgtatggagaaggcacgccataagcaggcctcctcaaaatttaacactgccggagattgaacttggttttgctgcagaaaaccatgctgcaagcaatgactctagtggttctgtggcttctacaccaaaagatgatgaatgcagtgagaaaacaagtgaggctcatgatatattgcagctgaagagc

SEQ ID NO: 216405 - DNA, 506 bp, Glycine max
ccctcacagcgtcacccagtcggcattgtgcaggagcatttctctcccgtcggagcaacttcagagattcaatgctagttgtttggactttgaaaatatgaaagtaataagcttttccggtggcataacaaaaccctgtttttttattgcccaaacagaaatgcctattctaacatttgctcattgtaagctgagtgctaccctagctcttaggaggatggggtccattacgagacttcaatattctgttgctgataggacattcacttctggttccgtggatttgccggcttccaaaacggactctggtcgagtggaatcgaggcggggaggcggctcatcctcggtatatagccgtcctagtttatcagaaatgaagaaggagaaggcagcaataagggaaaaggtttatgagttcttgagggcaattggcattgttcctgatgagcttgatggtcttgaactccctgtgactgttgatgttatgagggagcgcgttgattttc

SEQ ID NO: 216406 - DNA, 448 bp, Glycine max
ccaatggtacatcattgtaaatatcagcataaagatcatccaacagaatatcaaaattttcccagataaactagttattggagtaacttaatcattctactcgtcatcttcatcgctgtcttcataatcaaaatctgattcatcacttcttggttgcgtcagtgaattcatgtcaaatgatggttccatttccatctcttccatgtcaatagtgtcatagtccattcgttgctcaaatttctcattagaacaattaagcatccatgacagagaacacttcaaccctttcttgacaaccatcttatgcctaggttttatagttgactccaaaccgtaagtgaagaatgcagggaaagtaactaagtcttccaaggccttttataaccatttggaagtaatcaaagctaagtttcataatgtcaatgtttaaagcaagtaattgagggca

SEQ ID NO: 216407 - DNA, 496 bp, Glycine max
cagactccaacttgaactatcgtgatttcttggctctctctgttcaagataaacatgggtatggtatcactagcttcgctattaccattggctatactggggctcatattaagcacaccttgctcaggtgcttttgggaacagtggaactaatgtagaaaacacttatcactcgtgaccccaagtttgaactatggaccatggtcggtggtcaatcaatatgagtctgacgctgatattccgagaggtcatatcgcatttaagagagccaaatggtgaagtatgcagatgaatgcgcggaacctctgcgtgtcttcatgatacttatctacgccactgggttgttgtccgatgctatcgacctagatatgagacgacacacacaagctatgatggacataggacactggacaacttctggccatatatcagcgaggaacagcaggttatgccagtgagatacatctggacaatgctatggccttggatctgaaaca

SEQ ID NO: 216408 - DNA, 466 bp, Glycine max
caaaggcattttcattcagtgtagaaaaccttgagatgtttataacaggcttaagaaagatgaaatagttcttacgaattgaaactagctaattttacagactttgttcatttaatcagggatcctcatcctcaccctctaaataaaacggctggttcgccaaactatccaaaagacaaaatctgcgccaacaatatccatcatccctgtttgttggcatcacttaaaatatgtacagcagcgtctcaagccaatcacagagaggttttgacaaattgaatgatgggcttgatctggttaacctctccacatagctcatgcatttgcagattgtgttggtaacttggggcggttatgtccgccttcatagggaacaattagcatgggaggctctttcaagcacctttcaacatgctttcttggaggacaccctctgatgctgctgcacttattatatcccctaggg

SEQ ID NO: 216409 - DNA, 473 bp, Glycine max
gaataataaaaatgaccctactggcaaaatttctaaggttaacaaacaatattctggacaacgtgtgctggtaatggaatggattgatggtatcaggtgcaccaatccacaggccatcaaagaagcctgtattgatgttgatggatttttaacaatcggagttagtgctggcctacaacaatagttggaatttggattattgcatggagaccctcaccctggaaatatttttgccatgcgtgatgggagaattgcatatgtggactttggcaatgttgctgttctcagtcagcaaaataaacagattttaattgatgctgatgtccatgctgtgaatgatgactatgctgcgatggctaatgattttaccagattaagcttactgtccgcagggacggatgtgactcctataattcctgctttggaagcgatatgacacaactctgctggaaaaggactgtcacattttaatt

SEQ ID NO: 216410 - DNA, 484 bp, Glycine max
acctaactaatatgatctctggggttctttctccattgccatcggcctacaaaagggaccaacacagttgtccctgcagagtatcgatggctgcatcaacacgattccctggtgcatagatggaggctgtgttgctgaaatgtgactcctacaatgctgacactgccactgccaacaacaccacccatatgtcatgttattgcaaaaccacacatacacttgttcatagtcagaccagggcctattcgatgagaggctacttctgcttttgacgatgtggctgatgccactaagaaagctgctagtgtctctgctcttgaacagcttcatacctctgcagatgacaaggctacaaaggataggagcagcgccatggttatcggactgagcgcgcatactgctcctgctgaaatgcgtgaagagcttgccataccataagcaaaatgtgctcgagccatagcggaacattgtaatctgaatcaca

SEQ ID NO: 216411 - DNA, 370 bp, Glycine max
  unsure (1)..(370): unsure at all n locations
atgaaatggaattcaccgaggccgagagtaacatgaacgatcttgttgctgagtatcagcagtaccaggatgctactgctgacgaggacgagtatgaggaggaggaagaggaagaagagattgctgcttaaggcgcctctcttatttgtcaaaaattgtttcaaatatcgatatggttggctttgaacgagtggtgtaagtttaaattgtggtgcagtcaaattagattgactcgttaatgtgtatgcttatcgttgattgttgacattgtataaactgggttttgttgacaatgcttatgttcttgagagatcaagtcatggatgtttgtaatagttnaaaaaaaaaaaaaaataaatactaaaaccaa

SEQ ID NO: 216412 - DNA, 550 bp, Glycine max
  unsure (1)..(550): unsure at all n locations
tttacttgaaagctgccaagaattacttggaaaaaggttctgattatgctaagaacgaaatccagcgcctacagcgcatacttgacaaggtaatattctctttcagtcgaagcaaaccttgaaagttttactcactcgtgaaataattatgaatattctttttttgtggtaaatttcaattatttggttgtaaagtgagattaagaattgaatgcataatcgtgctactcacttgcctatgttgattgattgattgatgcaggccattagtcctgccaaggccgacgagttaactctaaagaaaaatatcttgtcgacatatgcggcttgactttttggtgcatcattaaccatctctcatggaagctcgtgatcaatcgcagctcctgatgattgattgactttgatatcgaaaatgctgggagatattcaacgtggatacttgtagtgcttaatntgagtctgtactattgaccttatctagcatgggcgctttgggttaaaaattccgacttacgattctctcccattgtagctactgagcgtttag

SEQ ID NO: 216413 - DNA, 566 bp, Glycine max
aaaccgctcaggtagactacaatggggagaagaatcgtaagttcggaatttttaaccccaaaagcgccatgcaagataaggtcaatagtacagactcaaattaagcactacaagtatccacgttgaatatctcccagcattttcgatatcaaagtcaaacaatcatcaggagctgcgattgatcacgagcttccatgagagatggttaatgatgcaccaaaaagtcaagccgcatatgtcgacaagatatttttctttagagttaactcgtcggccttggcaggactaatggactgcatcaatcaatcaatcaacataggcaagtgagtagcacgattatgcattcaattcttaatctcactttacaaccaaataattgaaatttaccacaaaaaaagaatattcataattatttcacgagtgagtaaaactttcaaggtttgcttcgactgaaagagaatattaccttgtcaagtatgcgctgtaggcgctggatttcgttcttagcatagtcagaacctttttccaagtaattcttggcagctttcaaagtaactcgagccgaa

SEQ ID NO: 216414 - DNA, 489 bp, Glycine max
  unsure (1)..(489): unsure at all n locations
tgctcgaggctttgcatctctggaaccgngcgggcgttcaattctctcacaatggctgaatcctgcctcctatctctcccttccctcttctacgccaaaaacaaaaccctttctctatcaattcccactaatcctctcaacctgcaattcccatgctcaaactcttcgctttttcccctcaccaccaagactacgcgccactcttctctcctcacattcgtggctcagacatctggttgggccaaagaaggggaggaggaagaagccgcgtgggagaaccaaggcgacactgcgtggggaactgaagaaggtggcgatgatatataagatggcggcgaagggggtttcgctgaagaagaagctgaagaagttaagatcttcgttgggaacctgcctttcgacttcgacagcgagaaattggtcttgcttttaaacaggctggcaccgttgaggttgctgaggttatatataatagggccactgaccgga

SEQ ID NO: 216415 - DNA, 503 bp, Glycine max
  unsure (1)..(503): unsure at all n locations
ctcaaagacacaggccgtggggcacaaattgtgagttcaattatcagcacggctaaacaatgtaatcttgacaaggatgtgacactcccaaatgagggtgaggagatccctcttaaagagcgtgaccttgtggttggaaaggtgtattccaagatcatggagattgagtctcgtctgttaccttgtgggcttcatgtcattggtgagcctccctcagccttggaagctgttgctacactggtcaacattgctgctcttgatcgtcctgaagatggtatttcttctcttccatcaatattagctgacactgtaggaagagatatagaagatgtgtatagaggaagtaacaaaggaatattgaaggatgtggagcttcttaggcaaataaccgaggcatcacgtggagcaatcactgcctttgtgnagcgtactaccaataatatgggccaagttgttgatgtagctgataagcttagctcaatccttggatttggcataaacga

SEQ ID NO: 216416 - DNA, 500 bp, Glycine max
tcgtccttttttttttattaccaaattcttttcattcaagaaaataatctaagaaatcaattatgaacttaaacctttatttgttcgcaggggttgaaattcagaactgcacaaacgagacttgatctcaaaaaatgagaaaaggaaaacaaaatcacatttgaaggatgctgctcttctcttcactgttgtatgttcttttcaagaatagctattaaattcagcgatcaatgccttcaattttgtcttccacttctgaatacaactgcctgagcttttcaatattatcttctgaagtttcccaataaccacgtccattggcttccaagaatgtctgcactagtttcctgaaggagtttggattagtgttcatgagcttgttcagcatttgctcatcctgaatgaaagttgtgttggcttcttcatacacccaattgtcaacttggccagaagttgcactccatcccactgtattggtgagtctcttctcgatctcgcgt

SEQ ID NO: 216417 - DNA, 510 bp, Glycine max
tttaatcgttcccttcattcactcccctttcactttttcccttccaacaacacaaattttttgttcatttcatactaattgtcattaattttgagacccaaaaacatggacagccaacgaagtcctcttcttagttgggctttctactgccacggcaagtcgatggaggagctgaagcagtctctgatgtacactacccttgagctggaacaaacaagagcaactgtccaagaagagctaagaaaaagagacgatcagcttctcaccctaaaggagcttctcaacaaagtcataagagaaagagatgaagctcaagagaaatgccagagactagtgttggagaaaatggtttttcagcaccaaaccgcacctgcttctggagtttccagcattgaggacgagccaagaaggggaattaatgactcctccaacaatggcctctcttcatcagattgtgaagaaagcattgtttcctctccagttatggagcatttgccaccacaacagcaa

SEQ ID NO: 216418 - DNA, 500 bp, Glycine max
agaatgcctctttctatggggggaggagctggtgcaaagaatgctattctcatgaatatgccaaatgctgttctttcaatgtggagatattttgttggagatctcgtctttgaagtttctaagatgacttctccctacattaaatgtacagtctctttcttcatagcatttggaaatttggctgatgacaccatcaattttgaggcttttccccacaagctggtgcagtttggagagattcaggaaaaagttgtattgaaattttcacaagaggaatttcttacagcttggtcaactcaggtgcgtcctgcaacaactctgttggctgatgggtgtccatatttgtatgctatggtgcatgatagttcagtgtctacaataccaggtgattttgtcattggtgttaagttgacaaccataaacaatatgtgtgcatatgggctcaatcctggtatttcaggttctcgtcttttgggcaccattcctcagtctatttcaca

SEQ ID NO: 216419 - DNA, 311 bp, Glycine max
aaaataacacacacttgacacgtcattacgacaattaaaagaggggtggaaattttcaaatagacagagcatactcaacaagagggtcatgtctaatttcctttattgaattaaacaaacgaacaaacgaaagaaaacacaaattccagatcatgcagaggattccgcattttcagaagatctggcagtagcctggggaacaaaaaaagctggcataagaattttacccgcaatttcaaaatcttgagaaattcccaagagaatatcaaaaactggaaaatgtttgggattggcaataaggaaacttaagg

SEQ ID NO: 216420 - DNA, 496 bp, Glycine max
cccttcacaagattctcacaaacaactcttgagaaagaaagaatggctgccaacacattgatgagttctgccatctcagccttcccatctctcctttcctcctcaaaatccagatttgccgcagcagttcctctttccagctttgttgtcaccaatgcctcttcttctcgcttttccatgagtgctgactggatgcctggccagcctagacccccctaccttgatggttcagcacctggtgactttggattcgaccctcttcgtcttggtgaagtaccagagaatcttgagaggttcaaagagtcagaactcattcactgcagatgggccatgcttgctgttccagggattttggttccagaggcattgggcttaggcaactgggtaaaggctcaggaatgggctgcagttcctggtggccaagcaacctacctaggcaacccagttccatggggcaccctacccaccattctggccattgaattccttgctattt

SEQ ID NO: 216421 - DNA, 449 bp, Glycine max
gcttcattcctttttttcataccaactagttgccagagtgatctaggagtttgaattcaaagtttaattacagcacagcgataccaacgtagcaagatcgatccgattcattacaaattgttacacggagttatacaggtagctattgaaacaaatatatattttttttcaaggcaaaatcgattgtggaataatgacgtttccaatgttgttgtgccatgggtcagccaagtgagcagccaagatctccaaaggtccagtgccgggataagctgattgttgaacacagaatcccacaaatgccaacaaagcaagacgtgcatttttaatttctttgactttgtattcgtggaatgttttagggtccttagagtatcccaaaggatcaaaagcaccaccagggtattttttcttttcagggtccttctccatgctcctttggtgctcca

SEQ ID NO: 216422 - DNA, 493 bp, Glycine max
agactttacttgcgaaggctgtggctggggaagctgatgtgccatttataagttgttctgctagtgagttcgtagaattgtatgttggcatgggtgcctctcgtgtaagagatctatttgcaagggctaaaagggaagctccgtccataatctttattgatgagatagatgctgtggctaaaagtcgtgatggcaaatttcgcattgtcagcaatgatgaacgagagcaaaccttgaatcagttgctcactgagatggatgggtttgatagcaattcttcagtgattgttcttggagctactaatcggtcagatgtcttggatcctgcacttcgccggccaggaagatttgatcgtgtagttatggtagaagcacctgatagaattggaagagaagccatcctaaaagttcatgtttccaagaaggaacttcctttagccaaggatgttgacctcagaggcattgcttgtatgaccactggatttactggagc

SEQ ID NO: 216423 - DNA, 448 bp, Glycine max
cctctacgtacttcttgctggttttttacccttccaggatgacaacctggtggccttgtacaagaaaatttaccgcggtgacttcaagtgtccgccgtggttctcctccgaggcgcggaggctcatcaccaagctcctcgaccccaacccgaacacgcgaatcacaatttcaaaaatcatggactcgtcgtggttcaagaaacccgtgccgaagaacttgatgggaaagaaaagagaggaattggatctggaggagaagattaaacagcatgagcaggaggtttctactacgatgaatgcttttcacatcatttcgctctcggaggggttcgatttgtcgccgttgttcgaggaaaagacgagagaagagaaagagttacggtttgcgaccacgcgccccgcgagcagcgtgatttcgagattggaagatttggcgaaggctgtgaag

SEQ ID NO: 216424 - DNA, 375 bp, Glycine max
actttacgtacttattgctggtttggtacccttacaggatgactatctgtaggccctgtacaggataatttacctgggagactagaagtgcacttcggggctttcctccgaggcgcggaggctcatcaccaagctcctagccccatccagaacacgcgacttacaattacaaacataatggactttgtgtggttggagataccctggccctagagcttgttgggaaataagagagaggaatatgtgctggaggagaatattattctagatgcgcaggagggacctacttcgatgaatgcttttcacgacatttcattcttggatgggttcgatgggtcgctcgtgttccaggagaagaagagaggagagaaacag

SEQ ID NO: 216425 - DNA, 367 bp, Glycine max
aatcggaacataaactttatagtattcatttgaacagctaggcgtggatctcgtcactcaccacctcctatggggactacgaaaaccagcgggctccatcgaattggcgactgcgctagcttagactccaccggaccacatagctgcggacgccccaagaagggctttccattgccttccatataccagagttgccacagctacttacgcggcgggcacagctaatagggcatttttcccagctacaaaagctttgacatcgggtgtacatgccttgcaatgaataacatgccataaagatgcgttggcgaaaattggggtatgcatcgtaccaatgcccaccttggttggagaacaagctgattgt

SEQ ID NO: 216426 - DNA, 454 bp, Glycine max
ctatcatggcggtggtctgattacgctgcagggtgactatgatgcatccctaacctccctctaactctgttcgccggcacgcccgcaggactgatcatgctatctactaccacatcagcatatagcctgaccacaatgcccagacccaagtcatccctgcctatatacaacctcttctcgatcaatttgccattctctagcaaccccctcattccttgcctccctcgcgagccactgaccaccacatacacctattacccaatatggcccacgtacatgtcaggccctatcgttacccgcactaccagataaaggaaatcgaggaccatgtcgattcgatgcttcaacaagggctaattcaacccagtaccagtccattctcgtcgccggtactctatatgaagaagaacgatggctcgtggcgcttctgcggtgactaccatgccctgaatgc

SEQ ID NO: 216427 - DNA, 507 bp, Glycine max
  unsure (1)..(507): unsure at all n locations
tttaatcgttcccttcattcactcccctttcactttttcccttccaacaacacaaattttttgttcatttcatactaattgtcattaattttgagacccaaaaacatggacagccaacgaagtcctcttcttagttgggctttctactgccacggcaagtcgatggaggagctgaagcagtctctgatgtacactacccttgagctggaacaaacaagagcaactgtccaagaagagctaagaaaaagagacgatcagcttctcaccctaaaggagcttctcaacaaagtcataagagaaagagatgaagctcaagagaaatgccagagactagtgttggagaaaatggtttttcagcaccaaaccgcacctgcttctggagtttccagcattgaggacgagccaagaaggggaattaatgactcctncaacaatggcctctcttcatcagattgtgaagaaagcattgtttcctctccagttatggagcatttgccaacacaacaa

SEQ ID NO: 216428 - DNA, 475 bp, Glycine max
gaacacctaacctttaaaacatattataaatgaaaaactaaaaggataataaataaagctgactcagtaacaatagtagtagttgtcagtggagtacaatcctttggaacttgttctgtgtgggggaatcagtgccctcacagaaaacccttttcctactgactctcccacagttcgaggtgaaggaatcttgatgaggaagttgtggttgtggtggtgaaggaatggtgacaggtggaatctcaaaggactcaagagggggtggagggtgtctccattgaggaagtggtcctgcaagaagcagtgtctgcagcaaaggaccagctttcatcactgcttgcaaaagcttacccttttctggcaacggtttatctggtgagattagctcaatcattgactctggcaactgttgctgttgtggtggcaaatgctccataactggagaggaaacaatgctttcttcacaatctgatga

SEQ ID NO: 216429 - DNA, 505 bp, Glycine max
catagccaccaaataattgcactcttttctctctccactctccaccaacacaaaagcacttgcaaactagttttgttttgggaacatcatcacattacattagattggtggtaatggcagcgtcactacaagcagcagctactttcatgcaacccaccaagttgagcaggagcaacactttgcagcaaaagtctactcagtccatttccaaggcttttggtttggaacctgttggagctaaaaaggtcacatgctcccttcaggctgatcttaaggacttggctcacaagtgtgttgatgctaccaaaattgcaggattcgcccttgccacctctgccctcgttgtctctggggcaagtgctgaaggtgttccaaagaggctaaccttcgacgaaatccagagcaagacctacttggaagtgaaggggacaggaacagcaaaccagtgcccaacaattgatggtggattggactcatttgccttcaagccggggaaatacaatgc

SEQ ID NO: 216430 - DNA, 505 bp, Glycine max
cttggagaatgctcttggtaaatttgatgatgggccattcttgcttggccaattcagtttggtggatattgcttatattccatttgttgaaagattccaaattgtctttgctgaggtgttcaaacatgacatcacagaaggaaggcctaaacttgcaacatggtttgaggagttgaataagctaaatgcttataccgagactagagtcgatcctcaggagatcgttgatcttttcaagaaacgcttcctgcctcaacagtgaacgttgtattgctgcaggcttcctctaaaatgtagactctgcccatatagcgtcctttcattcacgggatgggatgcatctgcagtcaaatgtcggttgtgtttatctgccagagttgcaggatagtttgaagtcataatcacgttcatttttcagcttgtttgtttgatgtcataataatgtttatgtaccagactgtgatcactgatcaatatgatataatgaccaatatggtattattat

SEQ ID NO: 216431 - DNA, 491 bp, Glycine max
ccgctggtggatgaaagttggcgagtcaaatttgagcgagtgagagaggatggtttctccaggctgcaaggtctttgggtccttcgggaaattgtacttccgatcataatgaagctgttgacagcattgtgtgtaccctacgttttggccaaaggtgtatttccagtgcttgggtatcccttggtaataaattctgccgtctatcggtttgcatggttgggatgcctctctttcagttttgtgtgcttctgtgccaagagattccatgtctggttcacaaatctccataattcaatacgcgatgaccggtatctgattggccggaggttgcataactttggagaacatgctgagaaagcaaatgtagcagaaacttctacaggggagcaggaagctattttactaggtacaggtttaaaccaacaagatcacgaagcagatgttggactacggttgaggcacgtaaatcaacaggtgggctgaattgtatt

SEQ ID NO: 216432 - DNA, 517 bp, Glycine max
cagaaactgagccagaaactactaacactacctaccaccaccactcctctcctccgtttgagcagtgacggcgctgcttcctctgttcactcttctgtttcctccgtcaactccgttaacagcagcagttaccgttccaccagcagcatccgcgagatcgatctgatcccctccgacgccgtctacgacctccgctgcatcgccgagcgcatgctctcctccggctacctccgcgagtgcatccaggtctacggcagcgttcgaaaatcctccgtcgacgcgagcttccgcaagctccacatcgaaaagctcagcatcggagacgttcagcgcctcgagtgggagcagctcgagaacaaaatcagacgctggataaaagccgccaaggtctgcgtcagaactctcttcgcgagcgagaagaagctctgcgagcaaatcttcgacggcgtcggaactttcatcgacgacgcttgcttcatggagaccggtgaaggtcccgcgattcagctcttcaact

SEQ ID NO: 216433 - DNA, 520 bp, Glycine max
aagctaatgaaatagccagaatatcgggcaaatccaaataatgctgcattgtcacatagtctacataacctgggaaactaacagcaatcaaatatgttcgccatttggaattggaatttgaatacaaatacagtgcatcaataatataaccctatgtacacagccaatatctgactgaaatttgatacagaatagtatcaatttgtatcataataaaatggcacagagaaatttatgtgaaggtaaaggggaagtgtatcagctggtgttttaattcttcgtctttcatttacttcatcattggctccttcctgcacgttcacatttcctttatctgcttaagcactgctgaccttgttcttacgcccaaaggtccaatggggtttagccggagtacgcctcaatgccttcactccgaatgggttgttcttgctcttgagacaagttccagcataagtgttgcagatgggatagtcgttagggcaacaactgtagtggtcatcacagcaagtagcaccct

SEQ ID NO: 216434 - DNA, 603 bp, Glycine max
  unsure (1)..(603): unsure at all n locations
gaagcaataatttgaaatatgttattggaaatatcagaaactgaattctttgatcgaattgtatccatgccaacaacatgaaatgaaaatagaaatatgttgtacattgaaataaactaaagtggtaatgcatattgttgtgctgcgtatgttaatcatcttccatcaccgaagtcaattaattcaatatctctcaagctgtcatatccagtattttgttggccactactatcaccattttcatgagtgctatatgccccatgaagcaagtactgagtctcctcaaaattttggcctgcattggtccttggttgtttctccattagtcgtattccttccaactccattgccacttccttcataccaggcctttcctcccctctaagtctcaagcacttggccgcaagaatagcaacttccatgatctcctgtttattttcttcatcataaataccaatttgaagaacatcaaacaagcgatcctctttcaagcaacatagaaagtgaactgtaagacttcgttnatcttctggcttgtcaaaagagaaaggtttctcccctgttagcagtntcacaagcaccaccccaaagctataaacatca

SEQ ID NO: 216435 - DNA, 611 bp, Glycine max
  unsure (1)..(611): unsure at all n locations
atgcgataataccttagtgacttcaggangaatagngggaaggangcaagctgggaattaggctagaggaaaaaaaaaagaaaaaaaaaaaaaaaataagttaaaagaaaagaaaaagaaaaaaagaagaggaattaaaaaaaaagaaaaaaaggaacccccagaaaaagaaaaaaagataaaaagaaaaaaaatagaaggaaaaaaaataaagaaaagaaaaaaagaatataaaaaaaaaaagaaaaaataaaaaaaaattagtaaaagaaagatagaaagataaaagaaagaaaaagaaaaaaaaaaaaaaataaaaaaaaagagatagaaggtaaaaaaagagaataaaaaaaaaaagagataaaaaataaagaaaaaaaaatagataaaaataaaagatgaagaagaagtaaaatagaaagaaaagatgaataactgtatagaaagaaaaaaaaaaaaagaataggaagtaaagtaaaaataaaaaaataaaaagaaatataaaagaaaaaataaaagataaaagaaaatgaataaaaaaaaaaaataataagagaaaaagaggagaaaggtaaaaaaataagatagtaaaaaaaaaataataaaaa

SEQ ID NO: 216436 - DNA, 437 bp, Glycine max
attatataccatatcaatcaatatatgggcggggttcatgaatttcacccaccccaaaatttattattggctgcagataatgttaaactttgtaaattctctcctcagacaccgtctgaacgaacaatttccttctttttcacatgataccttaacacaaggcaaagagtaaaaatggtttgctgctggtaatggtaatcatcaaatcaaaaaaaggcgctctcctctattcatatactttgcattcctcatcaacagggtttgtctcgcaaaattcctccaatgggtctccactccctgctttagctgcccctggccacttgcttgctactaggtgtgccaaaaccaccaccctttggctgtaaccccattcattgtcataccaagcaaccaccttaaccatgtcatctcccatgaccatagtcaaggaggagtca

SEQ ID NO: 216437 - DNA, 537 bp, Glycine max
gcgagacgagccgtttctaattaatgatatttgtcaagcggaagtgcagtgatgtatggagctgaggcatcctaacagaccggaaatacccgcacggttccaggccgaaccgggcggcgggaaccggttactggaaggcaaccggggcggataagcccattggccaccccaaaccggttgggataaaaaaagctttggtgttttacgcagggaaagctccgaaaggggacaagagcaattggatcatgcacgagtatcgtctcgccgatgtagatcgctccgttcgcaaaaagaacagcctaagggtacatacatacatgaatgatgatgcatgccctttctagttcaagattattaggataggataattgcatgaaattacgactttgccctcaagttgaagctgaggatgataatcatttcccatgcatattgcaaaatctatggccgtaatatcttaaatgttatcttaccgcgcagaaccttcaccagttgaagacttagccatcgcattaaacacattattgatgtggaaag

SEQ ID NO: 216438 - DNA, 526 bp, Glycine max
  unsure (1)..(526): unsure at all n locations
ctcgtacgacaacgcccacgccgccancttctcgcagcgacgaggagctgatgtccatgtgcgagcagtggctagtaaagcacggcaaggcgcacaacgcgctcggagagaaggagaagaggttccagatcttcaaggacaacctgcgattcatcgacgaccacaactcccaagaggaccgaacctacaagctcggactgaaccggttcgcggatctcaccaacgaggagtacagggccaagtacttgggaaccaagatcgatcccaaccggaggctcggcaagaccccgagcaaccgatacgcgccacgtgtcggcgacaaactacctgaatcggttgattggaggaaggaaggtgctgttcctccagtcaaagaccaaggaggctgtgggagctgttgggcattctcagcaatcggtgcagtggaaggaataaataagatagtgacaggtgaactgatttcgttatcagaacaagaattggtggattgcgatacacgatataacgaaggatgcaatggaggact

SEQ ID NO: 216439 - DNA, 511 bp, Glycine max
  unsure (1)..(511): unsure at all n locations
tatgaatttgnagcaacggtaccttttttattatttgcataatgaaggccaattaggcgatgtgtgttggaaaacacgtctaaggatcgcaacagaggcagctggagctctgtcatatctacactcagaggcctccatacccatcatccatagagatgtcaagactgctaacatcctcttggatgatgcttgcactgccaaagtttctgattttggtgcttcaagattgattccacttgatcaaactgaattagccacaatagtgcaaggaaccatcgggtatttagacccagagtacatgcaaacaagccaattgactgaaaaaagtgatgtttatagctttggggtggtgcttgtggaactgctaacaggggagaaacctttctcttttgacaagccagaagataaacgaagtcttacagttcactttctatgttgcttgaaagaggatcgcttgttcgatgttcttcaaatttggatttatgatgaagacaataaacaggagatcatg

SEQ ID NO: 216440 - DNA, 450 bp, Glycine max
ggatgcaaattttgggggaactggattattaaggtcaaattgtaattgatgtgactcaggttctataaattaacagtaatttggcttccagggaataaagaaaaatgccttaagtcttatatagagagatgtattggacatttaagagtggagaagagcataaagatgattgctttacagagttggcgccctctcaacggagccagcaatcacagggagcactttgattccaaaagggtcactgggatgttttgctaagttcttaactggaccttatccagtgacatatgcttggaagttgaaaccaagcattgcaaacatagctagcctaccattcttaatgtccttcacctttataagcgccactgggactggattctttgctagacccaatgggccgaatggaccaccccgctgaagcttgtcttccaaggcccggccgataataat

SEQ ID NO: 216441 - DNA, 380 bp, Glycine max
aaaaaaaaaaaaatatgctgaccatttggaattggaagttgaacacaaatacagagcatcaataatataaccctatggacacagacaatatctgactgaaaggtggtacataatagggataaatgagaattataatataatgggaaagagacacttatgtgaaggttaaggggaagtgtatgacctggtgtttaaattatttgactatcatttacgtaattatggagatgattcctggtcgaagacattctctttatctgcttaagaactgatgacctttgtcttacgcccaaaggatcaatggggattagccggagaaagcctaaatgactttaatcagaatgggttgttctagctcttgaaagaagatccaaaataaa

SEQ ID NO: 216442 - DNA, 367 bp, Glycine max
cggaaaaattaggcttcagattccgggctaaaattggacggacggctgaatgcaaatgaggcgaaatttttattatagtttatacaaatgcccccataatatttttttacccttaatatgaagtacttaaacaaatgaaataaaaatgatatatatctcttttttatgatttgtaaaaataatataatctttattcatataatatggataaaaaataacaaattaaaactttattattaaaaaaaaaaaaaaaaagggcggtataaaactatatgagatatataacctgtgaattaattctagaccataacatgcaagtgaatacagatttacatataatgagaataataaagctaggagtaataat

SEQ ID NO: 216443 - DNA, 406 bp, Glycine max
ttttttttttttttttttctttttttttttttttttttattatttttttttttttggtaagggttggaaaaagaaaaatacattaatttggcttgggttccacgcaattattcacattcttctgagaacattggaattaaaagaacctctccaaacacagaattgaaaaatctctaaattccacaaagtgaacgttttttttacgcaaacttgccggggacaaaaatgggggtgtaaccccaagcaattttgtttcctttgcccacaaggggataaataaagtttttcaatgggaccttaacgggtgcaaagggctgaaaaagggaccgcaaatatttggacaagggccaagatcccgtgttgagttcctttcccataaactcaagcaagccccttgggtaattat

SEQ ID NO: 216444 - DNA, 404 bp, Glycine max
attaaataccatatcaatcaatatatgggcggtgttcatgaatttcagtcacgccaaaatttattattggctgcagataatgttaaacttttgaaaatctttcctcagacaccgtctgaacgaacaatttccttctttttcacatgatacgttaacacaaggcaaagagtaaaaatggtttgctgctggtaatggtaatcatcaaatcagaaaaaggcgctctcctctattcatatactttgcattcctcatcaacagggtttgtctcgcacaattcctccaatgggtctccactccctgctttagctgcccctggccacttgcttgctactaggtgtgccaaatccaccaccctttggctgaaaccccattcattgtcttaccaagcaaccaccttaaccatg

SEQ ID NO: 216445 - DNA, 448 bp, Glycine max
cgcaggaaataaccttctatttgaatgaatgcttcatagaaagaaaaaatggtgtgtggggggcattcttgaaaagagagaagattcccccccccgtgcctaaacctaatgattcaaagaaaaacttaaagatgatgggacaaggaaacaccatattcaaatggtcatatcaatcctattatcaaaaattatgaaatataagattatcaagaaacgagacacgggcgggaaaggggagtagagaccactcaataaatgaaatagctactaaaggcttcgctctctttttagatatgagataactatgcaatatgagttatggagtgataaatatgacgagttttttttcaaaaagaaaatgcgaaggaaaaatactgaagtcatagtttaatcgatctgatgaatctattgatcaatttgacattcataattatatacatacattata

SEQ ID NO: 216446 - DNA, 523 bp, Glycine max
aaacaaatcaaataataacactaccaacataatcttgactgcaaagggcaaaccatttcaatgttatacatagacatcatgtcttctcgactttggggtcataaatcgaatttgatattacccacaacttattaatgttagcttttggatacctatcacagccttgaaggagactggtaccagccccacggttcatcagagatatattgggtcacttgcttcacactcaagtaattatcaagtccccattctcctaattcacgaccaaaaccactgcgtttaatgcctccccatggggcttgagtgaagcatggttgagagcaattaatccacacaattccagccttaaaagccttagtaatgcgctcacatctttctagatcatttgatattacagcagaacccaagccatatacagtgtcatttgctagatcaatagcttcttcctcagtgctaaatgtttttacacagagaactggtccaaatacttcttctctccaaatttgctgggggtagttacatc

SEQ ID NO: 216447 - DNA, 392 bp, Glycine max
aagcggccactttacctcggaattatgcaggaagacagtccaatatgaaaaaaatagaagaatcatctcaaactgggcatttattctttgcacctaagacattgagaattctaagaatgttacacgcatgtcccataacaacttgtaggacttggatcaccacacccttgaggaacagaaatatttacttgccaaggttgctttgcctccaattcaagatgggaagaaagttcccctgtaaatagcatcctcgtgagcatttccaagtgcagcctcgttcaagtacttgtcagccaataggactctattgacattatcttggtcttggacaagcttgttaccatacgtcaagagcttctacagagtgatcttgggctgctaaaaggttggag

SEQ ID NO: 216448 - DNA, 525 bp, Glycine max
gaaggtacgaagtgtatatagttttttttttttggggaatgttacaaaacaataaacaaaatctccatttcatactcaatatatgaatgatacatgaccaaaataaaactataaatcagacagaacccggtggcgcattgaattagtatctccattacagttatggacattgcatccaaacccaatataaagatcagagtattacgcatcccaggaagtaaaatcctactacaatttagcaccgagatgtcctaaaccgcattacatgagcacaaattcgagatgtcctaaaccgcattacatgagcacaaattcgagttgtcttggaagaggaccaagaaataaaagctagataatgttcacccctgcatccagaattaccaatccgcaagactcccaaaggcattaagccttattggcaatgatgttggaaagccagtccagaccttcgtaaaggccctcccagaggttgcacaggtgctctgaatgtaccagtggcgctgtctgagagagtgtagacccaac

SEQ ID NO: 216449 - DNA, 466 bp, Glycine max
gaaaaatgaatattttataacaagaggatttccaactcttgttaaaagaagattttccgacatgcataaacgcagttcatagtttcatatatatctttataaatatcatatggtgatgaagggggctaggcctcttcattgcagatacacacgacctctaagcatggcccctatagcttccaatggagaatggtggccacatctttaacctaacaaagaagaaaaatgcagtggtgaaagaccataaaaatattacacgttccttgaacaaaacggattgaacttcaatttggaatagagggtgatatgtggagaaatctccatatccacttttattattaggaaattcagcacatgcatgcattataacaagagcaattaattacagagtacattttagataggagaatacttagggaaccaagatgaggtcattgataatggttgatgttcatacggagaaaga

SEQ ID NO: 216450 - DNA, 576 bp, Glycine max
gtgaggttttacaaggaggaagaaaagatagatccccgagcatgcaaaaaagcttgcctcgctggcatatctgtatgtgaatgatgcattcccccctgctcacagggcacatgcatcaacagagggtgttactaaatacttgaagccatctgttgctggttttcttttgcaaaaggaacttgattaccttgttggggcagtatcaaaccccaaaaggccatttgctgccattgttggtggttccaaagtctcatctaaaattggagtgattgagtcacttttagaaaaagttgacatccttcttcttggtggaggaatgatcttcacattttacaaggcacaaggtctttcagtgggttcatcccttgtagaagaagataagttggatcttgctacatcactacttgcaaaagccaaggaaaagggggtgtctctcttgttaccaagtgatgtggtgattgcagacaaatttgctcctgatgctaatagcaaggtcgtgccagcatctgccatccctgatggctggatgggattgtatattgtccaaattcttgtaaatattcagtgaagcattgg

SEQ ID NO: 216451 - DNA, 590 bp, Glycine max
  unsure (1)..(590): unsure at all n locations
tcgcgatctagaactagctcatattcagtgtattcatttcatcaatcactttgtctttctcatcataaccaccaaaacgccaaccatgaatccagatcgtttcagatacatgcaagccctaatgtttatgatgttgcaggttgtttgtgctgaagaggaaataatgtgcattgagagggagagggaagcactcctccaattcaaagctgcccttgtggatgactatggcatgctatcatcttggaccactgctgattgctgccagtgggaagggattcgctgcaccaacctcaccggccatgttctaatgctcgaccttcacggtcagcttaattattattcatatggaattgcctcgcgacgttatatcagaggagagatccacaagtcgttgatggagttgcaacaattaaactatttaaacctcggttcgaattattttcaaggcagaggaatcncagagtttctttggttctcttagcaacctgagacaccttgatctgtcaaattctgantttggcggaaaaattccaactcagttaggctctctttctcatttgaaatacttaaatcttgctgggaaatatatc

SEQ ID NO: 216452 - DNA, 391 bp, Glycine max
  unsure (1)..(391): unsure at all n locations
ntgcgtagaagctagaagatatatggaggaatatngcgagancaagctcggaattggtcgagaaaaaataaaaaaaaataaaaataaataattaataggaaaaaaaataattaagtgaggaataaaatataaaaaaaaattaaaaccaccttaaatatataaaattaatatatgtttataatagaaatatataaatattaaataatataagataaatataataaataaaaaatataaaattttaatatataatattaatataaaaaaaaataattaataaaaaatattttattataatatttattaataatgaaaaaaaataaattaaaaataataagaatattaaattagatatattaaaaaatatatataataataaaaaaaataaaaa

SEQ ID NO: 216453 - DNA, 469 bp, Glycine max
agaaccacttaatttttgctaattagctaattatccattaaacacgggcagagcaatccgaaaggaaaaaaaagagaaaaaacatagccaactccgttccgcatgatataaaagtttaatcaacctgctccattttgctgccctcagcatcagcttaaggcttctcctacagtgggggcatatcaacattagcttcagctgcatcctcgtggatgctcagtccaagcttcaacattctgtggatcctgtttccaaaagtgttgggttcgtcaaggctgaaaccagatgtgagaagagcagtctctaacagcaacagaacaaggtccttcacggatttgccgttcttgtgagaatccgcacgctatctgagctcctacataaatggggtctcaggggtgatctacattgtcttcttgcttgacatgtatactgccatgctgttgacccttaaggcttgagctttcatgat

SEQ ID NO: 216454 - DNA, 406 bp, Glycine max
gctaaatcatagtacggaggagtgacaaatacttacagaatccaaagctttttttttctggggcttcttcttcttggtaacgccatgtctgcgacccaccaagagcagccactggtagagaactcggtcatagaataagacgagctcgaagaaacagcttatgattcggcagacaagatagtggtggttggagcctacgagtacgatgacgatgagaattgggggagagcgccccaaatctcgcggaagaagctatggctgtacaccggcccgggctttctgaggagcatagagttcctggaccatggaaacatagagggggaccttcaggcgggtgccattgcatggtactcattgtcgcggcttgagatgcgggccacaagaatgggcctgctgatccagctcc

SEQ ID NO: 216455 - DNA, 505 bp, Glycine max
gcagaaattggagaattttctattaactttcctagtaaaacggcggtgacttttcaatatacattcataaaccctggccccaatatcactaaacaaatgatcctattcttaaaacgacctaaatttatcatctctatcattccatttacataaaacgttgatataaaaaaataataacaaattatattgaaaatggaggcaattttcatcaattacccaacttaaattgatatgttgaggtcaatcctaggtttcttcatggaaggaataggaacaagagagttacacctaggacacttagggttgttcttcatgatcattacatatgataagcaaccagggcaccctgcagccataggtgatgatgaaacattcagcctctcttcacattcatcttcttgaattgtggtttccctaatcgacgacgacgaggaggaatacgaaggcgacgacaccgagagaggtgacttcaaaatgaggttcttttcctgacaaaggctctttc

SEQ ID NO: 216456 - DNA, 524 bp, Glycine max
aatgcaaacttgatttatattggttcggtcacgccttatgtctacattcagtcctcaaacaacccacttgagattttccactatctttataaaaatcttttttacaacttctgaacacccaaggaatcactttcctttgtgttcaggaaacttacaattcaagagacaatcaatctcttgattacaacttactttctgagatgaacaaaaaaatttctcttctttagagtggataatacaatttgaagttcctagatgaactctcaatagatttgcaagtgtgtgcctaagagttgttaagagagcatttgacaatgaagttttcttggaataactctcttactttttgaaatcagacacacatatatataggcccttcgtgtctttctaaaatggattgaagagatgtgtcttttaaaaagttttttctgaatttttcactggtaattgatacaggtttttgatattcattacaagtatcatttgaaggatcatgacttttcaaattgattctcagagtttca

SEQ ID NO: 216457 - DNA, 499 bp, Glycine max
  unsure (1)..(499): unsure at all n locations
aaaacaatgagtattctcatctaaggaaataaagcaaatgacataatgcgtaaagcaacgttcatatcacacgggcaaaacaattagtatcccatccaacaaaaatcataaaagttaaaattcaataaaaaagcatcaaataagttttaaacagataaatggatgaaagcaactacacatttagtccacttcctcaatcttggggccagcaccacttccaccagaaggagcagcataatcatcctcgggtgccccagcaccagcaccacccatgtcaggaccagcaccaccttggtacatcttggcaatgataggattgcagatgctttccaattccttcattttgtcctcaaattcatctgcttctgcgagctggttgctgtctagccactggatagcttgctcaattgcgtcctcaatcttcttctgtcagtaggatcaagtttctcaccaattttgtcatccttcacagngttcctcatgttggatgcataggttt

SEQ ID NO: 216458 - DNA, 439 bp, Glycine max
atacaatggggttacatgaatcaaattcattttttcacattattgggacagataggcctaaaatacattcctaaaataaaatagccgccgcaattatacgaattacttttttttgtttcctggggggggatgaaacttaagagccggggattatcatcattatcacatatgatgaagcaattttcaagaggggcaagaactgtttgaataggaataagagtttatgtccaacgggaaatgaaaatagttgtcatttgaacacactatgctggggcagcagcttgttcttcaacaacctgtgatgctggcaaaagggtgcaaatcaggttggggtcaccgtacacattataaacacgtcctgtggtaggccaaaactttgaagcacggacccaaggagctgggaaggctgcatattccctggagtatgggtttgtccatg

SEQ ID NO: 216459 - DNA, 524 bp, Glycine max
  unsure (1)..(524): unsure at all n locations
gattaatgggtttgcacgagaccatgntgctgcaaatatagaactctctttgggatctgaagaagaagaagttctgaagaagcatgtgtggaggtgctatcatctcagacttcattggtgtgaagcgtggccgcaacctcgccgcgcaggaactgtggtccgagcttgaccctttctctgacctccttggcttcgataccaccaccaccaccaccaaccaaccaccccttccagacaaaaaagtggtgtcatcatgtgagaagaagaagaagaaaagtgtgagtgcagaaaagaagagtggtgggcgagctcggaagaacgtgtacagaggaatcaggcaaaggccgtggggcaagtgggccgcggaaataagggacccacataagggcgtccgcgtctggctcggcaccttccccaccgtcgaggaagccgtccgagcctacgacgacgccgtcaagcgcattcgcggcgacaaggccaagctcaactttccgggcaccgttccgtcacccttcaaaaacaac

SEQ ID NO: 216460 - DNA, 447 bp, Glycine max
gttacaaattcatacaactttattaattcaactcatccttcaatgtaagtggttcctctgacaatcatatgcaagaacaatctaatcttccttattggggctaaagtgatatttcaaaaaacaagtcatgtatctgtgacccaaagccacatgtggaaaccacaagatctatatgagataaaagaaactcaactaatctatttactaaagttctttggcagctgcaataacagataccttggtgataccaaacttcttgtatatttttacagctggagcacttgctccaaagcgaacaatgcctatggactttactttgcttccaacaatctggtgccaaccaaatgttgatcctgcctcaatgctaactctatctgatactgaaccaggatgaacactcttcatgtattcatctgactgctcatcgaaaagctcccagctaacaaa

SEQ ID NO: 216461 - DNA, 412 bp, Glycine max
aaacaattggggttacatgaatcaaattcattttttcacattattgggacaaataggcctaaaatacattcctaaaagaaaatggcagctgcaattataccaattccttttttttgattcctggggggggatgaaacttaagagcaggggattttcatcattatcacatatgatgaagcaatattcaagaggggcaccaactgtttgaataggaataaaagtttatgtccaacgggaaatgaaaatagttgccatttgaacacactgtgctggggcaaaaaattgtttttcaacaccctgtgatgctgtcaaaagggtgcaaatcaggatgcggccaccggacacattattaacacgtcctgtgggtaggacacaacttttgagcaccgatcccaagaactgggaagggtcc

SEQ ID NO: 216462 - DNA, 521 bp, Glycine max
caatgaaaacaaccaagttaaaaactggggggcaagactgtatcccagaccatatataacataattgataatccttatggacatcaaacagaaaatcccctgaaaacgaggtctcttgagtttcacacaaaggataccctataaaaacctatatatagtcctatactgcattagctacaagataaataaactccacatatgctttaagcaggttggttttcttgctgtggattccatcaccaacatcacgatcacaattcttgtagctttatttacataaaaagggatatgaaggtgttcagaagactcctgccatggaaggcaggtcgtcgaagctccaaaggttcatagggtttccagcagcatcctgagatgcatcttcactgagcaaagacgccaatgcagcatcagcccaggcttcatcaagaaaagaaggggtctcaaagaacttcagctgggattcaatgtctgcaagctcctcaaaaagagtttttgcagaatcatttgcacagatgccatat

SEQ ID NO: 216463 - DNA, 479 bp, Glycine max
gtcaggaatcccggctttaggtggttggtttttctagagttgttgcaacatggggtctgactatagttctcacttacttgaactatagggccctgaccattgtgggatgggttgctgtttgtttgggggttttctcactccttccttttgtggttatgggatttttggcgattccagacctaaagccttcaagatggacagtgacaaacccgaatgatattaactggaatttgtatctgaatactctattttggaatctcaactattgggattccataagtactcttgctggagaagtggaaaatccgaagaaaactcttccgaaggctttgttttatgctgtgatcctagtagttctagggtacttctttcctcttctaattggtactgggtgctgttcctgtcaaccgtgagttgtggacggatggatacctttcggatattgctttgatataggaggagcatggtgagatggtggc

SEQ ID NO: 216464 - DNA, 414 bp, Glycine max
agatgtcaaatgtatggaggtgtgttactttaaatatattacccccccacaccaaggaacaaaatgtccacataatatataaaggttaaataggtatttgacttttggtaaccaaaaaaatttgttatataacatataatacattcaatggaacttgaaactggtcaaaatgttgttgcccacggggtcagccaaattatctagggggttttgttatttgccaacacctttgacaagagcttgaacaaaataacccaagattgccaacatagacaaccttccattcttcacttacttgacctttaaacccttcaaggacttatcatacttaccaaaacctagtgggttgaaaaaaggcctttatggaaaaactgtgttaccagaacctccaatacccttccatagccctaagaa

SEQ ID NO: 216465 - DNA, 504 bp, Glycine max
  unsure (1)..(504): unsure at all n locations
tgaaccaaaaaaagggaagcatgctgtattcgattcnagnntgaatgaanaatacacgcagctacctgctcagtggccgccctttttttttttttttttttttttttttttttttttgaagtcaaatgatattatctggtggacaggtgatttcttacagcgccccaccaaggaacaaaatgtccacatgattttaaaaggttaaaaggtttttgagttttgttaactctaaagaatctgttaaataacatataattcattctttggaacttgagactggttaagatgttgttgtgcccggggttagccaaatgatctaggatggtttggtttgggcccaacacctgtgacgagagctttatcaacatttcccaaaattgccaactttaccaacctttcttttttaattttcttgagctataaatccttctagggcttttcatttttaccaaaacctaatgggttgtacaaaggttcttctggataaacttgctcaccagaacc

SEQ ID NO: 216466 - DNA, 562 bp, Glycine max
  unsure (1)..(562): unsure at all n locations
tgccacattggcgtttttgatgccgtaagcttgaggctcagatgtcgnattgcaccaggaatatgcttgtcaccggcagctttaagccccagtcaaggtgtgtatcctcttgtggttgctgcccatcctctagaacctaatcagtttgctggtgggctgacggatggatctgtcaaagtgatagaaccgaacgaatcagagggtaagtggggaacctccccacctatggacaatggaatattgaatggtagggcaggatcatcatctacaacaagcaaccacactgctgatcaggctcaaagataagatcaaatgtattttactagttattttcatctgtaattgtatcagcttagatgtttagatttcgatacaccaatatgtctcatcaatatcatgtcagcttggacataaaatggtaaatgcttagacgtagaatcgtgtataccttgatttattctagttaataactcaattttattgcttatatttatgttgtaatgtccctgtatcttgcttacaagtgtatgtcaattttccttgcccttgcggtacttccgat

SEQ ID NO: 216467 - DNA, 557 bp, Glycine max
  unsure (1)..(557): unsure at all n locations
aaatagtgcaaagtagcaaagacatgctatcttaattcttataactgataattaaagcggggcgcatcaatacaatacaatacaatatgtaactatgaactatcaatatatgatcgttatttatgtctgtgatacacacaattcaggccatgatattcttacgtgatttacagcaacttctaacttatttaatacatcataccaacccaactaggagcaattttcattatacaatgacacttatctttaaactctgaagcatgacaaggtggtagtcaccagggaccatattcttatgcaatttatgccacaactggataagacgcacaagttgcaacaccacacatgttcttccccaattccattttgaagtagccattctcaccccaactttctccccatgaattttttatgagccaatatgggacgccattttcaactccataccccacagcaaggacggcatggttcacatcctgngaagtgctaccgcaaatgtactagtgtaaactccattctcgtagaaatggaacccatcaccacctgaaggccacact

SEQ ID NO: 216468 - DNA, 369 bp, Glycine max
aaaagctaacaaatacaaacgggatttattgggatagggcaacgagttgcattcatggggttatgggtacccccaaccataatattgcaagaaaaggattagttttttcaggtaatccaaaaacacatccttatcgtactttttgcacgtttgcaactttaacaattattttggggttggcaacaacattaaatatttggcctcctgctgagatgaaaagctattttttggcctaaagaacgggcagcctgagacccgtatgatatccagacactggggatctcatgggtgacccgggggtcagataaagcatcaacccatcggggagcaaatttattttgcctgtcaggggcccaagaccgggatttt

SEQ ID NO: 216469 - DNA, 119 bp, Glycine max
ggaaaaaaaaaaaaaaaaaaaaaaaataaattaaagaagaagggaggaaaaaaaaagaagcggaaaaaaaaaaaagaaaagaaaaagacccccaaaaaaaaagaaaaaaaaaaaagaaa

SEQ ID NO: 216470 - DNA, 512 bp, Glycine max
acagacatctgattcttcctttatatatatatatttaattttttgggtacaactttttctactaattagttacaagaacgtactcctcattatcgttatttaactaaaaaatattctttgtagttgtagcctatgcattgactatgaagttggtataaattgttgatcaccctccttgttcgtaatcgtacctgcatgtttcttcactgtcactgaggtggggaaagaaggaattcaccattggacaatcgtaattcagatcagcaggctttgcaaatttatgccactcctgatcaatcagcatttcattcgtgaatccaaaccgtcttagttcctcttctccatgatgcatcagtaagctatacctttcaccaaaacccttttacataacaagcatatttccgttgcccatgttgttgagaccctcgaactgttgaaccgaccatttgtaccacctcatgagaaaaactcgaaatgttataccgtgagacacaatgaccaaggtcatgtct

SEQ ID NO: 216471 - DNA, 658 bp, Glycine max
  unsure (1)..(658): unsure at all n locations
tgcctagaagttttagtnaccagtgaggangtanggggaagacccgaangctgaattcgtctcgagggggatcttaatgttccagctggtcatagacattccgtgctaaaattggaagaggggggggcaacaccaaccgagggatgtatcctgcccatttaggagtggttgctagttataaaggccagggaagaatagctgactatggttatcgaaatccaaagtgggtcgagggagaactgctccaacttaatggcaagggcatgggaccatacatgaaaggtgcagatcttggtttcctttatgtcgtgcctgagcaaagttttctcgtcttgttccaccggttgaaactacccgagagagccatggttgatggtaccctaatcctgtctaatttacttatcatctgatgcgaggaagaacatgaaggattctgatactagcgtgttgagattactgttaccttttttttttgagtggtagttttacccaacaggcaggcacttgatatattattagcccttctatgagttcattttttgctcgtaccttttaccaatctctttgatatctgtcatcttgagtatataaaatgggctgaccaacaaaatagtgtgataggaactctgaaggaccataaggatctttttgtgaaaaa

SEQ ID NO: 216472 - DNA, 502 bp, Glycine max
tttgttttttttttttttttttttaataaaaacataacaattttatacagaacaggttcaattatttacaagcaaaagaattgtgttagcgagcactttattacatcaaagcatttacaagcagcctctaggcttggcttttttttccttgtcgccgtcacttttttacatggttgataaacagagagacttcataaatatttattgaaagcagaaaaagaaaatgacactaataacaagtcagaaaccaaagcaccctcctcatccacatggctacttgctggtgacaacccctgaccctggcccttattattaaaaggagaagacagtttcagtttctggatggtgcttgtgctgcggcttagtctgctgatgggaccaataagcgtgggccactagaaccctgtccaaaagttcttggggaacaggttcacccctcctttgttgaggggatattcttgccgtgtgcaccagtgttgtccatttatccttcaaatccaca

SEQ ID NO: 216473 - DNA, 458 bp, Glycine max
gatcaaaccaaatccttagcacagccacgttatattacagagagttggcatgcacaattgcaccataagtgcaagaggctgtctaaatgccatacatacagagagaggcaatgtgtccgtgcttgtgcctccccaaagttttaatttattattattattagattgggccagaggatcctcgtgaagtatgtcttagcaggagaatacataagcttaaggtttctcccaatcatgagatatatacattatgatatgatacaagattaagctggaacagcttcctgcactttgccgttgcttgagagtactaagctatcatagtaatcaaccagcaccttccatccaccagggcacataaatccatcaggaggactttctttgttccttgccagtgtgcgcatctttgcgcctgatatgaacaggaagtcctgaggccttgaagggtcaaagaatgccat

SEQ ID NO: 216474 - DNA, 411 bp, Glycine max
  unsure (1)..(411): unsure at all n locations
gacaanaaaaggcatgattttgtttttngactttcanaaatttttagggaaanaaccaagcnaggaaanaagctcgagagcgaaaacggaaaacgnaacaaaatttttgatacaaagcaagaaaagaaaggacgggggggcggatggaggaaaaaggagccaaaaccccccccaagacagaagacagccacaccgagaagagcaaaccgacaaaaacaaaaggagagagaacnaacgggggagccacccacaagaaaccagagcaagccaagaagacaaccaagagagaaagcagagaggggagaagacgcaacgaagagaaaagaggccaaagccccacccgcaaaaccggacagcacaagccgacaaaaggacggacaacgaaaaaagaaaaaaaaaagggaagagacc

SEQ ID NO: 216475 - DNA, 522 bp, Glycine max
ttcgttcttttttttaattgggacatgaggttgcttaaaaatatttctttattatgtggcacatttagagtagacttaaattttactagactgcataaggtacgtcaaactactcataatataatactaggctactttcagcagcacatacaactagattgcatgtaggatgccatgctacatgtatcagattggagcttaagttacaagaaaagtcagctctactagactatgaatcagtgtgagcatgctgttcaattttacgaggtattaggttgcttatagaacgccttctaactcgagacttatcttggtgaataaccttgctgtgagaatctcctctaattattagaatgatctcttactttctttcagaacccggggagaatatcctcacgacattgttataagaaccatgtgcaaaatggcgtccatgaccactaaagcaacactagaatttgacaaatatgcaggcattattatataactctggcaactaaagacgcatatgctcgtgaattt

SEQ ID NO: 216476 - DNA, 531 bp, Glycine max
agggtttctgtccgatacacactctctcatcgttgaaatggccgcttcttcttcctctggcgacgagccttctcgctccgtcttcctcggcgccgacgtcggcaccggcagcgctcgtgcaggtctatttgacgaggaaggaaagcttcttggttcatctagcagctcaatacaaatatggaaagacggtgcctgtgttgagcaatcctctacagatatatggcttgcagtttgcgcagctgtaaaagcagcttgctctaaagctgaagttgcaccaacagaagtaaagggtatgggattagctgctacttgttctcttgttgctgcggattccgacagctcacctgtttcagtttcttggagtggagattcaagaagaaatgtgattgtatggatggatcatagagctgtagaacaagccgaaaggatcaattcctctaaatcacctgtattggagtactgtggtggagctcgttcacctgaaatggagccaccaaagcttctatgggttaaagaatatttgcatgaatc

SEQ ID NO: 216477 - DNA, 487 bp, Glycine max
agtcaaatatctatatttattattcatggtgtagcaatacactttttagatgagtgagggcactgtcatgtggagagaattcctgtgtacttactggatcaagtaaagaagtttgtctcacttcaaggaagtgacaaagatatgaatacaacatcaagttttcgacaagagattatgaaatgagagactgaggaagaactttatatgggttgagtatgtgattggggtccagcaaattcttgattgaagccatcacttgtacagtttcatgtgatttgctgtagaaaatttcgttggctttcattagtcccaggccatgctccgcgctaatgctacctcggtgcttagatgtccattcatatacataaggttcaatatgtgacaaaatcttgtcatcgtaatgagaagtagaaatgtttaaatgcaaattaccatcttcaaggtgaccatatcctattacattagctgtgttacctagtctagagcg

SEQ ID NO: 216478 - DNA, 494 bp, Glycine max
ggatattggaggccttgagaatgtcatgcgtgagctgcaagagactgttcaatatgcggtggagcacctagaaaaatttgagaagttccctatgtcaccattaaaaggggttctcttctatggtcctccaggatgtggaaaaactttgttggccaaagcaattgctaatgaatgtcaagctaacttcatcagtgtaaggggcccagaattgctcactatgtggtttggtgaaagtgaagccaatgttcgagaaatttttgacatggccaaacaatcagctccacgtgtcctcttctttgatgagcttgattccattgctactcaggtctatttttgtacttcgcatccatgcaggccaggttgaattaaattatgtggctgggttgaaaggaattgtatgattttgttgccaaatctgtagatgatttaaggagataatgtacacggtgtttttctatgtcaaaaaaaaaaaaaaaaaagggcggccgccgact

SEQ ID NO: 216479 - DNA, 514 bp, Glycine max
  unsure (1)..(514): unsure at all n locations
ggattccgaacagagagtagaaaatttgtgcggttgacacagtggtgtggtgcgcggtggcggtgctactgtgcgccgcggcgggcgcgtcgtgggtggaggaggcggcgaacccgatacgaatggtggcgggggtggaggcggaggtggttcgggtgatagggcagtgccggcgcgcgctgaagtttgctaggttcatgagcaggttcgggaagagttaccgaagcgaggaagagatgagggagaggtacgagatattctcgcaaacctcaggttcatccgctcccacaacaagaaccgcttgccctacactctctctgttaatcattttgctgattggacttgggaggagttcaaaagacacagactaggcgctgcccaaaattgctctgccactcttaacggcaaccacaagctcactgatgctgntcttcctcccacgaaagactggaggaaagaaggaatagtgagtgatgtttaagatcaaggcagctgcggatcatgctggacattc

SEQ ID NO: 216480 - DNA, 520 bp, Glycine max
cattctcatcctcttctttctctctttatcattgccatggatccctacaagcaccgggcatccagcgccttcaattctcccttctggactacaaattctggtgctcctatttggaacaacaactcctctttaaccgttggagctagaggtccaattctgctggaggattatcatcttgtggagaagcttgcaaattttgatagggaacgtatcccagaacgtgttgtccatgccaggggcgctagtgcaaagggtttctttgaggtcacccatgacatttctcacctgacatgtgcagatttccttcgagcccctggagttcagacgcctgtaattgttcgtttctcaactgtcattcatgagcgtggtagccctgaaaccttgagggaccctcgaggttttgccgtgaagttttacaccagagagggtaactttgaccttgttggaaacaaccttcccgtcttctttgtacgtgatggcatgaagtttccagatatggttcatgctcttaaacccaatc

SEQ ID NO: 216481 - DNA, 589 bp, Glycine max
  unsure (1)..(589): unsure at all n locations
gcttttaggacctttgagcaagtnagtgaggagctttgtgttgatatcaaggaaggggggcttaacagcaaggtcacagtgccctccatcccggaagccatgtctaagctcctaaaacctgaccctgagctggccaacttgatccacaacaagtgcatggggcttagcaactggtatggcctaataccagagcttttccccaatgttaagtatgttcatgggatcatgactgggtcaatggaaccttatttgagaaagttgaggcattatgctggagagttgcctttgttgacttctgactatggatcttctgaagggtggataggaacaaatgtgaaaccaacagtaccacctgaattggccacctacactgtgctttctcaaattggctactttgaattcatccctttgagagagctagaggaaattaagggagatgctagttttctttgtatggagcctaagcctgtggggctcactgaggtgaaagttggtgaggagtatgagaatgtcatcactaatccagcaggcttgtaccggtaccgacttggtgatgtggttaaggttatggggttccataattcaactc

SEQ ID NO: 216482 - DNA, 593 bp, Glycine max
cactgctgcaccctcaccctccattattctttcttcttctctctcttttgtgttttggggaaaagagaagaagtgaggaaccgaagaacgaagaaaagaaaaagaaacaaaaatggctgaatcaaaattattggaccgtggaagttggaagaaacgcgattatctgatcaagcttctcctaatcggcgactcttccgttggaaaatcctgcttgcttctcagattcgttgttgtggatcgggacttagcagtgagacaatctcggagaatggacaccattggattgggcttgatatttcagcatcaattcctatttattttgaatttttatatatttgttgctaattctatttatttttgttaaatgtataagatgttgcggtggagcgagaggttgagggtgaccttttacttggtgacatgggtcagggtctaggaatttgtcctggagttttggatggagccattagtatatctgctgttcaggtctcaatacggaaaagattgaaaagtgcatgggagatccagacgccgataccgataatcctgttttgaaagaagagcaagatgcccaagtactgtcttttataatt

SEQ ID NO: 216483 - DNA, 481 bp, Glycine max
agaacattattacatgcattattttattattgagatcacagaagtccatctagtagttatatatggctcctagtcttggcacaaagacaaagatcgttcttcttgcgttgggtgagtcctggcaatacttgaacatcaatgtcttcctttatcatcccttgcggcaattcccaatcaaaggaatgaagaagattagcaagaacaagttctaatatcacaactgccataggtaaacctgggcaacttctgcgacctgatccaaaaggaattagttggaaatcttgtccacgaaaatctacgtcgctatccaagaatctttcgggaataaactcttgaggatttttccaagattcgggatctctatgaataacccaagcattcacgtataatattgtcttagctggaattcgatagccatgtataaagcactcttcatttgattctcttggtacaagtagggtggctggtgggtacaatctaa

SEQ ID NO: 216484 - DNA, 594 bp, Glycine max
gtggatttgagttcatgccttcttcatcacccacctattacgccaacctccacaaccgggccgctgatgtgttgaccgttgaccagattaccccagtgtgaggagcttgggattcttgttgacagagatgatcagggcactctgcttcagattttcaccaagcctgttggggacaggttcttcattttctgcttcttttttttttgtttttttaatccctgctaaacaactttattataactctcacattctattagcctagccttgatgacttttaatttacgttaaactgtgctttttattctcctactttgttagttttttttttttatataaaattttaatttttcaattataactttcaataattaacaaatgatgtacagtatagtgttatgtcagaatggatgtacttgatgtagcagttcatcagagtgtttccctctacaaattgtacttttgtccctttcctgacataaagtttacgactttgaaaaaattgatagataaaagtgcaatttatttatcttccgctttgaactgattgaaagtgtaaaagttagatcaacaatttgacagtgtttgtgtgttgga

SEQ ID NO: 216485 - DNA, 421 bp, Glycine max
gtctccaaaacgcctctacgatttagggggccgtgctaacgccgtgcaatgcaaaaccttatacgactcgctcataccagcagaacagcgtttaagcaaccgtcgttctcggggttgttcgtaatttgagcatatcgaccccacacgaccttttcacccgcagtaacaagtcccaactcagacacattgacctcaataatcggacccttggtcagcacacccaactgtgtgtacagcgggttctgcgggttctttttcacactgataattggcaactgcaccgtaacgcttaactcaggatgcgtcacattcgccttcttgtacctcaatcccatgggcctaatgaagcgctcgtatttcaccggtcgccttgtgaatacaggtccaacaaacgtgggcttggtaattatgcgcttccagc

SEQ ID NO: 216486 - DNA, 458 bp, Glycine max
aattccgcgatcgaccatgctcgtaggccgcccttcgtttttttttttttttttttttttttaattgaatccattatttatatataacgggaaaggactatatacacatacaatgtattctagtttagtcccctaaaacacgagcaagttattctggggtgtcgaaccccaacttcttcaaattcggctggactgcaaattgaatcataggtggtgggccacaagtcaatgccaaggtatcaggagatgcatttggaatatgctccgtcaggatacttttagtgatgaatcccacactgtattcccacccttctcttatgctttcttgtatcacgtaccacaccttgaacctatgatacttcttagcccactcatgaagctgtttcttcagcaatatatcatcctcggttgggttcgcgtaaaccacatgcatgttggtgcagaactttggatccttt

SEQ ID NO: 216487 - DNA, 558 bp, Glycine max
  unsure (1)..(558): unsure at all n locations
atgacagggcgtcgaatcgatccgacccanaattactgtcacagctactgtcggggcgccttgtctttttaaccaaactttatttttaaaagaacaactaaatataggaagggttagatgtagaacggagtacccctttacagtataaaacgcagtgatacactggcactttctcacaattatttcatcaaacactacttatctttaagccacacactactgttatggaacatcaacagtattatcatcatattattatttccatgaatcctgaatctagcttccacacaaagtcattactgctgggcgcactgaaccctttgtgcaccaccaggcatgtcatcatcctcatcatatgcctactgagcttgctgctgattcctcctagtctccttcttcatgtggacatcatggagtgtagctttctcacatacatgcagctccatgcctgtcaattgtgaagaacgcttttgttgccaaacagcctccaaggccttaacttgatcatggtttagaggataaggaaactccacttgaagtgaatgaaaagttttccct

SEQ ID NO: 216488 - DNA, 540 bp, Glycine max
cggagccttggtgtatgccacgataaataatcggctggtatagctgaattctatgaggaggattacaaaaataagggtgtcaatatcatcccaggaactgttgctgctggattcacttctaattctgatggagaggttaaagaagtcacactaaaggatggcagggtcctggaagctgatattgttgtcgttggtgttggaggaaggcctcacacagccttagtcaaagggcaggttgaagaggagaatggtggaatcaagaccgatgctttcttcaaaactaatctttccgatgtatatgctgttggtgatgttgctactttccctttgaaattatacggtgaattgagaagagttgaacatgttgatcattctcgcaaatcagctgaacaggctgtgaaggccatcaaggcagctgaggaaggaagaacagttgaggagtatgattaccttccatacttctattcccgttcatttgatctgtcttggcaattctatggcgacaatgtctgcgacacagtactattcggagaccacaat

SEQ ID NO: 216489 - DNA, 515 bp, Glycine max
aactatgatactatattgatatttaattcttttggcgaaacgagctcaatacatcatattaaaacataaaaagcagcacctaaaccagaacagcaaacaagttcaagggagaaattgaacataacagacatgacatacaagaacacttgaaaaaagacacgcttaaaacaagaacacttgaaaaaaaacacgcttaaaaaccaccgcgaaggcgaaggacgagatgcaaggtggattccttctgaatattgtaatctgccaaggtacgaccatcttccagttgcttcccagcaaaaataagcctctgctgatcaggtggaatgccctccttgtcctgaatctttgccttcacattatcaatggtatcagaactttcaacctccaaagttatggtttttccagtcaaagtcttaacaaagatttgcatgccaccacgaagccgcaacaccaagtgcagggtagattccttctggatgttatagtcagaagggttcttccatcttaagctgtttccc

SEQ ID NO: 216490 - DNA, 499 bp, Glycine max
caagatcatcaccactgaaggtagaattgttggcataaaaaaagcacttgttttctacatgggcaaagcacccaaaggctccaaaaccaccttggatcatgcacgagtatcgccttctcgattcttcccgcaaacacaacctcggaaccgcaaagcttgatgattgggttctatgtcgtatctataagaagaactcaagttcacaaaaggttgaggctaattttttggctatggaatgcagcaatgggtcatcaccttcttcatcgtcccacgtggatgacatgctgggatcgttgccggagataaatgaccggtgcttcaccctgccacgagtgaactcactcagaacaatgcaccagcaggatgagaaattcgggtctccgaacatgggatccgggtttttctcggattgggttaactcgaccgatctcgattcgatttccgaattcgagtcgggttgccaaaccaaagaatggtgattatgattgcatgacttttt

SEQ ID NO: 216491 - DNA, 470 bp, Glycine max
tgcattattcaatggccaccacagtattctttccggaccatggtgagcaccttctggatgaggaagcaacctatgacgaccaagagcctaaagacattccccaacgctctttttggtctgaaaggtggacgaggtggacgtgtaacttgcatggcctcgtacaaggtgaagctcataaccccagaaggagaagtggagtttgaatgcccagatgatgttttcattgttgacaaggctgaagaagaaggcattgaacttccctactcgtgcagggctggttcttgcgtttcatgtgttgggaaaattgtgaaaggtgacgtggaccagtcagatggtagcttgcttgatgatgaacaaatagaaagtggatgggatctcacctgtgttgctctacctaggtcagacgttgacattgagacacgcaaggatggagagatcgaatgatcgatatatattataatgtaatcttg

SEQ ID NO: 216492 - DNA, 526 bp, Glycine max
  unsure (1)..(526): unsure at all n locations
tgcattattcaatggccaccacagcatgnnctatccggaaccatggtgagcacctccggggtgaggaagcaacctatgacgaccaagagcctaaagacattccccaacgctctttttggtctgaaaggtggacgaggtggtcgtgtaacttgcatggcctcgtacaaggtgaagctcataaccccagaaggagaagtggagtttgaatgcccagatgatgttttcattgttgacaaggctgaggaagaaggcattgaacttccctactcgtgcagggctggttcttgcgtttcatgtgttgggaaaattgtgaaaggtgacgtggaccagtcagatggtagcttccttgatgatgaacaaatagaaagtggatgggttctcacctgtgttgctctacctaggtcagacgttgtcattgagacacacaaggatggagagatcgaatgatcgatatatatcataatgtaatcttgtccatgctcttctaatgccatctatctatgtcgtgttttgatattgttagagt

SEQ ID NO: 216493 - DNA, 458 bp, Glycine max
aagaagagctggaagcgcatgatcactaatccgacgtttgttggacctggattcacgaggcgaccggtgaaatacgagcgcttcattacgcccatgggattgaggtacaagaaggcgaatgtgacgcatcctgagttaagcgttacggtgcagttgccaattatcagtgtgaagaagaacccgcagaacccgctgtacacacagttgggtgtgctgaccaagggtacgattattgaggtcaatgtgtctgagttgggacttgttactgcgggtggaaaggtcgtgtggggtcgatatgctcaaattacgaacaaccccgagaacgacggttgcttgaacgctgttctgctggtatgagcgagtcgtatgaggttttgcattgcacggcgttagcatggacaaataaatcgtagaggcgttttggcgactccatatattttataatttatatttttaaa

SEQ ID NO: 216494 - DNA, 552 bp, Glycine max
aaaaatgccagtgaagatgaaatcaataagtcctatagaaaggctgctatgaagaagggtgcatattagggaggagatcctgaaaagtccaaggagttaggtcaagcatatgaagttttaagtgatcctgagaagaaagacctgtatgaccagtatggtgaagatgcccttaaagaaggaatggggggaggaggctcgtttcataatccatttgatatatttgaatcattttttggtggagcaagctttggtggtggtggtagttcccgaggtagaagacagaagcatggtgaagatgtggtgcattctttaaaggttttcttggaggacgtctataacggcacaacaaagaaactatctctttctagaaacgtattctgctcaaaatgtaaagggaaaggttcaaaaagtggaacagctggtaggtgttttggatgccaaggcactggtatgaaaattacaagaaggcagattggactaggcatgattcaacaaatgcaacatgtctgtcctgactgcagaggatctggtgaggtcattaacgagagagat

SEQ ID NO: 216495 - DNA, 381 bp, Glycine max
  unsure (1)..(381): unsure at all n locations
agccgaagaactangacagaccatgagagaaaattaggccacgacgagagcggggaacgcggcgagagctcgagccgaaaaaaaaaaaaaaaaataataaaaaaaaaaaaaaaaaaaaaaaaaagaagaagaaaaaaaaaaaaaaaaaaaaaaaaaacccccaaaaagaaaaaaaaggggggcccgccacacaaaaaaaaaaagagaaaacaggggggcagagaaaccaaacacgggggagaaagggaaaacaaaacaaacaaaagggaaagacgcaacaggcgaaaaaaaggaaaaaaagaggggaccaaagaaaaaaaaggggaacacaaaaaaccacgggagaaaagaaaaaagggggggaagaggggaaaaaaaaca

SEQ ID NO: 216496 - DNA, 476 bp, Glycine max
ttcgttttttttttttttttttttttttggacccaaaaatatatagattatagaatgcaattttaacagacttttacatgtgacatttggccaaaatacaaagaggattcttcttatactggacaagtcctggcaagacttcagtatcgatgtcttcctttttcatccctgctggcaattcccaatcaaataaataaagaagattagcaagtataagatccaatgaggcagttgccataagcatgcccgggcaacttatacgaccagcaccaaatggaattaactcaaaatcttgccctcgaaaatctatagggctgtataagaacctctcaggcaaaaattcttctgggtgttcccatatttcagggtctctttgaattgccaaagcattcacatatactaatgtcttggctgcgatttcataaccatctataatgcaattttcatttgtctcttttggcaaaggagtgggactg

SEQ ID NO: 216497 - DNA, 520 bp, Glycine max
gagcaaggtcaaacctcaaccatagatacttactatcaagctcatggcatgggggcctttaccttactggaagtcggacccccttatatgaacgaccttctaacgccaccactgtaaacatgttaggcctttgaggacccaacagatccgaagttacttagggttatggcccaaggcgcagaggcacagaatccccttgacttgacccaggagcttttgaatggaccaacacaccatctccatgatgatgctcggcgaggctgaggagatcagagacatcgctcgtgaggttcttaagatctatggcgaatacagcctcactgactatatctggccattgaagcatctcaaggttggaaagtatgagaagaggatcgacgacttcttgaacaagttcgaccctgtcgtttaaagggacatcaagaagcgccttgagatcgtgaggaggaaaaaaaccggaaaggatgttgagggtgaggacaggggggtttttcttgacactctgcttgaatccgctgat

SEQ ID NO: 216498 - DNA, 432 bp, Glycine max
gtgtatgtaaccatgtattaaagatcgaattacaaagggatttaacctcctccgcttccgtaagtctttccgaaaaccatcatctgaagttgatcgtatccagccaagactccagcttcagcgatagctcgaagaacgttggcacctgctcccttgaagagtgacttgtatccctccttggcaatgatctcctggaagcagtggtaagagctcttgtacttgacagcctcttcagaagtcatcatcatacgtcgtcgaatggtgtcgagaggataagaagcaagaccagctccgatagtgatggaccatccaagcaagaaagaagcatggaagttgtttgccaaatttccagtgaggagaacaggcttgagtgagtcataaagtccaaagtaaagtcctcgatagacgatgataccaacgcaagagatgttg

SEQ ID NO: 216499 - DNA, 377 bp, Glycine max
ggactaaatactacttgataatgcccatgaacatgatgaagggtacctaatgattcatacataactttgataggagcttgtcttgacaaacaacagcttagatctagttgccaccggtgccacaaaggactatcgcagcaccatccacatgtgcgataagcatcaaaagcatcacaagaatgacaaagaaagggatgttagtttttagaatacttatagcccttaaatatgatttttttattattaacattactataactttccgctatatcggggattgtacctatgtgaatcaatacctagaacattgccggaccctaaaatggaaagtcccctaagcctatattgagaaggtgcggaaatatgatgctcaatac

SEQ ID NO: 216500 - DNA, 401 bp, Glycine max
  unsure (1)..(401): unsure at all n locations
tgctagttgcccttagtattgtgcganattngagncacgacgagagcggggaattcgtctcgagtaaatcataagaaggaggagagactaatactttcagaggccaaagcagtatatttcggggggttcttataatagctaacgccatggttgccccccaccaatagcaggcagtgttagaaaaatcggtcaaaaattaagacgagttcgaagaaacattttatgattcggcagagaagatagtggaggttgtagtctacaagtacgatgacgatgagaattgagggagagtgccaaaaatatcgtggaagaagctatggctgtacaacggcccgggttttttgaggagcatagagaatctggatcatggaaacttaaagggggaccttcaggcgggtgcc

SEQ ID NO: 216501 - DNA, 452 bp, Glycine max
gtacttcttactactagttaatgctcataaatttcatgatgggtacgtaaagattcatagtgaacttcgataggaacttctcttgacgaaataatgcgttgatctagtcgccaccggagccacaaaggactatcgaagtttattcttttttgttgataagctccaattgcatcataggaattacaaaaaaagggttctttttttttcgtatacttatagttattatctcgaattctttcatttttaagatttctaaaattttcgcaattccgcggattatacctattggaataaatacctcgacgattcccgctcgctaatatgtaaagtccaataagcatatcttgagttggtaccgaaataggatccccaatagccggagacaggaggttcgtatgagaaaacataagtaaacgagcttttgcttgagcctctaagataaggcacatgaa

SEQ ID NO: 216502 - DNA, 473 bp, Glycine max
gattgccgagattcaaccatgtttgttatatattgagacataatcaatcaagtacaccactcacagcagaaggtttataagctgtaaaggtacatgtaaccataaacaaaaatagtctccaagactataaaaacattacattttagacaaattagtcttcttccacttcatcctccgtcaacacctactataactgctggtgttgctgctgcctaacatgtatcatattcactacatacatcttagtaggagtagcctttgacgaacaactccttcttggcttcctcggattcaccctcaccggtgtacttcccaagctgggcgagcgagttggacttggcacggaaaaggagtgcatcttgtgccgccttcacgttctctgggcggcctccccatgtcttaaggcagtgttttggagggctctggcatacgagaacgacacgtgccacgggtttggagattggttcatggca

SEQ ID NO: 216503 - DNA, 516 bp, Glycine max
agcgaagcttgaattacaagaggttgttgatttcttgaagaatcccgataagtacaccgcgctgggcgcgaagattccgaaagggtgccttttggtgggcccaccgggaaccggaaagacccttctggcgagggctgtggcgggggaagctggggtgccgtttttctcgtgcgcggcttcggagttcgttgaactttttgtgggagttggtgcgtcgagggtgagagatttgtttgagaaggcgaaggggaaggcgccgtgcattgttttcattgatgagattgacgccgttgggaggcagagaggggcggggctcggaggtgggaatgacgagagggaacagactattaaccagcttttgacggagatggatggcttttctggcaattctggtgttattgttttggctgccactaacagaccggatgttcttgattcggcgttgttgaggcctggccggttcgacaggcaagttactgtggatagacctgatgttgccggcagagttaaaatttt

SEQ ID NO: 216504 - DNA, 536 bp, Glycine max
aaatctctaatatatgttttctcgaatattagaagcactaccatttaagataacaagttttagaactctcttctcattgtgaatcaaataagaaaataactattttttcctctcctaacaagtccctcttctcctcaagcaaacaaacagaatgtttatttaaaatctatctccttccctcattaaatttctttccccctccttggaaccaaacaaaacctgctaagtggtatagaaactgagaagagatattacaggaaatatagaagggatgtttaaaatttagaggatggagagttaggaggaaaataaggtgtaaaatgaaaagagcatccactggtatgtttcagtcagataaacccgcctttgactttagatgcgccttgaattccatgatgtcaccctcccatctggtcacagattgattagcacatacccatatctcatgagccacttgatttatgagcctaaaatcatggcttacaagcaccaagccaccatcccattcattcaatgcctcggccaacgagtcaatt

SEQ ID NO: 216505 - DNA, 483 bp, Glycine max
aggtcacattgtcacaatgtggtcactaattgttcactgttgtgccttattcctccggtgttcttgctattcttcttccaataccgcacaaccttcaagaactcaaaccttccaccaggtcctagaggccttcccataatagggaatctccatcagctagatagctcgaatcttcatcttcagctatggaaactctcaaagaagtatggccctatattttcccttcaactaggtttaaggcccgccatagtgatttcctcatccaaagtggccaaagaggcacttaaaacccatgacgttgagtttagtggaagaccaaaattacttggccaacagaaactgtcctacaatggaaaagacatatcattttcaccaaatggtagttattggagagaaatgagaaaactttgtgttgtccatgtccttagctctagacgtgtctcgagcttttcctcaatataaattgtgaggttaagcagatga

SEQ ID NO: 216506 - DNA, 244 bp, Glycine max
gaaaaggccagttaagaggaaattaataaatcctatgaaaaggctggtatgaacaaggggggagataaaggaagagatcctgaaaagccccccgattaatgtaatgtatttgaagttttaagatgattctgatgatatagaatctgttgaactgcatagtgaagaggcactgaaagaaggaatgagtggaggaggtacgttttataatccattagatgtatgtgaattaatttatggtggagca

SEQ ID NO: 216507 - DNA, 567 bp, Glycine max
ctaactttttcttggctggttgttaataaactctcttttctctattggatcatagcggggtgcaccctcttcctcttagaattccttatactcacacaccaaaattctggtacaccatgatttttccaagattttgtacgaatctaaaaggtatggaattggaaaccctctacaccccttgttatatgccaaactcaaattggtttgtgcaagagagcctcagcacagagtggactagagaagataacaagaagtttgaaagtgcccttgctatatatgacaaggacaccccagatagatggttcaaggtggccgctatgatccctgggaagactgtgtttgatgtgatcaagcaatatagggaactggaagaagatgtgagtgaaatcgaagcagggcatgttccgattcccggctaccttgcatcttctttcacctttgagctggttgacaaccacaactatgatggatgcagaagaaggcttgcacctgtcagaggctctgatcaagagagaaagagaggagtcccatggactgaagaggaacacagacgttttctgatgggac

SEQ ID NO: 216508 - DNA, 582 bp, Glycine max
  unsure (1)..(582): unsure at all n locations
tgcgtaagttttnagtattcgtgagganaattangnnaggacnggagctgggattcgtatgagaggttgtaaggctgaagacagtaaataccataagtcgaaaagncggtggcttctgtgggagattgaggtgttcttcttctagaaaaccccaggttttacaaggaggaagaaaagaatgatcccgagcctgcaaaaaagcttgcctctctggcagatctgtttgtgaatgatgcatttggtactgctcacagggcacatgcattaacagagggtgttactaaatacctgaagccatctgttgctggtttttttttgcaaaaggaacttgattaccttgttggggcggtatcaagccccaaaaggccattttgttgccattgttggtggttccaaggtcttatttaaaattggagtgattgagtcacttttggaaaaaagtgacattcttctttttggaggaggaatgattcttaacattttacaatgcacatggtttttaagtgggttcattccttgtagaagaagataagttggttcttgctacaatacttattngcaaagcaaggaaaagggggtgtt

SEQ ID NO: 216509 - DNA, 441 bp, Glycine max
ttgtttttttttttttttgtgtatgttaccatgtattaaagatcgaattacaaagggattgagcctcctccgctttcgtaagtctttccgaaaaccatcatttgaagtcggtcgtatccagccaagactccagctccagcgatagttcgaagaacgatggcacctgctgccttgaagagggactagactccctacttggcgaagatctcctggaagcaggggcaagagctctagtactgggccggctctccttacgtcataaggatacgccttataatggtggggtgaggataaaacacaagaacccgttcgagggcgagggaccattcgagcaagaaagaagcagggaggattgtttgacgcatttccagtgatgagaacaggcctcgaatgaatcatatagtgcaaagctgagtgctggatagacaatgataccaacgc

SEQ ID NO: 216510 - DNA, 394 bp, Glycine max
ctcctgaagcacaagcaccagcaccaatgctcactagccccatttctccaccaagggggggaccagcacctggcccttcctctggatcacccacttacactgttggagagactgcaggctggattgttcctggcaacgcttccttttacccagcttgggcctctgccaaaaacttcaaggttggagacatcctaggtaagtcatcatcatctacacttattaactaaatcaagtcccacgtggtacaaattaaagtaaagactcgaaccatcattggtgtgtattgcagttttcaacttcccatcaaatgcacacaatgtataggaggtgacaaaggccaactacgattcttgcagctcaccctctcctatcgtcactattcaccactccatcg

SEQ ID NO: 216511 - DNA, 517 bp, Glycine max
  unsure (1)..(517): unsure at all n locations
ctcctgaagcacaagcaccagcaccaatangtcactagccccatttctccaccaaggtgggcaccagcacctggcccttcctctggatcacccacttacactgttggagagactgcaggctggattgttcctggcaacgcttccttttacccagcttgggcctctgccaaaaacttaaaggttggagacatcctaggtaagtcatcatcatctacacttattaactaaatcaagtcccacgtggtacagattaaagtaaagactcgaaccatcattggtgtgttttgcagttttcaactacccatcaaatgcacacaacgtagaggaggtgacaaaggccaactacgattcttgcagctcagcctctcctatcgacacttataccactccaccggccagagtcccccttagcaaatgcggtgaacattactacatatgtggaattccggggcacttgttgggaagacaaaagcttttcatcaacgttaccggcggcagaaccgccaccgcccccacc

SEQ ID NO: 216512 - DNA, 473 bp, Glycine max
  unsure (1)..(473): unsure at all n locations
ggacttcttactactttataatgctcataaatttcatgaagggtacgtgaagattcatagcgaactttgataggaacttctcttgacgaaatactgcgattacctatttgccaccggagccacaaaggactatcgaagattattcttttttgctgataagcnccaattgcatcatacgaattacaaaaaaagggttctttttttttcgaatacttatagccattatctcgaattctttcatttttaagatttctaaagtttccgcaattccggggattatacctatttgaataaatacctcgacgatttgcgctcgttaatatgtaaagtccactaagcctatcttgagttggtgcggaaataggatccccaatagccggagacaggaggttcgtctgagaaaacataagtaaacgagcttctgcttgagcttctaaagatagaggcacatgaacagtcatttgatccccatc

SEQ ID NO: 216513 - DNA, 448 bp, Glycine max
tgaagataaaagccttagcctttccttcatctccaaacacaaagacatcatcatccggggctgctttcgtctccactgtcggagctgccaccagagctcttttgaacctgaatggttctggagctggagcttcagctcccagttcagccttctttgggaccagcttgaagaaggttattgcctcaagggtccccaacagcaaggtttccggcggaagcttcaagattgttgctgtagaagagaagaaagagattgaagagacccatcagaccgacaaggacagatggaagggtcttgcctatgatatctcagacgaccaacatgacatcacaagaggaaagggtttggttgacttcctttttcaagctccacaggatgttggaacttactatgcagtcatgagctcctacgagtacctcagcactggacttctccagtacttggacaa

SEQ ID NO: 216514 - DNA, 415 bp, Glycine max
gggggcccaaaatcaatttaagggggccctttaactcaaaattttagggggagacactcccatttgaaaaaaattgtaaaatcatttcaaacttgggattttttttttgcccctaaaaaattgaaaattttaaaaatggtacacccaagtcccaaaaaaaattttagcacttggatcaacacaacctttaggaaaaaaaaaatttacttgccaaggttgttttgcccccaattaaaaaatggaaaaaaggtcccctggtaaaaacatccccgttggcatttccaagggccgccttgttcaaatacttggcaaccaaatgggcttttttgacatttttttgtttttggacaaacatgttaccatacgtaaagagctttttcaaaattattttgggctggtaaaggggggggggcca

SEQ ID NO: 216515 - DNA, 512 bp, Glycine max
tccggacatgagagagagagagagattagtgaggtgtaagaaactggaaggagtaggtgttgttggcattctgacctaaagcttgtgtctttctgcttcgtttgtatcttctgctgcgtaaagaggatccctttctgattcttccgtaaatttcgtctctgaaactagggctaatacttcatctaccgatctctatattctggtttttccaagttcttggaaggaaaatgatgaagccatatgctcacagtggttgaatatagtacgtcagaagttcacacaagatatatatataattattattgggtaccacctgcagaatgtcattccgcagcatagttcgtgatgtaagggatagtttcgggagcttatctaggcgtagttttgatgtcagacttactgtgcatcataaaggaaaatctcaaggatcagtgcatgatttgcatgaccagcctctattaattcaaaatagccgcttggctagcttacccccagaattactatttgatatc

SEQ ID NO: 216516 - DNA, 523 bp, Glycine max
  unsure (1)..(523): unsure at all n locations
gaaaaagtgatagttgcacactgttttatttattgatttatacatgcaaaagtagtcaaaataattgacatacttgtctacatcaaaagttgacgaggaaaagtaaaacctgcgtagctagctagctgtcccatgtacacttttatttaaaaattgaaacataaaaaaatcttgaaacgaagcagctaatagaatccattatttatatataacaataaactactatatacacatacaatgtattctagtttagtcccctaaaacacgagcaagttattctgggtgtcgtagcccaacttctccaaattcggctggactgcaaattgaatncataggtggtggtccacaagtcaatgccaaggtatcaggagatgcatttggaatatgctccgtcaggatactttcagtgatgaatcccacactgtattcccacccttctcttatgctntcttgtatcacgtaccacaccttcaacctatcatacttcttagcccactcatcaagctcttccttcagcaatata

SEQ ID NO: 216517 - DNA, 503 bp, Glycine max
gatcaaaccaaatccttagcacaaccacattatattacagagagttggcatgcacaattgcaccataagtgcaagaggctgtctaaatgccatacatacagagagaggcaatgtgtccgtgcttgtgcctccccaaagttttaatttattattattattagattgggccagaggatcctcgtgaagtatgtcttagcaggagaatacataagcttaaggtttctcccaatcatgagatatatacattatgatatgatacaagattaagctggaacagcttcctgcactttgccgttgcttgagagtactaagctatcatagtaatcaaccagcaccttccatccaccagggcacataaatccatcaggaggactttctttgttcctggcagtgtgcgcatctttgtgcctgatatgaacaggaagtcctgaggccttgaagggtcaaagaatgccattttaccctgagtcttgtcatatgcagcaaccctggaagaagaatgt

SEQ ID NO: 216518 - DNA, 421 bp, Glycine max
  unsure (1)..(421): unsure at all n locations
gggcgaggagctangnagtantcataaaaanttaagggcacaacagaagcnngaattcgtctcgaggctctacaaggataaggaacaaattgctctatcacacgaaggagaacaancagggggctttttgatcgaacgaggaacgggtggcccctctgccacaggattcaagactgacgtagatggcatagagcgagtgaatatttctcattcagaaacatgatgagatgaacaagaatgggtcattgactaccccttacaaggggataaccgagcgtttctctcgagtcattgctgaggagggaatcaactcgctgtggagaggaaatattgccaacggtttttgatacttccccaaataagctattaaaattcctttcaaagaacaattcaagcgaaagttccgaaattctaaagctaa

SEQ ID NO: 216519 - DNA, 526 bp, Glycine max
cacccgttacaactctacatttaaaaataaaggtttattaaagttacactgtattatagacgtaaagaaactacaaatttttacactaaaaacagtttctcttttatacatactctctgttgtcatttgtcaacactacaaaaaatgaaaaagtaaggtagaatctttaatcattcacaaatatggagcaggctgcagagggcattctgtattctaagataatacatatgaaagatgttacatatataggctattcaaacagtggctggtactggagttgaaggagcaacacggttttcagctggaatttcaacaaactcagacaatatagcacggaattcatctccgctcagagtctccttctccagaaggacttccacaatcttgtcaatggcctcacggttgttccttatatgctccagtgcaatttcatatgcttcatctgagatcctcttgatggcagcatcaatgtcttctgcaagcctctctgacattgagttccttgccatcattctcatgatgacat

SEQ ID NO: 216520 - DNA, 563 bp, Glycine max
cgaacggggtctgagtcgatgcggagcaactggaaggaagggactgctttcttattcccactcctcacatcgagaaggaactgttgaagcaaataaagacgcatccatcccctcaaaccatatataaatggattaaagataacatctctcccaaacttcatgtagataaaggattcgcgaacatcttaatgactagcttcttacacgacattactagtgaagtaaacccccccagcgatgaaacagattcatcctctgcgtccttccaaagaacagtgagagcaggaaaaacaactactactatctttcaagccactaatgcagaaattccttcatgagcacagtgatctacaagtcagtgccctgtatgctctccaggtgcactgctataacagcaacttaccaaaaggcatgttacttcgcttttttgcgcacttctatgacatggaaattattgaagaagaagctctcttggcttggaaagaagatatgacgcaagagttttcgggaagaggctaagcttttgttcaggtgaatcagtggctaacctggttagaaactgc

SEQ ID NO: 216521 - DNA, 458 bp, Glycine max
  unsure (1)..(458): unsure at all n locations
atggcatgatcgatctagtagactatctnaaaantttagngcnacgnacaacagctcggaatacgtatcgagggagaccaaaggcttttggatgcttcactcacttgacttgagaagagccagggctgcaggggtgaacattgtaccaaccagcactggagcccccaaggctgtgtctttagtgttgccacagatgaagggcaagcttaatggaatagcgctccgtgtgcctacacccaatgtttcagttgttgaccttgatgtgaatgttgagaagaagggtcttactgttgaagatgtgaatgcagcatttagaaaggcagctgagggtccacatgaaaggtgtgttggacgtgtgtgatgatccacttgtgtctattgactaccgctgctctgaagatttccttactattgactcctccttgactatggttatgggagatgacatggataaaggg

SEQ ID NO: 216522 - DNA, 595 bp, Glycine max
aacgtaaaattttatcttattagagaactcaaaacatgtgaacatgtactagtgtactactgatataaagcaaacaaacgactaaactgcacagttggagcaagcttaacaagtgaacaacactgtatagacagctgttttaagtattacagtccaagggagttgaagtgttaactgagcagattggtaagaaaatcaatctctcctcttctttttcttctcattcctctcagccgaattcttcaacataataacaagaatccggacaaaaactgcaaccaaatcggtaaacaaggtcaaggcatgctttacatagtccagatcgcccaagtgtgccctctcaactatttcttgggtgtctactacaatgtaacctacaaacaccaaaagcccaaagtacaacttaaacttaaagagagctgttgaacctccaagatggaaaaagcaaagtgcaaccagagaaggatggacaatccagaaaaaaccaagccaccaaggtacaggtactccctacgcctagcaaccaaagctgttctgaaaacatgcaaagccaagatgtttccacaatgccctaaaataggcttgatcgatttga

SEQ ID NO: 216523 - DNA, 524 bp, Glycine max
gggaagtatttcttacataacaaattccttaatgattcacaggcaactggacattaagactaatccttaaacaagtattcaaaactgcacatcagtacttacacataaaatagacactgctatgaatctatcaaatataagaagagtaaagatgcagactttataagttcaaacaaaagaagcatttcctgaaaaaaacctgacacacatactatttgttatttacaactccaagaaagcttaattctgtgaggcagtggcctgaaggagaccatcccgaatttgcacggcaatgtctttaactgccccaggaccgtgaggtatgaacacagacgaggaccttgacgatgctcctatctctttcatggtgtcaaagtattgagtcaccagcaccatgtccatgacatctttagctgatgtcccgggcacgttctcagagaaagcaagcacgctgtccctcagtccatccacaatggcctgacgttggcgagcgataccgagtcctgacagatatttggattctg

SEQ ID NO: 216524 - DNA, 450 bp, Glycine max
gactatggtttatttatttaatttatataatccaattacggggataattgcaaattattaaggggtgcacttgggcaacaccctgagaatatagaataacttaattttaaataatttatataatccagttacaaggatttataatacagcagtactgaatttaatcacttcaaaattaagttatgctatattctcaaggtgtctaggtaagactttccatcaagtttacgagcaaataggttcttcaaaaactcctttaattcgattcttttgaaccgtgctggtgttttttcagtgatcaagcttattgcaggacctatcaccccatcatgttttgatgtgtggaatgttgcaattgaaatcctttcttttgcagagttcaccattgcacgatgctcaacacttcggtatattccattacttataatctcgagcatgtccccaatgttt

SEQ ID NO: 216525 - DNA, 500 bp, Glycine max
ggaaaaccttttcaatactatgtaagatctttattggctaatagcttctatatatatatatatataaataacaacatcaaagattgaacatatggccttaaataatgggaaaaaatggttcaggcttgatacttattttttcaagcaccaggcagggataatagaagaacaatttgagcaacactcgataagagtgtggacttataaaatgccataacccagaagcgagagacactgcaaacgattttgatgccactgaatccagaacttaatgccaattccatgaattcatgttgggttctctcttttcctcctgagttttgagtcatcattaagagggcagcttggaaaccactcttagcaggaactgtgctctcgggcaaaatgggaagaattaagtccacaacattcactttttcatcactaggaatagctttatgacaattgttcagcaacgttaaactttggtcattactccaatcgtgaaagatccactgaaa

SEQ ID NO: 216526 - DNA, 460 bp, Glycine max
ggcagaaagcaagctcatcctaagattataaatggagcagcctcctccatggctggtcttccccatccttggctggcaaggccgccaagctgggcccatcagcccccgaagtcgggagggtcagcatgaggaagaccgtcaccaagcaggcctcctccggaagcccatggtacggcccagaccgcgtcaagtacttgggcccattctctggcgagcccccgtcctacctcactggcgagatcccaggcgactacggctgggacactgctgggctttcggccgacccagaaaccttcgccagaaaccgcgagctcgaagtgatccactccaggtgggccatgctcggggccttgggctgcgtcttccccgaactgttgtcccgcaacggggacaaagttggagaagcttggtggttcaaggccgggtcccaaaatttcagcgagggtgggctggactactt

SEQ ID NO: 216527 - DNA, 276 bp, Glycine max
ttctttcttttttttttttttctatattttttttttcacaccccataaaaaaaaagtgaaatgggtatattttacaactgttaaacctcttacaaaaatcccaacattccacacacaaaaaataaattaagcaccccatattaccttttaacaaaaaaacccacaaaactccacgataacaaatatctgaacaaaaaaaaagttgtaaacggacactaatgcttatttctttactaaataaagttaaaatactttttatcaaaaaattctaaattg

SEQ ID NO: 216528 - DNA, 451 bp, Glycine max
ggagaccagaggctttggatgctcataccgtgacttgagaagagccagggctgcaggactgaacattgtcccaaccagcactggagccgccaaggctgtgtctctagtgttgccacagctgaagggcaagcttaatggaatagcgctccgtgtgcctacacccaatgtttcagttgttgaccttgttgtgaatgttgagaagaagggtcttactgctgaagatgtgaatgcagcattcagaaaggcagctgagggtccactgaaaggtgtgttggacgtgtgtgatgttccacttgtgtctatcgacttccgctgctctgatgtttcctctactattgactcctccttgactatggtcatgggagatgacatggttaaggtggttgcttggtatgacaatgaatggggttacagccaaagggtggtggatttggcacacctagtagcaagc

SEQ ID NO: 216529 - DNA, 470 bp, Glycine max
aaaccaaatccttcttagcacaaccacattcattatattacagagagttggcatgcacaattgcaccataagtgcaagaggctgtctaatgccatacatacagagagaggcaatgtatctgtgcctgtgcctacccagagttttaattattattattattattaaattgggccaggagtatgtatcttagcaggagaatacataaagcttaaggtttctcccaatcatgagatatacattataatacaagattaagctggaacagcttccggcactttgccattgcttgagagtactaagctatcatagtattcaaccagtaccttccaaccaccagggcacataaatccatcaggagggctttctttgttccttgccagtgcgcgcatctttgagcctgatatgaacaggaagtcctgaggccttgaagggtcaaagaatgccattttaccctgagtcttgtcatatgc

SEQ ID NO: 216530 - DNA, 526 bp, Glycine max
ggaaatccttggtgaaagatatatttattggttacatttacataagaaatgagatatgaacacgaggtcttctgaaaaacagaagaggtaaaagtgtgttcaacatggagggactaataaaagagattagacacttgatgcgtattaagctagctttttaaatatcatgatgtcacaaaaatgtaattcaagaaataaatctacgtagtttacacaagatacaatcgtagacagaccaaccgtaacggctgatttcatatccaacaatttgtcgaagtcgaacttcattccatttccatcacgtacatgctggagaacatagctctggtgcaatagataagcatgtgcttcctgtattaaatgtgtactcccagcaactacggtgcgatgcagccgtatcgagagagaaacaggagatctctacaggggttggggccttgtctgtacgataaagatgtctttttcaacaagacatccttccacatcctgtgggcaaccaaactttctctccaggaaaaacccaact

SEQ ID NO: 216531 - DNA, 592 bp, Glycine max
  unsure (1)..(592): unsure at all n locations
gaactgataatggaaacacttttattaagacttcaaatcacagcattcaagataatacaatacgcaacactttttagaaagccttataactataaactataaaagctttgcccagatgaaattacactgcaggcaaatttttcattcacctttagcttagttatcttcattgtcgcccaaattattctttgtcacatctttgtattagccctggatggcaacaccaaggggagcagcatccataggtattatcttctcaatttctacacccttgttgttctggttttcataggctgaaatgtgcactccaagtgctgctctaccagagggatcaaggttgttagaccaagcagcatcccactcaacagctttggctgtgctacatgcaacacttgctcctccaggaacagtgagcctagctgagttctgagggaagaacctctcaaagatcattctgtagtaatatgcttccttggtttttggggtgttgtgggggtaaatgttaccagcattaagcatcattttttcagtcacatgtnttgcagcatgggcctttaggccatcaatccaactatagccaactccatcactg

SEQ ID NO: 216532 - DNA, 592 bp, Glycine max
ggatattcaaacgaagccctatttcttgtcaaccagggcctctgaaaatttttaagtgcatagcatattttaactgtcatggtaaattattattacctacttcactgttccaaagaacaatctgattatgttttacagcacggaaaggagcgcagataagcaaagaaatggatttgtattatatactgtacatgatgctccacatccatgcaaaggagaaattttttccatcaagttgcctgcaataattctctgatatcgtacccttgaagctgcagaaaagtaagaaataatataactcctgagttccaaaaagaatggatagtgatgggagtgagaaggttgtgagtttgagcatatgaaaaccccaaagcagtccctagaacaaacaattggggaaattctccaggagtgagatgtgcaagggcaaaaacagcagcactaatgacaacagcaactggcgtaggaacccacttagtgagggaagtcataaaaaatccccgaaaacagtctcctaaggagtggagcagaacacctgtgatgcccaccagcaagcagtgctgagatttgagatcctattaacggaagcagc

SEQ ID NO: 216533 - DNA, 537 bp, Glycine max
aataaattattttttttaaagactaatttaatattagaatggggtataaacaaaattctgcatcactcatgcagagtcaaaatatcaatgaaaagcaacaaatccaaaccaaaacatgtttagagaaacagcttggaaggttctgaagctgccacaaattattagactaaccatgggactctaattattcattctaaggggggcccaagtttggatgaaatccagagctataaatgctacactgacttaccgtggcatattaaaaatgggggaaagctcactcctcctatctcactttgaactaatgtaccgatttttggtggaaaacttaaaaagcatataatgcttgtaaggcttttcttgggtcacaattgatgaagggaaattaggatgatttactgaatcagggaatgcttgagactccaaacatagtcctgcatgagcattgtacacatatccaccttttcccttaaatccttgatatatgtaccagtgtaaaattgcaaaccaggagcatttgtgacaactccacactct

SEQ ID NO: 216534 - DNA, 552 bp, Glycine max
ggaaaaccttcacaatacgaggtaagatctttattggctaatatcttttatatatatatatatataaataacaacaacaaagattgaacatatgtccttagataattggtaaataatgttcgagcatgatactattttttcaagcaacaagcaaggataatagaagaacaatttgagcaacactcgataagtgtgtttacttataaaattccataacccagaagccagagacactgcaaacgattttgatgccactgaatccagaacttaatgccaattccatgaattcatgttgggttctctcttttcctcctgagttttgagtcatcattaagaggtcagcttggaaaccactcttagcagtaactgtgctctcgggcaaaatgggaagaattaagtccacaacaatcacttttccatcactaggaatagctttatgacaattcttcaacaacttcaagcattgttcatcactccaatcgtgaagtatccactgaaaaaattggtatagaaaagccgtcacataatttaagatgtataagaaatttgacg

SEQ ID NO: 216535 - DNA, 511 bp, Glycine max
tttttttttttttttggaaaaccttcacaatacgttgtaagatctttattggctaatagcttttatatatatatatatataaataacaacaacaaagattgaacatatgtccttagataattggtaaataatgttcgagcatgatactattttttcaagcaacaagcaaggataatagaagaacaatttgagcaacactcgataagtgtgtttacttataaaattccataacccagaagccagagacactgcaaacgattttgatgccactgaatccagaacttaatgccaattccatgaattcatgtggggttctctcttttcctcctgagttttgagtcatcattaagaggtcagcttggaaaccactcttagcagtaactgtgctctcgggcaaaatgggaagaattaagtccacaacaatcacttttccattactaggaatagctttatgacaattcttcaacaactttaagctttgttcatcactccaatcgtgaagtttccactg

SEQ ID NO: 216536 - DNA, 554 bp, Glycine max
aaaatatctttagctgtattcaattaccaagttctcattggatcattggccacaaaaacaaaagcgccacacaattattgaaaatactatctttcaagcaaaattcgcaaaataataatttgaaccaacaccgatgcaaaatcctattagagcaaaaatacatcgatgcaaggaccaaataacagcattacaacattcacgggcaaaaccacaaacaaaactaacagaaattaaatctaaagtagcattgttcacaagagaaaataaattcgactaagttcaaagtaaaataattcatgaaacaaatttaaagcttgtcttcaaactcggagagaggagtcatctgttccttcaagcccttcctcttgcgaatgtcagtgacaagctgtgcagcttgtgatccagcctccaatgggtcagaagacatcatgtcccagtgatcaaaaacacattgtgggaaggcctggcctgatgttgcagccctcaatgtgctcgagaaaccaaaggactcgatgacagggaggtatgccttgaagttgtatagtggggaacct

SEQ ID NO: 216537 - DNA, 455 bp, Glycine max
  unsure (1)..(455): unsure at all n locations
gttaaggaaagtttgacaacctaagctaggttgancaaggatgttagggtgacaagggtagaatgttgtagtctatgaccgtgttgccgactaccatgctgtctggtgactggagaataccgttggactgcaaacatggaaaggatcatgaaagctcaagccctaagggacaacatcatggcaggatacatgtcaagcaagaagacaatggagatcaaccctgagaacccaattatggaggagctcacgaagcgtgcggatgctgacaagaacgacaaattcgtgaaggaccttgttctgttgctgttcgagactgctcttctcacttctggtttcagacttgacgaacccaacacttttggaaacaggatccacagaatgttgaaacttggactgagcattcgccaggatgcagttgaagctgatgctgatatccccccactggaggaggaggc

SEQ ID NO: 216538 - DNA, 496 bp, Glycine max
agcagattccattgagagggcaaataaatgcttcacatggtcattatgactcttcttttttctagggcgacactttcaacacacatcggcggccaggggatgaggaacaaaatacatgcagcagagcctggccaaaattctgtaaggctccactcctttcaaaacccacatcccacaggtttgggttttaaaaaagaaaggaaaaaaaggtacttaaaaaacctatatttcatttttatagacgaaacagctcggcctcaagccctgcaagcgttatgaggccggcacaaagctacaatacgcaggcttctggacataggggcagcaatgggggaaatatttgtacagagggttttctcacataaaatagcttagtgctttttttactcttgaaccaccttcaccggatagttcgttccattgttgaagctcggtcatatttatggattcagatgaaacacttgcacataccttgtgatgagcatatttgaaatct

SEQ ID NO: 216539 - DNA, 311 bp, Glycine max
  unsure (1)..(311): unsure at all n locations
ctctttctctctctctctctctatctatttantttattttgctctctctaaaatcctgggggagaacgtgcacagcaatggctacagaggccagctctctgattagggtgatgggtggcggctacaaggaggagcagcatcggactgtggggaatgagtcacacggtgagaaatcaacggctctcattactcgggacttgctcggtgggtcctcgattgaatcacaggaattggacctcgatttgcaggttcctagtggctgggagaagagactcgaccttcaggtttgttcaaatttcttttttctttcc

SEQ ID NO: 216540 - DNA, 626 bp, Glycine max
  unsure (1)..(626): unsure at all n locations
gtnaaaaaaaggaaaggagacttaggcgatgcnaanctnattaccggtacgacagctactactcggggccgcccttttttttttttttttgaaatgaatgtaagtattaaacaatactttcttttttggaccaattgggaattagtcttcctctaatttagtatatcactaaaattgcaatatatcatgtatctcattttcatacatacaaaatagaaatccacatttttcttttcctttttaatatcctctctggcacgatattgctacatctgttagcaaatatggaatacaactcaatgtgaaatggttgggagccagttttaaaatgatcccattatctatgctcttggccactgtggactcactacctcaagtgtgctaaagattaatcgcattctgctagcaacaactgacggtttctcagcctgacccatcacagccggctgttctaactgaagagtctttacaggaagccaagccattcccttcataaaatatgcatttgctataagggcacaaaagcctttccactgaagtctaacttcatctgacactggaggtgtagatgaccatctaacaatagttggttggggtgtacacaacatggtgatgaatataatgct

SEQ ID NO: 216541 - DNA, 499 bp, Glycine max
cattagttcttatccattaatttccattgaagtccgaaaacagaaaccaaaaatacaggatgatgaaatctcaaaaagcaaaaacaaatgggaatgtagtttaagtacaaacaaacaaagtggggtggcggctacaaatgctttgcaaatttttcacacttagaagcctgggggcttgtaggcgatgaagctgatgcactgcacttggcgaacgttgtcgaatccgatgatacggatgaagccgttggggtatgcagtcttagcctcttgaagctccttcaacacctgagaagcatcagtgcaaccaaacataggcagcttccacatggtccagtagcgtccatcgtagtatcctggtgacctgttgtgctcacggtacacgaaaccgtgctccaactcgaattccaagcaaggaatctatcccttcctaagaaggtattctacttcctttgccaattgtgcataatcaaggtctggcaggtgggaaagagtctcaaac

SEQ ID NO: 216542 - DNA, 346 bp, Glycine max
cattggacacagatacatgcgtgaagcggggtggctacatgtggaaaaattatactgttcgtttggcaaaattgcggatttcgcgccactttttagttcgcctggttcaggccgaacgctaagatgtggtctttcatcagcgacaggttgtagggcgtcacgtaaagatcagtgtctaccagggcgacaaagtctgttccattcacaatgatgttgatggcctcgaagaggaagccctcggggtggacagaaattcccgtgttttcgcctgtgacagtgacaggcgagtacttgactttgagctgctagatgaaagcggtgaacgcgggggtggtgccgttgatca

SEQ ID NO: 216543 - DNA, 413 bp, Glycine max
gttttggttagtttcattattgtagttcctaaactaaggctaagccatggcaggggatccttttgcatctatctcaggccctccccgcacgtgctgtgtaccttcatggctcttcttcttctgaccgtgtctcactctccttcccatcattctctggcctcaagtcacattctacatgcaaagcagcagcagccacgtcctcgcgtagaaggggtgcttgtccatccaccaacgttgttcgagccgctgcggttgagacactcgaccaaaccaccgaggtttctctggtggagaaatccgtcaacaccattcggtttttggccattgatgcagttgaaaaggccaactctggacaccctgttctccccatggggcgtgctacagtgggacacattttctacgatgagattatg

SEQ ID NO: 216544 - DNA, 420 bp, Glycine max
gtttaggtttagttgcattaaaacgtagtcattaaacttaaggcttaagccatggcaggggcatactttgtgcatatatctcaggccattctcgcacgtgctgtgtaccttcatggctcatctacatgggacagagtattactcttctttccatcattatctggccataagtgacattctacatgcaaagcagcagctgccacgatctcacgtaaaaggggtgctggtccatccaccaacggtgtacaagccgctgcggctgagacacttgatcaaaccaccgaggattctatggaggagaaatacgtcaacaccatttggcttgtggacattgatgcatgtgataaggccaacagtggtcaccctgttgtaccaatggggtgtgctacaatggggcacattgtctacgaagagataatg

SEQ ID NO: 216545 - DNA, 517 bp, Glycine max
atagatacacgtcgtcattaatattaaacagtactgttggcatcataaattctttcggaataattatacaaaagtgaccagtgaaaacccgatctgccagttgcccactgaataaaaacacacatcatattactatgggatgtcatacatgcattgtaatgagtggatattccaaagcaattggtccctttatccctccttaatccttatgccggaaatggcaccatcccttgcaaatgagtatagcttcttcagaaatagaataatccaaaggtagttgcagtatttatttgtcaaactataaaagtaaggacccttattcccaatcctagaagggtcccgatttgatttacaaaggtgggacaagatatgtatatacaagttcaaccatgtaacataatgaaacaataatcatactttggactttactaatgcacattacagggagatattatacactgaaacccttttgcagagaacttcaaggattggaaggaatactgacacaagcttgtgc

SEQ ID NO: 216546 - DNA, 464 bp, Glycine max
cagaggacacagatacatgcgtgaagctaggtagctacatgtggaagaattatactgtttgtgtggcagaattgcggatttcgcgccacttcttagttcgcctggtacaggccgaacgcgaagatgtggtcgttcagcagcgacaggttgtagggcgtcacgtaaagatcagtgtcgaccagggcgacaaagtctgttccattcacgatgttgttgatgtcctcgaagaggaagccctcggggtggacagtagttcccgtgttctcgccagtgacagtgacaggcgagtacgtgacgttgagctgcgagatgaaagcggcgaacgcgggggtggtgccgttgatcaatccgccgatcgaggtgttgtacagaccatcgtacgagacagtctcttcgggagccgaccagctgagctgcagctcatctcccggcttggaaagcgtcctgcggttgtgggtgatggc

SEQ ID NO: 216547 - DNA, 469 bp, Glycine max
cagaggacacagatacatgcgtgaagctaggtagctacatgtggaagaattatactgtttgtgtggcagaattgcggatttcgcgccacttcttagttcgcctggtacaggccgaacgcgaagatgtggtcgttcagcagcgacaggttgtagggcgtcacgtaaagatcagtgtcgaccagggcgacaaagtctgttccattcacgatgttgttgatgtcctcgaagaggaagccctcggggtggacagtagttcccgtgttctcgccagtgacagtgacaggcgagtacgtgacgttgagctgcgagatgaaagcggcgaacgcgggggtggtgccgttgatcaatccgccgatcgaggtgttgtacagaccatcgtacgagacagtctctccgggagccgaccagctgagctgcagctcatctcccggcttggagagcgtcgtgctggtgtgggtgatggccgcct

SEQ ID NO: 216548 - DNA, 396 bp, Glycine max
ctggtatgtaataagaacaactacttggtgctcattttaattccctcctttagcctttctacagaataaacagagtcaaagttcatgttgttgaagggaccattgactattcacttatggagcaacctggtcttggagctcccaagagtgagctcaagatcatctgttccaaaagaagcttcatggatcctctctcctttccaggcattcactaaacctgatgagctgcttccaaaggcaaattcatttgaaactgcttcagccatttggaatgtcataagtgtattcggagcctgcagctacggctggagaacatgttccacttgcccctggtgtcgaccacattcgggaaccgctgccaaccatagcatcttccttgaggccaaaagggttgga

SEQ ID NO: 216549 - DNA, 402 bp, Glycine max
ggttgaaaatacaaagcattggcgggcaaactaattgcaaaaccagacgtcattacaatttacatatcattttgtaagacattttggaagccttcaaaagtctctgccactcaactagaagggagaagttctttttctccaaatcatcaacacatttctgcaagatgaaaatttgaacatgagcatgtttagctctgtccagttcctcctcatattcctttttcttacaatttgcatcttcttgtagaatatgaatttgtaattccttttcagccaattcattttcattcaatttcaaaactctggaattctcttccctctcagaatataaggaaactagtagctcttctaccttttgaagtgcagactcccttttttctttttgttccaaaagcttcaatt

SEQ ID NO: 216550 - DNA, 461 bp, Glycine max
atgagttggcattttaaactttaaaaacatctgcataatcacacgggttaagggaagctacacaataagatcattgcttcactctcacatcataacccccaaatatatttattaggtaataacacactcaacagccaatattaataacataacataaaaaccaaaagtacttatatctccctcacttcatcttaaacctcatcctcactccagcagcattttagaatatacctgggaaatatactgccatcacaccctttaacaaatgattggttcacatctgcaccacctactccaaactcttcatagctcctctcaccacagcagtaacctttgatgtccaacgcaaacttgttaaatttttcgccatgcatgtgaatgagcaaaacaacaaaaaactctgctgggaccaaagcatgctaaaactctttccacaagatcacctagtgccatctcatcat

SEQ ID NO: 216551 - DNA, 513 bp, Glycine max
  unsure (1)..(513): unsure at all n locations
atccaccaattcctgggcatggccgttcntcctttctcatactcaagatctcccactggatctctaccatcatctcaacaaataaggcctaaaacaaaaccaaattccaagacaaacacatgctctctaatccactgctgccacagccaaacagaaccaatcgaactaaatggccaagccagatttcgagagaagaaccctgccactgcagttgcatcccccgtggttgttccaccaaggcctcgaaggataatccttgttaggcatggagagagtgaaggaaacgtggatgagagcgtgtacacaagaatacctgatccaaagatatccctcactgagaaaggaaaggtccaagcagaggaatgtggcaacaggataaagcaaatgatagaaaatgaccatgaccaacattggcaggtttacttctacgtctctccatatagaaggacacttcaaaccttgcagcacctcgctcgttcttttcaacgctctaaaatcgctggcttcagagaa

SEQ ID NO: 216552 - DNA, 464 bp, Glycine max
atagttagcgccatttaacatgaaattggggccgcagtaactcaacaagacccacgttgcccaacagatatggttaaataaggctattctgaagcaaaaagactttcatagccgggctatagacgtacgcatagagtgggtgattatggggaaggacttatcgcacaaaagggtggcgaaggaattcttggctccatttgtcgagtataggatatctctaactgctgaataactgcgaccgtgctgtttcctgaaaaatggggatccagaatgctatgaacacagaacctctactataccgccccaaacaactgtcctgcaagaaacttcttgtcctctagctcattctaaataggctgaagagccgcctatgactatacatcagtctccgcacgctctttatcaacaaccgtgaaaacagatttctaaacaggacccacaatgtgagcatatatgaatttgga

SEQ ID NO: 216553 - DNA, 469 bp, Glycine max
aaagttaacacattactgtgcaaataacatggtggggaatctgttttcatgtctaacacgttttgctggaatcgagtatgggcattttaaaaccatgggttatgtacttgtattcgcagaatttaatgataacactaaggttaggtagatttgagctcttttcatcaaaatactagtgtacatgtacttgttttcaactctatttacaactaactagttgaagtttctttggagggacctgcttaatcgattttcgcatgcacgtaatccacgaattcaaaattcttttggagttggattatggcaaaagctatggctgcgctgacaactgcgagtccagccataagtacacgcaactggaaatttgatgggatccctgatgttgcacaaaacacaacttgtggccccacttaggactttttgccttgtttggaattcctcatatgctgcttttcttgatgaacacttc

SEQ ID NO: 216554 - DNA, 525 bp, Glycine max
acaaaaataatttcaagttgtcattaatattaaacaataatggtggcatcataaattcttccggaataattatacaaaagtgaccagggaaaacccgatctgccagttgcccactgaataaaaacacacatcatattactatgtgttgtcatacatgcattggaatgagtggatattccaaagcaattggtccctttatccctccttaatccttatgccggaaatggcaccatcccttgcaaattgtaattgcttcttcagaaatagaattatacaaaggtagttgcaatatctatttgccaaactataaatgtaaagacccttcttcccaatcctagtagtgtcccaattgaatttacaaaggtgggacaagatatgtatatacaagtacaaccatgtaacataatgaaacaataatcatactttggtctttactagtgcacattacagggagttattatgcactgaaacctccttgcagagaacttcagcgattggaaggaatactgacacaagcttgtgctg

SEQ ID NO: 216555 - DNA, 418 bp, Glycine max
ggagggaatgtgcatgttactagcatttctctttatccatatagcaatacagtaaccctgctgctgatgaatttgatgaccataacacagtgacaaataagatcataagatgcaatgatttttgatatacaggacaataaaagaagcaatgcattaaagctgaaagtagagtgtatgttcatcttcaaaggagtgtaaaagagggtaatatatattttacagaatttccgaaagagcagaaaaaaggaagtaaagacaagaatgacttgtgactcaaatcctggaagggatcataggaatagtgtcctgtaagtatgcactggcagcagcaactccactttcaagctttacaggatagcccacatctttcagtatcatctccacaccagctagacatcccaacagttgcaactcattc

SEQ ID NO: 216556 - DNA, 403 bp, Glycine max
ggagggaatgtgcatgtttctagcatttctctttatccatatacaatacagtaaccctgctgctgatgaatttgatgaccataacacagtgacaaataagatcataagatgcaatgatttttgatatacaggacaataaaagaagcaatgcattaaagctgaaagtagagtgtatgttcatcttcaaaggagtgtaaaagagggtaatatatattttacagaatttccgaaagagcagaaaaaaggaagtaaagacaagaatgacttgtgactcaaatcctggaagggatcataggaatagtgtcctgtaagtatgcactggcagcagcaactccacttccaagctttacaggatagcccacaattttcagtatcatctccacaccagctagacatcccaaca

SEQ ID NO: 216557 - DNA, 468 bp, Glycine max
  unsure (1)..(468): unsure at all n locations
aaaccattctaccttctccaaaaccatcnctctctcatgttcgaagaaaacatacacggtctcttcaaactctaattttcttttccttccatttaatttcctcaatggcggcttccgtcgaccagcgtccgtaccccggcctccacaatggcgtcgttcggcccctcaaaccaggcccggatatcccgcgtcccaagaagctaccccagccgccgccgccactctcggattcctcaagcgacgaagaagaagacaccaccttgaacttgaaggacctgattcgcaagggaacaacggaagttgaatcctccattttcgacccgcgcgacgatggaacctctgaccactggatccaacggaactcttcccttgtccgtttaacgggaaagcacccgtttaactcggagccaccccttcctcgcctcatgcaccacggcttcatcaccccggtccccctccactacgttc

SEQ ID NO: 216558 - DNA, 504 bp, Glycine max
cttggaacttccaagaagctctccctttctagaaatgttatatgctccaagtgcagggggaagggttctaagtctggtgcttcgatcaccccgtgctggttgtcaaggaactggtatgaaggtttctataagacatcttggcccatccatgattcagcagatgcagcatgcctgcaatgaatgtaagggtactggagaaactatcaatgacagagatcgctgcccacagtgcaagggagagaaggttgtgcaggagaagaaagtccttgaagttattgtagaaaaggggatgcagaatgggcagaagataacattccctggcgaagctgatgaagcgccggacacaattactggggatatcgtctttgtccttcagcagaaggaacatcccaaattcaaaagataggctgaagatctttttgtagagcacactttgtcccttaccgaggccttgtgtggcttccaatttgtgctgactcacttggatagccgtcagctttttat

SEQ ID NO: 216559 - DNA, 387 bp, Glycine max
ttcgttttttttttttttttttgctctatagattgtagcaatgtaattcattatagacttatgggaatgatccattcatctaaaaatgtaacaccaaacatcaaaaacatggcaccaaggtagcatgggtagactgtcatatatactgtatataaacacttcttccagatctgggagcaatgataaatagctgacaccatcatgtataaatgttatggcaaccattaattacaatgataaaacagatttaacacggagcaaatgaagaaacatctgccatactaaagatagttaatagatttagctgatgtaaccctagagaagaggtgggttttgttttgcctgctgccggaccctcctcttgtactctgctgcaggctggatgaa

SEQ ID NO: 216560 - DNA, 501 bp, Glycine max
cccaaattcattttaatcctaatttcttatttcttgatcattcgatttttctcctcaggaggcagatattcgtaaaaactttgaccggcccgaccatcacccttgaggtggaatcctccgacaccattgacaacgtaaaagctaagattcaagacaaggaagggatcccacctgaccagcagagacttatctttgcgggtaaacaacttgaggatggtcgcacccttgccgattacaacatccaaaaggaatcaaccctccatctcgtgcttcgcctcaggggtggcatgcaaatctttgtcaagactttgaccgggaagaccatcacccttgaggtggaatcctcggacaccattgataatgttaaggccaagatccaggacaaagagggcatccccccagatcagcagaggctgatttttgccggtaaacaacttgaggatggaagaacccttgctgattacaacattcagaaggaatccacccttcacttggtgcttc

SEQ ID NO: 216561 - DNA, 401 bp, Glycine max
aggtgttgggatatttttcagaaattttgaacgagcaccacaaggaagtgaagacaataatgattcgggactcaaattttggaagggatcatatgaatagagatctgtaattatgcactggcatgagcaacttcattttcaagcttcacaggataacccacagtgtttgagtgtcatatctacaccagctagacatcctaaccctagcaacgcattcaagtggtcaatatgtccaattctgaaaaccttgccagcaaatttggtcattccacgatctaacctcagattgaatctcttacatgcgcttctaactattaaggactatcaatgaaggcaggaacagaaacaaaaattacagcgtcaccgtaccactcttctttttgggtgcaacacttcaaaac

SEQ ID NO: 216562 - DNA, 601 bp, Glycine max
gctattaaaatattgcaagatatattccatcgttctggcatatttttggttatctgttgttattgacaacatgaataaatttcttacaagaagggggaaacaaatatttggtataatcttctgttgaatttctaaaaaatatagaataaagaagcatagttcaaaaaagaaccaaaaaaaaggaagattggaattaggcaaaactcatactgttgaggcacttgtgtgaagttggactaaggaagcataaaatccaccactgatgttaatgagcttttcatgcttccctttctccactataactccattttttacaacagcaatcacatctgcattttttattgtagatagacgatgtgccacaaccacagtagttctgttcaccatgactttgtccaacgcatcttgaacaactctttctgactcagcatctaatgcacttgttgcctcatctagtagcaatatctttggacttttaattatggcacgagcaattgctacccgttgcttctgcccaccagataattgggttcctctctctcccactatagtatcataaccctgttgtaagccactaatgaatttatgtgcattggccatt

SEQ ID NO: 216563 - DNA, 527 bp, Glycine max
acaaaaataaatacaagttgtcattaatattaaacaataattttggcatcataaattcttccggaataattatacaaaagtgaccagggaaaacccgatctgccagttgcccactgaataaaaacacacatcatattactatgtgttgtcatacatgcattgtaatgagtggatattccaaagcaattggtccctttatccctccttaatccttatgccgtaaatggcaccatcccttgtaaattgtaattgcttcttcagaaatagaattatacaaaggtagttgcaatatctatttgccaaactataaatgtaaagacccttcttcccaatcctagtagtgtcccaattgtatttacaaaggtgggacaagatatgtatatacaagtacaaccatgtaacataatgtaacaataatcatactttggtctttactagtgcacattacagggagttattatgcactgaaacccctttgcagagaactccagggattggaaggaatactgacacaagcttgtgctgaa

SEQ ID NO: 216564 - DNA, 485 bp, Glycine max
catcacaagtttcataacatccaaattagagaccagtcatcttaacacaattccaacagaacattagacgatcaaaattcaattgaatcgccagatgtgataacaaacaaatagcacaattataaaagaaaaaaacttgggtgaatcaggaaaactgtctatatagcttccagagcttgcaggacatcagccttcaaatcctcaaaatcttcaactccaaagctgaagcgaaccaggttgtcataaatcttgtacttggccctttctgactgaggaagatcccagtaagacaaaatagcaggttgatccacaatgctctcacagccaccaaacgaggccgcaatatatgggattttcaatgaatcaataaattttattgtggtatgtagatctccatcaatctcaaaactgacaacaccaccgaaaccagtcatctgcctcttggcaagctcatgttcagggtgactcggcaagcctggatagta

SEQ ID NO: 216565 - DNA, 414 bp, Glycine max
aaatgactgattttttgcagttccatattatcttcaacctagggacaactgaaataaaaagtttaaatattgcaaaaacccaatcaactggtctttggatcaggcattggaaagaagccaacacttgcacctcttggcggttcaaaacccaagaacttgtgcacatttgttctgatgctgatggaacacaagaagtgcagaataggcagggaacaatcagaggggccattaccctgcaaccctacatgggtcatctttataataagcccaaaaggtctgaagggcaatttggaaacaaccttgccttctaagagttgaattaccatcccaaagaccaccaagagaaccagagcctccacacccccagacttgaacttgaagagagactggttacggctagattctttgaggctt

SEQ ID NO: 216566 - DNA, 365 bp, Glycine max
  unsure (1)..(365): unsure at all n locations
gctcttctttggctaaggtatcatncttgtctcatcccactaaggagaacaatctcgcggacttcttcatcgatctcggtatgggtggcccctctgccgctgtatcgaagactgccgctgctcccatcgagcgagtcaagcttctcattcagaatcaggatgagatgatcaagtctggtcgattgactaccccttacaagggtatcaccgagtgtttctctcgagtcattgctgaggagggattcaactcgttgtggagaggaaatcttgccaacgtttttcgatacttccccactcaagctctcaacttcgttttcaaggatcagttcaagcgaatgtccggatattcccaggctaaggatgga

SEQ ID NO: 216567 - DNA, 509 bp, Glycine max
aggacaaaaggtaaaggttccaaattcaatttaagtggacactttaacggaaaattatagaggaagacagtccaatatgaaaaatatagtaaaatcatctcaaacttggcatcttctctttgcacctaagacattgagaattctaagaatgttacacgcaagtcccatcacaacttctagcacttggatcagcacaaccttcaggaacagaaatatttacttgccaagtttgctttgcctccaattcaagattggaagaaagttcccctgttaatagcatcctcgttagcatttccaagtgcagcctcgttcaagtacttgtcagccaattggactctcttgacattctcttgttcttggacaagcatgttaccatacgtcaagagcttctccagagtcatcttgggctgctcaaaggttggaggtccattctatgagttcacaaagcttttcccaatgccgtcaacaccaacaccagaaatccactttctcacttcggcatcatatac

SEQ ID NO: 216568 - DNA, 274 bp, Glycine max
gtggaggatacggatcgctctgttggtgatttaggagcaacagtttcagcacacaggtggggactgcccggccaaatatcagtagaacccctgcagacattggtaatacaggggtgtaatctgaagacagaccgattgtagcatacggatcgctaatagtaaaagtgcaagaaaaaaaaaccattgcttggaaagtacttgacgaagaaaagcagggacagacagtattgatgaatagagcggcgactctgcatagattaggtatacaggcatt

SEQ ID NO: 216569 - DNA, 593 bp, Glycine max
  unsure (1)..(593): unsure at all n locations
aggacaaaaggaaaaggttccaaattcaatttaagtggacactttaacgcaaaattatagaggaagacagtccaatatgaaaaatatagtaaaatcatctcaaacttggcatcttctctttgcacctaagacattgagaattctaagaatgttacacgcaagtcccatcacaacttctagcacttggatcagcacaaccttcaggaacagaaatatttacttgccaagtttgctttgcctccaattcaagattggaagaaagttcccctgttaatagcatcctcgttagcattttcaagtgcagcctcgttcaagtacttgtcagccaattggactctcttgacattctcttgttcttggacaagcatgttaccatacgtcaagagcttctccagagtcatcttgggctgctcaaaggttggaggtccatcttttgagttcacaagcttcttcccaatgccgtcaacaccaacaccagaaatccactttctcacttcgncatcatatactctggccctcagtgcaccaaagaaatcaatggattggccacggaggtgtcaacaatctgacaacgtcctgttcaggaattgatc

SEQ ID NO: 216570 - DNA, 293 bp, Glycine max
gttgattattcgtcgttctgcattgatttggtccacactttcattacatagggggggattgccccgcgaaatagcaatagaacccccccagacatttctaattcgtggtctaattctaaaacattttgcttcaaacatatgaattgctaagagtaaaatccgggacaaagaaccgattgtatgggaaaaacttcaagatgttatgcagggacattccgcattgctgaatacagcgccgactctgcatagattaggtatacaggcatttcaacccattttagtggaggggcgtg

SEQ ID NO: 216571 - DNA, 476 bp, Glycine max
gggggattccgatattcggacgcatcaacttgttatgaaatcacattgatagcctttactcgggtcctagctcgtctaagagctagatttgcctcaattggttggctcttgccttccgccttattcaaattagcttctgctatttcaagagtttgctgggctttttggggatcaatggcactacccttttccgcatcatttactaaaacagggatctcattattggttattttagcaaaaccgcccatcagagccatcgttaaccattggtctttaagaagacgtattctcaaaatacctatatctacggctgtggcaataggcgcatgatttgggaatactccaatttgtccgctattagtagataaaatgatttccttcacttccgaatcccaaacaattcgattgggggtcagtacacaaagatttaaagtcatttcttcaaattgctctccatttctaagttcgtagctttc

SEQ ID NO: 216572 - DNA, 376 bp, Glycine max
atagctcttaagggggatctacaggtatcaactatatataacccgctattcctgaaaacccctaaacaccactgaaagaactacctggacactccgcaaaacatcttgcaaccttgaaccaccccttgtatccagtttgaaccgtgaaaaagaacagactcgcatcttttacaattgctctaaatatggggggcttgacaccttcatctacatcacctgtccttgtggacacagacagaaaatctttcgggctttcatcaattacagggggtgccaaatctaaaaaattcgtcgggttcaccgcagttggatcaaaaccaccctaagggtgcaattctcccaaaaaggccagctttcataataaataatccacctt

SEQ ID NO: 216573 - DNA, 379 bp, Glycine max
attgttcttgagggagatttacgcatatcatatatatataaccaagtgtgcccgaagacctttaagaaacactgaaaaaacttgctgcacactccgcaaaaatttttggtaccgagaacaacctcttgtaaccagcttgatccttgccaatgaacaccaccccatcttttgcaattgctaaaattgtgtggggcctgacaactataatctacatgacctgtctttgtccacccagacagaaaatagttccgccttccataaatcacaggtggtggggggaataaaaagattgccgtcgccaccgtagttggagcaaaaccaccctctgcttgtgctgttccaaaaaagggccgttcccctacttcggaatccaacttag

SEQ ID NO: 216574 - DNA, 490 bp, Glycine max
gcgcaaagagttaaacaaactttacatcgttacaaagaacttcaagacattatagctggccttggcttggacgaattatccgaagaagatcgcttaaccgtagcaagagcacgaaaaattgagcgtttcttatcacaaccttttttcgtagcagaagtttttaccggttcgccggggaaatatgttagtctagcagaaacaattagagggtttaaattgattctttctggagaattagatggtcttcctgaacaagccttttatttggtaggtaatatcgatgaagctactgcgaaagctacgaacttagaaatggagagcaatttgaagaaatgactttaaatctttgtgtactgacccccaatcgaattgtttgggattcggaagtgaaggaaatcattttatctactaatagcggacaaattggagtattaccaaatcatgcgcctattgccacagccgtagatataggtattttgagaatacgtct

SEQ ID NO: 216575 - DNA, 224 bp, Glycine max
gttattattcgggtcgctctgttagtgattttagtgcatcactttcattacatagggggggattgtccagcgaaatagcaatagaacccccccagacatttataattcgtggtgtaattctaaaacattttgcttggtacatatgaattgataaaagtaaaagtttgtgaaaaaaaaccgtattgttgggaagtacttcaagaagttatgcagggacatcccct

SEQ ID NO: 216576 - DNA, 575 bp, Glycine max
  unsure (1)..(575): unsure at all n locations
aattgtacacttggcactgtgttatataaattaggacctaagaaaggctatattttgtttgtatactagagctacttaagccagaggtaattagaaaaaccattcacaaggtttgctcattcttcacttgtccaaacagcaattatgcaggatggtaattgcacctctctaaagtaaaatgcctttctcctttctcgtggcacttggaagatcaatcaaaacttaaaaggcttagcctaagtttggttttctgttattgtctgaatggctgagagagacacatgcatggaactttcttataggccactggaacggttggcatactcttgaactaatgccccaaagagagatggcctttggagcaagttggctggtgaatcaaattctttggcccgccctgcatctacaactagaactctatcacagnccattactgttggtattctatgagcaatgctgatgatggtacgagctgcaaagtcctctctgatgaacttctgaataacagcaatcggttgggaatcaacagaagctgttgccttattcataaacaacagcctgttttgcttaagcat

SEQ ID NO: 216577 - DNA, 443 bp, Glycine max
aacatagatagcacttaagggggatttacacatagcagatatatataaccagctattattgaagatttttaagcaacactgaaagaacttgctgcactctccacaaaactttttgctcccttgaaccacctcttgtctccagcttgagccttgcaaatgaacagttttccatcttttacaggtgctctaattatgtggggcttgccaccttcatctccatcagcagtccttggcaacacagacagaaaatagttcggcttcccatcaatcacaggtgttgccgtctctaagatgttagccgtggccaccgcatttggatcaaaaccaccctcggcttgtgtttcgccgaagaaggcctgttttcctagtaaataatccaccttagagaggaactcttcgggtgaaccatagtcagtgatagacttcttatcagtcggagtgat

SEQ ID NO: 216578 - DNA, 500 bp, Glycine max
atcagaagacaggttcaaaccggatcaaaaaaacttgttacgatggtttcttccgacaaggatccacgagaggaagtccttcaagcatggtacatggatgatagtgatgaagatcaaagactcccccaccacaaagaacccaaggagtttgtctcgttggaccaacttgctgaacttggagtccttagctggaaattagatgctgataaccatgaaaatgatccagagctgaaaaagattcgtgaagagcgtggctacacctacatggatgtttgtgaggtctgcccagaaaagttgccaaattatgagcagaaaatcaaaagcttctttgaagaacatcttcacactgatgaggagatccgcttttgtgctgctggaagtgggtattttgatgttagggattgcaatgatgcttggattcgagtgtgggtcaagaaaggaggaatgatcatcttacctgctggaatttatcttcgctttacactagatgagagcaacta

SEQ ID NO: 216579 - DNA, 495 bp, Glycine max
aattgaatcttattaataagaataaagatagtacttgatagcatggttttacaaatcaactaaatatatgacatagcttaaaatgtactataacttaaatgaatatgtagttataatattatggctatctttcaaagggtcacctacacagaaacacaggcgtgggtaaaaggcttaaagggtcatctacacaaaaaccataacataaaaagctgggaccctttatttaaaggcaccattattttcatttgttcaaaccttactttagcaacacaaagtctcagtcccacgtactacgattaggcggaaccagatcttacgcggcggcatcaacagcatggttgccaacatccttttccacaaaatccttgacatattgttgtcttgcagggagatggtcatttggacgattgtgtggagttcaaactggctcaccaacaaaaaaacgcaaagccttaatgtagctgctctcatctagtgtaaagcgatgataaa

SEQ ID NO: 216580 - DNA, 589 bp, Glycine max
  unsure (1)..(589): unsure at all n locations
ggcccagttctcacagttacgacttattcaatgcttgagcatgtgaataagttgctggagataccaggatcaaagttgctattcgggggtagtcctctagagaaccattcaattccacctatttatggtgctattaaaccaacagctgtctatgttcctctcgaagaaattatgaaggataagaattttgagcttgtaacaaaagaaatatttggaccatttcaggttatcacggactatcaaaacagtcagctagcagttgtattggatgctttggaaagaatgcataaccatttaacagctgctgtagtttcaaatgatcctttgtttttacaggaagtcattggcaaatcagtaaatggtactacttatgctggtttaagagcaaggacgaccggagctccacagaatcactggtttggacccgctggtgatgctagaggtgcaggaattggaacaccagaggctataaaacttgtatggtccggccacagagaaataatctatgantttgggcctgtgccaaagaattgggaagttcctccttctacttgagaaaagtcctatttatgataggaacaacgaaatt

SEQ ID NO: 216581 - DNA, 475 bp, Glycine max
agataagatttttttttttacagcattagatatgaattatttattctacactgttcggcatcaatacaatttgattccttttatcatgtcagcacctcaaccgatgatgatctcaccaattatatttcagcaataaaaaaaaagcctaataaaatatttttttttcataaatttattctaaaatctaaaaatgtcatggaggggctgtggcatatcctacatgcaaatatgcttcctcttacattcttactcatcgcttctatcataaataggacacaccctcctaatttcgttgttcctatcataaataggacttttctcaagtagaaggaggaacttcccaattctttggcacaggcccaaaatcatagattatttctctgtggcaagaccatacaagttttatagcctctggtgttccaattcctgcacctttagcatcaccagcgggtccaaaccagtgattctgtggagc

SEQ ID NO: 216582 - DNA, 551 bp, Glycine max
ctcatacaaaggttgctgtaggagataagattgcagtagtgctaagtgctaacacctgcagtgaacaatggcctctgcatcagcatctctgctcaagtcttcacttgttcttgacaagtctgagtgggtgaagggacaaacccttcgccaaccttctgcatcagttgtgagatgcaaccccaccaccccatcaggcctcaccatcagagctggttcctatgctgatgagctcgttaagaccgcgaaaacagtggcttcaccagggaggggtattttggccatggatgagtccaatgctacctgtgggaagcgtttggcttcaattgggctagagaacactgaagctaaccgccaggcataccgtaccctcctcgtgacagttccaggccttggtcagtacatctctggtgccattctctttgaggaaacactctaccaatccacaactgatggcaggaagattgttgacgtgctgcttgagcaaaacattgttccttgtattaaagtcgacaagggtttggtgccccttgcaggttccacgacgagtcatg

SEQ ID NO: 216583 - DNA, 513 bp, Glycine max
gccgagcttaaaccattttgttatatattgagacataatcaagtacacaactcatagcaaaaggtttattaagctgtaaaggtgcatttaaccataaacaaaaatagtctccaagactataaaaacattacattttagacaaattagtcttccacttcatcgtccgtcaacacctactgtaactgctggtgttgctgcctaacaagtatcatattcactgcaaacatcttagtaggagtagcttttgacgaacaactccttcttggcttcctcggattcaccctcaccagtgtacttcccaagctgagcgagtgagttggacttggcacggaatgcgagtgcatcttgtgctgccttcacgttctctgggcggcctccccatgtcttcaaggcagtgttttggagggctctggcatacgagaatgacacgtgccacgggtttggagattggttcatggcattcaaattgagggtagcttcaacctcagactgtccaccagacaaaaacataat

SEQ ID NO: 216584 - DNA, 371 bp, Glycine max
ggttaaaaaacttatttagtgcattttaccattaaacaataataacccgtccaagacctcaagcacgaacaaaaaaaaaaaaatgaggggggcatttaatcaaccaacaacaaaaagagggcgatctttagggaagaaacacaaacataaaaacccaagggaaaaaaaaacaaagaaatgtctaaggaaaaataccgctgaaagaactccacagggaaaagccaacaaaccaaggtgactacttctttttcggagcaaaaaaaggccccaaatgagggagaaacaaactcaggcccaatggtccacagaacgtcctttaagagcttctaggcattattacggacgaacctgtcccccaaaaacaacagggg

SEQ ID NO: 216585 - DNA, 635 bp, Glycine max
  unsure (1)..(635): unsure at all n locations
tgtnnnnannnnggagggggagccagtcnacagatnctgtangaccnnctcatngcacttgtacgctaagctcgcgaatntcggcttcgagagattgagacaggctccccacttaagaagaattgcatagtgtataatggtcggggtgaaagaatatctgaacgtgttgagagtatcacgtgttagaggcattttgtctttgagtggcggcgaaatggctggaatgatctatctacaacgttgtttcacgatgccatgtatnatgtcttcagaacaaccaaccatacctttcaatggttcttatctctgagctggtggaaagcaagtgtatcttgttaccacagttgttatgctagagaaacaangttcttggagaagtgaatgctgagcttcttgacacccaagtgaatcctgctgtgtgggaaattagtggacacatggttttaaagaggaggaaggattatgatgaggcgtctgaaggcaatgcttggaggcttcttgctgaggtgtccctttctcaagagaggtttcaagaagtcaatgatctttgttttgaagccattggctgtggtgaattggaggatgtcaatgttcacagtgtcaaaagagaagttgatgcagtcagcacaagcgaa

SEQ ID NO: 216586 - DNA, 457 bp, Glycine max
ctttgatgaaaacaaattcaattttactaaagtcgggcaagaagaggtcctcttgcaatttgaagctagcgaggatggacaagtccacttctttccaaatgctccagttgatgttgacaattctcccagctttgttgccatcaatgtcaatactattgagtatgggcatgtcttgctgattcctcgcatatttgagtgtatgcctcataggattgaccgagagagcttcctccttgcactttagatggcagtggaggccgataatccttattttcgattgggtgacaacagcttgggtgcttttgcaactatcaaccatcttcacttacaggcttattatttggctctgcccttcccagttgagaaggcccccactaagagaattgcaagtgttaatggtgggtgtgagatatctgaactgttgacgtattcggatcgtggcttttgttttgacggc

SEQ ID NO: 216587 - DNA, 424 bp, Glycine max
gcagacttaacagcagcacacagcgggttactgtctgttcaagctaccatctctctctctgtttcttagtgcctccttgccaggtgctgccactctctctttctctctcttcatccttctgttgggttggttgtggagcgttgtgatctggtgtgcacgtgccgacattctttaccctcgccacagatctgaagtgttcaagcttggatcctgtgcttctggccgtaaatatggcccaagaaactttcctattcacactcgaatcagtgagcgaggggcgccctgacaagctctgtgaccagatctccgatgctgtgctcgatgcatgcttggagcatgaccctgacagcgaggttgcctgtgaaacctgcaccaagaccaacatggtgatggttttcggagagatcacaaccaaggccaacgt

SEQ ID NO: 216588 - DNA, 469 bp, Glycine max
gcaaacttaacaacagttcagagcgggttactgcctgttcaagctaccgggtctctctctgtttcttagtgcctccttgccaggtgctgccactctctctttctctctcttcatccttctgttgggttggttgtggagcgttgttttctggtgtgcacgtgccgtcattttttaccctcgccacagatctgaagagttcaagtttggatcttgtgcttctggacgttaaaatggcccaagaaactttcctattcacatccgaaccagtgaacgaggggcaccctgacaagctctgtgaccagatctccgatgctgagctcgacgcatgcttggagcatgaccccgacagcaagggtgcctgtgaaacctgcaccaagaccaacatggtgatggttttcggagagaacacaaccaaggcccacgtggactatgagaagagtgtgcgtgacacatgcccgaacattggttt

SEQ ID NO: 216589 - DNA, 465 bp, Glycine max
aatattaatggatactctctataatttggggtgattacgtatttctagcataaaacttgagagaacatttttttttgttccatcatataaaaaatatatggactgaaagaacacattcatcttctcaaaaaaaagggggacattcataaaaactttcagaaaaaaaaaaaacagaattgcttacgagggaaggaaacatagagaacatttcacctatttgataatcagaagcctgtagtagtgcaaaaacccctttccaagagtgcagaaaccccttttaattaaccacgaaccttctcccccttgagtgacttcaccacttcccatgtgaagtcagggacatctctgtcaaaaagtccatatgccaaactctttaagaacctgccgattccacccctctcgaaacaaggttgacggaaagcatgcccagcctgaaaaaaaactttcttcacaatgcttagattt

SEQ ID NO: 216590 - DNA, 532 bp, Glycine max
ggcccagttctcacagttacgactgtttcaatgcttgagcatgtgaataagttgcttgagataccaggatcaaagttgctattcgggggtagtcctctagagaaccattcaattccacctatttatggtgctattaaaccaacagctgtctatgttcctctcgaagaaattatgaaggataagaattttgagcttgtaacaaaagaaatatttggaccatttcaggttatcacggactatcaaaacagtcagctagcagttgtattggatgctttggaaagaatgcataaccatttaacagctgctgtagtttcaaatgatcctttgtttttacaggaagtcattggcaaatcagtaaatggtactacttatgctggtttaagagcaaggacgaccggagctccacagaatcactggtttggacccgctggtgatgctagaggtgcaggaatttggacaccagaggctataaaacttgtatggtcttgccacagagaaataatctatgattttgggcctgtgccaaagaatt

SEQ ID NO: 216591 - DNA, 510 bp, Glycine max
ggcccagttctcacagttacgactgattcaatgcttgagcatgtgaataagttgcttgagataccaggatcaaagttgctattcgggggtagtcctctagagaaccattcaattccacctatttatggtgctattaaaccaacagctgtctatgttcctctcgaagaaattatgaaggataagaattttgagcttgtaacaaaagaaatatttggaccatttcaggttatcacggactatcaaaacagtcagctagcagttgtattggatgctttggaaagaatgcataaccatttaacagctgctgtagtttcaaatgatcctttgtttttacaggaagtcattggcaaatcagtaaatggtactacttatgctggtttaagagcaaggacgaccggagctccacagaatcactggtttggacccgctggtgatgctagaggtgcaggaattggaacaccagaggctataaaacttgtatggtcttgccacagagaaataatctatgat

SEQ ID NO: 216592 - DNA, 521 bp, Glycine max
agataagatttttttttttacagcattagatatgaattatgtattctacactgttcggcatcaatacaatttgattccttttatcatgtcagcacctcaaccgatgatgatctcaccaattatatttcagcaataaaaaaaaagcctaataaaatatttttttttcataaatttattctaaaatctaaaaatgtcatggaggggctgtggcatatcctacatgcaaatatgcttcctcttacattcttactcatcgcttctatcataaataggacacaccctcctaatttcgttgttcctatcataaataggacttttctcaagtagaaggaggaacttcccaattctttggcacaggcccaaaatcatagattatttctctgtggcaagaccatacaagttttatagcctctggtgttccaattcctgcacctctagcatcaccagcgggtccaaaccagtgattctgtggagctccggtcgtccttgctcttaaaccagcataagtagtaccatttact

SEQ ID NO: 216593 - DNA, 440 bp, Glycine max
gttatatattgagacataaggaatttcacaatttcatagctaaaggttattaagctgtaaaggtgcatttaaccatgaacaaaaatagtttccaagactataaaaacattacatattagacaaattagtcttccactttatcgtccgtcaacacctactagaactgctggtgttgctgcctaacaagtatcatattcactgcaaacatcttaggaagagtagctttagacaaacaactccttcttggcttcctgggattcaccctcaccaatgtactttccaagctgagcgagtgagccggactaggaacggaatgcgagtgcattttgtgctgtcttcacgttctctgggcggcctacccatatatataagggcaaagtttcggaaggctctggcttaccacaatgacacgtgccacgggttttgagattggttcatgg

SEQ ID NO: 216594 - DNA, 466 bp, Glycine max
ctcatacgaacgttactgcatgagatattatggcttttaaactaacaactcacacctccggggaacaagggcctctgcatcaccatctctgataatgtcatcacttggtccccacaagagcgagtgggtgaaaggacaaacacattggcagccgtcaacatcaacagtgagacgcaacaccaccaccccatcccgcctgaccatcatagctggctcctatgcttaagagctcataaagaccctgaaaacagcggctataccagggctgggaatagcggccataaatgagtccaatgctacctgtcggaagctgatacgcttctatatggctagagaacactgaagctaaccaacagacataccgtgccctcctcgtgacagctacagaactatgacaatacatacctggcgccactctatatggtgaaacactctatcaattcacaactgatggcaggaagattgt

SEQ ID NO: 216595 - DNA, 444 bp, Glycine max
gttatatattgagacataaggaagtacacaactcatagcaaaaggtttattaagctgtaaaggtgcatttaaccataaacaaaaatagtctccaagactataaaaacattacattttagacaaattagtcttccacttcatcgtccgtcaacacctactgtaactgctggtgttgctgcctaacaagtatcatattcactgcaaacatcttagtaggagtagcttttgacgaacaactccttcttggcttcctcggattcaccctcaccagtgtacttcccaagctgagcgagtgagttggacttggcacggaatgcgagtgcattttgtgctgccttcacgttctttgggcggcctccccatgttttcaaggcagtgttttggagggctctggcatacgagaatgacacgtgccacgggtttggagattgggtcatggcattc

SEQ ID NO: 216596 - DNA, 528 bp, Glycine max
ggtgaaaaagggggagttcttattccttttagacgcttcattgatcggcgatttctgatacatggcggagcatcacgaacacgaggaagtgaagggtgagtccttgttggagaagatttctgggaagatccacgaccactattcctcgtcttcgtgggattccgacaacgacaaaaccagcgccactgattccttcaagtctaatgttttcaggcttttcggcagagaaaagcccattcatcatgttcttggcggtggaaaaccggctgatgtttttctatggagaaacaagaagatatccgcatcgacactcggagttgcgaccgctatatgggttctgtttgaattgcttgagtaccacctcctgactttggtttgccacttcctgatccttgctctggcggggttgttcttgtggtccaatgcattcactttcatcaacaagagtccaccaaagatcctacatgtgcacatttcagaggaacctgttgtaaaattcgcctctgctattagaattgagatcaatcg

SEQ ID NO: 216597 - DNA, 509 bp, Glycine max
ggtgaatccctggctcaagttttgtggttgattggtgtggaaccagtggctgatacctttggcagggtaaaccgggtggaacctgtaagtcttgaagagcttggaaggcctaggattgatgttgatgttaattgctcacgagtgtttagagaccttttcatcaatcagatgaatcttctggatagagcagtgaagatggttgctgaattagatgaaccagcagagcaaaactatgtaaaaaagcatgcatcaaaacaagctcaagcccttggagttgaagttcgagaggcagcaacaaggatcttctccaatgcttctggcttctactgctcagacataaacttggctgcggagaattcttcatggaatgatgagaagcagctccaagacatgtatcttagcagaaagtcttttgcttttgattctgatgcccctggtgctggcatgactgacaaaagataagtcttcgagatggctctgagcacagtagatgccacattacaaaattt

SEQ ID NO: 216598 - DNA, 418 bp, Glycine max
gttgaagaagaaaattatgaacttgcacctttttttggttaccggggttggtgttcaaaactggacaaaggatacttgtttttcaaaaatgggaaaagggaaacagaaatcgcatttaaggggtgctcttcttttcactggggtgggctcttttcaataaaagcttttaacttcagggatcaatgccgttaattttgggttccacttttgaatacaactgcctgggcttttgaatttttttttctgaaatttcccaataaccacgtccattgggttccaaaaatgtttgcaccggtttcctgaaggagtttggattaccgctcacgagcttgttcaggctttgtctatcttgaaatgaaaaatgggttggcctttttaacccccccggtataaacttggcccgaagtgccactccccc

SEQ ID NO: 216599 - DNA, 487 bp, Glycine max
ggtgaatccctggctcaagttttgtggttgattggtgtggaaccagtggctgatacctttggcagggtaaaccgggtggaacctgtaagtcttgaagagcttggaaggcctaggattgatgttgctgttaattgctcatgagtgtttagagaccttttcatcaatcagatgaatcttctggatagagcagtgaagatggttgctgaattacatgaaccagcagagcaaaactatgtaaaatagcatgcatcagaacaagctcaagcccttggagttgaagatcgagaggcagcaacaaggatcttctccagtgcttctggcttctactcctcaaacataaacttggctgtagagaattcttcatggaatgatgagaagcagctccaagacatgtatcttagcagagagtcttttgcttttgattctgatgcccctggtgctggcatgactgacaaaagataagtcttcgagatggctctgagcacag

SEQ ID NO: 216600 - DNA, 375 bp, Glycine max
aagaaaacgattatgaacttgaacctttatttgttcaccggggttggggttaaaaactgcccaaaggagacttgatcttaaaaaatgagaaagggaaaacaaaactcacatttaaagggggctcttttcttcactggtgggggctcttttcaaaaatagctattaactttagcgaacaatgcctttaattttgtcttccacttctgaaaacaaatggctgagcttttaaatattatcttttgaagtttcccaaaaaccacgttcattggtttccaagaatgtctgccccaattttcttaaggagtttggattaccgctcatgaacttggtcaacatttgcccatcttgaaagaaagatgggttgggttttttata

SEQ ID NO: 216601 - DNA, 400 bp, Glycine max
gttgattgacattgtgaggatggatttcttattttgtactgaaaatgggaacaccaaggatgagctgagttacctacagatgagagtctgcttactcagataaaggatgggtttgctgagggtaaggaccttgttgtgtcagttatgtctgcaatgggtgaggagcagatttgtgcactgaaggatattgggccaaagaactagcctcaattgctggtagtttgctgttttcatttatgcaaaagttatatttttttgtatgatcttgttaaaccccggagttatggagactctaagtcagactatttttatcaactgtgtttatggatgtgacagaaactgtttaacatttctctggttcgatggtgtctagatatttttttgataaaaatccactatc

SEQ ID NO: 216602 - DNA, 612 bp, Glycine max
  unsure (1)..(612): unsure at all n locations
aaaaaaaaaaactcagatagaagagagagaaagggaagaaagagaaagaacaaagaaggggaaaaataactgataactgagataacaataccatagatatagagagatagttccgagctccaattcccagaaaataaaaattaaaactttgcttcgctttttctcttcattgtttttcttcctcttctacccctttgatctcatgcaatctcccctcatggatccctttgatttgattcgcaaaggggtttaattgcttgagatctcgtaaaggttttggctttcgtaatggaagggtttggctgaagctatctggaatatttgtgttacatttttggaggtccatctatgttttagtcattttgtccatattcttgtcaataatgagcttatccaagaaaggttcccaaacagacacaaaactgagctccttaaacaaagcaacctatttgaatccaaatgcagcagagtttgttccatttgccctcagatcatcgccatctggaagcaccagctcggtagatgcagcagcgaggtttactactgctggatctcttgggaaagcagtnttagatcgatcagaatcatccatttcaaataattccgatgatg

SEQ ID NO: 216603 - DNA, 552 bp, Glycine max
ggcttggccattgccattacttcccatatacagatacaagaatgactacaatgtctgtgttcatgatggattttttttttactgtcagaaacttgtatacctcctcggctcaatatatcacaacacgaagcaggcctggctgcggttccgtgaaatcaaggccttcttcttcaagtagataacgctgtacagctatcgggagtcttgcgggagtgcgggagccccgagtatggtgaccagtgccaacacagatgtaaacctgcaaacgctgctcagcggctctggccgtgcttcttagcacactcagttcgtgtttcagcacgtgaatcgcttcacttacgtgcagaccgtgtaggtctatcattctctggtgccctcttccattctctggagcaacgggattcctctggcggtaaatagattcttgagcttttccatgagctgctttcatatgcatgttgtgcagttgccccttaacacttagctcctttgcagggccttgttccaataaggaggcttgtcggcctgctaaaatatgcttaccaagcgtgc

SEQ ID NO: 216604 - DNA, 496 bp, Glycine max
atttgacaggttcatcatcataacctttaatgaaaataaatggctgaggcaagcattggcagcaaaagcagcagatggtctttacagggaatgacagctctcgtcaccggtggatccaaaggaatcggatatgctatcgtggaggagttggcacagcttggagccactgtgcacacttgcgctcggaacgaagctgaactcaatgaatccttaaatgaatggaacacaaaaggatacagagtaactggttccgtctgtgacgcggcgtctcgtgcaaaaagacaagacctcatagctagagtctccaatgagtttaatggcaaactcaatatccttgtaaacaacgtgggaacaaacgtaccgaaacatacccttgatgttacggaggaagacttctcatttctgataaatacaaatcttgaatatgcttaccacctaagccagcttgcacatcctcttctgaaagcattagaggctgcaaacatcatttttatat

SEQ ID NO: 216605 - DNA, 555 bp, Glycine max
gaaaataaaataatactttattattaaaattaaaattgattacatgatgattggatcgtggacatacaaatttattcccaacaaattccccctcccaaatgatatagattgaaccaagggactttcagctatttattctcaatactaatataaaaactagcaacgtatgcatcagaccttgctcttaacatagtttatataaaaatgctaacaacacattatcttatacactcttttcaatacattttttttattgcttgaaattttttagatatcacaaaaatatatgggtcctagatcttattttcatgattttgtaattttttattatttgtaacttatggtagaatatgtgtcaagagaagtgtgttagagagtgtgttggtagtacttctctaatttatatagagaccattcactgttaatccaccatcaacacaaatggtctgtcctgttatgtaagaggctgcaggtaagcagaggaatgccaccaatgaagacacttcctctgcttctccaatccgtccaaggggggtttgcgaaatgaaagcatta

SEQ ID NO: 216606 - DNA, 501 bp, Glycine max
ggggtcccaaatttctaatatataaaagtataatggttctcatacagatttttctgctacacaggtgtagttacattagtgaaaatggagttaaacacaagggaactgcaaaagggagcaaaagattgcattgcatgtaggcatcctcattgtccagggacaaagttagtggcataagcccaagcattgttggcaacaggatcagcaacgtggtcgtaaaggttctgaatagggcccttgccagtgacaatagcctgaacaaagaaaccaaacatggagaacatagccaagcgaccgttcttgagtttcttgaccttcaactaagcgaatgcatcatggtcatcagccagaccaagagggtcaaaagctccaccagggtagattgggtcaagtccttcaccaagtggtcctccaccaactctgtaaccttcaacaaaccccatgagcacaacctgaacagcccaaatagcaaggatgctctgagcatggatcaggtttggg

SEQ ID NO: 216607 - DNA, 347 bp, Glycine max
aaaacactcataacacaaagcacaaatctttgcttatactcgagttaaaaaaaggcagcagcttcttccatggctctctcattcccatccttgactggcaaggtcgggaagctgggcccatcagcccaagacgcgggaacggtgagcatgatgaagaccgtcaccaagcacgactactaacgaagcctaagggacgggccaaacccagtcaaggacttgggcccattctatggcgagaccgcgtgctacctaaccggcgtgttcccaggccactacagctgggacactgctgggcttaacacataccctgatacctgcgacaagaaccgtgaactcgaattgaacca

SEQ ID NO: 216608 - DNA, 460 bp, Glycine max
gtaaaatgcaagtaacattaagttggattcggatacgcaagataattcacattatctgaagtacttcaccaaacacaaatctaaaaactctcaaaagtcatttcgttctttgacgctcactttccggggacgaagttggtggcataggcccaggcgttgttgttgacagggtcagcaaggtgatcggcgaggttctccaatggaccctttccggtgacaatggcctgaacaaagaagccaaacatagagaacatggccaatcgtccgttcttgagttccttcaccttaagctcagcaaaagcctctgggtcatcagcaaggcccaatgggtcgaagctgccacctgggtagattgggtcagtgaccttaccgagggggccaccagcaatactgtaaccttcaacggccccattaggataacttgtgtggcccagatggcgaggatgctctgggcgtggat

SEQ ID NO: 216609 - DNA, 441 bp, Glycine max
gcaattgacgttaaaagctttagccttttctacaactacaaacacaaagacatcatcatccagggctgcctccgtctccactgtcggagctgtcaacagagctcttttgaacctgaatggttcttgagctggagcttcagctcccaggtcagtcttctttgggaccagcttgaagaaggttattgcctcatgggtccgcaacagcatggatttccgtggaagcttcaagattgttgctgtccaatagaagaaagagattgaagagacccattacacctacaaagacagatggaagggtcttgcctatgatctctcacactaccaacatgacatcacaagaggaaagggctaggatgactctcttttacaagctccacacgatgctggaactgactatgcagccatgagctcctacgagtacctgagcactggactttgaca

SEQ ID NO: 216610 - DNA, 474 bp, Glycine max
cttggtaacttcatcagtttctttcttttttcaacagtgtcaaatatcaccaagaaaaatggtcacaaggggtggattttgaacaatctgaatgagtctcatcttgactactactatgcattttttgcaatattaaacttcctcaacctcatcttcttcgcgtatgttactaggtactatgtatatagggttgaagtttcagattccatagacaagcttgcaaaagaactgaaggaaaagaccgtgtccaacgttgtgaatccaaaagactagttgattggggtatctaacgggagaaagaggattaagaccgtgaaaagtttcaaaactactctatgtacaaatttggatggccaaagaactagatatgtgtgtgtctgtggggggtgtgtgcctgttaactctggagtggctttggtcattggaagtcactttagaagagaacctaatcaagttattataggtattgggggg

SEQ ID NO: 216611 - DNA, 380 bp, Glycine max
gggaacgatgtgaccaagttttttgtatcagtggctttgcattcatccatgcgaactctgtggctgatataatagctgttgaggccgtgccggtagaccgaattgatgtgaatctagtccagaggggtctccaagagttcactcagaaactgaactcagccacaactgatttggagaaagctgaagctcagattggggttgatgtccatagcgctctcaactctgctctttcaggctaataataagtactcgagtgttgagtcttgccttttgtatttgattatttccccccactgtgcggcattgatttgtctcggtgtaatcaaagttgctaaaagaatatattcatcctgaatctctgtgtagaaagtggacttgat

SEQ ID NO: 216612 - DNA, 270 bp, Glycine max
aaaaaacaagggcttggccaacatccttgagctaaattgaagctgttgaaatattattttatcaagcccactttcaacacaaaaattcaggatgaaaatttttttttagcaactttgattacaccgaaacaaataaatgccacacaggggggggaaataaacaaatacaaaaggcaagactcaacactacagttcttattatttccctgaaagagcagagttgagagcgctttggacaataaccccaatctgggctttagctttttccaa

SEQ ID NO: 216613 - DNA, 389 bp, Glycine max
cttccttcttccttctaatttttgttctttctcttgtcacttctcacacaccacgtatctgggtttttttttactttcccctcaaaaccaaaatcaatggaaggatcatgatccggtgtggttacagtgtacggccatggtgcaatcaccgagaccaagaactaccccttctacgttaaagtgggcctggcccagatgcttcgcggcggcgttatcatggaccttatcaacacagaacaggcccttatcgtggaggaagccggatcctgctccgacatgggccttgagcgagtgcccgacgacatacgcgctcagtgcagctttgacctgatgagcgacccgcacctcatcaaagacatactgcggtccggcaccattcccgacatggc

SEQ ID NO: 216614 - DNA, 415 bp, Glycine max
gcccaaagagtcatctatccattttttgttttttttgggtttcctaaacccaactaacgcggttcaaaacacaaaaaaaaacaaaaaaacctacccttattttaggaaacaactaaaaacactagcaaacccataatttaaattgaaacgccccataacaacaaatcattcatattcattcaaagcgattggcgaaccctttaaccttgccattggtgaaattgataccaaccatggtttcccccaaaccacaactaacctttgccaaaaccttggggtaactgaaccgagtgactgcctgaacaattgccctcgcacgcttcgggggatcgccggtcttgaagaccccggaaccaaccaagaccccgtctcatccaaactgcataatgagcgcggggtcggcgggggtggcaac

SEQ ID NO: 216615 - DNA, 469 bp, Glycine max
attgaatatgccttctcccgcccaattgaagcccttattttgctcttggaataactggacaaaacttgcaggtagctgttctttgaagagaaaagatagtgacacaacagtagagagacgagattattgctctgccgctggtcagtcaccaccaccagcgtggccaggaacagctattgccgagccttctgatttcaagacatgggatgggcaaaaacctatttctgtcttaggatctacgggttcaattggaactcagacactgagtataggggctgaggtcccagaaagatttaaagttgtgagccttgctgctgggtctaatattactcttcttgctgaccagattaaaacattcaagcctgaagttgttggtcttagaaatgagtctataattgatgaactcaaagaggctttggctgatgtggatcacacacccgacatcatgcctggagagcaaggagtgatt

SEQ ID NO: 216616 - DNA, 479 bp, Glycine max
cttaagctataacttttattgaaacccttttaggagtacatatactttatatagctacccctttacattttacaagattgatgaaccaacaaatacatttacaaaatatgctagcaggtgccaacaattcaccacagtcccaacttataaaatatgtcagaaatatgggattcaaacacttgaagctttttgcagactaacagcatattgccgagcccattggtcatagcgaataatttttttgagtgacggagatgctacataattccttttgatgttcctgacaagggagtcccacaaccttgaatatatccagataactaatattttcttcaacaaacatttctacagctttttcattggctgcactaagaactcctgtcatggtgccttcagcacgttccgtagcatagcaaagatgtaccgatggaaacttctttgtatgcggtgcataaaatgttagagaaccatacttgcta

SEQ ID NO: 216617 - DNA, 500 bp, Glycine max
ggtgaatgtgccttctcccgcccaagtgaagcccttatttttctcttcaaataactgcacagaacttgcaggtagcttttctttgaagagaaaagatagtgacacaacagtagagagacgagaatattgctctgtcgctgctcaagcaccaccaccagtgtggccaggaacagctattcccgagccttctgattacaagacatgggatgggcaaaaacctatttctgtcttaggatctacgggctgaattggaactcagacactgagtatagaggctgagttcccagagagatttaaagatgtgagccttgctgctggctctaacattactcttcttgctgaccacagtaaaacattgaagcctgaagttggtggtcttagaaatgagtctttaattgatgaactcaaagaggctttggctgatgtggatcacaaactcaaaatcatgcctggagagcaatgagtcattgaggccgctcgtcaccctgatgccaccactg

SEQ ID NO: 216618 - DNA, 512 bp, Glycine max
ctgaagctagaacttttattgaaacccttttaggagtacatatactttatatagctacccctttacattttacaagattgatgaaccaacaaatacatttacaaaatatgctagcagttgccaacaattcaccacagccccaacttctaaaatatgtcagaaatatgggattcaaacacttgaagctttttgcagactagcagcatattgtcgagcccattggtcatagtgaataatttcttcgagtgacggagatgctactaattccttttgatgttcctgacaagttagttccacaaccttgaatatatccagataactaatcttttcttcaacaaacatttctacagctttctcatttgctgcactaagaactcctgtcatggtgcctccagcacgtcccgcagcatagcaaagattcaccgatggaaacttcttgtcatccggtgcataaaatgttagagaaccatacttgctaagatcaagacgaggccaagttacttcagagcaat

SEQ ID NO: 216619 - DNA, 532 bp, Glycine max
  unsure (1)..(532): unsure at all n locations
tganatnaaanagaaggggagacagtgccggatttcggannacanctnanacactctatccgcacgctccgaagctggctagagaaatcacgagtgacacaatccatacagttaagctctttctatattcaaaaacaggcaaccgcattattgcgctggatctctcataacatcatcacacgtcatggccaggcccttattttgcacacaggaaccatctatatgctaacgctgagaccgacgaagaccggacccggatcttcttcctacgacgccaccacaaatcacacagcacttccgtcaggtaccaaactccaatcagtggcgatccccgccgtctacctgacactggagctacgacgccactaccgatgtgacactggacctctttcacgccacccagataatttaccgagacaccgacagcttcaacacatccaatcaccttgaggccttcctgaagtgtcttgctgcgtcttcctgcacttactacaccgcagtcatgctcagttaggagaacccgtacggtata

SEQ ID NO: 216620 - DNA, 468 bp, Glycine max
gtaaattgcaagaaacattaagttggattcggatacgcaagataattcacattatctgaagtacttcaccaaacacaaatctaaaaactctcaaaagtcatttcgttctttgacgctcactttccggggacgaagttggtggcataggcccaggcgttgttgttgacagggtcagcaaggtgatcggcgaggttctccaatggaccctttccggtgacaatggcctgaacaaagaagccaaacatagagaacatggccaatcgtccgttcttgagttccttcaccttaagctcagcaaaagcctctgggtcatcagcaaggcccaatgggtcgaagctgccacctgggtagattgggtcagtgaccttaccgagggggccaccagacatacggtaaccttaacggcacccattaagataacttgtgtggcccaaatggcgaggatgctctgggcgtggatcaggcttg

SEQ ID NO: 216621 - DNA, 527 bp, Glycine max
  unsure (1)..(527): unsure at all n locations
caaagaaacacccaaaatggcatcctcagcctcgaccacgctgtcttctcccttcctgcgactagaattcccctcctcaaccaaacaacgctcttcaatctccatcagagcctcggtctccgagaaacccccgctaccggctgtgtgggtgacctccccggagcccagtgagcttacgatccgtaaaatacccggcgactgcgggttcccggtgatcgggcccttcaaggaccgacgagactatgtctacaagcaagggcgcgacgagttcttcaaggcccgcatgcaacagtaccaaacaacggccttgcgcccgacatgcgccctggccccttccttgcccccgacccagacgaaactgttcatctcgatgccaagaggtcccccgtcctcttcgacaactctgaggtcgagaaaagagaccgctaacatggaaccttgatgcctttcaccgaactcagcggcggataccgagtacantcttacctcgaccactacggacccaaacacgccctcctcaaacaact

SEQ ID NO: 216622 - DNA, 436 bp, Glycine max
atgtaaaatgtaaccatacaataaacttataaagttatcacatactatcattctcgatgataaaaaaataataataataataatactatcatcatcctaaccggtcaaaaacaaaattaataacaaatattaattaattaattaattaattaattaactaactaactaaaagcttgctctctttagggaagtaatagtaacggaagaacccaagggagaagttcccacttgaatctcgaaggaatcatagcgaagaaagaactccacaacgaaaagcctcgaaaccaatgtgacgaagtcttttccggcgcattgcttgttcccaagtgctggagactcagtctcaggcccattggaccacagcacgtgcttgaggagcttatcgccttgctccccgacgaacctgtccccgacaaactcctcggccctctcgaag

SEQ ID NO: 216623 - DNA, 513 bp, Glycine max
  unsure (1)..(513): unsure at all n locations
caaagaaacacccaaaatggcatccttagcctcgaccacgctgtcttctcccttcctgcgagtagaattcccctcctcaaccaaacaacgctcttcaatctccatcagagcctcggtctccgagaaacccccgctaccggctgtgtcggtgacctccccggagcccagcaagcttccgatccgcaaaatccccggcgactgcgggttcccggtgatcggtcccttcaaggaccgccaagactatttctacaagcaagggcgcgacgagttcttcaagtcccgcatccaaaagtaccagtcaacggtcttccgcaccaacatgccccctggccccttcctcgcccccgacccaaacgtcggtcgttctcctcgatgccaaaaagttccccgtcctcttcgacaactctaaggtcgagataagagactgcttcactggaaccancatgccttccacccgactcaccggcggttaccgagtcctttcttacctcgaccgctccgaacccaaacacg

SEQ ID NO: 216624 - DNA, 459 bp, Glycine max
atgtaaattgtaaccatacaataaacttataaattatcacatactatcattctcgatgataaaaaaataataataataataatactatcatcatcctaaccggtcaaaaacaaaattaataacaaatattaattaattaattaattaattaattaactaactaactaaaagcttgctctttttagggaagtaatagtaacggaagaacccaagggagaagttcccacttgaatctcgaaggaatcatagcgaagaaagaactccacaacgaaaagcctcgaaaccaaggtgacgaagtcttttccggcgcattgcttgttcccaagtgttggagactcagtctcaggcccattggaccacagcacgtgcttgaggagcttattcccttgctccccgacgaacctgtccccgacaaactcctgggccctctcgaagatcctaggatccttcgtcgcgaat

SEQ ID NO: 216625 - DNA, 456 bp, Glycine max
gagtgatgacaaattgaagaagcactttcgtgagtcttaattaaagagattaaagagacacaccattcattcgctcactcatttcatttcaaacaatgtcaatcgctgcttcagcttcttcacatgcttgtatttcctcaatccccacatgcatcccctcttcctcttccaaattctcttcttcgctgacactttcttcactccaaagaggctcaaataagagatcgggatgcagagccatggttcaacaagccgttcagggtgcccctgctgcgtatgccaaagaaatggaacgcctttctgccaaagaatcgcttcttcttgcttttaaagatgcagggggttttgaggccttggtctccgggaagactactgaatggcaaaagattgatgtgaatgaaaggataactggtcttgagaggctcaattcaacacctttgcccaacacgtcaccct

SEQ ID NO: 216626 - DNA, 350 bp, Glycine max
atccagaggtaactgtccttgatccttcggatgcaatccaacatttacacaatcggggatccatgctgcaagatgtgttggatctgaacttatctgattgtcatggcaaggttggtgttccacgtcagctagttatcacaaaagagaaagacccctctagtatcccttatgaagtcactaaggctgggatgaagttgccattagttgcaaaaccgctagttgttgatggcactgcaaagtcacatgaactatttcttgcttatgatgaaattctctctttcagcggttgaacctccactggttctacaggagtttgtcaatcatggtggtcttctctttaagatttacat

SEQ ID NO: 216627 - DNA, 241 bp, Glycine max
gagcctagctgctggctctaatatttctcttatcgcataccagattagaggattcaggcctgaaggaggcagacttaaaaatgactctttaacagacgaactcagataggctttgggtgaggtggatcacaaaccctaaatcatacctggagcgcttggattcattgctgccgctcgacaccctgaggccaccactgtagttacacgcatagtcggttgtgcaggattaaagtccacagtt

SEQ ID NO: 216628 - DNA, 527 bp, Glycine max
catatggtgtaatcatccttttatatttcggtaaatgagttagtgaatagatacatgattatacaaaggctgtgtagcttaacccaatatgctagctacatcaccttctggcggtaaattagtgtaacaatgaaatggttcactcaattccatctcttggcatttttcacgcctttggacttctgttttgctgcctgaaaggcctgcatcttttgtttcttccgtgcctctttctcagccttggacatcttagatttggctttcactttaggagctttgctatcaagctcagcctcgcgttcaagttctctttccctagcatcaaaattcttctctaaataataattcgaatcacctgcataatcctgtatggtgccatctttaatttctatcactctattaactatttgctttataaagtatcggtcatgagatactgtgataacagtgccctggtattcatttattgcgttctcgagcatttctttagaaagtatatccaaatgattggttggttcatccaacac

SEQ ID NO: 216629 - DNA, 348 bp, Glycine max
accaatcttctctccactcccttcttttgtaaccgtctgaagtgcagcaatggcaggtggatttcattcgcagcatccatcggtagttcagaagttatctggacagtcttatcttgtgtccaggcttgctcctaatcactccagaaactgttctaccactggtagttacttcaatggaggtttgcagtcttcaggtttggttccagtcacggcacacgcgccggctgagaaaggggtgtctggatttttgttggatttcctgatgggcggagtgttcggccgctgtgtccaaaacagatgcggctccaatcgaacgagttaagttgctcatccaaaaccaggatgaaa

SEQ ID NO: 216630 - DNA, 543 bp, Glycine max
  unsure (1)..(543): unsure at all n locations
agacggattactangtantgcaancanttnaggtaaaaccagctactagtcgcggccggcctttttttttttttttttgaacatttttacatttgcctcaattacttcaaccggggggcgtcaaactacacgattataaactccaccgcaagttataaccaactaaaatgcaagtaagctaaactatgatttgttattataaagcccctaccctacattcggggaaactacaaaaccactatttttcatccaaattattcaatgctaacggggaagcaacattattgactcaaatagccgacgacttgattatctgactattaaccttcaccaccagaaccgtctttgtttccgaacaagaccagctgtagattatcatagccagcgagcactccagaacctgcaacatcacgtaatatgtttgcaccggcacctttaaagagtgagttaatacccacctttgcgacactaatcttgacatcatttcaagagctataggctcttacagcttcatcagaagtcatcatcattctaccacgcaca

SEQ ID NO: 216631 - DNA, 482 bp, Glycine max
  unsure (1)..(482): unsure at all n locations
tgaaantnnnaagacagcatagatttcgatcggangacgctaggcgctcatcccacctccgaagtcggctcgagggttggagctctaactcgatcttcttcttttgttgttctgcgattgcgtttgttttttactctcacctggaaatgtcttgctgcggtggtaactgtggatgctgaagctcctgcacgcgcagcaacggctgctgatgctgcaacatgtacccagactctgagctacacgtggttaaccaccaccgacacctcggacatgggagtggcacctgagaaggctgaatttgacggtgctgaaatgggtgtgcccgctaaaaacgatggctgcgaatgtggaccaaactggttctgcaacccctgcacttgtacgtgaggtggcgcgagaccaagactgaaaccgacatagcccttaattacgaataatgataaactatttatgcgtagctaagaacttatgcttatgtctgt

SEQ ID NO: 216632 - DNA, 450 bp, Glycine max
cccagtaatagtatttaaggttataagcagagattcataattcagattagccgaactttatacagaagcgaccaattaccaaacattaaaaaaaaaaaaaaagaagcaaccatgagcttaacacacccatcacaagtccaaaacacttgaacttgctgaagggcaagacatgaccactttattctaaggatgttggtttaacacaaaacaccagagggcacgaaaaccatcacagacataatacataagtttttagctacacattaatagtttatcattattcctaattaagggctatctctgcttgaagcttgctttcccaacacctaacttgcaagtgcaggggttgcaggagcagtttggcccacatttgcagccatcgttctcagggggcacacccatttcagcaccctcaaattgagccttaacaggtgccactcccatgaccaa

SEQ ID NO: 216633 - DNA, 493 bp, Glycine max
  unsure (1)..(493): unsure at all n locations
gactattcctccggcacctcccttctcggctggggagacggttactacaagggcgaggaggacaaagacaaagtcaaaaccaaagcccccaaaacgaggtcgtccgcagagcaggaccatcgtaagaaggtcctccgcgaacttaattccttaatttccggcccttccgcttcagctgacgacattgacgaagaagtcaccgacaccgagtggttcttcctggtgtcgatgactcattccttcgtcaacggtagcgggctgccgggccaggctttttttaactcgagcccggtctgggtcgccgggcccgaaagactttccgaatcggactgcgaacgggcccgccaggggcagctcttcgggctccagactcttgtctgtataccgtccgcaactgcgtcgtcgagctcgcctccgcggaggtcatttttcagaactccgatctgataacaaggtgcgtgatttgttcaacttncacaacaacaacaacaac

SEQ ID NO: 216634 - DNA, 512 bp, Glycine max
aacacaaaaaaaatccacttggacttcatcagagatattactatcccctggttgatcattcagcttcccaaatcaaattacctcaataaaattaatttagtccaagctaccaaaaaggactaaccaaaaataagaacactaatttacatagaaagctacagctactgctaccaataatagtacagaaggaactatcgtagttcatcgccaactttggatgatagtgccgacagaagctgttcctgcgtgtaaaacttgtttcccatgttcaccgtggcttgttggatcatcaaatcattcaccacagacacgctggcgtgatgcacttccaagtcaagatctttcaatgctgccatcaacctggctgcaggggtggttcttcttgctgcattggattcttaccattgcatcccaaccaatgatcttcacctctaactccaaatcagcgagcttgcttggtggcttctttggttctacgctattagatggaggcggtcctggtggtggtggcg

SEQ ID NO: 216635 - DNA, 566 bp, Glycine max
gttagtctagcagaaacaattagagggtttaaattgattctttctggagaattagatggtcttcctgaacaagccttttatttggtaggtaatatcgatgaagctactgcgaaagctactaacttagaaatggagagcactttgaagaaatgactttaaatctttgtgtactgacccccaatcgaattgtttgggattcggaagtgaaggaaatcattttatctactaatagcggacaaattggagtattaccaaatcatgcgcctattgccacagccgtagatataggtattttgagaatacgtcttcttaaagaccaatggttaacgatggctctgatgggcggttttgctagaataaacaataatgagagcactggtttagtaaatgatgcggaaaagggtagtgacattgatccacaagaagcacagcacactcttgaaatagcagaagcttatttgaataacgccggaggcaagagacaaacaaatgaggcaaatctagctcttatacgagctaggacacgagtagaggctatcaatgtgatttcataacaagttgatgcg

SEQ ID NO: 216636 - DNA, 444 bp, Glycine max
gtgctgcattcgcgaattgaacctcaatttcagtttctaatatttggctcactgtcttggcggtccagagaactgcatagagagagatggcctctgtgacatttgctgctgtgttaaatgggttgggatctatcttcttgcgtggacgcaacaggagccggaccctgctggccactgctgttggcggcaaagttggtgctgctgctgttactgttagaacctagaacacatattgcggccgctgctgctgctccactgaattcatgtctccctggtgtccgaggggggggacctctcgtagacccacaatcgcttgacgcctcactaccacgggactgtggctctcacccactatgacttggtaaggacccagcattcctcaaatgctagacacaacctcaacttattcatgcacgatgggcaatgcctgcacttcttagaatc

SEQ ID NO: 216637 - DNA, 347 bp, Glycine max
gatcatagattttgcatctgtcatgaaataacacaaacgggacaaaggttgatttgctactgtctagcctctcaattcaattatcttcatgaaatgaagagatatcacgccgacagcaccatgggggggtttcccttgcccagcctaaaaggaaaaaatctgcgcggcccacataacaatcctggcatgctttatataaaacaattgcaatcattctcagcttctaggcatccggaatgtaaactccattctttatagtgcccgcctctctaaaagggaaaaagaatttggctcttgagtatatttgcacaccagtggaattggttaatatttgaaacttatttgac

SEQ ID NO: 216638 - DNA, 416 bp, Glycine max
cgctcggccccaggggaagtaatgttgttctcgccagcaagtatggctcgtcgaaaattgtggacgacggcgtcactgtcgctaaagaggttgacatggtggatcccgatgagaatattgctgccaagatagtgagacaagcagttgccaagacacactactggattgttgatggaaccacgacctttgttgttcttgctcaagctcttatagcggaaggtgtaaagggtgatgcatgtggggccagccctgtgctcatcacacatggcatagagaagacagcgaaagctcttgtatgtcagcttaaacagaggccaggcgaagatgaatatagagagttggcttatgtgctagcacacaccgcacgggacacttgcgaagaacgaaatttgattgctgactcattgagcagagct

SEQ ID NO: 216639 - DNA, 462 bp, Glycine max
agaaaatcttcgaggtgttcatgctcattttactgttgaatgcaaagaacttttttacagagatttacctgagctggatgattctattgctgataagcttctccctggatgcaccacagtggagcaggtcaaagacttgttgttacagaaatgccaagaggtggagcaaacagctagagaacaagccactgataatgctatcttagatcaggtttctaagattgtacaagttgatatacctcaatccttgtttgaggaacaaggaaggcagctttatggagccaacctattagaaatacaggcaaaaatgaaactaaatgagcagcagctggcgactctgtcaagttcaaaggctgcgaacgaatttcttgagcatcagaaggaaaatataacaatatttgataaaacagagtctggcagatggtgatatatataggcgtgaaaatctgccgtttgctactg

SEQ ID NO: 216640 - DNA, 538 bp, Glycine max
  unsure (1)..(538): unsure at all n locations
cacccacacacgcgcgcagacgcagagtgagtgggtaaagcaaaatcatgaagtgttgttcctccctgcacttgctctcttcttcttcttcttagttatcattccttccttccttcctttcgatttccgcattcattcaatggcacttacaatactctctctgctcccaccctccactcctccctgcttctgcggcaccctccatctccgctcccacaacagcttcctttccatccattctccttcttcttcttctccctttccttccttctcctcaatttcaattcccaaccactctcccacgcgccgccgctttcacactgtcttcgccgcttcctccgactactattccactctcggaatccccaaatccgccaccggcaaggaaatcaaagccgcctatcgaaggttagctcgccagtaccatcctgacgtgaataaggagcccggngcaactganaagttcacagagattagtgctgcctatgaggtgctatcagatgataaaaagagggccttatatgatcaatatggcgag

SEQ ID NO: 216641 - DNA, 509 bp, Glycine max
cactcaataactaaatttttaggtaattcattcactcgtgtagaagagcttagacttcctaccagatatacactagctttctcttagtgcaacctgctcatggagtacaatttgagatcctcgaacaagttattctgtgtaaattgactggtgccaaaatttacaaatcaaaaacaaataaaagaatctgcctcactacttatttgatttcgctgggtagctaaaaattcagttaaagcatttcaagaaaatgtctgcattagtccctttccttccagtaactgttggaatcatgagaactctaacccacattaggtaaactacatcttgaagattctgctccacccaacaaccccataggactagagattatctttaaaccactttaaagctccatttgccacagatccagcaaagcccttcaatttattccatacatcattttcatcttctgatttttcagttttttcttcgactgtcgatgttgtactttcatcctttggagcttt

SEQ ID NO: 216642 - DNA, 345 bp, Glycine max
gagccttgctgctggctctaatatcactcgttttgctgaccagattagaacatttaagcctgaagctgacggacttataaacgattctttaattgaagaactcagagaggctttggctgatgcggatcacaaaccctaaatcattcctggagcgcttggaggcactgaggccgctcgataccctgacgccaccactgtagttacaggcatagtgggctgtgcatgattaaagccgacagttgcagcaattgtggcaggcaaagacatagcattggccaacaaagagacaatggttgcgggagccacctttgttcttcctttagcgcacaaacataacataaaaat

SEQ ID NO: 216643 - DNA, 501 bp, Glycine max
gtggcagcataaccagaaaaaggttccagaaattctggtaaggaacgaagcaaagcaaacgcagcgtttcgtttcgtgtcgctgctggttatggatggaatgtacggagtgccggcggagtacgccgacaaggctctcatgacgccggagaatctgattttcccgccggactaccaccacgacttcctcgccgccggccggattccgctgttcggatccgacgagttcttctcctcctccgccggaattcaccggcagcaggaagatgacgtggcagccaccactgtcatgaaggccaaaatcgcctctcaccctcactaccctcgcctgctccaagcttacatcgagtgtcagaaggttggggcgcctccggaaatcgcgcgcttgttggaggaaatccggcgagaaaatgacccgtgcaagagcgacgccgtttctttttcacgtgctttggagccgatcccgagcttgacgaattcatggaagcctactgcgacatgt

SEQ ID NO: 216644 - DNA, 537 bp, Glycine max
  unsure (1)..(537): unsure at all n locations
aattcacaatgtcagtagttatttatcaagaatactattatgatcatttcccttttccttcatgggaaagtaataagcattttactgtcagtaatctgcttttaatttagaatttacaaaaaagaaaatacaagcaataattaatcgggatatacatttgaaaatatcatgtacatgcacctcattcattcatcagcaaggatccgtccgttaaaattttccatcatagaaaactgcatattctctgatggtttccaatgacgttttctttggttaataaaccaattgttaatttgcttctggtccagccctgttgacttagccagttcaatcttatcagcttccgtagggtaaggccatttgtagtgaacattccaccattgaagcaatgcttgtcttgcttcctttggaagcttacccttctttttcttctttgaaaactcgagtttcaaagtaccgatgtgactcccaaactttcgtanaagcctatccttgagcttacgatcttcaccctttaattggccatcttgagcatca

SEQ ID NO: 216645 - DNA, 617 bp, Glycine max
gcccttttgatgttctaaaagccaatagagtgtatctcacagtttcagttctgtatacagtggtaaattttaaatttgctccattgaattctgtttttctctcgaactcaagtgtctaaagcattaaagcagaagtgttgcactcatggaataatattgtcttcaatcttcatctcagctatgtctttcagctaccaaagtccatgatgttgtacccttattgaagtattaatctgagaggaaagagagttgctgccattattatcagttcagtgatatttctttcttgagtatggttggctacggtaaaaagttgagagaattacagattcaagaatggaaaggatattacatcaactataagttaatgaagaagaaagtcaagagatatgtagaacaaatggaggttggagctcaaaatcgccacaatgttctcagagacttctcaatgctgctagacaatcagatagaaaaaattgttttatttctgcttgaacaacaaggagtacttgcacataggctgtcagatattggacaagaacaccatgctcttttccagcagccaaatagtataatcatctctgaactccaagaagcatatagagatgctggacgag

SEQ ID NO: 216646 - DNA, 426 bp, Glycine max
aaattgtcattaatcaaatttcatattcaaaagcggatacatactataaacactttttacattgccaattaatattagctgccaagccaacaacaaaagcaaactaaactaaaaaaatcatgggtgctcaagcaatggcaacttcaacagtttttgatttttggggaggaggatgcttctcaacaaccacagtgagaaccccattttcgcatttagctgtaatggctgacacattagcattctcaggcaaacgaaacttcctctgcaaattctgaggccctctcctctccaacctaagatacttgcacccttcatcctctccatcttgacgcttcctcttcccattgcttcttataacaaggtgtgttctaattttcaaccgtcacctacaaaacaaatacacacatgccaatgcaccataacatt

SEQ ID NO: 216647 - DNA, 494 bp, Glycine max
aaactgtcattaatcaaatttcatattcaaaagcgcatacatactataaacactttttacattgccaattaatattagctgccaagccaacaacaaaagcaaactaaactaaaaaaatcatgggtgctcaagcaatggcaacttcaacagtttttgatttttggggaggaggatgcttctcaacaaccacagtgagaaccccattttcgcatttagctgtaatggctgacacattagcattctcaggcaaacgaaacttcctctgcaaattctgaggccctctcctctccaacctaagatacttgcacccttcatcctctccatcttgacgcttcctcttcccattgcttcttataacaagtgtgttctcatcttcaaccgtcacctacaaaacaaatacacacatgccaatgcaccataacattaatggaggggaagaaaagaatattggagtgagacatcacgtttgtacctgaatttcagacttggagaga

SEQ ID NO: 216648 - DNA, 378 bp, Glycine max
gtttctcgagcaaaaacaattcgagggtttaaattttttctttctggaaaactagatgaggggtctgagcaagccttttattcggtatgaaatatcgaagcagcaactgcgaaagctgcaaacttataaggaggagagccatacgaggaaatcacctcaaagctttgggtgcgtgacccccaagtcaatagctagcgactagtgagggacggacaatgttgtagtctctcgtggccgacaaattggagtataacaaaggcatgcgcctattgccacgaccgggaatataggtaatgcgataatggatcttcttaaagaccaatggttaacgctggctgtgacgggcggttcggcagacgaaaacgatgatcacatcac

SEQ ID NO: 216649 - DNA, 530 bp, Glycine max
ggtagactagcgaaaacaattagagggtttaaattgtttctttctggagaatgagatggtcttactgggcaagccttttattaggtaggtaatatcgatgaagctactgcgaacgctacgaacttagaaatggcgagcgattcgaagaaatgactttaaatgtttgtgtactgacccccaatcgaattgtttgggattcggaagtgaaggaaatcattctatctactaatagcggagcaaattggagtgttaccacatcatgcgcctattgccacagccgtagatataggtattttgagaatacttcttcttaaacaccaatggttaacgatggctctgatgggcgggtttgctagaatgaacagtaatgagatcactgtcttagtcaatgatgcgggaaagggtagtgacattgatccacaagaagcacagctgactcttgacatagcgggagcttattagtataaggcgggaggctagagacatactaatgaggcaaatctagctcttagacgagcgatgacacgagt

SEQ ID NO: 216650 - DNA, 459 bp, Glycine max
  unsure (1)..(459): unsure at all n locations
tagttctagatcgcgagcggtaacgaatatccgcacggaggagacgacgaggatctgagaagaaggaggcgcgagctacttcggcttcggattagggatttggcgactcgtacgaggagcatgcggaaccggatcttggattgggccgagattctgatgggcctcgaggacaattccatcgagttccgcctccagctgccagaatccgaccgctacgtcggaaatcccgaggattacgtcgacgcggcagagtacgaggcgctgctgcagacgctggcggagagcgacgggggaggcaggaggggagcgccgccggcgtcgaaggccgcgctggaagccttgccgacggtgaaaattgcgtcngaaagcgaagccgtggcgtgcgctatatgtaaagatttgctcggtgttggagacgcggcgaagaggttgccgtgcgggcattcgtatcatggagat

SEQ ID NO: 216651 - DNA, 482 bp, Glycine max
ctctctcccatgccatcgtccctcccttcacccgcgtcgccggaatccggtgccgcgttaaccgcgccggagactcggcgtactcaccgctgaactcggggtcgtcgtcttcgtcgttcagcgaccgcccccccacggagatggcgccgctcttccccggctgcgactacaaccactggctcatcgtcatggagaatcccggtggtgagggcgccaacaagcagcagatgatcgattgctacatccaaaccctagccaaggttctcggcagtgaggaggaagctaagaagaagatttacaatgtttcctgtgagaggtactttggattcggctgcgagattgatgaagaaacttctaataagctcgaagggttgcctggtgatatgtttgagctgccggattcgcatgttgatcctgagaacacggactatgggtgctgaattatctgtgaatggagagatcgtccagagatcacctgaaga

SEQ ID NO: 216652 - DNA, 401 bp, Glycine max
agaaccaaatcatctatggcaactttgttggggaaaaaatgacgtgaaaagagtccaacattatgtttatagtaaaaatgataacgaagaggtgtccatctgatacagccatagaagtttgacaacaaacatttgagttaccccaccggaaatatatggaatgtctccaaaggcaagactaaaatagtgcatgtaacaaagtacttccatagtgtatgtacatcacatccctctccctatctcaaattggtccttcactgcatgttttctctgcgccggacataccttgttctatcattgtatcggggtctgtcctgatgcctttgtggctgtggttccacccttctctgtctttcaggtgatctctggacgatctctccattcacaaataatttagcacc

SEQ ID NO: 216653 - DNA, 540 bp, Glycine max
  unsure (1)..(540): unsure at all n locations
ctctctcccatgccatcgtccctccctccacccgcgtcgccggaatccggtgccgcgttaaccgcgccggagactcggcgtactcaccgctgaactcggggtcgtcgtcttcgtcgttcagcgaccgcccccccacggagatggcgccgctcttccccggctgcgactacaaccactggctcatcgtcatggagaatcccggtggtgagggcgccaacaagcagcagatgatcgattgctacatccaaaccctagccaaggttctcggcagtgaggaggaagctaagaagaagatttacaatgtttcctgtgagaggtactttggattcggctgcgagattgatgaagaaacttctaataagctcgaagggttgcctggtgttctgtttgtgctgccggattcgtatgttgatcctgagaacaaggactatggtgctgaattatttgtgaatggagnagatcgtccagagatcacctgaaagacagagaangggtggaaccacagccacanaggcatcaggacagaccacgatacaatga

SEQ ID NO: 216654 - DNA, 546 bp, Glycine max
gcaacaaatactcttccctacacttttcagaaaaaaaatggttcaacaagaaatccgaaggggtccctggacagaacaggaggactacaaattagtgtattttgttaacatgtttggagatcgtagatgggactttatagcaaaggtatcaggtttgaaggtggagggagactgtaaataggtatgaatatttggacatgctaagttatacatgaagcacccctttaaccacctcactttgttgtaggtttgaatagaacaggtaagagttgcaggttacggtgggttaattacctccaccccgatctcaaacgagggaagctcacaccccaagaagaacacctcgtcatggaccttcattccaaatggggaaataggtttgagaaccatgcagaaataattaaactataagctacctacctttcaatcatcatcactcataattttaaattattttttcctaccatacagtactataagtattaattaggtctttggcttatggttttttttttttatatagaatgggatataaaagatttttat

SEQ ID NO: 216655 - DNA, 411 bp, Glycine max
aaaataacaaattctagtacattcattcattacagacattacttataaattgtacattgctgtctaatcttcaatgttgaaaggaaccacaatgtcgaatataaacactcttcggtcttcacatgtcaggatggaaaaaaacctcctatcgattaatgcttcattaataattgccgggtcaagggagaagctagtcttgcttactaccaagggtaaaagcacgaggattagaactcttcaacaccctcagactcttcactgttgacacaaacatgtgccacggtacatctccaacaagcatcctgactccttcgttaacctcataaacaagagtatattgcccacttccaaccaagagaacccgaattggatgtcgtgttactgatcccttgcttagaattccaccagcac

SEQ ID NO: 216656 - DNA, 543 bp, Glycine max
gcgcagactaacaccctttccttcttcttcgttcggatcagattcttggaattctgaatcaaaattctcagaagaaggagatgtatagcaatttcaaagagcaagcaatagagtacgtgaaacaagcggtagatgaagacaataagggaaactatgcgaaagcgtttcagctttacatgaacgcgttggagtatttcaaaacgcatctcaagtacgagaagaaccctaagatcaaggaggccatcacgcagaaattcaccgagtatctccgccgggccgaggagatccgggcggtcctcgacgacgggcccagcggcccggcctccagcggggacgccgcggtcgccacacggcccaagacgaagcccaaggacggagggaaagacggagacggcgaggatcccgagcaggccaagctccgggccgggctcaactccgcgatcgttagggaaaagcccaacgtgaagtggaacgacgtcgcggggttagagagcgcgaagcaggcgctgcaagaagcggttatcttgcccgtgaagtttccgc

SEQ ID NO: 216657 - DNA, 576 bp, Glycine max
aaccagattcacattttcacatcaaatttatttttctggttattgcatcagtctgttcttatacacaaattatgattagtaaaaatatgcatttcacttgatccaatagcactgtaaattacaaatcataacatgtttaagctagtgcagatgattgaagaaaaattccgtcagaattatccttcctctccgaactcctttgtgaatctttcatgaacatcaaggtcagacttgcttacggtgggtctttgtctagcaagtactttgtcaaaatctgttctcgatataggaggtgggaggatcttagaagcaagtcctttcgcagcaatatcctgcattgtagtttgcactgaaccctgttgctttggcccacatgggatccacataccctcaggattcctaaagaaaaacatggcatcttgggttttgcgaacaggttcaaataaaacatccttgacacagacagatatatctgaacctgaaaacccctttgtcttgcgagcccaatgttaaaatcacttttagccaagtatggggaggatttctaggggcaccttgacatgtgtggcgagcctt

SEQ ID NO: 216658 - DNA, 375 bp, Glycine max
  unsure (1)..(375): unsure at all n locations
caacattttaagaagccctgggctcatgttcatgaacttgttanaaatcttgtagatgctggtgataaaattaagccaacagtgttgattggaacatcgggacaaggaagaacatttactaaagaggtgatggaggcagtggcttctattaacgagagacctattattctttgtctttccaaccctacgtcacagacagaatgcactgttgaagaagcttacaagtggagccagggacgtgccatttttgcaagagggagtccatttccttccgttgagtgtgaggggaaagcgatagtgcctggccaggctcaatatgcatacatatatcctggatttggtcttggattaataatgtctgagaccattatagtg

SEQ ID NO: 216659 - DNA, 448 bp, Glycine max
atcattaaataattgacaataaaatgataaaacgaaaaggaaaaagaaaaataggctatttattatcgcttcaccggtagcttcggtaggatggggtatacatacagctctctgcaaacttcaccaaatctttaggttgaggaaggcgagtggccaagccaagctcataagccttagcagcaacattggcagctatgtgtgctgaaatctttcttatgttggtgaatggtgggtatatgagtcccttatcaaagttctcttggctcacttgtgcagccaaagcctcagaggcagccagaagcaggtcatcatgcactcgaatggtcccagacattattaaaccaagaccaaatccaggaaatatgtatgcattattggcctggccaggcacaaacactttcccctcatactcaacgggaggaaaagggctcccacttgcaaaaatggc

SEQ ID NO: 216660 - DNA, 418 bp, Glycine max
  unsure (1)..(418): unsure at all n locations
agaccgcanggacttgagagcganancgatnaagggtaaacctagctccaatgcggtcgagggacaaaagaggaatccctggcataatttttgtttttgagtggtacagaatcaaacagcggtgcctagagcaaggtcaaccgggtggaacctaccatgaatgcaaggcacaacagccactaaatgggggcttcgagaattggtccagactgtcgagagacctttttatcaatcacatgacactcctacatagaacaaagaatatagtggtttacaaacatgcaccagcagaccataactatgcatttaagcatgcgtcagaacattctcaatcccttggagtttggggaacgtaggcagctatactgatctcataaacagcttcttgcttctactacttagacataaacttagcatg

SEQ ID NO: 216661 - DNA, 363 bp, Glycine max
gataacagacacatagatggggggatgaatcggacatactacgggtggacatgatttataaatcaaacggatggtgatgccggtcggagtatacacacagacttgtgcacgctcacatacatcacttaggagtggatggcacaaggactatacgcgtgcataagcctgaatatttacttgggaacgtgagagggcacgaatgtttggtatgagaaccactggtggacgcactctggccttatatagagacgctggggtgaattgctctgacagtgacgccttcctcactggaaggaagaagcactgcactcggcaggtgcaccggtccattacgcgctgtccggcttgaatatatgtgtctgc

SEQ ID NO: 216662 - DNA, 588 bp, Glycine max
  unsure (1)..(588): unsure at all n locations
atgaaatgaatcatttcatattgatagtattgctatgcttagtgtgcgactcgttagttttttagaacggttccaatttaacaaatttataaaccggttcatcgtataaatgaattaaaaaagaactaataaccaacgcatcgcttcggattatctagatctaaagaactagtcaaaacaaaaaaaaatataaaaaaagatatattatagcaactgaactattgtgaagcataaaagaacaaaaatcttatttagttgtaaagcaataaaaatatacagataaatgaagaggtgaaagaaagagagaaaaaaaatcaatgatatagaattctaatatgtaaaggtctatgggttatctcataaaaggtagtgtaataaagcatcaatctaaatcaattcatatctatttatatatgaattaatttataacgtaaacaaattaagagctctgaatcaataaaaactgagaatattgattcacgaanaaacaaatcaatattcgaaaaaaaaaaagattattaatttaagatatgagacaggctccattgtcgaattcaaacctaaccattaatcgagaagtgatgggaa

SEQ ID NO: 216663 - DNA, 521 bp, Glycine max
acatatataactaaagaatcgggttttgttctattatttgttattttataatattctaatgaatctttattttcctttttattattagttattagaatattttttattattagaaagaataaatagaattggcaaaaataaaaaaaaaattcaataaaatcaaaattatcgcgggcgaatatttactcttttattatcaatcaaattcagatgtaatgtagggcacaactcctaaaaaaaggattgctttttggtttcttccgccatcccacctaatgaatcattaagatttgtttttaataaaatcttaagtatttgcaggtttcgtcgttcccatcacttctcgattaatggttaggtctgaattcgacaatggagcctttctcatatcttaaaattaataatctttttttttttcgaatattgatttgttttttcgtgaatcaatattctcagtttttattgattcagagctcttaatttgtttacgttttaaattaattcatatttaaatagatatg

SEQ ID NO: 216664 - DNA, 502 bp, Glycine max
gctctcttggactcagttcagtttcactttcgatcctacaatggcgacagtcacgttttcgttttccggtaaaaccctaactctaccttatcaccccaaaaccccaatctccaactttaccccggtaacgaatcttcgcctccctccttctatcgcgacccgaacccgcaattgtaaccggattcgggcggcgctggatggggatttctcggcgaaaaggagcagcagcagcaacaacaacgaccagagggagacgataatgttacctggttgtgactacaaccattggctgattgtgatggagttttcaaaggaccctgcacccacccgtgaacagatgattgacacgtacctcgacactcttgccactgtcttgggaagcatggaggaagctaaaaagaacatgtatgcctttagcaccaccacttacactggatttcagtgcactgttgatgaagcaacctccgagaaattcacgggtttgcctggggttctttgggta

SEQ ID NO: 216665 - DNA, 523 bp, Glycine max
aaggattttgatatttggaacctaacttcactagcttaattgtttcttggttttaggaaatatgtggaggttctcaatagttctaaagctgattctgctattagcccaggatgtacaaagtctgaaattcctcagaaggtgttggaatctttgtttaatattcccaaaagcactgaacatgacaaagataccatgaattggagaaatgtagtaaagaaaatccagtctttgggacctgggttcaatgtttctccgcatgtcgcagaatctcaacaacatacgtgtggtacaaaatgacaattttttaaatacttttacttgtataggcttgccttaaacagccttaaacagtatttgttgattagtgcctttgagtacccattttattatgcaaaaatagctggctgatttttagtgattgcaaacacctttatgaatctggtgcatgctcatttcttcttctggtttacctttcatcatgatctgaaataggactgtcattggttctacagagtatgttggc

SEQ ID NO: 216666 - DNA, 562 bp, Glycine max
  unsure (1)..(562): unsure at all n locations
tccttctccttctcttctctgcttctcttttcatctccgaaaacaatgaagctcattagcagcattaaccccaaaaatctcaaactcagtcccaaacgcttctttcgcaaaaaggaacgatctttagtctcacgctccgacccaccttcattcggatccggatcttcctccgacgactccaccacaaatcacaagccttccgccggtaaccaaactccgaccagcgtcctcccgggcgtctccggagactggtccgacgtcgccgccgtcgacgtgcggtgggacctcgcccaggccttccgcctcatcgaccgcgacaacgacgggcgtcgtcacgcgccaggacctcgaggccctcctcacgtgcctcggcgcgtcgccgtgccccgacgacgtggcggtcatgctcggcgaggtcgacggcgacggcatcaccgtagaaaggctcatgagctacgtcgggtcgggtctgaaacccgggtcggatcccgacgagctcaagaggcgtncgaggtgttcgaacagatcgcgacggaggatctcgccggagagctgcttaggg

SEQ ID NO: 216667 - DNA, 479 bp, Glycine max
aaaaaaaattatgaagttgccttccttcttatatatatttgcacatcataagtcataacatgatcatgatcatcatctgacatcatcacaatcacaaccacgtcatcatcatcgctgctgctgcagctccatcatacgagaaaagtcctcgaagcagacgaacccgtccccatttctgtccacaccctctatcatgcgccggcactcctctaacgtgcaccgctcgtcgccgatggccttgaaaaccctaagcagctcctccgccgagatcctcccgtcgcgatccgtgtcgaacacctcgaacgcctccttgagctcgtccggatccgacccgggtttcagacccgacccgacgtagctcatgagcctttctacggtgatgccgtcgccgtcgacctcgccgagcatgaccgccacgtcgtcggggcacggcgacgcgccgaggcacgtgaggagggcctcgaggtcctggcgcgtga

SEQ ID NO: 216668 - DNA, 456 bp, Glycine max
gccttctccttctcttctctgctactgttttcatctccgaaaacaatgaagctcattagcagcattaaccccaaaaatctcaaactcagtcccaaacgcttctttcgcaaaagggaacgatctttagtctcacgctccgacccaccttcattcggatccggatcttcctacgacgactccaccacaaatcacaagccttccgccggtaaccaaactccgaccagcgtcctcccgggcgtctccggagactggtccgacgtcgccgacgtcgacgtgcggtgggacctcgcccaggccttacgactcatcgaccgcgacaacgactgcgtcggcacgcgccaggacctcgaggccctcgtcacgtgcctcggcgcgtcgacgtgccccgacgacgtggcggtcatgctcggtgaggtcgacggcgacggcatcaccgtataaaggctcatgagctac

SEQ ID NO: 216669 - DNA, 435 bp, Glycine max
ataaaaaaaattatgaagacgccttccttcttatatatatttgcacatcataagtcataacatgatcatgatcatcatctgacatcatcacaatcacaaccacgtcatcatcatcgctgctgctgcagctccatcatacgagaaaagttctcgaagcagacgaacccgtccccatttctgtccacaccctctattatgcgccggcactcctttaacgtgcaccgctcgtcgccgatggccttgaaaaccctaagcagcttctccgccgagatcctgccgtcgcgatccgtgtacaacacctcgaacgcctccttgagctcgtgcggatccgacccgggtttcagacccgacccgacgtagctcatgagcctttctacggtgatgccgttgacgtcgaccttgtcgagcatgaccgtcacgtagccggggcacggc

SEQ ID NO: 216670 - DNA, 543 bp, Glycine max
ctgttctagaaatgcaaatgggaaatatcaggagagcaagagagttgtttgatgctgccacagttgctgacaagaggcatgttgctgcttggcatggatgggcaaatctagaattaaagcagggaaatctaaagaaggcaaggattctacttggtaaaggtcttcaatattgtggacagaatgagtacatataccaaacacttgcacggcttgaagctagagcaaatagatatctgcaggctcgatatttattcaatcaggccactaagtgtaatcctaatagttgtgctagttggcttagttgggcgcaaatggaggtggagcaggaaaactaccgtgctgctaggaaattgtttgagaaagcagtacaggctagtcctaaaaataggtatgcttggcatgtatggggcgtttttgaagctaacatgggcaacattgacatgggaagaaaacttttaaagataggtcataatctaaacccaagggatgctgttctacttcaatctcttgctttattagaataccaatactcaactgcaaacg

SEQ ID NO: 216671 - DNA, 615 bp, Glycine max
  unsure (1)..(615): unsure at all n locations
ctgttctagaaatgcaaatgggaattatcaggagagcaagagagttgtttgatgctggcacagttgctgacaagaggcatgttgctgcttggcatggatgggcaaatctagaattaaagcagggaaatctaaagaaggcaaggattctacttggtaaaggtcttcaatattgtggacagaatgagtacatataccaaacacttgcacggcttgaagctagagcaaatagatatctgcaggctcgatatttattcaatcaggccactaagtgtaatcctaatagttgtgctagttggcttagttgggcgcaaatggaggtggagcaggaaaactaccgtgctgctaggaaattgtttgagaaagcagtacaggctagtcctaaaaataggtatgcttggcatgtatggggncgttttgaagctaacatgggcaacattgacatgggaagaaaacttttaaagataggtcataatctaaacccaagggatgctgttctacttcaatctcttgctttattagaataccaatactcaactgcaaacgttgccccgggtttgttcaagagagcatttgattgaatccaagcaccagcctcgttggttgttggggttggat

SEQ ID NO: 216672 - DNA, 541 bp, Glycine max
  unsure (1)..(541): unsure at all n locations
gatgtaccagttcnagtctgagacgctaagccttacgtagctcgcaattcgctcagcaacattgaagaaccctgggctattttttgattctgtggaaatcttgtatacgctgaaataaggtaagccaacagtgttgattggaacatgaggacaatgaagaacatttactatataggtgattggggcaatgggtcttattaacgagagacctattattcttgctctttacaaccctacgatacagggagaatgctctgatgaacaagcttactagtggagccagcgacgtgccattatcgcaagtcggagcccatttactcccgactagtatgaggggaaagtgtatgtgcctggccaggaccaaaacgcatacatattatctggattctgtcttggcataataatgttgtgggaccattcaaatgcatgatgatctgcttgtggctgtctctgacgcttttgctgcacaagtgagccaatagaactttgtttagggactcatctacccaccatttaccaacataagagagatttcagcaca

SEQ ID NO: 216673 - DNA, 524 bp, Glycine max
atcattaaataattgacaataaaatgagggaacgaataggaaaaagaaaaattggctatttattatcgatttaccggatgcttcggcaggatggggtatacatacaggtgtctgtaaactttaccaaatctttaggtagaggaaggcgagtggccaatccaagctcataagccttagtagcaacattggcagctatgtgtgctgaaatgtttcttatgttggcgaatggtgggtatatgagtcccttataaaagttctcttggctcactagtgcagccaaagcctcataggccgccagaagcaggtcatcatgcacttgaatggtcccagactttattaaaccgagaccaaatccaggaaatatgtatgcattataggcctggccaggcacaaacacttttccctcatactcaacgggaggaaatgggcttccacttgcaaaaatggcacgttcctggctccagttgtaagcttcttcagcagtgcattcttgctgtgacctatggttggaaagagaaagaata

SEQ ID NO: 216674 - DNA, 453 bp, Glycine max
aaatgggaattgattccaatttctgtaaaactgctaaggcgctctatcctcacgctcgtaatctggctcgaggctggatcggcacttgttgatgactggtactgccttaaaaccatggtgaggacttttgagacacattgtggatccttgtctcaatacgggatgaaacacatgaggtcctttgcaaacatctgcaatgtaaggataaagaatgaacaaatggctgaggcttcagcacaagcttgtgtcagtattccttccaatccctggagttctctgcaaaggggtttcagtgcataataactccctgtaatgtgcactagtagagaccaaagtatgattattgttacattatgttacatggttgtacttgcatatacatatcttgtcccaccttatgaaatacaattgggacactactaggattgggaagaaagggtctttacatttata

SEQ ID NO: 216675 - DNA, 493 bp, Glycine max
caactgcaacaattttggataagcacctttaaccctttagagcagatcctgatagaagaagggctaatgcatttgattatggatcagggtttgtgaacccctcaagagttctggatcctggtcttgtatatgattcgaatccagaagattttgttgcgttcctttgttcacttggttatgatgagaggtcactccaccttgtcacaaaggacaacatcacatgtgatagggcattcaaaacaccatctgacctcaactatccatctattgcagtgccaaatcttgaagacaacttttcggtaactcgagttgtgactaatgttggaaaagcaagaagtatatataaagctgtagtggtgtctcctactggagttaatgttactgttgtgccaaatcggttagtcttcacaagaataggacagaagatcaagttcactgtgaattcaaagtggctgctccctcaaagggctatgcattcgggttcttgtatgga

SEQ ID NO: 216676 - DNA, 521 bp, Glycine max
  unsure (1)..(521): unsure at all n locations
ggctcgagattctttgaacaatggcgtctctctctcacctcaacaagctcctctgcatgcccccgctcaactcttcaccctctatttcgccaccacgcagcagcgtcggaatttggaccaaacctgtcggaaggccgaggctactggtgcgtgtccgagcggtcacgagcgacgacgagtgggggccggagaaggaggaggcgtacggcggcggcgtagcggtggaggagaaaccgacgaagtcggagacggagacggagaagctgaagaaggccttggtggattcgttttatggcaccgatcgtggactgaaagcaacgagcgaaacgagagcggagaatcgttgaactcatcacacagctcgaggccaagaaccctaaccctgttcccaccgacgccttgactcttctcaacggaaaatggattctcgcgtatacatcctntgcaggtttattcccattgttgtcaagtggaacactaccattgggtcaggtagaggaaatatcccagaatattgactc

SEQ ID NO: 216677 - DNA, 471 bp, Glycine max
tccttctccttctcttctctgcttctcttttcatctccgaaaacaatgaagctcattagcagcattaaccccaaaaatctcaaactcagtcccaaacgcttctttcgcaaaaaggaacgatctttagtctcacgctccgacccaccttcattcggatccggatcttcctccgacgactccaccacaaatcacaagccttccgccggtaaccaaactccgaccagcgtcctcccgggcgtctccggagactggtccgacgtcaccgccgtcgacgtgcggtgggacctcgcccaggccttccgcctcatcgaccgcgacaacgacggcgtcggcacgcgccaggacctcgaggccctcctcacgtgcctcggcgcgtacccgtgccccgacgacgtggcggtcatgctcggcgaggtcgacggcgacggcatcaccgtagaaaggctcatgagctacgtcgtgtcgggtctg

SEQ ID NO: 216678 - DNA, 479 bp, Glycine max
aaaaaaaattatgaagttgccttccttcttatatatattgggacatcataagtcataacatgatcatgatcatcatctgacatcatcacaatcacaaccacgtcatcatcatcgctgctgctgcagctccatcatacgagaaaagtcctcgaagcagacgaacccgtccccatttctgtccacaccctctatcatgcgccggcactcctctaacgtgcaccgctcgtcgccgatggccttgaaaaccctaagcagctcctccgccgagatcctcccgtcgcgatccgtgtcgaacacctcgaacgcctccttgagctcgtccggatccgacccgggtttcagacccgacccgacgtagctcatgagcctttctacggtgatgccgtcgccgtcgacctcgccgagcatgaccgccacgtcgtcggggcacggcgacgcgccgaggcacgtgaggagggcctcgaggtcctggcgcgtga

SEQ ID NO: 216679 - DNA, 569 bp, Glycine max
gtcaaaacacttcaactttaggctttatctcaaaaaaatgggtggtttagctagcggtcttgctctaattgttatggtgggtctgcaaattcattatgcagcacttgctatattcacaagagccgctttgttagatggattgagtacgacggtctttgtagtgtacaggcaaggcatagccactttggctttggcgcctatgtttttctctcctaagcggagacaatcagtgaaagattccttgggattcaggagcttctttttgatgtttgtgaccgctcttgttggagtcacagcaaatcagaatgcatactttaaaggtttattttatgcatcctctactgcagctaccgctatgagtaatctgataccagcattaacgtttgtaattgcggcaattgcgggatttgagaaagttgacataagcttaagaagcacggccaagatattagggacagtttgttgcgtcgctggagccttaaccatggctttggtcaaaggacagaagctgttacacacagagttcctttcttttatacatcttactggcagtgaaagtgacgattggc

SEQ ID NO: 216680 - DNA, 574 bp, Glycine max
  unsure (1)..(574): unsure at all n locations
caaaaagatatctgcagtctcgatattttttgagacaatgccatatcgattgaatgaaagtacaggatacatcgactatgaccagatggagaaatctgctacactcttcaggccaaaattaattgttgctggagctagcgcttatgcacgtctctatgattatgaacgtgtacgcaaggtttgcgataaacagaaagctatactattggcagatatggcacacatcagtggattggttgcagctggtgtcatcccatcaccttttgattatgctgatgtagttactaccacaactcacaagtcacttcgaggaccacgtggagctatgatattctacagaaaaggggttaaagaaattaacaaacaaggaaaagaggtattgtatgactacgaagacaaaatcaaccaagctgttttccctggactgcaaggtggccctcacaaccacactattactggtttagctgttgcgttgaagcaggccactactcccgaatatagagcatatcaagagncagttctcagcaacagctttaaaattgcacaggctctgagtgagagaagctatgagctt

SEQ ID NO: 216681 - DNA, 431 bp, Glycine max
  unsure (1)..(431): unsure at all n locations
ttttttttattaataatctatttgatctaaaaaagagaaattnaaagcgggtttgtagttattctttttatacatttcaacataacctccatgattttcaggattcttacatataatggctttagacattgttacaaaaatttgtggttgacctctaccattgatcatgaaaactgatcttgttgaattgtttgccagtaacaccatgtgatgacctaatggaaaattttcttttctcaattcttgtgcttcatggttgctttatcaaaaccaatgggtggaaattgttttgcatactccttaacatcaaagcggagctttgctatctcctattgaaaggtacaatatgactcatttgtggccaaaaagtccttcaactttgttcctttgctctctcccttaatactcacagctttcttcactgctgcatt

SEQ ID NO: 216682 - DNA, 357 bp, Glycine max
agttgataaaggggcattgtggattcattagatatacaatttgtgtttggattgagaatgaccactgaaaaggagatttctgatgatgaggacgaggaacagaagaaggttgatgagggtaaagttgaagatgtggtttatgataatgagaaggatgataagaaaaagaagaccagtgatggaggtgtcatcatgagtggtgattggtgaacaagcgccaatcctatactgatgacgaacgcctgggagatcacgctgaactagtgggctggtttctacatgagatttaccattgattgggaacagcatttggctgtgaagcacttgcttgtggagggtcatatggtgataaagggt

SEQ ID NO: 216683 - DNA, 409 bp, Glycine max
  unsure (1)..(409): unsure at all n locations
agcccaaggtatgccctgatctganncangtaaggaagcgcccgcgctagaattagctcgaggactacgaaggaggagaagatttctaattcattaaggaggcatctcatgaggggtatggtgatacaaccaagcctattcggatgaggaaacctgatgagatcacaaaagaagactatgctgctttctacatgagtctcaccaatgattgggaagagcatatggctgttaagcacttttcatttgaggaacagctggagtttaaggctgtcctctttatccccaagagggcacctttcgacctttttgacactaagaacatgcctaacatcatctaactgtatgtcccgcgggtttaaatcatggacaactgcgaggagttgatgccagactatcttaactctggaaa

SEQ ID NO: 216684 - DNA, 561 bp, Glycine max
caaagacatcatcatccatggctgtttccgtctccactgtcggagctgtcaacagggctcttttgaacctgaatggttctggagctggagcttcagctcccagttcagccttctttgggaccagcttgaagaaggttattgcctcaagggtccccaacagcaaggtttccggtggaagcttcaagattgttgctgtagaagagaagaaagagattgaagagacccagcagaccgacaaggacagatggaagggtcttgcctatgatatctcagacgaccaacaagacatcacaagaggaaagggtttggttgactcccttttccaagctccacaggatgctggaactcactatgcagtcatgagctcctacgagtacctcagcactggacttcgccagtacttggacaacaaaatggatggattctacattgctccagcttttatggacaagcttgttgttcacatcttcaagaacttcatgaccctgcccaacatcaaggttcctctcattcttgtatctggggaggcaaggggacaggaaaatcttccaatgtgagctt

SEQ ID NO: 216685 - DNA, 344 bp, Glycine max
gacagagcgagttgttgtaaagcttgccttgatgcaggcatggccacccacgcgggtctagcttctacaaggatccccactaacaccaagttcccatccaaggcttcacactctttcccaacccaatgcgcctaaaagagacttgaggtgacagaattctctgggctaagatccacttcatgtgtgacatatgctaacgatgctagagaatcttccttttttgatcttgtagcttcccaactcactcccaagaccaatggatcatcaactcctgtgaggggagagacagtggccaaattgaaagtggcaatcaatgggttcggacgcattggtaaaaacttcct

SEQ ID NO: 216686 - DNA, 337 bp, Glycine max
gttatatattgagacagaatggggtacacaactcatagcaaaaggcttattacgctgtaaaggtgcatttaaccataaacaaaaatcgcctccaagactataaaaacattacattttaaacaaattagacgtccacttcatgatccgcaaacacctactgtaactgctggtgttgctgcctaacaagtatcatattccctgtacacattttaaaaggagtagcttttgacgaacaacttcttcttgggttgctcggattcacccttaccagagttcttgccaagctgagcaagtgacttggagttggcaccgaatgcaacatgcatcttgtgctggc

SEQ ID NO: 216687 - DNA, 537 bp, Glycine max
cccacgagacctagtacaatatatagtaacacaataaatacaagagattctgcaaactgaaaaagggattcttactaaagcaaactcaaacaagaacaacttccactcatttggcatctaccgtagtaacacaagatcaaaagcagcttctctgatagaacacacgtacgtatgattcaacatctttcacaggagtggttcatttctaacagctagctattgcaacttaaaataattgcaatgcttctgcaaagtgctaactttttttcccccccttctttatggatatgacaatgtgatcagaatgaaacaataaccaatccattgaatttgaatctgattttgggtttggatcaataccaccattcttcatctcaggaaaggacaagaaataggccaaagcctgcaaaccaactactaattaagcgcttaaaactgcattagtggctggtttaagtgtgatgttaagaacatcagcttggttattaaagggtgttctttgtacgaagaagcatgccccaataacaatgtagcaca

SEQ ID NO: 216688 - DNA, 401 bp, Glycine max
atttaaccagtgttgaatcatcaaatgccttaacttctgcacctccacatatgcatgacgaaatcactaggagttctggttccagtgcacttattgaatcaaatcgtactggacaaagtcgcatttccattttccaaagcctaattgatcgtgctcgaaggaccgtgcgaggatctgcagatgatataggatggcttcaacgtgatcctggaatgcctccggttgaagatggaacagagaggttcctggaaattctggacaacatcaagcatggtgttcacaagttaccaaattcggtggtttatttgttaattccaggtcttttcagtaatcatggtccactttactttgtcagtacaaaagtcagttttttcaaaaatgggtttggcctgtcttatcgc

SEQ ID NO: 216689 - DNA, 471 bp, Glycine max
cctaaaaacccccaccaccaccactcaaaattctataaccaaaccaagcccatcatcatccaccaccaaaacgacgccgcagcagcgcgtggagctaaagagaaaaacaaactcatgggtccccgcactaatgctaaacgcattcgacgacatcatcaacaacttcatagaccctccactcaaaccctccatagaccctcgccacgtgttgtcacaaaacttcgcccccgtccacgagcttcctccgacggagtgtgaagtcattgaaggctctctcccaccgtccctcgacggcgcctacatccgaaacggccccaacccccagttcctcccgcgtgggccctaccacctcttcgacggcgacggcatgctccacgcgcttcgcatctgccatggcaaaaaacccacgctctgcagccgctacgttaaaacctacaaatacaccatggaaaacgacgccggtttccctct

SEQ ID NO: 216690 - DNA, 528 bp, Glycine max
cccaaattcattttaatcctaattttgcacttcttgatcattcgatttttctcctgaagatgcagatattcgtaaaaactttgaccggcaagaccatcacccttgaggtggaatcctccgacaccattgacaacgtaaaagctaagattcaagacaaggaagggatcccacctgaccagcagagacttatctttgcgggtaaacaacttgaggatggtcgcacccttgccgattacaacatccaaaaggaatcaaccctccatctcgtgcttcgcctcaggggtggcatgcaaatctttgtcaagactttgaccgggaagaccatcacccttgaggtggaatcctcggacaccattgataatgttaaggccaagatccaggacaaagagggcatccccccagatcagcagaggctgatttttgccggtaaacaacttgaggatggaagaacccttgctgattacaacattcagaaggaatccacccttcacttggtgcttcgtttgagaggtggtatgcagattttcg

SEQ ID NO: 216691 - DNA, 619 bp, Glycine max
gttgaaagttaagaagtagcaaagatgtttccattcgggcacaagggtcaaaagataaaggggactatggtggttatgcagaagaatgtgttggatatcaacagcatcaccagtgttgacgggatcgtcggcaccggcttagacttcttaggcagtgcactcgatacagttacttttttagcctcctccatctccatccaacttattagtgctaccaaggctgatggtgggaaaggaaaagttggaaaggctacaaatttgagaggaaagataacattaccaaccataggagctaaggaagaagcatacgatgctcaatttgattgggacagtgacttcggaattcccggtgcattttatattaagaacttcatgcaaaacgagttctacctcaagtctttaattctcgaagacattccaaaccatggaaccattcacttcatatgtaactcctgggtttacaattcaaaacactacaagactgatcgcattttctttgccaacaatacatatcttccaagcgagacaccggctccacttgtcaagtacagagaagaagaaattgagaatgtaagaggggatggaaactgtgagcgcagggaatgggatagatctatga

SEQ ID NO: 216692 - DNA, 502 bp, Glycine max
tattccttacgaccttctcggttctgccgactcggaagatgctgtgggacgggtctactgcgcctcaccatagcaggggaatggaccctctcgggaataaaggcgccacgcaattatggctctggccaccgaaggggccagttactttggaggccaccttgtggaccgtctgcttggaagaggccacatcttgatccaccataataatttcttcacgggacggaaatagcacatgcttcaccacagggggaaccctgactaaaagcacattccgcacgactatggttaacccatccttctggagggtgaccagatctaccactaggcttgccccgcttcccctgtccattacaagttcaaaaacgggtggaccatccagacaaaggtctggggcacgctcaacatagttgggatggcatacaggcatgtgcccgctttctgattagtggcccaatgaaggctacggtgaatcacttctacaccctaaggctgtgacctactg

SEQ ID NO: 216693 - DNA, 612 bp, Glycine max
  unsure (1)..(612): unsure at all n locations
cttaattttctcacataatgaatatttgttacagatactaaactagaaaaggttttgagttggtctgatcgtcacaaaatcataggaggaattgctcgaggaattttatatttacatgaacattctagacttaaagttatacatcgtgatcttaaacctagcaatgtattgttggacgaaaatatgaatccaaaaatttcagattttggtcttgctagaattgttgaaatagatcaacaggaaggaagtacaaatagaattattggaacatagtaagttttcaatactcattcctatgattttcatcccttgtaagatatatttaagcttatttgtcactttttcggttttcccataattttgcagtggctatatgtctccagagtatgctatgtttggacaattttcagacaaatcagatgtttatagctttggagttatgattctcgagattattagtggaaaaaagaatataggctcctacgaaccacagtcgtgtgctgatggtcttctaaattntgtgagtgcaataatcttggaatttttattactatgctaatgtcaatanaatcaatataaagtggaaaatatatgattggccaaattacaaat

SEQ ID NO: 216694 - DNA, 477 bp, Glycine max
  unsure (1)..(477): unsure at all n locations
accatctctgctgctatcacaaccttatcgatctcccgcgcaactcttgtgcaaaagcgggtctcatctcccgttcttggtttgccagcaatgggtaaggtgggaagagtgagttgctccatggaggaaaaaccttattctgtgaaggaaagcagctctagcatgttggggatgggggcatctctgatggcagctgccagcgctgcagccatgtcaggcccagccatggccttggtagatgagagactgagcactgaaggaaccggacttccctttggcctcagcaacaatcttcttggttggatccttttcggcgtctttggtcttatctggactccctattttgtctacacttccactcttgaagaggatgaagagtcaggactgtccctttaaatatcctgngttgtagggtgggtgatgatgaatgatggattgtataaattgcaatgagtccccctcatcttctgtgttgtt

SEQ ID NO: 216695 - DNA, 469 bp, Glycine max
gaactgatataggaaacacttttattaagacttcaaatcacagcattcaagataatacaatacgcaacactttttagaaagccttataactataaactataaaagcttggcccagatgaaattacactgcaggcaaatttttcattcacctttagcttagttatcttcattgccgcccaaattattctttgtcacatctttgtattagccctggatggcaacaccaaggggagcagcatccataggtattatcttctcaatttctacacccttgctggtctggttttcataggctgaaatgtgcactccaagtgctgctctaccagagggatcaaggttgttagaccaagcagcatcccactcaacagctgtggctgtgctacatgcaacacttgctccttcaggaacagtgagcctagctgagttctgagggaagaacctctcaaagatcattctgtaagaatatgct

SEQ ID NO: 216696 - DNA, 519 bp, Glycine max
tttattttttttttttttttttttcttattaatttttttaacttttttttttttgggctttattaatttctaattctttaacccaaattttcccaaccccaccaatctcataccaacaaaaccattcccttcaggtcaaccttccaaagggcctaatagcctcacccgaaaacaccaaactttccactgcgacagcaatcgcaagagcaatattcacaaccctcggaacctgcgacgccgctttcgccgttcaacaaatagccgacatagcagaaggcgacaaccgcggtctggcactgtagctgcccataattcctgcaatagggtgggctctgttaaccattctgcagccggcgctgaaccaactgaaccgcatgcgcatcaccaaaggcgtgatcattgggtaggggcttggcggattggctggcttgggggctagcccgcatgcatcggcggcggcggcttctgaagttgcggcgaaggctgaagctgcctcgaacgacaacaggggacagcttc

SEQ ID NO: 216697 - DNA, 525 bp, Glycine max
ttacaaggctctactctactgcttcaccttctgctctagaaaattcagtggtgatagcatgggttcggctactctctctgtagccaaaccagcccttcaggcaaatgggaaaggcttctctgaattctctggcctccgcagctcatcaggcttccttcccttttctagaaaatcttcagaggatttccattctgtcattgccttccagacctatgcagttggaagcagtggaggatacaagaagggtgtgacagaagcaaaactgaaggttgccataaacggatttggaaggattggaaggaacttcttgaggtgctggcacggtcgcaaagactcccctcttgatgtcattgccatcaacgacaccggtggcgtgaaacaagcctctcaccttctcaagtacgattcgatcctcggaaccttcgatgctgatgtcaagcctgttggcagcgacatcatctctgtcgatggaaaagaaatcaaagttgtctctgaccgcaaccctgccaacctttcttgggagga

SEQ ID NO: 216698 - DNA, 409 bp, Glycine max
  unsure (1)..(409): unsure at all n locations
aaacctgcgagtcgatactgtttcgagacnacatnaagttaccgcacgacctcgaattcgactcgagattgctacatagggctatatagcattaacatttgagtcttcattgcacaatgtcgggctcgggcataaacggatggagcctctcttccatctcctcagccaaaacctctctcaggaaggccacattacgcccttccgtcttcgcaacccttaacactccatcttctacttcctcttcatcttccttcccctctctcattcaagacaggcccgtttttgctgaccctgcccccattatcaccccaactgtgagagaggataaggcacaggaatactagaaagatcttgaacaacctcataaattgttgtgggagaagagcgaactcaaagcgacagctgttga

SEQ ID NO: 216699 - DNA, 522 bp, Glycine max
caagaggaaagggtttggttgacttcctttttcaagctccacaggatgctggaactcactatgctgtcatgagctcctacgagtaccttagcactggacttcgccagtacttggacaacaacatggatggattttacattgctccagcttttatggacaaacttgttgttcacattaccaagaacttcatgaccctgcccaacatcaaggttcctctcattcttggtatctggggaggcaagggacaaggaaaatctttccaatgtgagcttgtctttgccaagatgggaatcaaccccatcatgatgagtgctggagagttggaaagtggaaatgcaggagagccatcaaaactgatcatgcagagataccgtgaagccgcacacttgatcaagaagggaaagatgtgtgctctcttcatcaacgatcttgatgcaggagctggtcgttttggtggaaccacccaatacactgtcaacaaccagatggtgaatgccaccctcatgaacattgctgataacc

SEQ ID NO: 216700 - DNA, 541 bp, Glycine max
  unsure (1)..(541): unsure at all n locations
ggattggaaggaactacactactcaaatataagatcccaacccgtggccttcttggattgcggaattcaattttaactgcctcccgagggactgctattctcaacactgtttttgatagctatgggccttgggctggtgaaattagtactcgggatcaaggctcattggttgcttttgaggatggaacaagtacttcttatgcaatctctagttcacaggagaggggacagatgtttattggtcctggagtggatgtttataaaggtcaaattgttggcatccatcagcgacctggggacttgtccttgaatgtttgcaagaagaaagctgcaaccaacatacgttccaacaaggaacaaacagtgattcttgatacgccattggactatagtctggatgactgcattgaatacatccaagaagatgaactagtagaggtcacccncgcaagtatccgaatgtccaagaatccaaaaattacaaacangaaaacaaggtagactttcaccgtgaagctgtaacttgcaaatgcttnttgag

SEQ ID NO: 216701 - DNA, 529 bp, Glycine max
  unsure (1)..(529): unsure at all n locations
gcatttgcagagagagagagagatttagagttaagacggntgtggggattcgatgggggccaccgttcactcgccgctagtcacttatgcttccgtcatatctctgcttacactctgtcctccgtttgtcatacttctatggtacaccatgactcttgctgacggatctgtttccgagacattccattatttaaggcagaatgggttgcagggttttgctacatatatggcccacccccactcccaccgcctgcaaaatcattgcagtctatgctgcatttgaggcagcacttcagcttcttcttcccgggaaaaccgtttacggccctatttctccaaccggccaccgacctgtctacaaggcaaatggtctgcaagcctattttgtcaccttgattacttattttgctctctggtggtatgggatattcaaccctacgattgtttatcatcatttgggagaaatttattcagctctcatcttcggcagctttctcttctgtgttttcttgtacatcaagggtcattt

SEQ ID NO: 216702 - DNA, 468 bp, Glycine max
agcgaaagacgcaccgagaggactgtacgggcgagaagtcggtcaaggccaggtttccgatcaaggaggagctcgtcaatgactacctcagcggcaagatcacaatggacgcgacgttcaatgagctccgaaagaagggcaagaagagcgacaaagagatagatagcatgatcaggcttgcaaaggaggtccaggcgagcattctcaaccagaagctggagccggttgtgcgcactttctacaatcggacggctttccagcttccaggcgatgctcgtgtccgaatttcattcgacaccaacctgacgctggttagggaggacaattgggataacggcaagcggtccggcagcaactggcggcggatggacattgggattgactggccgttcgagcagttgccgaaggaggatctcgagcttttcccgtacggtgtgctcgaggttaagctgcagacgcagatggggc

SEQ ID NO: 216703 - DNA, 382 bp, Glycine max
cgcactaactatgctttttttttctttaacaccaccatttattgctgcaagaagcggtcgatttagaactatcaccaactgccattctgaactgcgaaatgattgccagctatcgtattaaggaacgaacaatctaactggtttgaaccgtgtggagactagatgtaccaactcttgctgcacgatgatattgtaagataagcttgcctttattcatatgctacttcttcaataacgtgatatccatgccatgatcgctcgcgctaacggtacatttgtggtatcacatgacatcgtctcaccttgacatagtgcaagatttgccttagagcccctgtagatcagacacctgtaaattgttcgattcttaacttgtatttat

SEQ ID NO: 216704 - DNA, 381 bp, Glycine max
accggactcggtggcatcaacagagaactgagtgagaatctcttctccatttctacgggaaaatagatctccccggaaaagatttgtaagtcaatcgcctttctttttattcaccaatcggaccaatcccctaacaggactctgtatatttagagggactagggtatttacttcaacgatactattgacccgtaccatgatggaagaagagtctggtaaaacatgcccttccatgggagtgaaaaaaaaccgttctactttaatatgacgttttgtcttaaaacctataactcctggatgctcaaaaaaggcctcttttgcaaaaaaggaatttatgcctacagccctatatttagtgattcccgagctttgcgaacggca

SEQ ID NO: 216705 - DNA, 436 bp, Glycine max
ggagactgagaaaacagaactatacaaaatggaagatacactttctgcgttgaggtctttgatgctttctcagtctccaccgcttgatgccttagttgttccttctgaagattatcaccagagcgaatatgtgtccgcacgagacaagcgccgcgaattcgtttccggcttcactggaagtgccggcttggcacttataacaaagaatgaagcactgctgtggacggatggacgatattttttgcaggctgagcaagaacttagtgctcaggggaagctatccgattggtgaagaacccgcctgtgatatctggagggccgataatttggcaaaagaggcattcattgtggttgacccttggtgcatttcaattgatactgctcaaagatgggagcgtgcttttgccgaaaaacagcaaaagctggttccaacctc

SEQ ID NO: 216706 - DNA, 600 bp, Glycine max
gaaaattgtaagtacgcggacgaactgcgcaaggtaacgaacgtagctgagcaatgacaatgccactgccaacggtcgtttccccattttcttcttcctcaggcaccttcttatccacagttaccgcgcgctcttcactccctccaaaacgcaacgtctccccttccccttcccccttctccactctctctcgcagagacattgctctgctttccttcttctccctctccctctcagcaccatcctccgccatcgacattggcatctcaggaccgaaggattggctgaaagagcaaaaaaagaaggcctccaagtacctattggcccccgtcgatgcctcccgccaaatccttcgctctgcctatctcacgctcacggaaactgacgctgcttatacggatgaggatttggagaagatgcagcagctctttatatctgctgccagggattgcgtcccacaggaccggaattctttcgtcactctccaagccaacaccggagtagaggtgtgcacctttcgattgattgtgaagaatgcagcttcgttgcttggaaataaagatccctgtaaagtgaaagccgaagctttgctagataatc

SEQ ID NO: 216707 - DNA, 546 bp, Glycine max
aaaaattccaacacaagttctatactaaagtgcagagagcatgagctagcatctatatatgctatgatagacttaaggaaagtgtgtctggtcattgtgttgtacatgcatacagatagtatgaggagcgcactggtatggatttttaccttgaacgtttgccttcacattttatttattcctggtggtgactcaaagccgcatccgcgtttcagagagaaaatcactgaggattacaatcgcggatttataagcattgactgtggagcaagtaacgattacttggacgaggaaacaagtacattttataagacagacacagatttcatagaaacgggagaaaacttgttggcgtcttcccaatttattgacataaatatccctggttttggaagacaactacgcacattgagaagcttccctgagggaaataggaactgttatactctgaagcccgagtataagcaaggtgaacagcaaagttatctgattcgggctatgttcggatatggaaactacgatggaaaaaatcatccccctacgttc

SEQ ID NO: 216708 - DNA, 388 bp, Glycine max
gctcgttaagaccgcgaaaacagtgtctttttcagggaggggtattttggccatggatgagggcaatgctacctgtgggaagcgtttggcttcaattgggctagagaacactgaagctaaccgccaggcataccgtaccctcctcgtgacagttccaggccttggtcagtacatctctggtgccattctctttgaggaaacactctaccaatccacaactgatggcaggaagattgttgacgtgctgcttgagcaaaacattgttcctggtattaaagtcgacaagggtttggtgccccttgcaggttccaacgacgagtcatggtgccaaggtttggatggtctagcctctcgctcagctgcatactacgagcaaggtgcccgtttc

SEQ ID NO: 216709 - DNA, 542 bp, Glycine max
cgcagttcccaaattcattttaattctaattttgcacttcttgatcattcgattggtctcctgaagatgcagatattcgtaaaaactttgaccggcaagaccatcacccttgaggtggaatcctccgacaccattgacaacgtaaaagctaagattcaagacaaggaagggatcccacctgaccagcagagacttatctttgcgggtaaacaacttgaggatggtcgcacccttgccgattacaacatccaaaaggaatcaaccctccatctcgtgcttcgcctcaggggtggcatgcaaatctttgtcaagactttgaccgggaagaccatcacccttgaggtggaatcctcggacaccattgataatgctaaggccaagatccaggacaaagagggcatccccccagatcagcagaggctgatttttgccggtaaacaacttgaggatggaagaacccttgctgattacaacattcagaaggaatccacccttcacttggtgcttcgtttgagaggcggcatgcagattttcgttaaaac

SEQ ID NO: 216710 - DNA, 495 bp, Glycine max
cccaaattgagtttgagtttcagccatggtatctgtttctctgctcttattcctatctttctttgccttctttgcaccctctgaatctcacgacaaagtctcgttggaattgtactacgaaagcttatgcccctacagcgccaacttcatcgtgaatcacctcccaaaaatcttcaccccagatcttgccccaatcgttcacctcaaactcgttccttggggcaatgccaaactccgtgccaacgccacctttgactgccagcatgggccatatgagtgcttgctgaacacagttgaagcctgtgcaattcacatctggcctcaactcagcaaacattttcctttcatctactgtgttgaggatctggtgtttcagagtaagcgtgaggaatgggaatcttgttttgagaaactggatcttgattcggaacctattaatcagtgttataatagtgaacatggaaaacagttggagctacaatatgcagctgaaac

SEQ ID NO: 216711 - DNA, 575 bp, Glycine max
ctaacaacgtccctatttccggtttcaaattccctccggcgacacattcggattccaatatgaggacccgtttatcctcgactcgggtcatcttcgtggcctcgctctgtttcctcgcaagcttcgaattattgcaagccaaaaccatcgacccctacaaggttcttggggttgataaaaatgcaagtcagcgggaaattcagaaggcttttcacaagctatctcttcagtatcaccctgacaagaacaaagccaagggtgcacaagagaagttttctcagatcaataatgcatatgaacttttatccgatgaagagaagagaaagaattatgacttgtatggagatgagaaaggaaaccctggatttcatggtggccatcctggaggtcaggatggatatacttattttacagggggtggtcctggacaaagccattttaacttcaaaccagggggggactggcagggtatgggtggtcagggaggatctaagtcattctccttttcttttggcagctcgggcaattccaatccctttggatttggcttggatgatctttttgcagttttttcg

SEQ ID NO: 216712 - DNA, 517 bp, Glycine max
gagaaaggtgaagaaatcggtggagggaatgaaaggggtgacagaggtggaggtggatagaaaggccagcaaggtaactgtttccggctatgtggaaccctcaaaggtggtttctcgcatcgctcaccggactggtaagagagcggagctatggccatacttgccgtacgacgtcgttgcgcacccttacgcgccaggtgtctacgacaggaaagcgccatctggctacgtgcgaaacgctgatgtagaccctcggctcaccaacctcgcacgtgccagctccactgaggtcaagtacaccaccgctttcagcgacgacaaccccgccgcatgtgtcgttatgtgattattcattttctctcttgtatcatagtagcaaagaaaaacatcaaatgttcacgtggggaacgcttttggcacaatggacatgtatcctttaaagtgatgttcggaaatttgatatcttaagatggtaattaattaatgattctgatttataaatctataacaaattaat

SEQ ID NO: 216713 - DNA, 526 bp, Glycine max
  unsure (1)..(526): unsure at all n locations
atacactggattcctacttantgctagctcaatatgaaatanagggccaagacccagcggccgccaatgtgactgatatattcataattcctcttatttgtatgttacacgacgtacaaaattgagtgagaggggtggattcataaactattaccatatcgcccaatattctacactcttcttaacaatattaatagtatcatgaactaacccttattgcacgtctctataataatgaacgtattcgcatgcttctcgataaacagaaagctatactatcgtcagatatggcacacattattgtataggttgcatctggtgtcatcccatcaccttttgattatgctgatgtagttactaccacaaactacatgttacttcgagtaccactttgagctattatattctacagaaacggggctaaagaaattaacatacaaggaaaataagtattgtatgactaccaaaacaaaactaaccaaactgtttatccttgactgcaaggtggcccttcacaaccacacta

SEQ ID NO: 216714 - DNA, 545 bp, Glycine max
tattagctacatggcagaacgggttgtaggaactggatcatttggaatcgttttccaggcaaaatgcttggaaactggggaggcagtggcaattaaaaaggttttacaagacagaagatacaagaatcgtgaactgcagttaatgcgtgtgatggatcatccaaatgtgatctctttgaagcattgtttcttttcaactacaagtacagatgaactttttctcaatttggtgatggagtatgttccagagtccatgtatagagtcttaaagcactatagcaatgctaatcaaagaatgccaatcatctacgtaaaactttatatgtaccagattttcagggggttggcttacatccacactggtcccaaagtttgccacagagatttgaagcctcaaaatatactggtggatcctcttacacaccaagtgaagctatgtgattttggaagtgcaaaagttctagtcgaaggtgaagctaatatatcatacatatgttcacgattctatcgagcaccagaacttatatttggggccacagagtata

SEQ ID NO: 216715 - DNA, 544 bp, Glycine max
gtatgctaatgctcaacgagaagtccaaagtatattactgatgatgcataattcaatataaaggcagtggagcaactgtgtaattgtacactgggcactgtgttatataaattaggacctaaaaaaggctatattttgtttgtatactagagctacttaagccagaggtaattagaaaaaccattcacaaggtttgctcattcttcacttgtccaaacagcaattatgcaggatggtaattgcacctctctaaagtaaaatgcctttctcctttctcgtggcacttggaagatcaatcaaaacttaaaaggcttagcctaagtttggttttctgttattgtctgaatggctgagagagacacatgcatggaactttcttataggccactggaacggttggcatactcttgaactaatgccccaaagagagatggcctttggagcaagttggctggtgaatcaaattctatggcccgccctgcatctacaactagaactctatcacagtccattactgttggtattctatgagcaatgcttatga

SEQ ID NO: 216716 - DNA, 600 bp, Glycine max
  unsure (1)..(600): unsure at all n locations
attaaatgcacatataatggtgttcaattattcgaaagagaatttccaaaaaaatggctaacagatggtattcagataaagatcttatttccttttcgtctcaaaccttggcacaaatctaagctacgatccaatgaaaagaaaaaggatctaatgaaaaaaaagaacttttgttttctaacagtttgggggatggaagtcgacttgcccttttctggttctccccaaaaaaatagattttcatcattttttgaccccatttttaaagaactaaaaaaaaaaacgaaacaatttcaatttttcacttttcgagttctaaaagttttaagtgaaaaattgaaattgtttctaactatcttaatagaaaaagcaaaaaggattagcaaaagtattatcgaaagtattcttaaaagtattctcaaaagtattctaagcctaacgaaaataaaacaatttttcaaattgctatntattaaatttaaattcaaaaagatagatgaattgagcgaaaatacaaaagaatcaacaatttataagaataatccaatgatttctgaacaaccatttcattcaatcgataaatcagtaaattgttctttg

SEQ ID NO: 216717 - DNA, 499 bp, Glycine max
tgaggctattccatctgccccttatgatcctcttgttttaagacacgcctttgagcaggcagtcataaaaaggttgatgactgatgtgccttttggtgttctactctctggaggtttggactcttctttggttgcatccatcacttctcgttacttggccaacacaaaggctgctgagcagtggggatcaaagttacattcattctgtgtaggccttgagggctcaccagatttgaaggctgcaaaagaggttgctgactatctaggcactgtccaccatgagtttaccttcactgttcaggatggaatagatgccattgaagatgttatctaccatattgaaacatatgatgtgactacaattagagcaagcacacctatgtttctcatgtctcggaagattaaatcacttggtgtcaaatgggttatctcaggagaaggatctgatgagatctttggagggtatttgtacttccacaaggcacccaacaaggaggag

SEQ ID NO: 216718 - DNA, 412 bp, Glycine max
  unsure (1)..(412): unsure at all n locations
agttagtgaatcaaggatggagcttttaaggtctgttataattggacctcaaggcgccccatgccatgatggtcttttctttttcgattgcctctttccttctacctaccctgcaggtccaccgaaagttcactaccattcaggtggcctaaggctaaatccaaatttatataattgtggaaaagtctgccttagtctcttgggcacttggcatggtagtaatagtgaaaattggataccagaaaaatcaaccatgctacaagtgttggtttcgatacaagctctaattctaaatgagaagcctttttttaatgagcctgngtatacgacaacatatcctggtgctgaggggcaaagaagatctaaggagtacaacgagagtacatttattttattcttaaagacaatgatg

SEQ ID NO: 216719 - DNA, 452 bp, Glycine max
gaaaaacagataagtattgatgagttactgtttcaagttgttgttcccagcagcataaattgagaaaataagacactctctcatgagttctgtctggttgcatagcattggttggtagttgtctcaaaaatctcttcttgccctttggccataatcaaaagccaagacactgttcatacagctgctcaattatcaagccaaccttgctcggttccactgcagaatttcagtttattcttatctaggtagactccttataagtgcgcagaagttcaagtgtagagaatgagtcagcctaagattaaacgccgagttggtaaatacgaggtggggaggaccattggtgaaggtacatttgcaaaggtgaaatttgcaaggaactctgagacaggagagcccgtggctcttaaaattcttgacaaggagaaggtgctaaagcacaagatggctga

SEQ ID NO: 216720 - DNA, 584 bp, Glycine max
ctgcaacacaacacacataacacgtaacaaagagaatgagagcgctaaattcgcacgtgctcctcgtagatcttcactcccaccatcacgtgcccacctcaaccctctcctacctcagaaactcccgcttcatatcatccctccgtcgacgctccccaagaaccggaatccgatgtacggcgtcgccggagattcgccgcccctccgatcgcttctacggctcctcgccgtcgacgtcgcgcccggaggacctcaacctcttcctggaactgctccctctgaagatgcgaagggaactctatcgccaccgcgaaatcggaggcctcatagagattgtcatggatttgggaagaaaacctctcgccaggttcccttccggtgattgggtcatctctgaacaacccatagcgcaagaggatttacgccatgccatttccaaggttggtgagttttctgatgacaacaggtcaggtattgataggtctttgcatcggataagcgcgattcggaatcggaaaatgcaaatcattgggcttacttgttcggtgggtcgagctgtgggtgcagtgctgaaatatacgtga

SEQ ID NO: 216721 - DNA, 491 bp, Glycine max
cagcattctcaacacctcctcccttactcactcatcaatggcatcaacaatatcagcaatggccatgatcaacgccaaatgcgtcaacccaaagttccccaaccccaccaagctcgtaccatcaaaaccttcccttcaggtcaaccttccaaagggcctaatagcctcacccgaaaacaccaaactttccactgcgacagcaatcgcaggagcaatattcacaaccctcggaacctgcgacgccgctttcgccgttcaacaaatagccgacatagcagaaggcgacaaccgcggtctggcactgttgctgcccataattcctgcaatagggtgggttctgttcaacattctgcagccggcgctgaaccaactgaaccgcatgcgcagcaccaaaggcgtgatcattgggttggggcttggcggcttggctggcttggtggctgcgccgcatgcatcggcggcggcggcttctgaagtggcggcgatggctg

SEQ ID NO: 216722 - DNA, 591 bp, Glycine max
ccaaaacaggaaaatcacatgctcttcataagagagtggaacagctctgcatcagggcaatcagatgggctgaattgaaaagaaaatcaaaggaagagaagaaactagcaattactgtcttcagtttccctccagacaaaggaaacgtgggaactgctgcctatctcaatgtcttcgcctccatatactcagttatgaaagaactaaaaaaagatggttataatgttgacggccttccagagactccagaagctttgattgaagatgtaattcatgacaaagaagctcaattcagcagcccaaatctgaatattgcttacaaaatgagtgtccgcgagtaccaaaatttgactccctatgccacagcactggaggagaattggggaaaaccccctggcaatctgaatgcagatggagagaatcttttggtatatgggaaacagtatggtaatgtcttataggtgttcagcctacatttggctatgagggggatccaatgaggctgcttttctccaaatctgccagccctcatcatggatttgcagcatattattcctttgttgagaaaatcttcaaagctgatgctgtact

SEQ ID NO: 216723 - DNA, 498 bp, Glycine max
tgcaattgaagttgaagtcttgcccttctctcttcaactccaaacacaagacatgatcatccatggctgcctccgtctccactgtcggagctgtcaacagagctcttttgaacctgaatgggtctggacctggggtttcagctcccagttcatccttctttgggagcagcttgaagaaggttattggctcaagggtccccaacacaaagatttcctctggaagcttcaagattgttgctgtagaagagaagaaagagattgaagagacccagcagaccgacaaggacagatggaagggtcttgcctatgatatctcagacgaccaacaggacatcacaagaggaaagggtttggttgactcccttttccaagctccacaggatgctggaactcactatgctgtcatgagctcctacgagtaccttagcactggacttcggcagtacttggacaacaacatggatggattttacattgctcccagctttatggacaaac

SEQ ID NO: 216724 - DNA, 454 bp, Glycine max
caatcgtcaacatggctattgcctttgcatttttgggagctgcattgcgtggacggactagggatgcctatggccgaaagacggccaccctccatgccgatgttatctttaccgacagaacactaatgatggctgctgctccagacccttatgttgtcattctgggacgccttctggttgggtagggtgtgggcatagcttctgtcactgctcccgtttatattgcagaagcatcaccttccgaaataaggggttcattagtcaccacacatgtcctcatgataaccgaaagacagataattttctatcttgttaacctcgctattactggagttcctggttcttgccgatggaagcttggtgtttctggcgtgcctgctgatagtcagttcagtctcatgctctcactgcctgaatacgcaagatggcgtttcgcgaagaatacgaaaaatga

SEQ ID NO: 216725 - DNA, 386 bp, Glycine max
cgttgccattctcatcctcttctttctctctttaccattgccatggatccctacaagcaccggccatccagcgccttcaattctcccttctggactacaaattctggtgctcctatttggaacaacaactcctctttaaccgttggagctagaggtccaattctgctggaggattatcatcttgtggagaagcttgcaaattttgatagggaacgtatcccagaacgtgttgtccatgccaggggcgctagtgcaaagggtttctttgaggtcacccatgacatttctcacctgacatgtgcagatttccttcgagcccctggagttcagacgcctgtaattggtcgtttctcaactgtcattcatgagcgtggtagccctgaaac

SEQ ID NO: 216726 - DNA, 479 bp, Glycine max
tgaaaagaaaaagttcgaaaacatgtatattctgacttaaaaggagaaatgcattggaggaccgatgtgtaccatgcattagaattgaaatgtagtaatggccatatcttaccggagacatgtcatttatggattatatcaggaaaataataccggtccggttgagtctctttttcaattcgaaaagatcaagaacaaatgaacattcattatctttctactggagaaagagactattgtaacctactagcaagtgaaaaagaggttagacatatagagatacgatataatccttctgataaaaaagaaagagggattgcacattatgcaatatttaatcaaatcatatatattgatcattgccattctacacatgctactgttttacatgatactacggatatattagcagagaggcggagaaatacattaattattccatttcaattccaatcgattcaagaacgagacagagagct

SEQ ID NO: 216727 - DNA, 383 bp, Glycine max
  unsure (1)..(383): unsure at all n locations
agaaacagcgtgctcctatctgatactcaaaaaccaggattaangttttcggcacgcttccgaatgctaggaattcgtttcgaggagagaccctcttgcacatttgagttttcctcctgggtttaggttttaccccacaggtgatgatcttttggttcagtacctttgccgcaatgtttttggccctcatttctctctttcaatcattgctgaaattgatttttacaagtttgttccatcccctcttccatttaaggccgcgtttggggggaaggagtgctatttttaaaggccaagattcaggatttacccttttgttttacgcccaaacagtcaacgtgatttctgttttttgtaaagacccctgatatcagacttttatt

SEQ ID NO: 216728 - DNA, 516 bp, Glycine max
ggagactgagaaaacagaactatacaaaatggaagatacactttctgcgttgaggtctttgatgctttctcagtctccaccgcttgatgccttagttgttccttctgaagattatcaccagagcgaatatgtgtccgcacgagacaagcgccgcgaattcgtttccggcttcactggaagtgccggcttggcacttataacaaagaatgaagcactgctgtggacggatggacgatattttttgcaggctgagcaagaacttagtgctcaggggaagcttatccgattggggaaaaaccctgctgtgatatctggagggccgataatttgtcaaaagaggcattcattgtggttgacccttggtgcatttcaattgatactgctcaaagatgggagcgtgcttttgccgaaaaacagcaaaagctggttccaacctcaataaatttggcggatgaagtttggataaatcgcccacagccccagattaatgctggtatcggacatccactgaaattt

SEQ ID NO: 216729 - DNA, 524 bp, Glycine max
ggagactgagaaaacagaactatacaaaatggaagatacactttctgcgttgaggtctttgatgctttctcagtctccaccgcttgatgccttagttgttccttctgaagattatcaccagagcgaatatgtgtccgcacgagacaagcgccgcgaattcgtttccggcttcactggaagtgccggcttggcacttataacaaagaatgaagcactgctgtggacggatggacgatattttttgcaggctgagcaagaacttagtgctcagtggaagcttatgcgtattggtgaagatcctgctgtagatatctggatggccgataatttgccaaaagaggcatccattggggttgacccttggtgcatttcaattgatactgctcaaagatgggagcgtgcttttgccgaaaaacagcaaaagctggttccaacctcaaaaaatttggtggatgaagtttggataaatcgcccacagccacagattaatgctgttatcgtacatccactgaaatttgcaggtc

SEQ ID NO: 216730 - DNA, 621 bp, Glycine max
  unsure (1)..(621): unsure at all n locations
ggagcctgctcgaaggtatatgaattctaaactaaggagttgttcttccgaaacatgtgaattccaggggacatatccagaactcaggaagcatgctaggtctgagcatccttctgttcgaccatcagaggtggatccctcgcgacaatgtgattggttaaggatggaacaagaaaggggtttgggagatctttttagctcaatccatgcaagttctggtgcagattacaatagagataccattttgactgggggtcttgctgacttgatgtcctcattcttgtatgaaatatttatctctattgaagatgttaaccgaatggctagtttgttgactaattcgagacacagagttccattatatgacagaaggtctggaacaacaaacagggtatcaaatgatacacagacaagtcaatcagctagatggagatccaatttaccttcagtgcatcaactggagagaattgccagagtagagtgagaagcaatnntccgtatttatcatcccgtgatcttgaggcagaggcaaatcgtacggctagatggagaaacaaattatcatctttaagaaacgcctcgcatgagcatcagtatagagacctcagtgcagaggtcaca

SEQ ID NO: 216731 - DNA, 424 bp, Glycine max
cacgacaccaccagcctcttccttttccgtcgcacttactctcattcatgaccatggccgacgacgcgcagcatgagcacaccttcgagagcgccgacgccggtgcctcgcagaccttccccatgcagtgctctgccctgaggaagaacggcttcgtcgtcatcaagaaccgtccctgcaagatcgtcgaaatgaccacctcgaagaccggcaagcacggtcacgccaaggtccacttggtcgccattgacatcttcacctccaagaagctcgaagaactgtgcccctccacccacaacatgaacgtccccaacgtccgccgccaggagtaccagctcctcgacgtgaccgacgacggtttcctttccttcatgtccgacgacggcaccacccaagacgacgtcaagctgcccgacggtgaagt

SEQ ID NO: 216732 - DNA, 527 bp, Glycine max
gattaagaaatttggtatttgaagccgttattacatatgcatctatacatttcaacataacgatcaagattttctggattcttacatataaaggcttttgacattgtttttaaaatatgttgtcgtcctctaccatggatcaggaaaactgatcttgttgaattgcttgccagtaagaccatgggatgacctaatggaaaattttcttttctcaattcttgtgcttcatggttgctttatcaaaaccaatggttggaaattgttttgcatactcctcaacatcaaggcggagctttgctatctccgattgaaaggtagaagatgactcaattgtggccaagaagtccttcagctttgttcctttgctctctcccttaatcttcacagctatcttcactgctgcatcaaaaaactctgctaccttgacaaaatcctcctcaacaaatcctctagaagtaagagcaggggttcccatcctgatgccaccaggaaccatggcagacacatcttcaggaacagtgttttta

SEQ ID NO: 216733 - DNA, 456 bp, Glycine max
gtcgtatcaactctcgcaaagtgcaagggctatcgtataaccaaataccaacttctttccctcaaatttcttaagctgaccaacagcattctacttaatagcttaaaccatgtaaagaacctcggaccccttctttttaagcttttcatgggacgggggattttgaacggccttattgctttcaccacaaaggcagtacatgttatccgagcccttccttcatccagataacatgagtccttgaggcggggaacatcatcaccactctcggtggagggatccaccgagcactaccacttgatgagcatagttctgagaaccctctggacttccagggggcatagtcttatagaaggcttaataaacctcgttatgctcatccttgccttcacctattgggaagaacattatactgcacttatagaccgagttgtcaccgacgactgctaggatctt

SEQ ID NO: 216734 - DNA, 516 bp, Glycine max
cccgacttggatagggaactatgctagtgactctacctaatcttattgtagaaattgtcaggatcaatgattagaccatgcaaactagaaatgctttttcttgtataaaggaagggattactcgatccatttccatatcgatcatgatatatataataattcgagcacccatttcaaacgcatatccaatttttgcacagcagggttatgaaaatccccgagaagcaaccggtcgtattgtctgtgccaattgccatttagctaataagcccgtggatattgaggttccacaagcggtacttcctgatactgtatttgaagcagttgttcgaattccttatgatatgcaagtgaaacaagttcttgctaataggaaaaagggagctctgaatgtgggggctgttcttattttaccggaaggttttgaattggcaccccccgatcgtatttcgcctgagattaaagagaagataggcaatctggtctttcaaaactatcgtcctacaaaataaaata

SEQ ID NO: 216735 - DNA, 569 bp, Glycine max
  unsure (1)..(569): unsure at all n locations
tgatcatcataacgttctgttcccttaagttgaaaattgctgtgcaaaatgaatgtataatactggctattcagaaggggcaaaaatcagaaatcaaaagaggggacattctgtgagagcatcaaatagcatcgagtaattcatttggtttgcaatagctgacttgaaagttgacactgaagatgggagaaactacagaaaggtatgcagttgtgacaggtgcaaataaaggaattggattagagatagttagacaattagcttcagctggaatcaaggtggcgctcactgcaagaaatgaagagaggggtatccaagcactgcaaacactcaaggactcgggtctatctcaccttgtactgtttcatcaagttgatgtggctgatgcaacaagcgtagcttctctggcagatnttatcaaatctaaatttggaaaacttgatattctggataacaatgcagggattcttggaggctgtaataaagacactgattcattcacttcatttctcttgaagcgtggggcagcaccagaagatgggancaaggcaatcactcaatcatatgag

SEQ ID NO: 216736 - DNA, 337 bp, Glycine max
atttctcaatctctgtgtttgcggttgaggattccgaacgagtgaccttgttcgtggctcgcaacgatgaacttatcatgggaaaagacaacgttcacatcaacattgtcgacattgcacatgtcgactctgccaagacaactaccactggtcacttgatctacaagcttgtaggtatagacacgcgtcagatagagaggatcgagaacgaggctgcccagacgaacaagaggtcattcaagtatgcctgagtgctcgacacgctcttagctgagcgtgacacaggaataaccattgatatcgctttgccgaagtgcgaaaccaccaagaactactg

SEQ ID NO: 216737 - DNA, 401 bp, Glycine max
cctaaattatacgaaagttttgcttgaatatgttggtgtacagctatgttcgctctacagctacatatatgaatgtatattccaacacatatgaccttacacttttttatctacactgtaaaaaataaattgaatatctagattttgagagaaaaagaaaactatgtacaggctcaacagaaattaggaatgcttcattcatctttcattgccagctcatgcatgtttttgtgcccgatttccacatgtagagacaagagagcctcacagacctgaaacgcatctgcttcaaaaaggtcatcattcagcgatgaatataccatccatgcatgcgccaatgttagcttagggcgcaccacatcggatacgagaacttctgcatctcggcatgtgacaagccc

SEQ ID NO: 216738 - DNA, 546 bp, Glycine max
aaaaagttcaaacctgcatgattgcatttattattttggtttccattacacaaacatggtttattaatgacaaatacaagtacattcagccactccaaatacataacttaaacatacacaactgatgaaggaatcagattccttctatttcacatttatttaaagccagggacagtacttcagcaaccatagagcccttagatagagatactgttgggaattcctctgaaagtcaatccctcctcactagaaggatagagcaaagtgtaaggcattttagccggcccatagcggtttctcaatgtctcattattgttcttctctataagcttcttttcaatctcttcaagattctttccaaacctcttaaaggcctctaatggcccggcatcagaagtccagtagtcaccgccatctctctgcccaaggtagaactcatcagatgcgtgccttgataaaatttctataattgtaaggtcaatgagggtctctttcttgccaagtatagtcttcaaaaactccttctcagggttcttagctaacgca

SEQ ID NO: 216739 - DNA, 542 bp, Glycine max
caatagtcagcatggctattgccggtgcaatcgtgggagcagcattgggtggttggattaatgatgcctatggtcgaaagaaggccaccctctttgccgatgttatctttaccgccggagcaataatcatggcttctgctccagatccttatgttctcattttgggacgccttctggttggtttgggtgtgggcatagcttctgtcactgctcccgtttatattgcagaagcatcaccttccgaaataaggggttcattagtcagcacaaatgtcctcatgataaccggtggacagtttctttcctatcttgttaacctcgcttttactggtgttcctggtacttggcgatggatgcttggtgtttctggtgtgcctgctgatgttcagtttgttctcatgctcttcctccctgaatccccaagatggctttttgtcaagaataggaaaaatgaagcccgtgatgtgctttctaagatctttgacgttgctcgcttagaaacgaagtcgatctcctcactgctcaatccgagcaagagcgcc

SEQ ID NO: 216740 - DNA, 523 bp, Glycine max
ttgacaaggacagttattcagatcttgataccttaaatgctttcaaacatgaactgacattattagaaagggtgcgacatccgaatgtggtccagtttgttggagctgtcacccagaatatacctatgatgattgtgcgtgagtaccattctaagggtgacctggcaagctatcttcaaaagaaagggcgtgtgtctccatcaaaagttctacgctttgctcttgatattgccaggggcatgaactatcttcacgaatgcaaaccagatccggttattcactgtgatttaaagccaaaaaatattttgctggataatggagggcaattgaagatagctggatttggcactgtgagattttcgctaatctcacctgatgaagcaaagctggtacagccagagcctaacattgatctttcaagcttgtacgtggcaccggagatttacaaagatgaagtctttgatagaagtgtggatgcatattcttttggtctcattatatatgagatgatagagggtacaca

SEQ ID NO: 216741 - DNA, 470 bp, Glycine max
atttgccttcaagcaagggaaatattatgttttgaagttctgccttgagccaactggattcagagtgaaggcagagggtgtggccaagaacgctccccctgagttccaaaacacaaagctcatgacacgtttgacctacactcttgatgagattgagggaccctttgaggtgtcttctgatggcactgtgaagtttgaggagaaagatggaattgactatgcggccgtcacagaccagctaccgggaggcgaacgtgttccgttcctcttcaccatcaagcagttggtggcatcagggaagccagacagctttagtggagagtttctggtcccatcataccgtggaagctctttcttggaccacaagggaagaggtgcctctacaggttatgacaatgcagttgctctgcctgctggtggaagaggagatgatgaggaacttgccaaggaaaacaacatgagtgcctcat

SEQ ID NO: 216742 - DNA, 446 bp, Glycine max
  unsure (1)..(446): unsure at all n locations
naggattgcgntgattcnanncacgtgaggtaccgccgaagctcgaattcgctcgagagagctatatctgctgctatttcaacttatccgatgccatcctgaatggcctgggtgaggacaacatagcccccgccccttgcatctgttatattattctagtctcttcttttcccttttcttgctctcttccttagcccttttgctctctctacctatacagcaagactttgtttctttttgagtcaagatggcgtgtctcacctattggtttcgaaggctactaaaaaagacttgagatatcatttcttgaaactggtgtgtttgctgaccccggaggatttggcctgcgtgcatctgtccaaagaccaattggacgagattcttactccagcacagtgcactattgttgcatcactttctaatgaatatgttgactcttatgttct

SEQ ID NO: 216743 - DNA, 533 bp, Glycine max
cggctcgagggagtttccgaacaattactggcactccgttaagcagttggccgaaacatacccttccgtcattccttgcttcggtctccatccttggtttgttaaggaacggagtcccaattggtttcaaacgttgaaggaatattttgattccacaccctctgctgcagttggagagattggtgtggacaaaggatcacacggaaagaagattgatttttctgagcagattgaagtattgaggcagcagcttgaacttgcaaaagagttaaacaaaccagcatctgttcattgtgttcgtgcttttggtgatcttcttgagctaatgaagtttttggggccttttcctgccggtgtcattcttcattcttacctaggttctgcagagatggttcatgaattttccaagcttggtgcttatttttccttctcaggatttcttatgtcactaaaagcaagtaaaggcaaagaaaatgctgaagatggtccctcctgataggattttgttggagacagatgcacctgatgcacta

SEQ ID NO: 216744 - DNA, 379 bp, Glycine max
caggactgcaaattgaaattacaagctataatgtcattccacaaatgtggggggaatgtgggagattccgttttgattcctctccctaaatgggtacttgaaattggagaatcggaccctgatatcttttacaccaaccgcaaaggtattaggaacaaggaatgtttatccctcggcgtggacaaccaacctttgtttcatggacgaactgccattgagttgtacaccgactacatgcaaagcttcagagataatatggaagattttcttgaatccgagctcatgatagacattgaagtaggacttggtccagcaggagaacttagatatccctcttatacaaaaaatctagggtgggaatttcctggtattggagaat

SEQ ID NO: 216745 - DNA, 542 bp, Glycine max
  unsure (1)..(542): unsure at all n locations
tggctgttcaacccctgggaaatataagattgtcttggattcagatgatgccttggtcggtggcttcagtcggctcaatcacactgctgagtacttcacctcagaaggatggtatgatgaccgacctcgatcctttcttatctatgcaccttctagaacagcagtggtttatgcccttgcagatgatgttgaacctaccctagcagatgaagctgaacctgccctagcagatgaagctgaaccagagccagttgatccttgatgacaattttctgggatgctgaaatgttacaagtgcacaacggcatggatgcagtaaatccctaatcaaactagccaaccaacgtgtggtggattaaccgacactgaaacaacatagaagctgaattgaagtggaataaataaagcgctagttcatctttagttgagagcaggagactagcctcgaagtctgtacatgtgccttgctaggtaataagttgtgatatcacacccatctttctgtttctactttttaggattaacgtnctgacatgtttaag

SEQ ID NO: 216746 - DNA, 486 bp, Glycine max
  unsure (1)..(486): unsure at all n locations
cccnnnaagtgaatcgntgatacgagnccgaggtngangtacgcgcccgtaagctcgggaactgtttgcgagtgaccacagtaggcacagccactttccaatttttttctccattttttccatcttgaagggataaactcgtcttcccaactcacagaggtttcaagaaatccttgcaaaactcaacactgtcatacccttatctttactccaccggtgctgcctatagaaaatcccgttttgcaagcaagagctcgtgaagcagctaatgaagttaaagcggtgactgactcaagctggaacaaccttgtcattgcatgtgagacccctgtgctggtagagataccgacaccatggagtgggccatgctggatgatagcacctgctatcgatgagccttccaacgaatctgctggagaagatgcgtgctttaagcttaacacagacgatcttccaaacatattagcactgtacgtgatctgaagc

SEQ ID NO: 216747 - DNA, 468 bp, Glycine max
agagaaaaagtataatagagcctgtgcattatattattgaatcatattatgcgggcaatacatgtatcgaatggacaacatgctccctaagaacaaattccccaatggagtaaaagaagaaaaaaataatttcaacccctattctaagatatcataaaagtgcagctgaaatggatgctgccggggtttcttctagtcttctgctgttatgttagaattctatgtaattcaaaataatgcatttgaaaccccgtaaccatcacgatgagatttctgccatctccatgcaaccttcaaactctgttgaagatcagtgtgcttagcaacccaattcaattcacgtttgatctttgatgggtcactgtacacctcagcataatcgcctggacgacgcggaaggtagtccactttaatgtccacccctgtggcctttttacaagctttcacaaactccttcactgaactacc

SEQ ID NO: 216748 - DNA, 542 bp, Glycine max
gagaagtgtgtttttattaaaaatgtaatatgtagatacggaggcaacaaggagataagtggggaaacaagaggaaatatgtttcatggggaagtttgtgaggaagagaatgatatataagttacagagaagagaggaggaaaaaagctttatgaacattgtggataaaattcagatatctgcttgctcagaagttggtttcatagcagacacacactaagaggcatataactagaaatgacttttaaattttttcatccattgagatatcccactttttcgatcaaagcctggatatcagcaccgctactcccctcagttgcctcgacgatgttggggctgttcaatggcgtgacatctgaaagagggtagcttctgttattatggagttgactgattgcactgctttccactcccttcagtatgacacttttgtgtaggccaccaagaagtcctttcggaatctgtgtcaccgcattctccaacgaacaccaccatctttgacagttcaaaaccctattgaacatataggtatctgaggg

SEQ ID NO: 216749 - DNA, 449 bp, Glycine max
accaaaacatttttttttcatattcttgaaatctgccaaggggggaaaactaaataacattaccaaccaaaacctataggtaaattaatcacgcacttataactgctttacccaaacaaaatattatccacgcataaattatacaacctttactaccataaaatgaactactgttgatcacattgcactttgtgattagatggctaataattatattcatcctatgccaaacgcagttgctgtcattgtttttgtctcatctcctacttaaagatgacatcatgcaaagtgtttttctttcaatcatccagcttcatatatgagacctgcttgctgctcttctgaggcaacacctttaccaatgactggtattggtccgaggaaagaaacccttagtcggggaaataaacatcaaattggatgtaaaggcgaccattcatgaatggcct

SEQ ID NO: 216750 - DNA, 558 bp, Glycine max
atcttcatctccaacaagtgtttctgtttctcatggcatccaccactctatcccctacaaccccttctcagctatgctcaggaaagagtgggattttcagtccctcacaggcacttcttgtgaagccagtgaagaggcagatgatggggaagagcaagggaatgagaattgcatgccaagccaccagcattcctgctgatagagtccctgacatgggcaaaagacagctcatgaatctgcttcttcttggtgccatttcactcccctctgctggaatgcttattccctacacctacttttttgtccctccaggttcaggttcttcagctggtggtactgttgccaaggatgctgttggaaatgatgtaattgcagagaattggctcaaggcacatggacctggtgaccgaacccttgcacaaggattgaagggagatcctacctatcttgttgtggagaaagacagaacccttgcaacatatgcaatttatgccgtgtgcactcaccttggatgtgtcgtgccatggaatcaagcagagaacaagttcatctgccctt

SEQ ID NO: 216751 - DNA, 391 bp, Glycine max
acacgggaaaaagggacccgttcaggttcctttccattttagcttcagttcacaaaaaatcaatttggttacaaaatatatttatgccttaatacaaaacaaaagggtggaatttcatgtttaaaaatacatgacaaccggggggcgggtttaaggggtttaagcccaccatggggcattacctgttttgaaatttgtttcaacccaaggaacaaacaccaccttcccattatttatatcacaatgggctaatgccaaaaacaagggagcagggcctctcacaactttttcttgggcattggactgaaaaccatggcaggggcagaagaacttgttctttggttgattccatgggaccacacatccaaggggggggcccacggcattaatt

SEQ ID NO: 216752 - DNA, 667 bp, Glycine max
gtcaaacattttgcaccttttattcacaaacttattaagcataaaattcatcatcgcatatccaacattgatacatcaccagaaatagatgctaatatatatgtgtacatcactgcctgaagaaatttgtcaatgatttaccgtccaactctttcgtgaagaaccttgtcataaattcatggaacgtgaagttcctataaagagctggtttctctgttgatgttagctctggtaatggtccaaaatgtttctccctatcacttgggttgaggaaaacggcaatagagactcgtggctcgttagaataattggctaacacccgatgatgagcactcttgtatgtttcattagaaattatctgatacacaaaatgatgaatatgaaagatcttagatttaaattatattaaaatcaaaaactaaatgtaacaattcctataaaaccttgtagagaagttcaaatttaaccaaaattcttctggcagttaaatggttcaaatagtatgtttagaaaatatgttcagttggtgacaatatgacaattgataaacagttatgaactttatcagctaaggatattatacttaaattctaacaacgtacttctttaaataaaaagtgccccttgtccgtttacacttacaataattactacctttctctttttt

SEQ ID NO: 216753 - DNA, 494 bp, Glycine max
aaacggaaaaggagggttcatacttaatagagcgtgtacatttggatattttgcatagaaagattcaaaatactcctattattcggcgaaagtgaattcaacagaagcatagctttgagttttcaacgggagatccaatcacactagtaaacattaatttggtcatatgctagtccaaattctcaagagagaaatacaagaaaaaaaccccatgctgaataatccccgaaggttctgtgaacttcatatatcatataacatattcacgtgagaccaaaaaggttaattattgaaattaagtagagcctagtggttgaattttttgcccaaaaccgtggctctcagctcagcaacatcaatctctttgatgttctccggtttgtagtaaccagtgacagggtctgggacccacgaaaccttttcagcacctcctcctagtaccttgtcttcccctgacttgccgctgatggaggctgctcctcctcttgttgcgc

SEQ ID NO: 216754 - DNA, 421 bp, Glycine max
aaacggaaaaggttttttcatactgaatagagcgtgtacatttggatgttttgcatagaaagattcaagatactggtatttttcggcgaaagtgaattcaacaaaagcatatctctgagtgtggaacgggagatccaatcacactagtgaacattaattgggtcatatgctcgcccaaattctccagagagaattgcatgaataaaaccccctgctgaataatccccgaaggtgctgtgaacttcatatattatataacatattggcgtgagaccaaaaagggtatttattgaaatttagtacaccctatcggaatgaattttttgcccaaagccgtggcttttatttcagcaacatcgatcccttagatgttctccggtgtgtaaaaaccaacgacagggtttgggacccacgaaaccta

SEQ ID NO: 216755 - DNA, 558 bp, Glycine max
aacgaatataaaataatattaattttatatgaatttgtgaggggtcaaattcatatgggaacaaacttagttccctaatatcttacaaaggatccatgatagttcattgcaagtatgtcatcatttaacctttactaaagaaactatttacaaaaacaacacttactatgaataaccaaagttgcataatgtcatttcaccagtagttccactagtatacattattgtatagatgagtcctcactaaggcttattgtgtcaacctaaaaatccttttctgtctcaatccctgtataattgctacttggcacttcattggagacatctttcttttcattttgcttgggtgaaggctattcttcacaactttctaaccatacttcttacatttgtaacaatcatcaagcacatctacatcatttcttgtttggaaacaaaaccgtggctctcttagcttcctcctcactttcatcttgatcttctccgaacctgcacttcaccatgtgttgttgccaccatcactagtatttccagtgcaattttcatcattgacagctt

SEQ ID NO: 216756 - DNA, 512 bp, Glycine max
aacgaatattataataatattaattttatatgaatttgtggggggtcaaattcatatgggaacaaacttagttccctaatatcttacaaaggatccatgatagttcattgcaagtatgtcatcatttaacctttactaaagaaactatttacaaaaacaacacttactatgaataaccaaagttgcataatgtcatttcaccagtagttccactagtatacattattgtatagatgagtcctcactaaggcttattgtgtcaacctaaaaatccttttctgtctcaatccctgtataattgctacttggcacttcattggagtcatctttcttttcattttgcttgggtgaaggctattcttcacaactttctaaccatacttcttacatttgtaacaatcatcaagcacatctacatcatttcttgtttggaaacaaaaccgtggctctcttagcttcctcctcacttttatcttggtcttcttcgagcctgcactttaccatgtgttgtt

SEQ ID NO: 216757 - DNA, 601 bp, Glycine max
atttcgaaccgctgcttcaaccattccttcttgctgaactggattctctccgtaaaccctgctggaaccgctcctccacgcgcaatggccaagccctgttcctcacctgcccaagacctagtcgcttctcctggcgattttgaatttgtgctgcctctgaaaattgtggagtatccggatccgagattgagggccaggaataagcgcatagttgccttcgatgatagtctgaagaagcttgtccacgaaatgtttgatgtaatgtacaaaactgatggtattggtctctcagcaccccaattaggaattaatgttcaacttatggtgttcaatccagtaggtgagcatggtgaaggagaggaaattgttcttgtaaacccaagagttagccaatactcaaagaaactgacactatttaatgaaggttgcctatctttccctggaatcaatgctgatgtaaagcgaccagaatctgtgaagattgatgcacgtgatatcaatggaacaaggttttcagtcaacttgtctgacctttctgcacgaatattccagcatgaatttgaccatctacaaagaattctttctttgagagaatgactga

SEQ ID NO: 216758 - DNA, 184 bp, Glycine max
acctttaaattatataataaaaaataaaaattttttaaaacagaaaaaaaaaaaagaaaaaagggggaatataaaagaaaaataaaaaaaaagaaaacataagataaatataatagaacaaaaaacaaggaaaaaaaaaagaaaagaatatatgaaagtacaaaaaaagaagatagaatataag

SEQ ID NO: 216759 - DNA, 537 bp, Glycine max
atgggtaatattatttattcaataaatttgattgattgatgcgggttgattttctattacgataaattgaggaaacaatagccagtccgatagctgcttcagcagctgcaatagctataacaaaaattgaaaaaatatttccttttaattgtcgactatcaaaaaaatcagaaaaggttacgagatttatattaactgcattcagtataagttcaagacacataagggctctaaccatattccggctcgtgatcaacccatatatacctatagaaaataaataggcactcaaaacaagtgcatgctcgaatatcattgaccaactccttatcaatttttattcatttcgatatgaacaagaagaattcaacggatttgattgactaatattataagtctacaacaaaataaagtattcgcaataaaaaaaagattttatacagaaatattcgttttcattcacatagaattcaaccaaaataaatgtgaaaaaatctaaaacaaaaaaaaaattgaattttgggtttggttatatta

SEQ ID NO: 216760 - DNA, 548 bp, Glycine max
gcaataaactatttcaatatttttttactattttattttaggagggatgaaaagagcagtaatggaattgaactcatcagttcaagaacttttcgtgtacaatgtaagggaaagtcctgatacgtacatattttctgatggttccatctttaaaaataaactgtgcctcaacgtatcaaaccataaagtcaataagccatatccatacaacaagcatagttacgaatttctgtgaacattattttctttctctcttctttggctgaaaggattatgtttattgttgtactatatagacgcagccattacagatcagtgtttgatttttggcttcttcacgatcatcacagtgcagtgagcatgatgagcacaatagtcactgacactacctaaaaccggcctttttatagccccataaccatgacttcccacaaccaacattgcagcacggtgcttatctacagcatcacaaagaacatttctaggatcacctttcaccacttttgctgcacatcattaacgattgttgatgcaagtttttaacggtt

SEQ ID NO: 216761 - DNA, 466 bp, Glycine max
tttatttttttttttacattgtcaatattaagacattatttaattacatcggaaccagagagtttcattacaaataacaaaatgaggcaaaaaaagcccaccatttctttcctaataaagctaaagctatagctatagccattgctctgacttattgctcatttttaaagccttgaaaaaaaaagtgcaaatactaaatactaaacacatgatacaaacacacacatgaaagaaaaaaacttagtagtaagcccaggtccaaaggacatgatcttcctcaggaaatccaaaattacaagaactttcaggtgggtcggagtaatccacatcttcttcaagtttgggaaagaggtacgaagggtagagactcttgctgaggttatcttcttcatcttgtgacatatctgattgatcaggctcaaacacataagaagaatcaccatgccctaacagcgcagagtgaact

SEQ ID NO: 216762 - DNA, 579 bp, Glycine max
ggctcgagtacaaattctctgtgttgtgttgtgtacttgtgttaattgtgttgttgttgtaggaaatttaagtgaagagagaatgatgatgaagtctgctatgtgtgcattggtgcttgcggcactggttgtggttgaagtggggcccatggctgaggctgcggtgacttgcaacccaacacagttgactccttgtcttccggcaattaattcaggttctgcaccttcgagtgcttgttgccagaagctgaaggagcaaaagccatgcttctgtggctacctcaaaaaccctagcttgaagcagtatgttaactctcctaatgccaaaaaaaccgttagttcttgtggtattgcctatccaacttgttaagcacctcttatatatatatataaaatgtgtgaacaatatatatatattgattaaaaaatagtttaatttatatacacactttgatcctataaaaacatcttgacacaagcattcaatagaatttcaccactttatcatgacattttactataatgatgtggtataaaggaaatcctggtgaatattttgataagatgctttatctcatg

SEQ ID NO: 216763 - DNA, 559 bp, Glycine max
agaacatcattatttctcaatttatgtggctctttaaccataattccctggatacaacatgtatactagtgtatacaccatattcaaagatagctaataaatacttgactgtataattaatatcacacaaacgtaaagtggcaatatatagtgtaaatatatataagcttaatttatacacagaaaccatgagtataaagcatctttatacaaaatattcaacaagaatttactttattaccacatcattatagtaaaatgtcatgataaagtggtgaaattctattgaatgcttgtgtcaagatgtttttataggatcaaagtgtgtatataaattaaactattttttaatcaatatatatatattgttcacacattttatatatatatataagaggtgcttaacaagttggataggcaataccacaagaactaacggtttttttggcattaggagagttaacatactgcttcaagctagggtttttgaggtagccacagaagcatggcttttgctcctttagcttttggcaacaagcactcgaaggtgcagaacctg

SEQ ID NO: 216764 - DNA, 533 bp, Glycine max
actcgggggttatttttgattttgcaaattacacaatcacagccgtacatcacacgtgagctgggccttttccaacttaaaagcagaggataacattggcccatgacgcaacacatgcaccacctaataatcataattttacatctttacatacaaaatacaaagactttaaattaaaattaaaaaaaaaaagataaacagatcatcttgatgaaatgaaaccgaaacccagaaacattgttttgattttttttgttgttcccaacttgattaagcatgaacggtttgattgaatcacttggacttgaagggaatggccctgattacgacctggtggtagagtgctgcaagtgcagcaccaatgaaaggtcccacccagaagatccagtgatcattccaaccaaggtccttgttgaagatgatagcagcaccaaaactacgagcagggttgataccagtgccggtgatagggatggttgccaagtgaacccaaaacacccgcgacccaatatgcaaaggtgccaaaatgggga

SEQ ID NO: 216765 - DNA, 442 bp, Glycine max
ggtgtaatcattcttttatatttccgtaaatgagttagggaatagatacatgattatacaaaggctgtgtagcttaacccaatatgctagctacatcaccttctggcggtaaattagtgtaacaatgaaatggttcactcaattccatctcttggcatttttcacgcctttggacttctgttttgctgcctgaaaggcctgcatcttttgtttcttccgtgcctctttctcagccttggacatcttagatttggctttcactttaggagctttgctatcaagctcagcctcgcgttcaagttctctttccctagcatcaaaattcttctctaaataataatcgtaatcacctgcataatcctgtatggtgccatctttaatttctatcactctattaactatttgctttataaagtatcggtcatgagatactgtgataaca

SEQ ID NO: 216766 - DNA, 344 bp, Glycine max
ggctcgagtacaaattctttgtgttgagttgtgtacttgtgttaattgtgttgctgtagtaggaaatttaagtgaggagagaatgatgatgaagtctgctatgtgtgcattggtgcttgaggcactggttgtggttgaagtggggcccatggctgaggctgcagtgacttgcatcccaacacagttgactccttggattccggcatttaaatcatgttctgcaccttctagcgcttgtagcccgaagctggtggagcaaaatccatgcttttgcggctaccttaaaaaccctaacttgaaacagtatgttaactctcctaatgccatgattgccgttagttctt

SEQ ID NO: 216767 - DNA, 559 bp, Glycine max
atcatccgcagctgcttttattcgcaccttaaacagtgagccatggccgtcggaaagaacaggcgcatctccaaggggaagaagggtggcaagaagaaggcagctgatccctttgccaagaaggattggtatgacattaaggctccttctgtttttcaagtgaaaaatgttggcaaaaccctcgtctctcgtactcatggcaccaagattgcttctgaaggactcaagcatagagtgtttgaggtctccttggctgatcttcaaggggatgaggatcatgcattcaagaagattaggttgagagctgaagatgtgcaagggaagaatgttctgacaaatttctggggaatggatttcacaacagacaagctgaggtcattggtacgaaaatggcaaactcttattgaagcccatgtggatgtgaagacaactgataattacacattgaggatgttttgcattggatttaccaagagaagagctaaccaggtgaagagaacctgttatgcacaatcaagccagattagacagattcgtaagaagatgaaggagatcatga

SEQ ID NO: 216768 - DNA, 441 bp, Glycine max
tttttttttttttttttttttttttttttaaattcccaactcgtattcaattcttattggcaaaactatccagttaaaatatttgttgtacacctccaaaccttcttcaaaaaaagaattctggaagcccttccagcacatccaaaattatgcattaatgaagtgctatacccatcgatgattaaattggacgggaattatgatgtaccacaaaatgtgtcaccattaaaatcaaaataacgagtcggagttttaagtaacttgggacagaacttaaaaaaaaaaactgggctaaacgagaggcgcatccttggtacattatggcgcttaacacttagcctgctttcaggcatatgcaaagtattagaatgttggttcagaacatccatccttggagcatgcaaagaccaagcgagtataattattcatgctgtacccaac

SEQ ID NO: 216769 - DNA, 506 bp, Glycine max
caaggctcgcgtttttgatatcgaagccggaaacaaattcattgacgtgaagcagtattcctgttacaacatttccaaaatcaatatgtctcctcaattatgagggatgttcaaatataaacacaaaatgagattaattttatactagagtagttgtttatccttcgtatactgaggcaaagcagatactttgcagataggacataagttcctcaaagataaccattttttaatgcagctgacatggtggtcatgcccacatgttttaagtgttccaacatcgtccatgtacttgtactcttccagacatattacgcagtttccttcgtctagactttgctcaaatgaacaatatattgttaccgtcaaacatttgttaagcgaatcctcatagattcctgtgttcacatagccaattctttcaccaagtgcaagttgttcctcataactcatgttatctacgtccatgcttatgtttagatgctgatctagcatgttcctggaac

SEQ ID NO: 216770 - DNA, 426 bp, Glycine max
ggacgaaggaacccaacaagggggttattcatattttttgggacataagcttcttattcacataacaccaatagttttccatttataagccgagattgacgatccaaattacatatttataagagaccaaccaaacacaaagcaaccaccgcttaaaacacccggaacaaatcctagaacatttgaatttgcaaaggggggccatgactactttattttaaaacttcaaacacaacacatacttattatttattgatacatgtattacagctatctttgcttgaaggttatgcatgttgatcttacttggaactgcatgggtctcaagtgcaatttgatccacagttgcaaccaccgttcttaggttgaacacccattttagcacccttgaattgggccttaaccggcccaacacccaaaactaga

SEQ ID NO: 216771 - DNA, 362 bp, Glycine max
ggagggaaaacccaatttttgcctcaatcttgtctcaacataactgaatctcaccctccctttttttttttggataagtccatacatccatagggtttttttcattaattatcatgcaaaacagcctaatcacatttgccaaaataacataaaataaagtggaattggggaaaacatgaaaaaaaaaagaaaatgatgattttgatgatgaaaaaactcaatttggtttccttgctctacccatatatgtatatatattatggcagggtcaattcttaatcttttgcaactactggaatcttagccttgctggtttttacctgctcatataaatctcttttcttcaaaccaactttggtttg

SEQ ID NO: 216772 - DNA, 321 bp, Glycine max
aaatataattgttcactggacctccaaatgatcaacgaagggggcccattatcaaaaatctagtcactgcctctccacctaggaatcttctctttgcaccaaaaacattggcactattctgaatgtaacacgcacgtgccatcacaactactcacactgggatcagtacaaccttcaagaacagaaatattaacttgccaagtgtgctttgcctccaattcaggaacggacgaacgcatccctgtacctagcatcctagttagcatttccaagtgctgccttccttaagtgcttgaacatcaacatggacatctcatgaca

SEQ ID NO: 216773 - DNA, 479 bp, Glycine max
aaccaaccaagcgacaacgtggttacaatggggaaataacttccaaaagacattcgaaggggtgttgcgttaattcatttactataatacaaaggaagatcggcaaagagaatataggaggactgaaggagaaaaaaagtaacacctcagtcctccatttgtatttgacaatattgtataaggggcaactatgccagcagaagaaagaattattcagctttccctaaaaggtaaagcgaagataatctccattattcttcatagttcttgggttgtatcgatagttgtactcttccttcacattgaagagaacactgataaaactttttccaagtcaactttggctaccaaacatttaataattgttctcacgctcattaagtcatgctttagtaccaaaaaatgattgctggaacttggtttttgttggagtactatgcttaactgtagttgtgcttccaaaggcaaacttattaggc

SEQ ID NO: 216774 - DNA, 486 bp, Glycine max
ggaccctgaaacctgtgctctcaatttttattggaggcatcctaccatatggggcagagatcatcgagctcgttattatcctgacatgaataaggctgaaccagctctattacatctatggcatccttctaatagtgcccgtgaacctaatgatcacctgcgccgagattaccattgtgcagtgctactcccaaccgtacagtgaggataacaaggggcggtgggaaccttatctcagtgctggatgctgtgcgctgaacctgttcctctactgagaactttactggaataccagatcggagataacagagctggagtcgcgcacccggtacttcagtttcatgacactcgaaacatatgccttctatgtgtggacgggaacaaaaagcatctatgcacgcttatgcgttgatactggatctactgcgaccgagaagagtgaccgatttgaagcacacatacgtggactaatgcagcgcgaagcaa

SEQ ID NO: 216775 - DNA, 461 bp, Glycine max
aattgaatcaacatttaatttccaaattggggcacacaatctaataaaactgtacagagcttaatttccacccaaaaataattttaaaaaaccggaagcaaaactattatgccaaaagctaattaaaatgagttttacaacataacaggggaatcacctaaaagcgtgtttcaccagaaataacagttcaaactgttgcccccctgtgaagaacgaacaccatatttgatcaagcaccaacaactcaatgggcgttagttatactactttctgcatttataactggattgaagtatggatgggccatggctttttttggaatacgacggtcttggggatcatagcgaaataacttgggaacaaagtcaacggccttagggccaggcaattgatgattttctactataatgaacatcccccatggcttgcggctatgcctctccataagtgctgcaagatga

SEQ ID NO: 216776 - DNA, 475 bp, Glycine max
agtcgaagaataagattatgagcaactgcgcacaggatatagttcatagagaatagagatcaaaggggtcgataacagagagaatatacagattctttttttgtgacatgaaaaatccttaggctagtagtaactgcgatagcatgacaagtatcaaaattacaattaagttggattcattcgacttccacgatctcatccaaagcatagttgtttgttgatacattggcatagttgactttgttgaatcgaaccacaacagggtagcgagtgttggggtcctgcacaacaataaaacaggaactgagtttgcataatgcatgggatggtagaaaattgagagggtatgcattaaagtgagtttaggggcactaacctgatcaacagcaaccactgaaccggtgcctttgtaccagtaagattccttcctaagaatcttcacctgttaattgtaaataagaattagaaactaccc

SEQ ID NO: 216777 - DNA, 461 bp, Glycine max
aatgtaacagtttctccttcaccaagcacatgcggaatggtgcactgtgcagtgtgcacagagccataaagtcattaagcaatcgtcatatatactattcacatactacaattacatgtacaccactagtatagaactataaggtagcaatagaagaagactacggtcaaaattatggcttaacagagttttatgacatacaacaaaaaattaaaaagacaaaacacggacaagattttgcgggttcttagcttcccaacttaaaagcatctacaaagagacctaaacatatgccagctttccagtagttcaccagcacttgaaaagactgcaacctcccagtccttgcggtaggtagctttctatatattagcatgccaatcccctcaattgcagccaccacaacaccagcaaccagaacataccaattaccggtttgcccaaggattgtagctagtgca

SEQ ID NO: 216778 - DNA, 532 bp, Glycine max
ggtatcaataacacctccatttcattgaatgagctgattagggaaatataagtagttcaatgtacaggaaaagaacctcatgcatgtacaagcttgacgataaagcacgcaatcctaagcttttaaaattgcaagataatcatcgattatagacatggcggaagatcggtatccagaaccaaagagattgtaatgatttaaatagtgatacagcatataaaggtctctcctctcctcaaagcctggttgcttaggcatcacctcaaaataagaattatagaatgatcctccaaagccagcacaccaagacattccaaattctgcttcactgtgtccataataacatgcagggtccaatatgacaggctctccatttttgtcagaactgatgtttccactccagaggtctccgtgtagtaagcatggttctatcactacattggcaaacaagggtgtcatgcttttcaccagtctctgtcctttgtcataaatagttctgtcaccatactggtctaatgccaacttcaactgg

SEQ ID NO: 216779 - DNA, 511 bp, Glycine max
ggttcaagcttttctgtcataccaacgagttgccagagtatgagtttgaattcgaagtttaattacaacacagagattccaacgttgcaacccgattcgttacaaaatgttacatggaattatacaggtagctattgaaacaaatatttgatttttttttttcaaggcaaaatcgattggggaataatgatgtttccaatgttgttgtgccatgggtcagccaagtgagcagccaagttctccaaaggtccagtgccgggataagctgattgttgaacacagaatcccacaaaagccaacaaagcaagacgtccattcttaagttctttgactttgtattcatggaatgttttagggtccttagagtatcccaaaggatcaaaagcaccaccagggtatttctttttttctgggtccttctccatgcttctttggggctccacaaaggaaattgcaaggaattcaatggccaaaatggtgggtagggtgccccatggaactggattgccta

SEQ ID NO: 216780 - DNA, 550 bp, Glycine max
aaagaaataaagtgtaaattagggactagcaaagaatgaacacgtctaaaccaaaagtgtacatgcatatatcatcccttcttctatgtagaggacactaataattttgtccaagggacaatggtggatttaataaagaaactaaaattaccaatggccattaaaatttaatgcatatttggtttttaattcaacttatgcacaaattccgagatcaaatcaatgatcttcaaaactcattttgcaaaagaaagggtgaggatccttttgcaaaactcattttgatgcaaatgtctgtttgtaataactatccaaacatgcacttaatcttccccttcctctctattccttaggacagctccaaagtgttttactagtatgtctaccacaacaggcaccaagtccttgcaaggcacacccttcttatacacttgagccagatgtgaatcacttccaattctccctccaaggaaaatatccacaccttcagtggccttaccattgtcatccctagccatgcaccccatgaaaccaatgtcagcaacttgaa

SEQ ID NO: 216781 - DNA, 548 bp, Glycine max
aaagaaataaagtgtaaattagggactagcaaagaatgaacacgtctaaaccaaaagtgtacatgcatatatcatcccttcttctatgtagaggacactaataattttgtccaagggacaatggtggatttaataaagaaactaaaattaccaatggccattaaaatttaatgcatatttggtttttaattcaacttatgcacaaattccgagatcaaatcaatgatcttcaaaactcattttgcaaaagaaagggtgaggatccttttgcaaaactcattttgatgcaaatgtctgtttgtaataactatccaaacatgcacttaatcttccccttcctctctattccttaggacagctccaaagtgttttactagtatgtctaccacaacaggcaccaagtccttgcaaggcacacccttcttatacacttgagccagatgtgaatcacttccaattctccctccaaggaaaatatccacaccttcagtggccttaccattgtcatccctagccatgcaccccatgaaaccaatgtcagcaacttg

SEQ ID NO: 216782 - DNA, 508 bp, Glycine max
ctctaacttttgtttcttaccatgaaacttttagtgggtctggacaatgatttacagaaacatgggcgcgtacacctatgcctacgctccgaaagatggcgaaacccttggtttttacgtccgggcgaggcctgcatgcttataactcaaaagttctgcacgcgatgctctacgggatgaccttgcaggaaatgactaacggggaggagcacatttactttagcttgatcctggcgtgggttgccgtcgctcttagcttctggaacgctttccacaccggcactacacttcacgatggtcggatcggcggtgcactcatccggcaaggggtttatgcacgtctacatcttgtccgatattcactaacgcgcagtgtgaccgggtttgattcttatcaggcgacacgaattgatactagctggtgcgactgcttgcttgggtggaggtgcgtactatacatgatgcgcattttgcaccaaagatggtgctttatagaacaccctggggc

SEQ ID NO: 216783 - DNA, 476 bp, Glycine max
gcaaataaggcggaggcaggagatatattttcagaatgtggaatgactgatattcacatcggggagacaatagctgatgacgtatctgggaaaccactaccttcaatctaggcggaagaaccaacagggaaaatgtctatttccataaacacttcacctttcgcagaccgcgagggaaagtatgcctctactatgaatgaaagggacaggctctatcgtgaacttgagcggaatctggctatgaaagatgaaaatggtgaaacagcctatacattcgttacaagtgagcttggaacttggcatatcaccatacttatataaaacatgcgacaagaaggatattaattcatggctgagccttccaaagttatcaacaagaacgcggactaaaaactgaggtaaccgtatgacattgcgacttgaggggcaccacaagagcacatgggagctgttgttgaacttcttggcgagagacg

SEQ ID NO: 216784 - DNA, 550 bp, Glycine max
agtaaaaattttatctcgaaaacttacacacaccatcgggggaaaccttgaattttaaacattgtaattggaggtcgatataatatacaaccatgacagttctctcagtagtgctaggaaagttgggtcaagggataatgcagcaacaccatgcatgaagttactaacaaaatctgagccaacaaacaaaacagaaaacaaaacactctatgactcaagctgagcataccagatgccctggatcttgacatcctttggagcctttgctcccaaatcagtgtcagatggttgaacactctcgaacacaccgataacctcacccgtctcaggcttggtcttggtgacactcaaggtgattttgcccttggatgatgaggcacttttattggttttcttggcaagatcttccttaatttctttttcaccagcaggcaaagcaactgcattgtcataacctgtggacgcaccacttcccttggggtccaagaaagaactttcaccgttggatgggactagaaacttccactaaagctttttggctttcctgatg

SEQ ID NO: 216785 - DNA, 412 bp, Glycine max
gcaaataatgcggaggcacgatatatattttctgtatgtggaattactgctattcacatcggggagacaattgctaataaagatatatgggaaaccactaccttctatctaggcggaacaaccaacagtgaaaatgtctatctccataaacacttcaccttttgtaagccttgagggaaagtttgtctctactatgaatttaagggacaggctctatcatgaacttgatcggaatcttgctatgaaagttgaaaatgatgaaacagcttatacatttgttgccattgagccaccaactttgcatattaccatacttatataaaacatgcgaagagaaggatcttaattcatggctgttccttccaaaggtatcaacatgatcgcagattaaaaactgttggaaccctatgac

SEQ ID NO: 216786 - DNA, 336 bp, Glycine max
ggggaaatctttaattataaacatttgttattggaggtaaacataatatacaaccatgacaggtctttgagtaatgctaggaaagataggtcaagggataatgcaacaacaccatgcatgaagttactaacaaaattttaaccaacaaacaaaacaggaaacaaaacactttataaattaagctgagtataccaaatgccctggatcttgacatcctttggagcctttgctctcaaatcagtgtctgatggttgaacactcttgaacacacctaaaacctcacccacattatgcttggactaggagacactcagggcgatttttgccttggatgat

SEQ ID NO: 216787 - DNA, 503 bp, Glycine max
aaagaaatatttttttaattagggactatcaatgaatgaggggggtctaaaccaaaagtgtacatgcatatatcatcccttcttctatgtagaggacactaataattttgtccaagggacaatggtggttttaataaagaaactaaaattaccaatggccattaaaatttaatgcatatttggtttttaattcaacttatgcacaaattccgagatcaaatcaatgatcttcaaaactcattttgcaaaagaaagggtgaggatccttttgcaaaactcattttgatgcaaatgtctgtttgtaataactatccaaacatgcacttaatcttccccttcctctctattccttaggacagctccaaagtgttttactagtatgtgtaccacaacaggcaccaagttcttgcaagggacacccttcttatacacttgagctagatgtgaatcacttccaattcttcctacaggaaaatatccacacctttaatggccttaccatt

SEQ ID NO: 216788 - DNA, 414 bp, Glycine max
  unsure (1)..(414): unsure at all n locations
attcattaatttctattgaagttcgggggcagaaaccaaaaatacaggatgatgaaatctcaaaaagcaaaaacaaatgggaatgtagtttaagtacaaacaaacaaagtggggtggcggctacaaatgctttgcaaatttttcacacttagaagcctgggggcttgtaggcgaagaagctgatgcactgcacttggcgaacnttgtcgaattcgatgatacggatgaagccgttggggtatgcagttttagcctcttgaagctcctttaacacctgagaagcattagtgcaaccaaacataggcagcttccacatggtccagtagcgtccatagtaatatcctggtgacctgttgtgctcacgggacacgaaaccgtgcttcaactcgaattacaagcaaggaatccatccct

SEQ ID NO: 216789 - DNA, 593 bp, Glycine max
gggacaggaacagcaaaccagtgcccattttttgatggtggattggactcatttgccttcaagccggggaaatacaatgccaagaagttgtgccttgagccaactttattcacagtgaaggccgagggtgtggccaagaatgctccccttgagttccaaaacacaaagctcatgacacgtttgacctacactctggatgagattgagggaccctttgaggtgtcttctgatggcactgtcaagtttgaggagaaggatggcattgactacgccgtcgtgacagttcagctaccgggaggcgaacgtgtgccctttctcttcaccatcaagcagttggtggcatcagggaagccagatagctttagtggggagtttctagtcccatcctaccagggaagctctctcttggaccccaagggaagaggtgcttccacaagttatgacaatgcagttgctttgcctgctggtggaagaggagatgaagaataactttgccaggaaaacaatttaagtgcctcatcatccaagggcaaaatcaccttgagtgttaccaatacaagcctgagacgggtgatgttatcggtgtgttcgag

SEQ ID NO: 216790 - DNA, 533 bp, Glycine max
agtaaaaaattgagctcgaaaactcacacacaccatcaatgtaaaccttgaattttaaacattgtaattggaggtcgatataatatacaaccatgacagtactctcagtagtgctaggaaagttgggtcaagggataatgcagcaacaccatgcatgaagttactaacaaaatctgagccaacaaacaaaacagaaaacaaaacactctatgactcaagctgagcataccagatgccctggatcttgacatcctttggagcctttgctcccaaatcagtgtcagatggttgaacactctcgaacacaccgataacctcacccgtctcaggcttggtcttggtgacactcaaggtgattttgcccttggatgatgaggcacttttattgttttccttggcaagttcttccttatcttctcttccaccagcaggcaaagcaactgcattgtcataacctgtggaagcacctctttccttggggtccaagaaagagcttccacggtaggatgggactagaaactccccactaaagc

SEQ ID NO: 216791 - DNA, 500 bp, Glycine max
gggacaggaacagtataccactgcccattttttgatggtggattggactcatttgccttggagccggtgaaatacaatgccaagaagtcgtgccttgagccaacttcattcacagtgtaggccgaaggtgtggacaagaatggtcccattgagttccaaaacacaaagctcatgacacgtttgagctacactctggatgagattgagggaccctttgaggcgtcttatgatggcactgtcatgtttgaggagaaggatggtattgactacgccgtcgtgacaattgagcaaccggaaggccaacgtgtgccctttctattcaccatcaagcacttggaggcatgacggaagccaaatcgctttagaggggagacactattcccattctaccgggtgagctctgtgttggaccccacgggaagatgtgcttccacagggtatgacaatgcatttacttttcctgctgggggaacagggtatgaagaataacttgccgagga

SEQ ID NO: 216792 - DNA, 445 bp, Glycine max
agtaaaaattttagctcaaaaactcacacacaccatcaggggaaaccttgaattataaacattgtaattggagggcaatctaatatacaaccatgacaggactctgagtagtgctaggaaagctgggtcaagggataatgcagtaacaccatgcatgaagttactaacaaaatttgagccggcaaacaaaacagagaacattacactctatgactcaagctgagcataccagatgccctggatcttgacatcctttggagcctttgctcccaaatcagtgtcagatggttgaacactcttgaacacacctttaacctcacccgcatcaggcttgggcttggagacactcaaggcgattttggccttggatgatgaggcacttatattggtttccttggcagagatttacttatcttctcttgcaccagcaggcaaagcaactgca

SEQ ID NO: 216793 - DNA, 581 bp, Glycine max
gatctaaatagattgttctactcaacaatatctacgctaaattcatcatcgtgagtgatgtttctgtttcttctgaaaaaggtatcacacataaatctagagaagtgttgacccattctcatctgcaactacaaacactctctgtccttgacagacagctgttccaaacccaacatcattcacctgctcccaccattccatttcctctttctttctcccacctctctcatatcttcagatccatcactctctttgcagaaaaaaaaggctttgatatttggaaatgtctgaagtgagaaacaaagtggatttcatccagttgcttggacctgacatgtcaatcaagattctcacccatttggatgacccttgtgatcttattcgggtttcttctgtttccagttcttggcaccgatttgttattgaacatggcctctgcaagcaactttgcttgaaaatgtttcctgaaatatctggtgttgctcatataattgagcttgacaacattattgaaccactaagcaacactcttggcagttatgtaagttgggagtctcataagagaaatcatagagtctatg

SEQ ID NO: 216794 - DNA, 589 bp, Glycine max
aagtagttgagaactaagaaggagaagcaaatggcttcctcaatgatctcttgcccagctgttaccactgtcaaccgtgccggtgccggcatggttgctccattcactggcctcaagtccatggctggcttccccaccagaaagaccaacaatgacattacctccattgctagcaacggtggaagagtgcaatgcatgcaggtgtggccaccagttggcaagaagaagtttgagactctttcctacctgccagaccttgatgatgcacaattggcaaaggaagtagaataccttcttaggaagggatggattccttgcttggaattcgagttggagcacggtttcgtgtaccgtgagcacaacaggtcaccaggatactacgatggacgctactggaccatgtggaagctgcctatgtttggttgcactgatgcttctcaggtgttgaaggagcttcaagaggctaagactgcataccccaacggcttcatccgtatcatcggattcgacaacgttcgccaagtgcagtgcatcagcttcatcgcctacaagcccccaggcttctaagtgtgaaaaatttgcaaagcat

SEQ ID NO: 216795 - DNA, 447 bp, Glycine max
attcattagttttcatccattaatttccattgaagtccgaagacagaaaccaaaaatacaggatgatgaaatctcaaaaagcaaaaacaaatgggaatgtagtttaagtacaaacaaacaaagtggggtggcggctacaaatgctttgcaaatttttcacacttagaagcctgggggcttgtaggcgatgaagctgatgcactgcacttggcgaacgttgtcgaatccgatgatacggatgaagccgttggggtatgcagtcttagcctcttgaagctccttcaacacctgagaagcatcagtgcaaccaaacataggcagcttccacatggtccagtagcgtccatcgtagtatcctggtgacctgttgtgctcacggtacacgaaaccgtgctccaactcgaattccaagcaaggaatccatcccttcctaagaaggtattctac

SEQ ID NO: 216796 - DNA, 361 bp, Glycine max
atcgaagatgccatcgagagtgcttttctttggttggatggaaaccagctagcggaggctgacgagttcgaagacaagatgaaggagcttgagagcatttgcaacccaatcattgccaaaatgtaccagggtgcaggtgctcccgacatggctggaggcatggatgaagatgttcctccatctggatccggtggtgctggccccaagatcgaggaagttgattaaattgtttcattatttagatgggatgggcttgtgttggatctattccggtttttttcctttatttttattggtctaaaatatgggccattattttgggtactaacaccaggtttggggattggtaattctttttttt

SEQ ID NO: 216797 - DNA, 406 bp, Glycine max
atcgaacatgccctcgctagtgctttttaggggcaggatcgaaaccagctagcgggggctgaccagtgcaaagacaagatgaaggagcttgatagcatttgcaacccaatcattgatacaatgtaccaaggtgcacgggctgccctcctgtctgtatgcatggatgaagattggtctgacatcgggaggcggtggagctacaccccactatgcacgaaccagattagatctgttaattttttagatggcctgggcctgagtggtacctatctcgcttccacttcctactttagataagaacgaatatattgtgccattattgaggatactaacaccagatcatgcggtagattattctcatctgggggtttagaatcagtctttccacattcatctggatagagac

SEQ ID NO: 216798 - DNA, 453 bp, Glycine max
aaatagtgctttttaacaaagacatgctatcttaattttgggaactgataattaaagcggggcgcattcaatacaatacaatacaatttgtaactatgaacaatcaatatatgaccgtattttatttttgtgatacacacaatttaagccatgattttcttacgggatttacagcaactcttaacttatttaaaacatcataccaacccaactaggagcaatttttattatacaaagacaactatctttaaactctgaagcatgacaaggtggttgtaaccagggaccatattcttatgcaatttatgccacaactggataagacgcacaagttgcaacacccctcatgttcttccccaatcccattttgaagtaggcattataaccccaactttttccccatgaattttttatgagccaatatgggacgccattttcaactccataccccac

SEQ ID NO: 216799 - DNA, 466 bp, Glycine max
agttgatcgttgaaatgataatttatttaacagagatacaagatatccatttttttttcagattggaatcttttaaagagatatatggaattatatgggtatttgcccctattttgattcttatattgggaattacgataagtgtactagcaattgtatggttagaaagggaaatatccgcagggatacaacaacgtattggacctgaatacacaggtccttttggagttcttcaagctctagcagacggaacaaaattacttttcaaagagaatcttattccatctagaggagatattcgtttattcagtataggaccatctatatcagtcatatcgattataataagctatttagtaattccttttggctataactttgttttatctgatctgaatattggtgtttttttatggattgctatttcgagtattgctcccattggacttcttatgtcaggatatgg

SEQ ID NO: 216800 - DNA, 520 bp, Glycine max
  unsure (1)..(520): unsure at all n locations
gttcttatcctattcttttttgtgtaagtaaaataaaaggggacttccaaaaattaaaggattatttcgtttctgatagttatttatttaatcggtggatggaagtatactctggatcggaattctggggagtactgccttattttttctaccaacggaaagccccaattagtattctttttctattatacataaatataaatgttcttttggatatttttaaaaatatacgttactaatcctttgtgtattttggtgtttctaatcatccattcattttttattaatcccttatttatgttatttatgttaatatatatatgctaattcatacaaatgatattgaaaatttaatttaaaaagggttggtcttttacgcccgcttcaagacaggatgactaatcaaccaaccttgggaaaaacaacaacttctacctataatttaattcatttttttcacttaattcttatacatagaaaatgagactcaatatttttactgnncattaaaatcatcatc

SEQ ID NO: 216801 - DNA, 536 bp, Glycine max
  unsure (1)..(536): unsure at all n locations
agcgttttgtttcccatcgtctttttttgctctccctctgtgcagacatggggggcttctcgtacttcaaggatttggtggggagggaagtaatcgtggagctgaagaacgatttggccatcaaaggaacattgcattctgttgatcagtacctcaacatcaagctcgaaaacactagcgtcgtcaatcaagaaaagtaccctcacatgctttctgtaagaaactgcttcatcagaggttcggtagtgagatatgtgcaattgcctccagaaggggtggacattgaattattgcacgatgccacaagaagagaagcccggggcggttagtgtcttcattttgtgatgtatcttatttatgagaattcggtgggcttacataaggtggatgttaaccttcctacttcagaaggaaactcttttcagatgttaaaggttatgtaactgtattggcttttccttttagttcttttggaagctntgtccacgtttaatgtgacaaaaatgatactggtggtactgcatttttttttcttt

SEQ ID NO: 216802 - DNA, 535 bp, Glycine max
agcgttttgtttcccatcgcttttttttgctctccctctgtgcagacatgggggggttctcgtacttcaaggatttggtggggagggaagtaatcgtggagctgaagaacgatttggccatcaaaggaacattgcattctgttgatcagtacctcaacatcaagctcgaaaacactagcgtcgtcaatcaagaaaagtaccctcacatgctttctgtaagaaactgcttcatcagaggttcggtagtgagatatgtgcaattgcctccagaaggggtggacattgaattattgcacgatgccacaagaagagaagcccggggcggttagtgtcttcattttgtgatgtatcttatttatgagaattcggtgggcttacataaggtggatgttaaccttcctacttcaaacggaaactcttttcagatgttaaaggttatgtaactggattggcttttccttttagttcttttcgaagctctggccaattttaatgtgacaaaaatgatactggtgtaactgcattttttttcttt

SEQ ID NO: 216803 - DNA, 495 bp, Glycine max
gcttgctcatcaagtccaagaaccatacctaccttttgcaatctcaattcaatggcgtcctctctcattgcgaagcgcttcctctcctcttccctcctctccaggtccctccttcgccccgccgcttccgcttcccaccgctctttcaacaccaacgccatgcgccagtatgacaaccgcgccgacgaccacagcaccgacatcgatcgtcactccgaacgctctttccctagcactgcgcgccgcgacgatatcttctcagatgtgttggatccattttttccgactcggagtttgagccaggttctgaacatgatggaccaggtcatggacaatccgttcctctccgcgtcgcgcgggatcggagctggcgctggagtgcgtcgcggatgggacgcgagggagacagaggatgctctgcatctgcgcgtggacatgcctgggctcggcaaggaagacgtgaagatctccggggagcagaacactctcattatc

SEQ ID NO: 216804 - DNA, 531 bp, Glycine max
  unsure (1)..(531): unsure at all n locations
aggcgcatgtacttccttttgagncnnncnnnnnnntnnnttnnnnnnncnnnccnnnnnnnntntnnntnggntggtgtatnnnnnntnnntttttttttttttttttgnnntntntttntttttttttgggggtgggtgttttttttattttttttttttttttcctntttttttttttattctgttttattctactaactagattcatcaccacctaataaaagaaaactaaagagtagtgtcaatgcaaaatggccaaatcagcttgggttgttctactcaaccttaacactgatcacgtctttcctctcttcctccttcattttcggcacaaccaccttgaccacaccgttcttcatctcagctctgatctggtcaatcttgtagagcttgtccggcaagtcaatcctgctagtgtatcgacgagcgctctcttcttcatcgccttctttagcaccttcacctttgataatgagagtgttctgctccacagagatcttcacgtcttccttgccgagcccaggcatg

SEQ ID NO: 216805 - DNA, 534 bp, Glycine max
gcttgctcatcaagtccaagaaccaacctaccttttgcaatctcaattcaatggcgtcctctctcattgcgaagcgcttcctctcctcttccctcctctccaggtccctccttcgccccgccgcttccgcttcccaccgctctttcaacaccaacgccatgcgccagtatgacaaccgcgccgacgaccacagcaccgacatcgatcgtcactccgaacgctctttccctagcactgcgcgccgcgacgatatcttctcagatgtgttggatccattttttccgactcggagtttgagccaggttctgaacatgatggaccaggtcatggacaatccgttcctctccgcgtcgcgcgggatcggagctggcgctggagtgcgtcgcggatgggacgcgagggagacagaggatgctctgcatctgcgcgtggacatgcctgtgctcggaaggaagacgtgaagatcttcgtggagcagaacactctcattatcaaagtgaaggtgctaaagaaggcgatgaagaagagagcgct

SEQ ID NO: 216806 - DNA, 549 bp, Glycine max
ctaaacaacaagcttattcacaactctatataacaattattacagatacgtttgaagtttcaaaaccaaacacagcaacaatactattaagctgttatatctactaactagattcatcaccacctaataaaagaaaactaaagagtagtgtcgatgcaaaatggccaaatcagcttgggttgttctactcaaccttaacactgatcacgtctttcctctcttcctccttcattttcggcacaacgaccttgagcacaccgttcttcatctcagctctgatctggtcaatcttgtagagcttgtccggcaagtcaatcctgctagtgtagcgacgagcgctctcttcttcatcgccttctttagcaccttcacctttgataatgagagtgttctgctccacggagatcttcacgtcttccttgccgagcccaggcatgtccacgcgcagatgcagagcatcctctgtctccctcgcgttccatccgcgacgcactccagcgccagctccgatcccgcgcgacgcggagaggaacggatttgccatgacct

SEQ ID NO: 216807 - DNA, 536 bp, Glycine max
gggacaggaacagcaaaccagtgtccaacaattgatggtggattggactcatttgccttcaagccggggaaatacaatgccaagaagttgtgccttgagccaacttcattcacagtgaaggccgagggtgtggccaagaatgctccccttgagttccaaaacacaaagctcatgacacgtttgacctacactctggatgagattgagggaccctttgaggtgtcttctgatggcactgtcaagtttgaggagaaggatggcattgactacgccgccgtgacagttcagctaccgggaggcgaacgtgtgccctttctcttcaccatcaagcagttggtggcatcagggaagccagatagctttagtggggagtttctagtcccatcctaccgtggaagctctttcttggaccccaaggaagaggtgcttccacaggttatgacaatgcagttgctttgcctgctggtggaagaggagatgaggaagaacttgccaaggaaaacaataaaagtgcctcatcatccagggcaaaatca

SEQ ID NO: 216808 - DNA, 519 bp, Glycine max
agtaaaaaattgtatctcgaaaactcacacacaccatcaatttgaaccttgaattttaaacattgtaattggaggtcgatataatatacaaccatgacagtactctcagtagtgctaggaaagttgggtcaagggataatgcagcaacaccatgcatgaagttactaacaaaatctgagccaacaaacaaaacagaaaacaaaacactctatgactcaagctgagcataccagatgccctggatcttgacatcctttggagcctttgctcccaaatcagtgtcagatggttgaacactctcgaacacaccgataacctcacccgtctcaggcttggtcttggtgacactcaaggtgattttgcccttggatgatgaggcacttttattgttttccttggcaagttcttcctcatctcctcttccaccagcaggcaaagcaactgcattgtcataacctgtggaagcacctcttccttggggtccaagaaagactttcacggtaggatgggactagaaac

SEQ ID NO: 216809 - DNA, 448 bp, Glycine max
gggacaggaacagcaaaccagtgtctaacaattgatggtggattggactcatttgccttcaagccggggaaatacaatgccaagaagttgtgccttgagccaactttattcacagtgaaggccgagggtgtggccaagaatgctccccttgagttccaaaacacaaagctcatgacacgtttgacctacactctggatgagattgagggactctttgaggtgtcttctgatggcactgttaagtttgaggagaaggatggcattgactacgccgccgtgacagttcagctaccgggaggcgaacgtgtgccctttctcttcaccatcaagcaggtggtggcatcagggaagccagatagctttagtggggagattctagtcccatactaccgagggagctctttcttggaccccaagggatggaggtgcttcacaagatatgacaatg

SEQ ID NO: 216810 - DNA, 500 bp, Glycine max
agtaaaaaatttttctcgaaaactcacacacaccatcaattgggaccttgaattttaaacattgtaattggaggtcgatataatatacaaccatgacagtactctcaatagtgctaggaaagttgggtcaagggataatgcagcaacaccatgcatgaagttactaacaaaatctgagccaacaaacaaaacagaaaacaaaacactctatgactcaagctgagcataccagatgccctggatcttgacatcctttggagcctttgctcccaaatcagtgtcagatggttgaacactctcgaacacaccgataacctcacccgtctcaggcttggtcttggtgacactcaaggtgattttgcccttggatgatgaggcacttttattgttttccttggcaagttcttcctcatctcctcttccaccagcaggcaaagcaactgcattgtcataacctgtggaagcacctctttcctttgggtccaagaaagagcttccac

SEQ ID NO: 216811 - DNA, 559 bp, Glycine max
  unsure (1)..(559): unsure at all n locations
gccaaccttctgctgcatcagttgtgagatgcaaccccaccaccccatcaggcctgaccatcagagctggttcctatgctgatgagctcgttaagaccgcgaaaacagtggcttcaccagggaggggtattttggccatggatgagtccaatgctacctgtgggaagcgtttggcttcaattgggctagagaacactgaagctaaccgccaggcataccgtaccctccttgtgacagttccaggacttggtcagtacatctctggtgccattctctttgaggaaactctctaccaatccacaactgatggcaggaagattgtcgacgtgctcctcgagcaaaacattgttcccggtattaaagtcgacaagggtttggtaccccttgctggttccaacgacgagtcatggtgccaaggtcttgatggtcttgcctctcgctcggctgcatactaccagcaaggtgcccgtttcgccaaatggcgtactgttgtgagcatccncaacggtccctctgctctggcagttaaggaagcttgcctgggtctggctcgctatgc

SEQ ID NO: 216812 - DNA, 465 bp, Glycine max
gagactacttaggtgttcatccacttatacaagagggcctaagctatgttgggatgcacattccagttggtagagtccaagcagatgacatggatgagttggctcgtttagccgacgaatacgccaccggtgagctcaggctcacagtggagcagaacattataatcccaaatgtggacaataacaaaattgatggcttgctcaatgagcctctcttgaaggggagattctcacccgaaccttctctattgatgaagactctggtggcatgcactggtaatcaattttgtggacaagctataattgagacaaaggaaagggcattgaaagtgactgaggaagtggagaggcaagtggctgtgactaggcctgtgagaatgcattggactggctgccctaacacttgtggacaggttcaagttgctgacattggtttcatggggtgcatggctagggatgacaatg

SEQ ID NO: 216813 - DNA, 458 bp, Glycine max
aaagaaataaattgtaaattagggactagcaaagaatgaacaggtgtaaaccaaaagtgtacatgcatatatcatcccttcttctatgtagaggacactaataattttgtccaagggacaatggtggatttaataaagaaactaaaattaccaatggccattaaaatttaatgcatatttggtttttaattcaacttatgcacaaattccgagatcaaatcaatgatcttcaaaactcattttgcaaaagaaagggtgaggatccttttgcaaaactcattttgatgcaaatgtctgtttgtaataactatccaaacatgcacttaatcttccccttcctctctattccttaggacagctccaaagtggtttactagtatgtttaccacaacaggcaccaagtccttgcaaggcacacccttcttatacacttgagccagaagtgaatcactttcaat

SEQ ID NO: 216814 - DNA, 487 bp, Glycine max
gagactacttaggtgttcatccattttttcaagagggcctaagctatgttgggaggggcattccagttggtagagtccaagcagatgacatggatgagttggctcgtttagccgacgaatacgccaccggtgagctcaggctcacagtggagcagaacattataatcccaaatgtggacaataacaaaattgatggcttgctcaatgagcctctcttgaaggggagattctcacccgaaccttctctattgatgaagactctggtggcatgcactggtaatcaattttgtggacaagctataattgagacaaaggaaagggcattgaaagtgactgaggaagtggaaaggcaagtggctgtgactaggcctgtgagaatgcattggactggctggcctaacactttgggacaggttcaagttgctgacattggtttcatggggtgcatggcttgggatgacaatggttaggccactggaggtgtgga

SEQ ID NO: 216815 - DNA, 401 bp, Glycine max
aaacaaataaattttcaacaatggactagcaaaaaatgaacaggggtaaaccaaaagtgaacatgcgtatatcatcccttcttctatgtagaggacacataataattattttcaaaaggacaaagggggtatttaataaagaaacttaaattaccaatggccatcaaaatttaatgcatatttggtttttaactcaacttatgcacaaattccgagatcaaatcaatgatctttaaaactcattctgcaaaaaaaagggtgaggatccttttgcaaaactcattttgatgcaaatgtctgtttgtaataaccatccaaacaagcacttaatattgcacttcctctttattccttaggacagctccaaagtgtttcactagtatgtataccacaacaggcac

SEQ ID NO: 216816 - DNA, 357 bp, Glycine max
agctgccgaaatattaaatgtttattcccctgatctatatgttcgtcaaagggctgtgccaaatgcatatacattagctataagtggcaaacgacctttcgttgtcattcatactagccttgtggagctcctgacaaaagcagagttgcaggctgttttggctcatgagctgggtcacctaaaatgtgatcatggtgtgtggcttacatatgcaaatattctaacccttggagcctattctgtacctggtattggcggtatgatagctcagactttggaagagcagctgttccgctggcttcgagcagctgaattgacttgtgaatcgtgcagctctttttgttgctcaagacccta

SEQ ID NO: 216817 - DNA, 562 bp, Glycine max
cctggatcagaagccctcattgtttaatttcaattccagatgtctgattataaaagttgtggtgacttcaagggttgcatttcctaaatttggaaccccatatgttttaaaaccacttgctcatgaagatgcaatgaccctattccgacaccatgctctcttggaaaaaagcagttcaagtattcctgacgaagaacttgtccaaaaggttgtgagatattgcaagggtttacccctcgccattaaagtgattggtagatcactcagtcatcggcctattgagatgtggcaaaagatggtggaggaattttcacaaggtcattctatacttgattccaatattgaattacttacatgcttccaaaaactcttgcatgtattggaagataatcccaacatcaaggagtgcttcatggacttagggttgtttcctgaagaccaaagaattcctctttctgttctcattgatatatgggcagtgttatatggatatgatgatgacggcatagaagcacggacatgataaataaattagactccatgaatctagttaatgtcttgg

SEQ ID NO: 216818 - DNA, 467 bp, Glycine max
gcttgctcatcaagtccaagttccttcctaccttttgcaatctcaattcagtggcggcctctctcattgcgaagcgcttcctctcctcttccctcctctccaggtccctccttcgccccgccgcttccgcttcccaccgctctttcaacaccaacgccatgcgccagtatgacaaccgcgccgtcgaccacagcaccgacatcgatcgtcactccgaacgctctttccctagcactgcgcgccgcgacgatatcttctcagatgtgttggatccattttttccgactcggagtttgagccaggttctgaacatgatggaccaggtcatggacaatccgttcctctccgcgtcccgcgggatcggagctggcgcttgagtgcgtcgcggatgggacccgagggagacagaggatgctctgcatctgcgcgtggacatgctctggctcggcaaggaagacctgaatatc

SEQ ID NO: 216819 - DNA, 548 bp, Glycine max
  unsure (1)..(548): unsure at all n locations
aattaatggcagctgcaagtattatcatctccatctcctctgcttcactctttgctccaacaacaacccaatgcctcctcaaacacaattacaaggaccatgatcatgttcatgttccatcatcatcatcatcatacttcacaacacacgctgctctcaagatatcaagaccaacaacaacaacgtttggaatcaccacaacaaccaccagggttaataatgttcctcctcgtaggtttagttgttcagcatcgtcatcttcttcctcttccactcttccctcagctcttctatttgactgtgatggagtccttgtggatactgagaaagatggtcaccgcatatctttcaaccaaaccttccaagagagagaactaggcgttacatgggatgtggacttgtacggngaattgctcaaaattggaggcggaaaagaaaggatgacagcgtactttaacaaggtcggttggcctgcgaatgccccaacagatgaacaagaaagaaaagattcatagcttcactccacaaacaaaagacaagactattta

SEQ ID NO: 216820 - DNA, 551 bp, Glycine max
aacaacaaatgtattattctttattcaactcatggtgatatttggatcattgacttgaaagggtgggcttgtacacataagtcgaattggacactcataggaaatattgaaggagacttgcatcaaacaaaatcttaagagtgtcacttaacaaagagctagctcacgtattgcttctcaagaaggcttccgcagaaagccaaatcaaatctctcctcaggaggatcaccaatgcagtcaaagactgcatctgcatttaagaaatcttcatctgctgtatagccgctctttgttactatacacgtcattccagctgctttagcagctgctaggcctatggcactgtcctccaccacaacacatcttgaaggttcaacacccagagtgctggctgctaataggtagatagctggatcaggctttttacggggaaccacgtctccggcaaatatcttgattttttctgctctttcaggtcccagcaagaatgatactattgcagagaccgccttctcattggaagtgcttgaaactgcaacttggactccttg

SEQ ID NO: 216821 - DNA, 353 bp, Glycine max
tcttgacgtatggtaacatgcttgtccaagaacaagagaatgtcaagagagtccaattggctgacaagtacttgaacgaggctgcacttggaaatgctaacgaggatgctattaacaggggaactttcttccaatcttgaattggaggcaaagcaaacttggcaagtaaatatttctgttcctgaaggttgtgctgatccaagtgctagaagttgtgatgggacttgcgtgtaacattcttagaattctcaatgtcttaggtgcaaagagaagatgccaagtttgagatgattttactatatttttcatattggactgtcttcctctataattttgagttaaagtgtccactt

SEQ ID NO: 216822 - DNA, 353 bp, Glycine max
aagtggacactttaactcaaaattatagaggaagacggtccaatatgaaaaatatagtaaaatcatctcaaacttggcatcttctctttgcacctaagacattgagaattctaagaatgttacacgcaagtcccatcacaacttctagcacttggatcagcacaaccttcaggaacagaaatatttacttgccaagtttgctttgcctccaattcaagattggaagaaagttcccctgttaatagcatcctcgttagcatttccaagtgcagcctcgttcaagtacttgtcagccaattggactctcttgacattctcttgttcttggacaagcatgttaccatacgtcaaga

SEQ ID NO: 216823 - DNA, 353 bp, Glycine max; identical to SEQ ID NO: 216821

SEQ ID NO: 216824 - DNA, 353 bp, Glycine max
aagtggacactttaactcaaaattatagaggaagacagtccaatatgaaaaatatagtaaaatcatctcaaacttggcatcttctctttgcacctaagacattgagaattctaagaatgttacacgcaagtcccatcacaacttctagcacttggatcagcacaaccttcaggaacagaaatatttacttgccaagtttgctttgcctccaattcaagattggaagaaagttcccctgttaatagcatcctcgttagcatttccaagtgcagcctcgttcaagtacttgtcagccaattggactctcttgacattctcttgttcttggacaagcatgttaccatacgtcaaga

SEQ ID NO: 216825 - DNA, 446 bp, Glycine max
caaaggttgctgtaggagatttttttgcagtagtgctaagtgctaacacctgcagggaacaatggcctctgcatcagcatctctgctcaagtcttcacttgctcttgacaagtctgagtgggtgaagggacaaacccttccccaaccttctgcatcagttgtgagatgcaaccccaccaccccatcaggcctcaccatcagagctggttcctatgctgatgagctcgttaagaccgcaaaaacagtggcttcaccagggaggggtattttggccatggatgattccaatgctacctgtgggaaagcgttggcttcaattgggctaaagaacactgaagctaaccgccaggcataccgtacccttctcgtgacagttccaggccttggtcagtacatctctggtgccattcttcttgaggaaacactctaccaatccacaactgatg

SEQ ID NO: 216826 - DNA, 514 bp, Glycine max
gctatatattgagacataggggagtacacaactcatagcaaaaggtttattaagctgtaaaggtgcatttaaccataaacaaatatagtctccaagactataaaaacattacattttagacaaattagtcttccacttcatcgtccgtcaacacctactgtaactgctggtgttgctgcctaacaagtatcatattcactgcaaacatcttagtaagagtagcttttgacgaacaactccttcttggcttcctcggattcaccctcaccagtgtacttcccaagctgagcgagtgagttggacttggcacggaatgcgagtgcatcttgtgctgccttcacgttctctgggcggcctccccatgttttcaaggcaatgttttggagggctctggcatacgagaatgacacgtgccacgggtttggagattggttcatggcattcaaattgaaggtagcttcaacctcagactgtccaccagacaaaaacattattttcagggacagcaggggga

SEQ ID NO: 216827 - DNA, 449 bp, Glycine max
gtaatttctgccagcctcaataatttcttgctctgcctctgccactctctgagtaggactacactgccatggctgcctcagtctccactgttggagctgtcaacggagctccactgagcttgaacagctctggagctggagcttcagttcccagttcagccttctttggcaccagcttgaagaaggttattgcctcaagggtccctaacgtcaagatttcttctggaagtttcaaaatcgctgccgcggaaaaagagattgatgagaaacaacagacagacaaggacagatggaaaggtcttgcctatgatgtttcagacgaccagccagacatcacaagagggaagggtttggttgattccctcttccaagctccacaagatactggaactcactatgcaatcatgaacttttatgagtaccttatcactggacttaaacaatacaac

SEQ ID NO: 216828 - DNA, 497 bp, Glycine max
acaaaaaatttttttttattaactaaaacgaacaggtagcaggacatgaatatcgtgtcaaggaaaaaattaaatgtagaaaagcaacaaatgcgcaagcggaaagagaaagacatcaagactttaacattgcacacattgtaaaatgtagacaatgtaactcaaaattatacaggataacaatccaatatgaacaagataacttattttattatctcaactcttagcttctctccaagtggagaatgcttaggttctcagggtgtgtataagcaggttccatcatcacttcttgcagttgggtcgaagtttgaggcatttggatcagtacaaccttcaggaacgggaatgtttacttgctgagctgctttgccatagaaagatcctctgttgatggaatcttgattagcatcaccaagagcagcctcttttaagtacttgtctgccagttgtactctcttcacattctcttgttcttgacaagcatgttaccatac

SEQ ID NO: 216829 - DNA, 526 bp, Glycine max
  unsure (1)..(526): unsure at all n locations
atgccattcatccacctgaagccccccnnnnnntnntnnngnnnacnctcnnnnntnnnnnnnnttantttgtnncttattttttantattttttttttcatnnntnattttnnnaccctttggggggggtctttatactatatcccacctttctttccccccccttccttctctttataaccaaccacatcttattatctccaccaaaacctccaaccacaccaccaccaccaccaccaccaaacctaaaaaagacatggccaccttccctcctaagaggtacaaccccagatcaaaaaaaataccccccccccaaccatggaaataccccctgaacaactacgactccaaaacacctatatcatcatccccaaaaacttctaaccccaaacttgaataatcacaaataccccccctccttccaaccattaaccctatatatttcgatccccacccacgatcaccattaaactcaccttatgccacccgtgaaccccctaaaaatgaatgctttacccccaaccc

SEQ ID NO: 216830 - DNA, 445 bp, Glycine max
attccattctctctgtgtatttccttacctctcccttcaagatgcagatcttcgggaagaccctcaccggcaagaccatcacccttgaggtggaaagctctgacaccatcgacaacgtcaaggccaagatccaggacaaggaaggaatccccccggaccagcaacgtctcattttcgccggaaagcaacttgaggacggccgtacccttgctgactacaacattcagaaggagagtactcttcacctcgtcctccgtctccgtggtggcatgcagatcttcgttaagacactcaccggcaagaccataaccctagaggttgaaagctccgacaccatcgataacgtcaaggccaagatccaggacaaggagggtatccccccggaccagcaacgtctcatctttcccggaaagcagcttgaggacggccgcaccctcgccgacta

SEQ ID NO: 216831 - DNA, 545 bp, Glycine max
  unsure (1)..(545): unsure at all n locations
gaaccacgaaattatagctaattagctaattatccattaaacactgtcagagcaatccgaaaggaaaaaaagagaaaaaacatagccaactccgttccgcatgatataaaagtttaatcaacctcctccattttgctgccctcagcatcagcttcagcctcctcctccagtgggggcatatcagcatcagcttcagctgcatcctcgtcgatgctcagtccaagcttcaacattctgtggatcctgtttccaaaagtgttgggttcgtcaaggctgaaaccagaagtgagaagagcagtctcgaacagcaacagaacaaggtccttcacggatttgtcgttcttgtcagcatccgcacgcttcctgagctcctccataattgggttctcagggttgatctccattgtcttcttgcttgacatgtatcctgccatgctgttgtcccttagggcttgagctttcatgatcctttccatgtttgcagtccaaccgtattcttcagtcaccagacagcatggtgnatcaacaacacggtcagagactac

SEQ ID NO: 216832 - DNA, 503 bp, Glycine max
  unsure (1)..(503): unsure at all n locations
gtcacgtgcttctcttggtcaagactttggacttgtgcagattaggagcttgaaagcactttaacttcttaatacatggcttgtcaaatgggaactatgactctgaactggagattatcaattacagagaatgaaagctctgaaaagtcatgtgtcaaccttgcaacttccagaatccacagctgttgctgtgagccaaattttaacgggctaactctaaaagcttgcatgaaatcttcaccttttgctcagagctgtttcctgggaagaagagctgggtggaaaatagcttttgcattgaacacaggtggagtgtctggaaatggtgaccaacaaagcttcaacgaagccagttccaatctcggtggtactcgattgggtaggatattgactgcaggtggcagacaacttctagaaaagctgaactcagctagaaagaacatccctttgaaagtattcctgctacttttgggtttctacacggcanatgcactagctacaat

SEQ ID NO: 216833 - DNA, 520 bp, Glycine max
ctccttcaccaagcacatgcaaaggggtgcactgtgcagtgtgcacagagccataaagtcattaagcaatcgtcatatatactattcacatactacaattacatgtacaccactagtatagaactataaggtagcaatagaagaagactacggtcaaaattatggcttaacagagttttatgacatacaacaaaaaattaaaaagacaaaacaaggacaagattttgcgggttcttagcttcccaacttaaaagcatctacaaagagacctaaacatatgccagctttccagtagttcaccagcactagaaaagactgcaacctcccagtcctcgcggtaggtagctttctatatattagcatgccaatcccctcaattgcagccaccacaacaccagcaaccagaacatcccaatcaccggtttgcccaaggattgtagctagtgcatttgccgtgtagaaacccaaaagtagcaggaatactttcaaagggatgttctttctagctgagttcagcttt

SEQ ID NO: 216834 - DNA, 362 bp, Glycine max
cgaagaataagattatgagcaactgcacggaggatatagttcatagagaatagagatcaaaggggtcgataacagagagaatatacagattctttttttgtgacatgaaaaatccttaggctagtagtaactgcgatagcatgacaagtatcaaaattacaattaagttggattcattcgacttccacgatctcatccaaagcatagttgtttgttgatacattggcatagttgactttgttgaatcgaaccacaacagggtagcgagtgttggggtcctgcacaacaataaaacaagaacttgagtttgcataatgcatgggatgggagaaaattgagagggtttgcattagagtgagttt

SEQ ID NO: 216835 - DNA, 559 bp, Glycine max
cacaagcaagcctcctccttcagattctgctcaaagatctttgcaagaaccccggcggtggcttttccgccggtttggtcgacgaaaccaacatttttgaatggagtgtgactataattggacctcccgatactctttagtaagttctcttcactaaatatctctttctttcacactaatttatgcgattttgatttgattattgggattttggattccccttgtttgtgcagtgatgatctcgttgcttctttgttctggggttttgggttcccccctaaaaatcacgtttttaattatacttatcggggggttcttcagagttttatgttatttttctttttgaacagatggggtggtttctttttctgccctgataccgtggaatcattaaggagtttcttttttatattttttgtgagtctttctggttgctttgtttaattctagagacgagattatagttgttgtacggaagcttgacaaaaagatacaggctatgttgtattttattcttttattgcggcttctgcaagaaatgatactgatttggttgttc

SEQ ID NO: 216836 - DNA, 462 bp, Glycine max
aaggtcatgcaaatgaacatctaagggggcattttaactagaaaccaaacactgaccatgcacttataatacatttggtttttccaatacatatggcactatactggtttcaacagtgacaggtgaaccaatccacacattaagttgtatatccttctgttcacaaaaggaagatgagaatccaagctgtcaatcacaacatttcttgtgacttccgcacacatcggctaaccttcttcttgaattcatctctcctatctctccactccttcgcagcttcaacatttgcaggagattcatcattcggactagaaagcatcgatatgatacttaatactatactctgtactgtatgaacaggcgtccagcgctcacttgcaagcttcataaccatttgggtcgtcaccagtaggatgaataaattgatattcaaactcccccatcaggatacactgcatattg

SEQ ID NO: 216837 - DNA, 544 bp, Glycine max
  unsure (1)..(544): unsure at all n locations
cacaagcaagcctcctccttcagatgcagctcaaagatctttgcaagaaccccggggatggcttttccgccggtttggtcgacgaaaccaacatttttgaatggagtgtgactataattggacctcccgatactctttagtaagttctcttcactaaatatctctttctttcacactaatttatgcgattttgatttgattattgggattttggattccccttgtttgtgcagagatgatctcgttgcttctttgttctggggttttgggttcccccctaaaaatcacgtttttaattatacttatcggggggttcttcagagctttatgttatttttctttttgaacagatggggtggtttctttttctgccctgataccgaggaatcattaaggtgtttcttttttatattttttgagagtctttctggttgcttgtttaattctagagacgagattataattgttgtacggaggcttgacgaaaagaatacagcctatgttntattttattcttttattgcggcttctgcaagacatgata

SEQ ID NO: 216838 - DNA, 430 bp, Glycine max
ataaggtcatgcaaatgaacaactaaagggggaatttaactagtaaccaaacactgaccaagcacttataatacagatggttgttgcaagacaaatggcgctatactcggttcaacagttacaggtgaaccaatccacacattaagacgtatatccttctgttcacagaaggaatatgagagtccaagctgttaatcacaacatttcttgtgacttccgcacacatcggctaaccttcttcttgaattcatctctactatctctacactccttagaagcttcaacatttgcgggagattcatcattaggactagaaagcatcgatatgatacttaatactatactctctactgtgtgaacaggcgttcagcgctcacttgcaagctcataaccatttgggtcgtcaccaggaggatgaagaattgatatg

SEQ ID NO: 216839 - DNA, 583 bp, Glycine max
  unsure (1)..(583): unsure at all n locations
ttccctttcccattcccattcctattcctcctttccctctcctctccgctcctccaatgccccccaaactttctccctccgccgcttcgccgccgcctctctcgcttgccctccaccgccgccgccgcccctcgacgccatggcccagaaaatcggaaagtccacgcgccgccccggtgcctcctccaaggcccgcgtctatgccgatgtcaacgtcgttcgccccaaggaatattgggactacgagtccctcaacgtccagtggggggagcaagatgattatgaggtggtgagaaaggtgggtagggggaaatacagtgaggtgttcgaaggtgttcactgcaccgacggtgagaaatgtgtcattaagatcctgaaacccgtgaagaagaagaagatcaagagggaaatcaaaatattacagaatctttgtggagggcctaatgttgtaaagttgcttgacattgttagagaccagcaatcgaagaccccaagtcttataattgaatatggcaataacactgatntaaagtgctctattctacattgtcagactacgacatacgatattatatttttgaac

SEQ ID NO: 216840 - DNA, 424 bp, Glycine max
gaaaaggaatcaacatttcatttccaaaggttggcacacaatcaaataaaactgtaaacagctgaatttcccccccaaaattaatgttaaaaaaccgaaaacaaaccttttttccaaaaggctatttaaaaggagttttccaccaaaccagggaaatcccttaaaagcaattccaaccaaaattaccatttaaaactgtggccccctttgtaaaaccaacccccttttttaaacaggccccaccacctaagggggcccgagttctactactttctgaatttttaactggattgaagtatggatgggccatggtttttttccagtaggacgtccttggggaccatagcgaaaaaacttgccaacaaagtcaacggcctcaggaacagccaagagatgattttctacattaaagaacttcgcccat

SEQ ID NO: 216841 - DNA, 321 bp, Glycine max
ctccctttcccattcccatttttttatctcctttccctctcctctccgctggtgggggtccccccaaactttctccctccgccgcttcgccgccgcctctctcgcttgccctccaccgccgccgacggccctcgacgccatggcccagaaaatcggaaagtccacgcgccgccccggtgcctcctacaaggcccgcgtctatgccgatgtcaacggcagtcgccccaaggaatattgggactactagtccctcaacgtccagtggggggagcaagatgattattacgtggcgagacaggtgggtagggggaaatacagtca

SEQ ID NO: 216842 - DNA, 403 bp, Glycine max
caaaaaccactggaactccacctttaagcgcaagtgctcttcaaccatgatcgacgacaacacccaaccgctgaaaagatccgtgagtgccggcgcggctattccagtctctactggactctacatgaacccgcccacaccgggtagtccctccggatccgatgtgagcgagtccagcttaccggttgcatcctcttcgcacgtgttccgtcccgtgcctagaactgtcaaggttctaccacccgtagaaaccacgtcgtcctccaatgaccctccaacttcactttctctatcactccccggtgttggtgttgttgactcatccgaagtctccaatcggacaactgagccgattcattttacaccgcccatgccacatcgggcgaatactatgcctttgctg

SEQ ID NO: 216843 - DNA, 542 bp, Glycine max
caaaaaccactggaactccacctttaagcgcaagtgctcttcaaccatgatcgacgacaacacccaaccgctgaaaagatccgtgagtgccggcgcggctattccagtctctactggactctacatgaacccgcccacaccgggtagtccctccggatccgatgtgagcgagtccagcttaccggttgcatcctcttcgcacgtgttccgtcccgtgcctagaactgtcaaggttctaccacccgtagaaaccacgtcgtcctccaatgaccctccaacttcactttctctatcactccccggtgttggtgttgttgactcatccgaagtctccaatcggacaactgagccgattcattttacaccgccaatgccacatcggtcgaatactatgcctttgctgccaatgatgacgtcggtttcagcgacggtgatggcgccgtttaattttagcgcagagtttcggtcggtgatgcaggaaatgataaggaaggaggtgaggagttatatagagttgcacaatcagaatgggatgtgttttc

SEQ ID NO: 216844 - DNA, 317 bp, Glycine max
gccaaaagttcgaagggtgtgtttttaaacagtggttccaaagcaggagacaatggaaaggcaggctcaggttctggaaatgatggtgtctcacaaagtgctgaaagtggttcagagggatcttcagatgctagtgatgagaatactgaccaacaggaatcagctacaaacaagaaagggagttttgaccaaatgcttgttgatggagccaatgcacggaagaattctgtgagcaccattcctcattcttcagtacctggaaatcccgctgtctcaatgtctccaactagtcttaatattggaatggacttgtggga

SEQ ID NO: 216845 - DNA, 593 bp, Glycine max
  unsure (1)..(593): unsure at all n locations
naggggaattctacctccctgagncnnncnnnnnnnntnntggnnannnacnnnccngnnnnnnnnnnnntnggnggtnnnnntcnnnnnttnngngttttttttttttcngggttntntnttttttttggggggggtttttttttttntttttntttttcttcccttttttggttnttactatttaacctacatataaaaatctgcccaataaaagtgctgaaaaaaatatttcgctataatttgttttacaatactaaacgggcaaaacattaggggagtgacaattaaggcttaatggtaaaaatagtaaaccaaggaaaaaaattatatcctatgctcaatttcgccatcgataaaatttcagctgcaaattcctgtctttcgggagttgataatttttcgccgttgctttggcctgatcatcagaagctgtttcattcaagattagcaattgcttctgaaccacacattcgctctaactcttccttgatggaatcattttcagatgtaagcttcttgcattcttcagatactctctgaagctcttctctgagaattcgatgctcactttttagagactccaccctttt

SEQ ID NO: 216846 - DNA, 266 bp, Glycine max
gccaaaagttcgaagggtgtgtctacaaacagtggttccaaagcaggagacaatggaaaggcaggctcaggttctggaaatgatggtgtctcacaaagtgctgaaagtggttcagagggatcttcagatgctagtgatgagaatactgaccaacaggaatcagctacaaacaagaaagggagttttgaccaaatgcttgttgatggagccaatgcacggaagaattctgtgagcaccattcctaattctttagtccctgaaaatcc

SEQ ID NO: 216847 - DNA, 520 bp, Glycine max
gtgactggaacagtctcttcgatacaatctttattatcactgaattgcatgtaagtctcgataaataatgtaggccaaggttatttactatataacctacatataaaaatctgcccaataaaagtgttgaaaaaaatattttgctataatttgttttacaatactaaacgggcaaaacataaggggagtgacaattaagggttaatggtaaaaatagtaaaccaaggaaaaaaattatatcctatgctcaatttcgccattgataaaatttcagctgcaaattcgtgtcttttgggagttgataatttttcgccgttgctttggcatgataataagaagctgattcattcaagattagcaattgcttctgaaccacacattcgttctaactcttccttgatggaatcattttcagatgtaagtttcttgcattcttcagatactctctgaagctcttctctgagaattcgattctcacttctcagagactccaccctcttttgtaactcttcacactcag

SEQ ID NO: 216848 - DNA, 527 bp, Glycine max
gttggtttctttgacagccccaaaattaggtgcaaagaagtttggtggtcctcaccactttctaggaggtagatttgtcccacctgctattgcagaaaaatataagcttatacttccaccatatcttggaacttccatgtgtgttcgaattggaaagcctccacgtattgatatctcagctctaagagagaactatatctctccagaatttcttgaagagcaggtggaggctgacccttttaatcagtttcataaatggtttaatgatgcattggctgctggtttgaaggaaccaaatgctatgtccttgtcaactgtagggaaggacggaaaaccctcatcaagaatggtattgctaaaaggcttggataaggaaggatttgtgtggtacacaaactatgaaagtcgaaaggcacgcgaattatctgaaaatccacgtgcatcacttcttttttactgggatggtttaaaccggcaggtacgggtggaagggcctgctcagaaagtctctgatgaggaatcagaac

SEQ ID NO: 216849 - DNA, 372 bp, Glycine max
ggtcataagacctttgagcaattttggtaggagcttgctgataatatcaaggggggtgtccttaacatcgaggccacagtgtcctacattaaggaagccatgtttaaccttctaaaacctgaccctgaccttaccaactagatccacagcaagtgcatggggcttagcaactggtatggcctaataccagaactattccccagtgataagtatgaccatgggatcatgactgggtcaatggaaccttatttgagaaagatgatgcatttatgctagacagccgcctttgttgacttgtgactatagatcatctgaagggtggatctgaacaaatgtaaaaccaacagtatcacctgagatggccacatacac

SEQ ID NO: 216850 - DNA, 458 bp, Glycine max
gggcaatgaaaattgacatacacttgggggcattattcattgacattacaacataaatataaacaataaaattgagttattaactaaaataaattaaggtatacacgattctacgtctaagcatttaccattttatgtccaagctgacatgatattgatgagacatattggtgaatcgaaatctaaacatctaagctgatacaattacagatgaaaataactagtaaaatacatttgatcttatctttgagcctgatcaacagtgtggttgcttgttgtagatgatgatcctgccctaccattcaatattccattgtccataggtggggaggttccccacttaccctctgattcgtttggttctataactttgacagatacatccgtcagcccaacagcaaactgattaggttctagaggatgggcagcaaccacaagaagatacacaccttgacttc

SEQ ID NO: 216851 - DNA, 535 bp, Glycine max
atttgagtttggcacaggaaggatttcttgacactgcagctaagttacacagggaggcgagtttcacttccacatcgcaatttggagatgatgatgcatcttcaacgctttcttctaaaacatctttcatgcgaataaacacttctgatatgggaaattattcagcagaggatcgtgagtctgatggctcaaaatctcgagcatcacataatctcctcttagcatctcaaactagcacccctcgaattactccccctggatcccctcctagtatgtctgcattggtatccccaacaagaacatcatctaagcctgtgtcttcaaggcgccatgcaatttccttttcaacctcaagaggaatgtttgatgataggtcttcagtatggccacaaactggacgaacactcgtggatggaaaagagttttttcgccaagttaagaattcgtttatcttatgagccgtttggtgcatttttggccaatgcttacggactggacttttcataacaaactaaggaggaacactactgaaagc

SEQ ID NO: 216852 - DNA, 575 bp, Glycine max
  unsure (1)..(575): unsure at all n locations
aggatatcttcctcagagagtttgttttccaatgcttctgatgctttggacaagattaggttcctttccctcacggataaggacgttttgggagaaggtgataacaccaagcttgatattcagattaagttggacaaggaaaagaaaattctctcaattcgagacagaggtattggtatgacgaaggaggatttgataaagaatttggggacaatagcaaaatctggaacttctgcatttgttgagaagatgcaaacaagtggagatctcaatctgattgggcagtttggagtcggcttctactctgtttatctcgtggctgactatgtcgaagtcattagcaagaataatgatgataaacagtatgtatgggaatcaaaagctgatggagcatttgcaatttcagaagatacatggaatgaacctctanggcgtgtgactgagattagattacacctcaaggaagaggcttgggagtacttgcaggagtctaaactgaaagaattggtgaagagatactctgaatntattaacttccctatctatatttgggcaagcaagaagttgatgtggag

SEQ ID NO: 216853 - DNA, 499 bp, Glycine max
gtcagtggacttttcacgatcctcatcagcaatcctacggatgatatcaagggctttcctaataagtttcttcttgattgtctttacactactatgttgctgaagcatttctcgcgatacattaagtggcaatgtgtcataatcaacaagacccatcaaaaagtttatgtacttaggcaacagttcattaaattcatctgaaatgaacacacgtctaacatacaacttcaggttggatttgtctgcgttataatagctctcgtataaatcttgaggtgccttaggtggttcaaacaggactgccttgaactcgacatcgccctcagcagtgaaatgacttcatgctaaaggtttctcatcactgaaatccttggcaagagagtggtagaatttggcgtattcttcttctgttacctcctttggattcctcagccatatagctttcacatcatttaaaagttcccattcataagttgtttccttcaccgtctttgtcttg

SEQ ID NO: 216854 - DNA, 442 bp, Glycine max
gcttaattgtcaagttggaattttttcatactccatggaatggactggttgggggaatagattactgagttagggcaacgatattctgtgttgcgattatgctagttttgatgggttgattaccaagcaagttatgagcaagatggcagaaatgataaacagtctttgtggtggtgatgaaaaattgatgcgtgaaaggacacacctgctgttggcttgttgttcaagaatggcaatttgtaagaaagatgtttggagagttgaatgtggaatcccttctggatttccgctcacagctatttgtaatagcatttttaatgagatgctcattagatatagctattaaatattactgcgccaggctaaagctccaagtattgttttacaatacttcaaaaattttgtttctttgcgtgtgtatggcgatgataacttaattagt

SEQ ID NO: 216855 - DNA, 535 bp, Glycine max
ctcactcattgcacatagtaatgcgctttgggtaagtgaataaaatattacatactagttcacaaatgcaaaaggacactcatcaaccagatatttgagactcttacagttctcaagaagtcgcgtcagcatacggttagtggcgttagaactcagaatttcattcttaacgccaaaaagaacagccagttaagctactggaaaaggatcaactctagtaagaaaaacaattttcttacctctcccaagtgctgtgcgaatccttttgttgatatctgaggagcgattgttaactgcataactaatccaagcagtggtgggtaaaccaccacgtccactaccacatgtaacatttacaacgacagcttctgaaggtaattgacttactggataaagacaattcacaaaaattggtatccaagaattcactggaaaatttccatcaaagaattattgtgtgttagccaacacaagcttatcatcaaaaacaatcttgtttggaaaagcattacctgctccttgtaaacccaacaaa

SEQ ID NO: 216856 - DNA, 441 bp, Glycine max
caagatcatcaccactgaaggtagaaaagttggcataaaaaaagcacttgtgtgtacattggcaaagcacccaaaggctccaaaaccaattggatcatgcacgagtatcgccttctcgattcttcccgcaaacacaacctcggaaccgcaaagcttgatgattgggttctatgtcgtatctataagaagaactcaagttcacaaaaggttgaggctaattttttggctatggaatgcagcaatgggtcatcaccttcttcatcgtcccacgtggatgacatgctgggatcgttgccggagataaatgaccggtgcttcaccctgccacgagtgaactcactcagaacaatgcaccagcaggatgagaaattcgggtctccgaactgggatccgggtttttctcggattgggttaactcgaccgatctcgattcgatttccg

SEQ ID NO: 216857 - DNA, 351 bp, Glycine max
gccaaaagttcgaagggtgtttttttctacagtgcttccaaagcatgagacggtgcaaagtcaggctcaggttctggaaatcatcctgcctcacaacgtgctgaaagtggttcagagggatctccagatgctattgatgacaatactcaccaacaggaatcatctacaaacaagaaatggacttttgaccaaatgcttgttgatggagccaatgcacggaagaattctgtgagcaccattcctaattcttcattaccttgaaatcccgctcgctcaatgtctccaactagtcttaattttggaatggacttgagggactcatcttcttctggtgccgaagcttcttaaatg

SEQ ID NO: 216858 - DNA, 550 bp, Glycine max
tgcattattcaatggccaccacagcatctctatccggaaccatggtgagcacctccggcatgaggaagcaacctatgacgaccaagagcctaaagacattccccaacgctctttttggtctgaaaggtggacgaggtggtcgtgtaacttgcatggcctcgtacaaggtgaagctcataaccccagaaggagaagtggagtttgaatgcccagatgatgttttcattgttgacaaggctgaggaagaaggcattgaacttccctactcgtgcagggctggttcttgcgtttcatgtgttgggaaaatggtgaaaggtgacgtggaccagtcagatggtagcttccttgatgatgaacaaatagaaagtggatgggttctcacctgtgttgctctacctaggtcagacgttgtcattgagacacacaaggatggagagatcgaatgatcgatatatatcataatgtaatcttggccattgctcttctaatgccatctatctatgtcgtgttttgattttgtagagtgatttgcattggctgttagctactg

SEQ ID NO: 216859 - DNA, 500 bp, Glycine max
aaaagataaagaataactattattgtcttagacaacatgtgcataaacagtaagcattaccaaactaattaattaaagtgcaacaatttcacttgtttccacaaacatgacaaaagtaattaataaactcgcgatgatttcagctagctaactagccaatgccaaatcactctaacaaaatcaaaacacgacatagatagatggcattagaagagcaatggacaagattacattatgatatatatcgatcattcgatctctccatccttgtgtgtctcaatgacaacgtctgacctaggtagagcaacacaggtgagaacccatccactttctatttgttcatcatcaaggaagctaccatctgactggtccacgtcacctttcacaattttcccaacacatgaaacgcaagaaccagccctgcacgagtagggaagttcaatgccttcttcctcagccttgtcaacaatgaaaacatcatctgggcattcaaactccac

SEQ ID NO: 216860 - DNA, 509 bp, Glycine max
gggagctctaggaactctaaagagttgcttgaacaacgagttacatttacgtactgtcagtgctaatattggcatgtttgggacgatgaaagaaaaaataactgattagtctttctattataaaatagagtataggcattatttttttcttctaaaaaaataaaattaagaaattttcatggtaaccattcgtgcagatgaaattagtaaaattatccgtgaacgcattgagcaatataatacggaagtaaaaattgtaaatacgggtaccgtacttcaagtaggcgacggtattgctcgtatttatggtcttgatgaagtaatggcgggtgaattagtggaatttgaagagggtactataggcattgctttgaatttggaatccaaaaatgttggtgttgtattaatgggtgatggtttgatgatacaagagggaagttcagtaaaagcaacaggaagaattgctcagataccttgtagtgaggcttatttgggtcgtgttataaatg

SEQ ID NO: 216861 - DNA, 445 bp, Glycine max
ctggaggatctttacctcggaacatctaagaaactctctctttcacgaaacgtgctgcgttcaaaatgcaatgggaagggctcaaagtctggggcttcaatgacctgtgctggttgccagggtactggcatgaacgtgtgtattaggcaccttggtccttctatgattcagcagatgcagcatccttgcaatgagtgtaagggtactggaaagacattctatgacagagacaggtgccaacagtgcaaaggagagaaagttgttcaggagaagaaagtacttgaagttgttgtggagaagggaatgctgaatggacagaagattacattccctggtgaagctgatgaagcacctgatacagtcactggggatattggctttgccctacagcagaaagaacacccaaagttcaaacgataggccgatgacctttttgtagaacaca

SEQ ID NO: 216862 - DNA, 527 bp, Glycine max
ataagaaaaattaaaatggtacttaagatgtcttttgcgagggaatttcttggacaataaattctacagtgtttgcttgtcaaaatcattttgatcaaacactaattatgtttagtcccgcacaagcgggtaaaaaatagcataatcgagatcatcaaatgacattacaggctctgattactgctgagcgcactgcactctttgagcaccaccatgcatatcctcatcctcctcatatgcctcctgctgagcttgatgcctcctccttatctcttcctccatgttcacatcatggagtgtggtctcctcacactcatccagctccatgtctgtcaactgcgatgtacgctttagtggcagagtatcctccaaagctttcacctgatcaagactcagggtatcaggaaattccactgataaatgaatgtaaagctttcccttcaggaagagcctctggtatgttggcattccctcatcatttattgccttgtatgaattaggcttaacaacctccccagggttagatt

SEQ ID NO: 216863 - DNA, 438 bp, Glycine max
gggacatccataccaaagctgaattgtacgcctaaaatgttgctcccaacgtgaggaaaccatataccattactaaacaaagggagaagtggacagaggaagagcatcaaaagtgccttgaagctttgaaattgtatgcatgctggcgtggcgccaaattgaacagcatttacgaaccaaaactgctgttcgagatgaaaaaccatgctcagaagtgcttgtataaggggattataaatattcattccaaatttcaacaaaggattgttactggcaatatagaagacattaacatagaacttgattttgattgggccacaaacctttttcacctatcaataactaagagacaggatgctgaccatcttacaattattatcactcgaaatagagaggaatttgttcacgtatgcagtctcatgcaacacacactgtaat

SEQ ID NO: 216864 - DNA, 534 bp, Glycine max
ataacacaagcctttgcaggccatcttggtgacctcgaactcgctgccatctccattgccaataatgtcgtcgttggcttcgacttcggcctcttgttgggtatggcaagcgctttagaaacgctatgcgggcaagcttttggagcgaagaagtactacatgttaggcgtttacatgcagcgttcatggatcgttcttttcatatgttgcatctttcttttgcctttgtacttgtttgcctcgccggtgttgaagttgttggggcagccggaggagttggcggagctatccggcgcggtgtcgatctggatgataccggtgcactttgcctttgcgtttcagttccctctgcagaggttcttgcagtgccagctgaagaccgcgcccatagcgtgggtgtctctggtggcgctcgtggtgcatgtgtttgtaagttggttgttcgtgttcaagcttcagtttggtgttgttggtgctgctgctactattaacttctcttggggggtcctcactctggggctttttggctacgtt

SEQ ID NO: 216865 - DNA, 566 bp, Glycine max
  unsure (1)..(566): unsure at all n locations
aggccagtagtcactcgagacncccgnnnttntnnggnnacnnnctccnnnnnnnnngggcgggntnnnnntnnntnntntttttttttttggaaaaatggagaaaaaaattgggtggggtaatacttctatcatgaaacaatttcactgtcttaataatgacatatatcataattattttagtttcgttcaatatcaccgaagcctaaaacaaatatgcggattcctttggcatttaggttacaaagcgagtatcccttgattagttcaattcttgttttggatcagtccacttcgttaaatgcaattttgctctttcagcctctttgtcccagtcgcatcgaattgtaatgaggctcaatattaatgtctgagttgctgtgccaccaaaaatcatccctgcccagattcccataactccttgattgaagacccaacccatcaaaattccaagaggcaccccaataatatagtagcaacccaaatttatgtatgcaacatatgattgccaccctgatcccactgccacccccgagagaactggttgaacactgttgagcagaatt

SEQ ID NO: 216866 - DNA, 620 bp, Glycine max
  unsure (1)..(620): unsure at all n locations
tgcgaaggtgtccctcttagnccnncnnnnnnttnnttnnnanncccnccnnnntnnnttntttttngtctttttttttttttttttttntttttttttttttttttttttctctttttcttctttgggggtggcttctttctgtctttttttattatgcaataaactaattttggctcttaaaaaattaataattatactggatcaagtgtccacgaacactccttaaattaattcaaggaattcatttaaaccaataattatcttgatcaactaattctaccatatgaaaatttcattctttacttgtaaagagccaaaattatcttcaccttaataattggagatgtagaagaataatcagaaccttcctaaatccacgtaatttcttcgaaaatgctctgcccaacacaatgatattgccacaccacaagctatgcggcgacttccatttgatattccatttatcgcctggagatttacaatgctcatgacctatttctgcattacaaacgttgttgcccgaaattggactccttacaagtagataattgtgcacaaagcccgcaatacaaatgatccatcttattggagaaaagtacccgtgtccgccaatcaat

SEQ ID NO: 216867 - DNA, 567 bp, Glycine max
  unsure (1)..(567): unsure at all n locations
tgaaacacaaccttgtgcagaaagcacttctgcccaacagggctggagacaggttgttgatgcattatgcaatgttgtgtcagcctcaccaacaaaagcagctacggcagttgtacttcaggcggagcgggaattgcagccctggattgccaaggatgatgatttaggtcagaagatgtggagaatcaatcagcggattgtgaaattgatcgtggaacttatgaggaatcatgagacttcagaatcattggtaattgtggcaagttcttcagatttactactgcgagccacagatgggatgctggttgatggagaagcttgcactttaccacagttggagctattggaagcaacagctagagcagttcagccagtgctcgagtttggagaatctggattggctgtggcagatggcctttcaaaccttttaaagtgtcgcctctcagctacaattagatgtctttctcatccaagtgcacatgtccgagctctgagtatatcagntctttcgtgacattntgcatacttnttcaatcagatgtagtcctaaaccctcgagattaaatg

SEQ ID NO: 216868 - DNA, 528 bp, Glycine max
gaaaagaaaatcctgcctgatcatacattaatccaaacaatgggaaatgacttccattacaagctaaatcaacataagcataacacaaaatgagacaatatagaaaaggacctggttacagcgtttttcgttactgtacaagactgttctatcgagagcagactcacaagcaagttcagggtgaaacttagtttagctacagtacatacatgatacaaaatgagctttctataaacatactagaattatgactgcagctcttttcaacaggactagcagaattatgcttatttgcaaacccgttagttcaataagcatatcaataacttttttttttctatacgtctagtaaaaaattgtcacggactaagatggatgatttcatttcacatggaaatagtacagcctaactctttggcagcggtatcaagaaagttaatagacaatccgtttgaaagtcggctgtgagcttcccaagtcaagcatttttctatgtcagcttgccagtcaatgacatccaaattgaag

SEQ ID NO: 216869 - DNA, 400 bp, Glycine max
  unsure (1)..(400): unsure at all n locations
gattccgcaacagagagtagaaaagatggcgcggttgatcacagtggtgtggtgcgcggtggcggtgctactgtgcgccgcggcgggcgcgtcgtgggtggaggaggcggcgaacccgatacgaatggtggcgggggtggaggcggaggtggttcgggtgatagggcagtgccggcgcgcgctgaagtttgctaggttcatgagcaggttcgggaagagttacccaacccaggaagagatgagggagaggtgcgagatattttttcaaaatcttaagttgattcggttcctcaacaagaaccganaagccgacaccctcttcttttaatatttttgttattggacttgggaggggggcaaagacacaaattaagcgctgtccaaaatggtttttactttt

SEQ ID NO: 216870 - DNA, 448 bp, Glycine max
agtgcaaagtattaaagacatgctatcttaattcttataactgggaattaaagcggagcgcatcaatacaatacaatacaatatgtaactatgaactatcaatatatgatcgttatttatgtctgtgatacacacaattcaggccatgatattcttacgtgatttacagcaacttctaacttatttaatacatcataccaacccaactaggagcaattttcattatacaatgacacttatctttaaactctgaagcatgacaaggtggtagtcaccagggaccatattcttatgcaatttatgccacaactggataagacgcacaagttgcaacaccacacatgttcttccccaattccattttgaagtagccattctcaccccaactttctccccatgaattttttatgagccaatatgggacgccattttcaactccataccccac

SEQ ID NO: 216871 - DNA, 554 bp, Glycine max
catagagggaaaaaaggtcataattcttgacatgggtctgcttgttgctggaacgagaataccgtggtgagtttgaggagaggttgaagaaactgatggaagagatcaaacaaagtgacgagataatacttttcatcgatgaagtgcacactttgattggagcaggagcagcagaaggggcaattgatgctgctaacatactaaagccagctcttgcaagaggtgaactacagtgtattggagccacaacattagacgagtacaggaagcacattgaaaaagatcctgctttggagagacgattccagccagttaaagtgccagagccaactgtagatgaaaccatacaaatactgaaaggacttagagagcggtatgaaattcaccacaagctccgctatactgatgaggctcttgtagctgctgcacagcttgcctaccagtatatcagtgatcgatttttgccagacaaagctatcgatttgattgatgaagctggttcacgagttctgctttaacatgcacagttacctgaagaagcaagagtacttgac

SEQ ID NO: 216872 - DNA, 561 bp, Glycine max
cctatatcccttttttaaccccgctaccctttttctgaattggggttgctttataggcaaaaaacatgatgaggcctaccaggtattccattaaaaactttaggtacattgacaagtaaaacatactatgactatggtttaaacaaattaagtacatagtattagcaaattaaccgcattatacaggaagcgtctctggcaaggattcgggggctccgctgctaccattgagcacaatcacattaccatcagaatcaacatccactataacagagtcgccctccttgatctctctggcaagcatcttctcagccatgctgtcctccaaaagtcgcattatggctcttcttagaggtctagctccataactagggttataaccttcctccaccactctgtccctgaatctttctgtcacttgaagttcaatatctttcaccttcagtctatcaaacacctttttgagcattatgtcagcaatctccttcaccttcagttttgtgagctgcctgaagacaatcatttatccaatctattcacaattctgcctgaatattgttt

SEQ ID NO: 216873 - DNA, 531 bp, Glycine max
cgcgtgttcaaaccttccctgtcatctatagtcgatgaaaatacaaaggttgctattgcattagtatcagatcctgtgtacgtggcagcaaaaaagatgcgggagttacatgtaaatgcagctgtgattgtgatggaaaacaagattaaggggatacttacttcaaaggacatccttatgcgcgtggtggctcaaaatctttccccagagtcggctcttctggaaaaggtgatgactccaaatccagaatgtgcatctctagagacaacaattcttgatgcactgcatatgatgcataatgggaagttcttacatcttcccgtggtggacagagatggaaatgctattgcttgtttggatgttttgcagataactcatgctgcaatttctctggttgaaagtagtcctggagcatctaatgatgcggcaaacacagttatgcaaaaattttgggactcagcttttgctctagagccgccgcctgaagattttgacacccatagtgaaacctctggacgggtgactttggat

SEQ ID NO: 216874 - DNA, 576 bp, Glycine max
  unsure (1)..(576): unsure at all n locations
caaacaacaacactctttctctctcttcaattcagcttcttcagcttcagcgaaagcctgttctaaccgtagatcgtgccttttcttttgtgcctgagaagccacttctctacttgcggttcttcttcttcttcttcttcaattttattcgattcgcttgctggaaaattctttgagtgagggagaggatgtctggtggcacacagaagagtctgagaaaagcacttggagcccttaaggacaccacaacagtctcgttggctaaggtcaacagtgattacaaggaattggacattgctatagttagagccacaaatcatgttgaacgtccggctaaggaaaaacatataagagctattttcagctatctcagctacaagacccagggctgatgttgcctattgtatccacgcacttgccaggcggttatcaaagacacataactgggcggttgctttgaaaactttaatgttattcaccgtgctctaaagggagtggatcctacatttcatgaagaactcatanattatgggagaagtagaagtcatatgctcaacatggctcatttaaagatga

SEQ ID NO: 216875 - DNA, 550 bp, Glycine max
aattctctctacagtaacaaggatatcttcctcagagagttgatttccaatgcttgtgatgctttggacaagattaggttcctctccctcacggataaggaggtgttgggagaaggtgataacaccaagcttgatattcagattaagttggacaaggaaaagaaaattctctcaattcgagacagaggtatcggtatgacgaaggaggatttgataaagaatttggggacaatagcgaaatctggaacttctgcatttgttgagaagatgcaaacaagtggagatctcaatctgattgggcagtttggagtcggcttctactctgtttatcttgtggccgactatgtcgaagttattagcaagaataacgatgataagcagtatgtatgggaatcaaaagctgatggagcattcgctatttcagaagatacatggaatgaaccacttggacgaggaactgagattagattacacctcaaggaagaagctggggaatacttggaggagtctaaactgaagaattggtgaagagatactctgaatttattaa

SEQ ID NO: 216876 - DNA, 614 bp, Glycine max
  unsure (1)..(614): unsure at all n locations
aggggattacgcatgagacnctcnnnntnntnnnnnacnncnnnnnnnnnnnnnnngngggnnnnnnntnnnnnnnnnnttttttttcntnttnnnnttttnntttngggggggtntntttttttttntttntttttttttctcttttttttttttgttttcagactactatgttgttgaagcatttctcgtgatacattaagtggcaaagtgtcagaatcaacaagacccagcaaaaagtttaggtacttgggcaacagttcattaaattcatctgaaatgaacacacgtctaacatacaacttcaggttcgatttgtttgcgttataatagctctcatataaatcttgaggtgccttaggtggtacaaacaggactgccttgaactcaacatcaccctcagcagtgaaatgactccatgctaaaggtttctcatcactgaaatccttggcaagagagtggtagaatttggtgtattcttcttctgtaacctcttttggattcctcagccatatagctttcacatcatttaaaagttcccactcataagttgtttccttcactgtctttgncttaagctttttttcttcatcttcacttttatcagcatcttc

SEQ ID NO: 216877 - DNA, 411 bp, Glycine max
aattctctctacagggacatggttatgtttctcacagagcagattgccaatgcgagtgatgctatatacaatattaggttcctctacgctccggatatcgtggagtggggagaaagagaaaccaccaagctagcttatcatattaagttgaacagagacaaaaaaattatctcaacacaagaccgccgctttagcgtgacaaaggaggattccataaataataaagggacgacatcgaaatcccgaacttgtgcatttgttgagaagatgcaaacaaacgcacaccttaatctgatgcgggacgggtggaagatgcgttgtactcatggctatctggcatgaccactatggccatggattatgtagaataacggcgataaacggcgtgtatgggaatcaagagctgaggga

SEQ ID NO: 216878 - DNA, 486 bp, Glycine max
gttctttctctcgcaatcttcactacattcaccgagcatttgcattcacattgaatatggctgagactacacaatctaatgctgagttgttggagtggcctaagaaagataagcgccgcttcctgcatgttgtgtatcgtgttggtgatcttgatcgcaccattaagttttatactgaatgttttgggatgaagcttttgaggaaaagagatattccagaggagaaatatgccaatgcttttcttggatttggccctgaacaatcccattttgttgtggaattaacatacaattatggggtgacctcatatgatattggaactggatttggacattttgctatcgcaactccagatgtttacaaattggttgaagacatccgggctaagggtggaaatgtcaccagggagcctggtccaggtaagggtgggaaatctgttattgccttcgtgaaggatcctgatggttatgcttttgagctcattc

SEQ ID NO: 216879 - DNA, 492 bp, Glycine max
attctccaacttttactaaatatattgaaatactgttggatgtcactgtagactgtctagaatctcaaccaaacaggcaaacacatcagagaaaccgtattgaacactactacttcactgataaatacaggagctgatcacttattcatacaatagcattagtactttaaattaaaaagccataactctttactccagctccttcagaaaatcttgattgtcaaccaaaacagttttccatccatcaggatctaagaaagcagtgatctttgtgttaaggccaggaattggtcctggttgccgagtaatcttccctccaagctcttgtgtgactatgttgacaacctcagcactcttgtatacatcatcagtaccaatagcaacctgtgcataagcatttcccttggtgtattcagtgacaccatagttatatgtcagctccacacagttgtctcatgttcctctgcatacccaagcatagctatagtatac

SEQ ID NO: 216880 - DNA, 518 bp, Glycine max
gttctttctctcgcaatcttcactattttcaccgagcatttgcattcacattgaatgtggctgagactacacaatctaatgctgagttgttggaggggcctaaaaaagataagcgccgctttctgcattgtgtgtattcgtgttggtgatcttgatcgcaccataaagttttatactgaaggtttggggatgaagcttttgaggaaaagagatattccagaggagaaatatgccaatgcttttcttggatttggccctgaacaatcccattttgttgtggaattaacatacaattatggggtgacctcatatgatattggaactggatttggacattttgctatcgcaactccagatgtttacaaattggttgaagacatccgggctaagggtggaaatgtcaccagggagcctggtccagttaagggtgggaaatctgttattgccttcgtgaaggatcctgatggttatgcttttgagcttattcaaagacctttaacccctgaaccattgtgcca

SEQ ID NO: 216881 - DNA, 566 bp, Glycine max
attctccaacttttactaaatatattgaaatactgtgggaggtcactgtagactgtctagaatctcaaccaaacaggcaaacacatcagagaaaccgtattgaacactactacttcactgataaatacaggagctgatcacttattcatacaatagcattagtactttaaattaaaaagccataactctttactccagctccttcagaaaatcttgattgtcaaccaaaacagttttccatccatcaggatctaagaaagcagtgatctttgtgttaaggccaggaattggtcctggttgccgagtaatcttccctccaagctcttgtgagactatgttgacaacctcagcactcttgtatacatcatcagtaccaatagcaacctgtgcataagcatttgccttggtgtattcagtgacaccatagttatatgtcagctccacacagttgtctcatgttcctctgcatacccaagcatagctatagtatacttgtattcaggtctatcagtcttcttaccaccctcaaacccaaagccttttcataaaacttaattgagcgctct

SEQ ID NO: 216882 - DNA, 608 bp, Glycine max
gcaagtggagcacttgatccagatagagatgcatctggggatcttgttacttctgttaaaaggggtgtatgggcaatgattgctgtttttcttgcttattgcctactgcaagctccttctacggttcttattaggccacatcctgcaatttggcgcttggttcatggaatggctgttgtttaccttgttgccctcacatttttgctttttcagaagcgtgatgatgctcgacagtttatgaagtttcttcatcctgatcttggcgttgaacttccagaaagatcttatggcgctgactgtcgtatatatctgcctgaaaaccctgcaagcaggtttaagaatgtttatgagacactttttgatgaatttgttctagctcatgttattggatggtgggggaaggcaatattgattcgtaatcaaccccttctttgggtgttatccattggttttgagttggtggagtacacttttcgtcacatgttgccaaatttcaacgagtgctggtgggacagtattattcttgacatcttgatctgcaattggtttggaatatgggcaggaatgcatactgttagatattttgacaggaaaacatacaaatgggt

SEQ ID NO: 216883 - DNA, 601 bp, Glycine max
gcaagtggagcacttgatccatattgagatgcatctggggatcttgttacttggggtaaaaggggtgtatgggcaatgattgctgtttttcttgcttattgcctactgcaagctccttctacggttcttattaggccacatcctgcaatttggcgcttggttcatggaatggctgatgtttaccttgttgccctcacatttttgctttttcagaagcgtgatgatgctcgacagtttatgaagtttcttcatcctgatcttggcgttgaacttccagaaagatcttatggcgctgactgtcgtatatatctgcctgaaaaccctgcaagcaggtttaagaatgtttatgagacactttttgatgaatttgctctagctcatgttattggatggcgggggaaggcaatattgattcgtaatcaaccccttctttgggtgttatccattggttttgagttggtggagtacacttttcgtcacatgttgccaaatatcaacgagtgctggtgggacagtattattcttgacatcttgaactgcaattggtatgaatatgggcaggaatgcatactgttagatattttgacaggaaacatacaaa

SEQ ID NO: 216884 - DNA, 305 bp, Glycine max
tgaagttgaagtcttgcccttctctcttttactcctaacacaagacatcatcatggatggctgcctccggctccactgtcggagctgtccacagagctctttcgaacctgaatgggtctggacctggggtttcagctcccacttcatccttctttgggagcagcttgaagaaggttattgactcaagggtccccaacacaaagatttcctctggaagcttcaagattgttgctggagaagagaagaaagagattgaagagacccatcagaccgacaaggacagatggaaggggcttggctatgat

SEQ ID NO: 216885 - DNA, 355 bp, Glycine max
acgacaaatttttaaggcaccaaattcaatttaagtggacagtgtaactcaaaattatagaggaagacagtccaatatgtaaaatttagtaaaatcatttcaaacttggcatcttctctttgcacctaagacattgagaattctaagaatgctacacgcaagtcccatcacaacttctagcacttggatcagcacaaccttcaggaacagaaatatttacttgccaagtttgctttgcctccaattcaagattggaaaaaagttcccctgttaataccatcctcgttaggatttccaagtgcatcctcgttcaagtacttgtcagccaatgggacttttttgaaattatcttgtt

SEQ ID NO: 216886 - DNA, 520 bp, Glycine max
gccttctctaagaatctgaaactttgtattcatgaggattctcagaacaagacagagcttgctgaattgctcaggtatcactccaccaagagtggtgatgagatgaccagcctcaaggactatgttaccaggatgaaggaagggcagaatgacatctactacattactggtgaaagcaagaaagctgttgagaattcccctttccttgaaaagcttaagaagaaggggttcgaggttctctacatggttgatgctattgacgagtatgctgttggtcagcttaaggaatttgagggaaagaagttggtctctgctactaaggaaggcctgaaacttgacgagagcgaagacgaaaagaaaaagaaggaagaattgaaggagaaatttgagggtctctgccatgtgatcaaggatgtgttgggtgacaaggtggagaaagttgtggtgtctgatcgtgttgtggattctccttgctggctcgtgactggggaatatgggtggacagcccacatggaaagga

SEQ ID NO: 216887 - DNA, 494 bp, Glycine max
gccaaaaagctgacacaaattttccatggggaaactaaatacactactaatccaggaaacggcacctaactagccaacattccaaaatttcgaaaattcaaaacataaacatagtaaaagactgttccccaatcattgtttctaaaaacacaaaggcgaatcaataattaagttagatttaatcaacttcttccatcttgctaccctcagcatcggcatcagcatcggcgtcctcgagaggaggcatgtcagcatttgcttcaccagcatcttcataaatgctcagtccaagcttcagcatcctgtgaatcctgttaccgaaagtgttgggatcatcaaggctgaacccacaagttagaagagcaggctcaaagagtaggagaacgagatccttcacagatttggcattcttgtcagcatcagctcgcttcctcaattcatccatgaaggggttctcaaggttaatctccatggtcttattgctcgacatgtat

SEQ ID NO: 216888 - DNA, 483 bp, Glycine max
atccaagttcactttggtggcagttgaatgagtttgcaaccccacacacaaaaaccaagcccttaaaaatgtcatccccctcgccggtggccacggtggtctccgccgccgcgctgtacgaccgcgccaaagccgagaaagaattcgacgaaaccaaggtcggagtcaaaggtttgatcgattcgggaatcagaaccatcccccctttcttcgtccacccgcccgaaaccctagcggacctcaagcgcggaaccaaacccgggtccgcgccggagatccccacggtggacctcgccgccgaggagagctcccgcgccgccgtggtggagcaggtccggcgggcggcgagcaccgtgggattcttccaggtggtcaaccacggcgtcccggaggagctgctattgcaaacgctggcggcggtgaaggcgttccacgagcagcccgcggaggagagggcgcgggtgtaccgtatggagatgggga

SEQ ID NO: 216889 - DNA, 518 bp, Glycine max
attcacaaacttattaagggtaaaattcatcatcgcatatccaacattgatacatcaccagaaatagatgctaatatatatgtgtacatcactgcctgaagaaatttgtcaatgatttaccgtccaactctttcgtgaagaaccttgtcataaattcatggaacgtgaagttcctataaagagctggtttctctgttgatgttagctctggtaatggtccaaaatgtttctccctatcacttgggttgaggaaaacggcaatagagactcgtggctcgttagaataattggctaacacccgatgatgagcactcttggatgtttcattagaaattatctgaaggaaatctccaatgttaataaccaaggcgttaggctgaggcttgacatggatccaaccctgttcagtctcaacctgcaatcccacaatatggtcctgcagcaacaccgtaagagcccctggatccgcatgcgagttaagcccccaccgtagatcaggttgaggacaaaacgggtaa

SEQ ID NO: 216890 - DNA, 422 bp, Glycine max
ggagttgaaaagggtggctacaccatttcagacaactcatcaggtaacaagcctgaggtgattttgattggaactggttctgagttggaaattgctgctgctgctgctgaggatctaaggaaggaaggaaaagctgttagagttgtttcttttgttagctgggaactttttgatgagcagtcagatgaatacaaggagagtgttctacctgcttcagtaacagctagagttagcattgaggcaggatcaacatttggttggcacaagattgttggaagcaaaggaaaggccataggcattgatcgatttggagcaagtgctccatctggaaaaatatacaaggagttttggtatcaccaatgaatctgttattgctgttgcctataaactttcgtagatatatttgtagggtttcttttatc

SEQ ID NO: 216891 - DNA, 372 bp, Glycine max
ggtacaaattcatacaacgggattaattcaactcatccttcaatgtaaggggttcctctgacaatcatatgcaagaacaatctaatcttccttattggggctaaagtgatatctcaaaaaacaagtcatgtaacagtaacccaaagccacaagtgaaaaccacaagttctagatgagataaaagaaactcaacaaatttttctacgaaagttctttggcagcagcaataacagcttccttggggataccaaactccttgtatatttttccagctggagcacttgctccaaatcgatcaatgcctatggcctttcctttgcttccaacaattttgtgccaaccaaatgttgatcctgcctcaatgctaactct

SEQ ID NO: 216892 - DNA, 494 bp, Glycine max
gcgcaacaagaggaggagcattcttcatcagcggcaagtcaggggaagacaagggactaggaggaggtgctgaaaaggtttcgtgggtcccagaccctgtcactggttactacaaaccggagaacatcaaagagattgatgttgctgagctgagagccacggttttgggcaaaaaattcaaccactaggctctacttaatttcaataattaacctttttggtctcacgtgaatatgttatatgatatatgaagttcacagaaccttcggggattattcagcatggggtttttttcttgtatttctctcttgagaatttggactagcatatgaccaaattaatgtttactagtgtgattggatctcccgttgaaaactcaaagctatgcttctgttgaattcactttcgccgaataataggagtattttgaatctttctatgcaaaatatccaaatgtacacgctctattaagtatgaaccctccttttccgttt

SEQ ID NO: 216893 - DNA, 494 bp, Glycine max
aaacggaaaatgttggttcatacttaatagagcgtgtacatggggatattttgcatagaaagattcaaaatactcctattattcggcgaaagtgaattcaacagaagcatatctttgagttttcaacgggagatccaatcacactagtaaacattaatttggtcatatgctagtccaaattctcaagagagaaatacaagaaaaaaaccccatgctgaataatccccgaaggttctgtgaacttcatatatcatataacatattcacgtgagaccaaaaaggttaattattgaaattaagtagagcctagtggttgaattttttgcccaaaaccgtggctctcagctcagcaacatcaatctctttgatgttctccggtttgtagtaaccagtgacagggtctgggacccacgaaaccttttcagcacctcctcctagtaccttgttttccactgacttgccgctgatggaggctgctcctcctcttgttgcgc

SEQ ID NO: 216894 - DNA, 464 bp, Glycine max
ctcgagccgctcgagccgcttgagtcgttcgaggaggccacgaacacgggaaacgccgaggatatcgatcgatttaataagcgtctggtgcgtgccacgcctcaacacaatgaagactgcaaggaattgctgaaactcatgggagtcccacacattacggctgcgtgcgaggctgaagcttcttgtgctgcgttggccaagggtggacgagtctatgctgcaagcaccgaggatatggacgcactgacgtctggtgtacctgttttgaatcgacgcttgacagtgtcaccggcgaaaaaggttccaattcttgagattcgattggaacgcgcacttcaagagctggatctgactaatgaacagatcgtggacttgtgcattttatgcggctgtgactactgagattcgatccgaggtgtggctccgaagaaagcatctgcaggtattaaggagcacaacaacat

SEQ ID NO: 216895 - DNA, 305 bp, Glycine max
ctcaagccgctcgagccgcttttttttttcgaggaggccacgaacacaggaagggccgaggatatctatcgatttaataagcgtctggtgcgtgccacgcctcatcacattgaagactgtaaggaattgctgaaactcatgggagttccacacattacggctccgagcgaggctgaagcttcttgtgctgcgttgtccaagggtggactagtctatgctgcaagcaccgtggatatggacgcactgacgtttgggggccctgttttttatctactctttgacattgtcacccggcgaaaaaggtt

SEQ ID NO: 216896 - DNA, 432 bp, Glycine max
  unsure (1)..(432): unsure at all n locations
caaagttctggcctaccacaggacgtgttgataatgtgtacggtgaccgcaaccgcatttgcacccttctcccagcatcacaggctgttgaagaacaagcagctgccacagcataatgtgttcaaatgacaactattttcatttcccgttgtacataaactcttattcctattcatacagttcttgcacttgttgaatattgcttcatcatatgtgacaatgatgataatccactgctcttaagtttcatccaatcacaggaaaaaaaaaaaaaagtaattcgtataattgctgctgctattggattttaggaatgtattttaggcctatctgttacagtaatgtgaaaaaatggatttgattcatgtnnaaaaaaaaaaaataaaaaatattattatttttttaataaaaaaatttataaaaaaaaaaata

SEQ ID NO: 216897 - DNA, 303 bp, Glycine max
aaaaccactattccactttcctatatttttttcttctaaaaaaaaaaacaaaacgcccacccctgcctccaaatatacaaaaaaaaaaacacatacacaaatcacacacagaaacaaaaaaaaaaaaaaaaaaaaaccaccaaaaacaaccaaaaaaaaaaaaaaaaaacaaaccaaaaccaaaattccccccaaaaaaaaaaaaaaaaaaaaacccggaaccaaaaaaaaaacctcctaaaaaaacaaataaaccccgcaccccaaacatcctctaaaatgccaaacaaacaacaaccaacc

SEQ ID NO: 216898 - DNA, 578 bp, Glycine max
ctttatcttcctttatgttggtatgtttgccttggacattgaaaaatggaaatttgggagtgatagccctggaacatctgtagcaactagttcagtattgttgggtctaattcttcttggaagagcagcttttgttttccccttatccttcctatccaacttggctaaaaaatcaccaaatgagaaaatcagcttcagacagcaagttatcatttggtgggctggtcttatgagaggtgctgtttcaatcgcacttgcatataatcagttcaccatgtcggggcacacttcactaagaagcaatgcaatcatgatcacaagcaccatcactgttgtgcttttcagcacagtggtgtttggtctgttgactaagccactaataaggcttttactgccccatactccacatcataaagaatcaagcatcacgataaccacagatccatctacttcaagtccaaaatcagtcactgtcccacttcttgggagtgcccaagaatctgaagtcgatattgatggccatgatattcatcgtccaagcagcattcgtgctttacttttcactacaacacacactg

SEQ ID NO: 216899 - DNA, 533 bp, Glycine max
gaaaaaaataaatttaatttagctttagctattcaaacttttgggacaagaaatctaataatcaaatattacattttacggaagacgtagagatgagttgagatgcttatggtgcattgcacagccttctcactacccaaagagctaaacaaaatctcaggacaggattcttatacacgcattgctcactccacaaaacttatgcagtttacaaacaaattacatatttcttggcttttttctcaacgccattgatggccattacgttcagttggtgagccaggttctataggaacaaaacccctgccaccaaaaacaggacgcatgaatgcatcatcaaacttacgccacaagcgatgaacagtgtgtgttggagtggaaagtaaagcacggatgctgcttggacgatgaatatcatggccatcaatatcgacttcagattcttgggcactcccaagaagtgggacagtgactgattttggacttggagtagatggatctgtggttatcgtgatgcttgattcttatgatgt

SEQ ID NO: 216900 - DNA, 530 bp, Glycine max
tcgattgctcctctttttctttgtccctaacacacttcaactccactcatttccttttagtggctcttgagtcttgaagttccttattagataagatttatgcaaatcccttcagaaaatctccaatatccaataattgcgccaaacccaaatccatttcacttcatattccttcaacaactcgtcacctgaaccgaaccatgagagaggcgcagaacgacatcgttgcaacagaattcgcaacgacaacaaacgacgaggaggttccgtccggcgtcgttttgttcgggaagtacgagttgcgaaggttgctgggagttggcgcattcgcgaaggtgtaccacgcgacgagcgtggacgacacgcaccagagcgtggcgttgaaggccgtgagcaagaacaaggtcctgaacggaggcttcgccgccaacgtggagcgcgagatctccatcatgcgccgcctccaccaccccaacatcattaacctcttcgaagtactcgcgaccaaaacaaaaatctacttcgtcatg

SEQ ID NO: 216901 - DNA, 554 bp, Glycine max
caaccaccaccagctcatcggttaattggtaaaccagaacaataccaatcaaattaccatcctgcccttctagctttgctccaccaccattcttctcccttctcaccaccacccttccctcctccgtcattgcctccactctctccataattttctctggcaccactgtcgaaacaacccgttcaaccgaattcgatccggtcgggtcctcgaaaagacccgacatatccaacccggtcgagaaagaaattaagtcgaaagcattcaaagacttgaatccggttcgacccaattgcttttcacactcactctccttgaccaaaacccggttgaaccgatactcgccatccgcattgaaccacgtgtccttatagatctcatcgacggttatccttgtcttgggattcgtgtccaaaagtcgtgataagaggaatctcagatcatgtgatatccacctcgggaaccggaattgaccgcggtaaatcttcctatacagaacggagggattgtaatcattgaaggtaaatagccagcaatgagcgcgaacaaacgac

SEQ ID NO: 216902 - DNA, 570 bp, Glycine max
  unsure (1)..(570): unsure at all n locations
aggccagctagctcgtcagacnccnagnnnnnntnnnnnnaacnnncnnnnnnnnnnnnnnnnnnnggnnnnnnnnnnnnnnnnnnnnnnttttttttcnnnnnntnntnnntnnnntnnnggggggggngcttttttgntgctttgtagtggacaaaatcggaaccacattcctgggaattgatcttcccaatagaggtatgtggtcctaataatggttttgaaatgtggagttctgagtgggcaaatcaaacttcatggcacttgagtttccttattgacaatcccaaacagtctacagtttttgatattctcttgggaatttctcaagattttgaaattgctggtaatactcttatgccagctttttctgttccacaggctactgccagatcttctgaaaatgcggaatcctctgcatgatctggaatttgtgttttctttcgtttgttcgtttgtttaattcaataaaggaaattagacatgaccctcttgttgagtatgctctgtctatntgaaaatttccacacctcttttaattgtcgtaatgatgtgtgaagtgtgtgttat

SEQ ID NO: 216903 - DNA, 501 bp, Glycine max
aaaataacacacacttcacacatgattacgacaattaaaagaggtgtggaaattttcaaatagacagagcatactcaacaagagggtcatgtctaatttcctttattgaattaaacaaacgaacaaacgaaagaaaacacaaattccagatcatgcagaggattccgcattttcagaagatctggcagtagcctgtggaacaaaaaaagctggcataagagtattaccagcaatttcaaaatcttgagaaattcccaagagaatatcaaaaactgtagactgtttgggattgtcaataaggaaactcaagtgccatgaagtttgatttgcccactcagaactccacatttcaaaaccattattaggaccacatacctctattgggaagatcaattcccaggaatgtggttccgattttgtccacttacatgcatcgaaatgctctgtactgttgctgtttgttaaaaacacttgtaccaatgaggcccaatcactcctttt

SEQ ID NO: 216904 - DNA, 608 bp, Glycine max
  unsure (1)..(608): unsure at all n locations
aggcctgtagtcactacgagtacnccgagnnnntanntnnnnngaacccncncnnnnncnnnnnannnnnntggngcnnnntacgngccnnnnccattgtttagaaaacaataatggccaccacctgggggggggatatggagaacaagagtgatcaagaagaactgaagcatcttgggtttgtgaagattgcggcaattaaagcctttgtgtgtgtgtcgaatctctacgacttcgcaaagcaaaactcgggacctttgagatctgctgttggaaccgtggaagacactgtaaccaccgttctgggtcccgtctaccaccaattcaaggctgtccccaaccacctcctcctttttgccgacaacaaggtggatgaagctgctcacaaattcgatgagcatgcaccttctttggttaagcaggttgcaacccaagtcacttgtttggttcaggaagtgacacacaaagctgagaaagtagtgagtgaggctcaatctggaggggcacgagcagcagcaaattatgtagccactgagtccagcaaattgtgctctctgtttcggtgaaattgtggactggtctcaaccaatatccaccattccattcag

SEQ ID NO: 216905 - DNA, 453 bp, Glycine max
gacacaatcccattttgttctacgaacttggttaacttacaccatgggcacacttcgaacccatttcttacacttccatgaacatccacattgccctcaaactgaaacaaatactagccagaagcagattttatgaagaaaatagctaccctattagtagtgctctaagaactctctgccacggaacctgcttcatcttcattcacattgccttctccctgtttaaacgctgttgctatctcatcaattggaatcagaggcaaatagccaaacacggcaaaacccttttcactcgttccctttaccacattgttgtatttttctgaccagtgtgcagctcggggaactgccatctctgccactgaatggaatggtggatattggttgagaccagtccacaatttcaccgaaccagagagcacaatttgcttggactcagtggctacataattt

SEQ ID NO: 216906 - DNA, 545 bp, Glycine max
  unsure (1)..(545): unsure at all n locations
ggaatgggacctcttaacaatgattaagtagtgaaccctaaaacaaagaacatgcgcttgtatgttaagcgtgtattcatttcagatgattttgatggggagctgtttccacgttacctgagctttgtgaggggtgtggttgattcagatgatcttcctctcaatgtttctcgggagatccttcaagaaagcagaattgtaagaataatgagaaagagacttgtaaggaaggcatttgatatgattcaagaccttgctgaaagtgaaaataaagaggctgatttctcaacagatgacataattcttggcaagagtcttgttagcgtataaacttttctatttcaattttaagtatttcacttgtatttagaaaagctgttcggatttgctacattatgaagtcgtgaaatattcatgagcttttcgttcagtatttttttcaacaaaaaataatggatattggttttgtcttctnnnnnaaaaannnnnnnntttataanaatttaattatatttaaaatttatattattttttttaatttttat

SEQ ID NO: 216907 - DNA, 515 bp, Glycine max
  unsure (1)..(515): unsure at all n locations
agggnaatttgactccgtgaagtacnccnagnnnntnntnnnnngnacccncntctnnnnttnnnnnnnnnntggntnnttnntnnnttttntcttttttttttttgtnnctnttttctanttccttgggggggcttttcccttgtctgtgtttgtggacacttatggaactgggaagattcctgacaaggagattcttcaaattgtgaaggagaatttcgacttcagacctggaatgatcaccattaacttggaccttaagaggggtggccataggttcctcaagacagctgcttatggacactttggaagggatgaccctgacttcacctgggaagttgtgaagccactcaagtctgagaagcctcaagcttaagattgttgtgaagttaatcactcccttcaatggatgtcttgctaggtgtggatgaataatttgcgtgttccatgactactactacttcattcataggtctaatgtcatctcatcaatacttaaactgtttttttttttc

SEQ ID NO: 216908 - DNA, 417 bp, Glycine max
gttaaaaaaaaacagtttaagtattgatgagatggggttagacctatgaatgaagtagtagtagtcatggaacacgcaaattattcatccacacctagcaagacatccattgaagggagtgattaacttcacaacaatcttaagcttgaggcttctcaaacttgagtggcttcacaacttcccaggtgaagtcagggtcatcccttccaaagtgtccataagcagctgtcttgaggaacctatggccacccctcttaaggtccaagttaatggtgatcattccaggtctgaagtcgaaattctccttcacaatttgaagaatctccttgtcaggaatcttcccagttccataagtgtccacaaacactgacaagggctcagggacaccaatggcataggaaacttggacaatgcacc

SEQ ID NO: 216909 - DNA, 571 bp, Glycine max
  unsure (1)..(571): unsure at all n locations
aagaaagtagaacgatctcatgaggtccacataactgagatcatctacaagggaacgcacgaccatgcaaaacctcctccaaatcgccggtcaagtataggttcggttaaccttcatactgacatgcaagtggacaaccctgaacacgttgaaccacacaatggtggtgatggtgacttgggctgggctaatgtacaaaagggaaatatagctggagctgctaattggaagcatgaaaacattgaagccacatcatcagcatctgttggccctgaatactgcaaccagtcccccaatttgcaggctcaaaatggtactcacttagattcaggagaggcggtggatgcctcatctactttttctaatgaagaagacgatcaagtcactcatggtagtgtatcattaggttatgatggggaaggagatgaatctgagtctaagagaaggaaactggaatcatatgcagagttgagtggagctactagagccattcgcgagcctagagttgttgtacagactaccagcgaagtagatatcctcgatgatggntatccggtggcggaaatatggg

SEQ ID NO: 216910 - DNA, 494 bp, Glycine max
  unsure (1)..(494): unsure at all n locations
gagcaaaataacttttacctttgacatgtgatgaagaatgtcaaacgttacaatgagtctaataatgaaaagtccgcctatgtatgccttggcattacatatatgtataaatctatatatgtatgttatcagatgtaaacattagttttttctttaaagaatcagggaataaaattttacatatgaggtccaagaggcatgcgactcatcatttcttggtacactgatgagccatttgacaggttaaggccaccatgttcaggaatagcctccacatttggctctccctttggcaacatgaaacccaaatcatttgcagcgcattgttgttgttgatgttgctgttgctgttgatgttgttgctgctgctgttgatgttgctgctgctgttgatgttgttgtcgctgctgatgttgttgttgcgctgccaagaacggatgaacaggcatgacaggaagctntgcttgcgcgtggcctaaccctgacatcaccag

SEQ ID NO: 216911 - DNA, 566 bp, Glycine max
ttaattaacttgctaattaatgtactgtcgcctgatattagcggagaacctcattgagagactgccagtaaatttggggaaactccaatctctgaaactgatgaacctggatggaaatcgaattacttccttgcctgatgaattgggccagttagtaaggcttgaacgcatatccatctcagggaatttgttaacatccttgccagcaactattggaagtttgagaaatctggtgcttttaaatgtgtcaaataacaagttacagtctcttccagagtctgttgggagttgcttctctttggaagaattacaagctaatgataatcttattgaagatcttccctcttctgtgtgcaatctctctcacttgaagtcactttgcttggataacaataatgtgaagcagatacccctgaatttattgaaagactgcaaagctcttcagacatatcactgcatgctaatcctatatcaatggatcaatttcagctgatggaggggtttcaagagtttgaagccaggaggaaaaagaagtttgacaaacaaattgattcatatgtgatgat

SEQ ID NO: 216912 - DNA, 455 bp, Glycine max
tttttttttttttttttttttttttttttttttttttttttttttttttttttttttttttgggttttttttttttttttttttttttaaaaaaaaccccggtttgtcccaaaaaaaaaaaccctaatttttaaaaccccccaaacccttttttaaaaaaaaacccccccccaagggtttaaaatttttaccccccgaattctcccaattctcccccccccccgaatccccaaaaaaaacggggggccccccccccccggaaagttttaaaaaaaaattttaaaccttaaagtttcccttaagggccccccccccccattaaaaaaaaaattgggtttttccccccccccccccccccaaaggggggtttttttcccccccaaaacattttgggccccccctctttttccaaacccaacaagtccaaaacccctaaacctccccctttttttttg

SEQ ID NO: 216913 - DNA, 552 bp, Glycine max
gtggtgccttatcgctgtggttattatcttcttcttcctctttcttagatctcttgtttctctacgccgcacgccgaaaccatggccggaaaaggagagggtcctgctatcggaatcgatctcggaaccacctactcttgcgtcggtgtgtggcaacatgaccgcgttgaaatcatcgccaacgaccaagggaacagaaccacgccgttttacgtcggattcactgacaccgagcgtctcatcggtgatgcggccaagaatcaagtcgccatgaaccccatcaacaccgtcttcgatgccaagaggttgattggtcgtagattcagtgattcctctgttcagagtgatatcaaattgtggcctttcaaggtcattcctggtgctgctgacaagccaatgatcgtggttaactacaagggtgaagagaagcaatttgccgcagaagaaatctctttcatggtgctcatcaagatgcgtgagattgctgaggcttacctaggctccacagtgaagaatgctgttgtcaccgtccctgcttacttcaatgattct

SEQ ID NO: 216914 - DNA, 482 bp, Glycine max
cttggtttcatggctgctgcaagtgttcgagtggcaaacgagcttggaaaaggaagctccaaagctgcaaagttctctatagttgtgacagtgcttacatccttggccattggatttgttctcttcttatttttcttatttttaaggggaaaacttgcttacatatttacctcaaataaagacgtggccgatgccgttggggacttgtcacctttgttggcaatctctattctactaaacagtgttcaacctgtactctcaggggttgctattggagcagggtggcaaagtattgtagcatatgtgaacatagggtgttattacatcataggtattcctgtaggagttgtgcttggtaacgttttgaatttgcaagtcaagggtatttggattggaatgttgtttggaacatttattcaaaccggagtgctgacttgtatcacttacaaaactgattgggacgaacaagtaactaaagctcg

SEQ ID NO: 216915 - DNA, 570 bp, Glycine max
gagcatccttgatgtccagggaaatccatatttgtccttttttctgcgtactttcatcgaattattgcttgttagctctataccaacttcttatatatcccatcctccacatctacgcctgaatcatcgtccaactattagttcctctctctgcgttcatatcgcaacatgcttcccttttcaactctctttcaaaccccgttaaccaccgagtattggtacaaccaccccacaacaacacttctagcgttcttgctcatctcccttgttacttgctatgcatggctcaagcccaaggcccaaaggcttccaccgggcccatcgggcctccctttcttcgggaacctcctatccttggacccagacctccacacttacttcgccgtcctggcccagatccacggtccaatcttcaagctccagctcgggagcaaactctgcatcgtgctgacttcgccgcccatggctcgcgcggtgctcaaagagaacgacaccgttttccaaaccgtgacgtccctgccgcgggccgggccgcgagctacggcggatccgacatagtgtggaccccat

SEQ ID NO: 216916 - DNA, 603 bp, Glycine max
aatgaatgatccaacccaggataattttttttataacaaatccatattttttgatgtacaatgacaacgacttatatctaacaccttatgctggtactggtacacataattaatgtagttttttttttttacaaaataattaatatagtgttgagcgttgaataatggatacaagtatattatagtaaactctattgataaagatctgggttggataaccgtggggtggggatagcaaccaaaggtattttctttttgagaacaattccaaatttctctgatacctctaacttttctccttggggtactgtccaatcaaataagtgtacgagtgtggcaagaaaatgcaaaaccgtcttctcagccattgctattcctgcacaaattcttcttccagatccaaaggggaaatagttgaagtcattgccactgaaatccaattttgcatctaagaatcttgtaggatcaaattcgagtgatttcttccaaattgaagggtctctatgaatagcccacacattcacaaacacccgagacccctttgggattgtgtaacctcccacaatagtggtttcgctaggacaatgaggtactagaagtgga

SEQ ID NO: 216917 - DNA, 544 bp, Glycine max
  unsure (1)..(544): unsure at all n locations
agagccatgctaggccttacagnacnncncttnnnnnnntnnngnnnannnncnnnnnnnnnnnnnnnnnnnnngggnnnnnnnnnnnnnnnnnnnnnnnttttttttnnnnnnnnnnnnnnnnnnnnnnggggggggnnntttntntnntttttttgttttgtttctttcattatgcgtgagatctctatcctgcgccgtgttcgccaccctaacatcgttcagctcttcgaagtcatggccaccaagagcaagatctatttcgtaatggaatacgttcgcggcggcgagcttttcaacaaggtcgccaagggaaggctcaaagaagaggtcgcgagaaagtactttcagcaattaatctctgctgtgggattctgccacgccagaggggtgtaccacagagatctcaagcctgaaaatttgttgcttgatgagaatggcaatctcaaagtctctgattttggattgagtgcggtgtctgatcaaatccgacaggatggtctttttcacactttttgtgggacacctgcgtatgttgctcctg

SEQ ID NO: 216918 - DNA, 531 bp, Glycine max
agaaaataaattcatactcattcactatatttcaatgggccggttttctcgtatggcaattagacaaacagtaggcacctaacgctccagtcaagaagcaaacctaaaagcaggacaatcaatcctgtgtggaaatttttttaccaatttccatacacaatctataacataaaaaaaaagagagagagagaaagaaagagtgtgtgtgatacagagattagagagaaagtccttaaccatttttctcttcttctctatatctgagtcttcaatcatcagaaggtatacagagcggggtttcaatatcagaagaaatatccggcacaggttcagaaaggccacgtagtagggaaggttgaataggtgtagacaactctgaagaagtagcagactcctccaccatcaaattctgcaatccaggctttaactcatcgttacaaaacctctcatactcggctctatcccctccttttttcttcacctccaccacaaccaaagaaggtgtcaactcaaatatctcagcagcaatag

SEQ ID NO: 216919 - DNA, 665 bp, Glycine max
  unsure (1)..(665): unsure at all n locations
agggccatttagttcttactgtacnnctnttnnnntnttttnngnnannnncnnnnnnnnnnnnnnnnnnnnnggnnnnnnnnnnnnnnnnnnnnnntttttttntnnnnnnnnnnnnnnnnnnnnngggggggggtntttnnnnnnntnnnnnnntttttttcctttatcattcttgtgtcacagacagcattctcatcaacgccggcaccgactgcaccgaggagttcgaagccatccactccgacaaagccaagcaaatgcttgaagactaccgaatcggcgagctcaccaccacctgctacaactctgattcttcatcgtcaaacccctccgtgcatggcagctccgacaccatccttttgacccccatcaaggaagtgattacaccaatgcgaagcgtggctcttaacccacgcgagaaaatcccatgcaagctcatctccaaaaccttcatctctcacgacgttaggcttttccgctttgccctcccctccgacgacctacttatgggtttgccagttgggaagcacatattcctatgtgccaccgttgacgagaaactatgcatgcgagcctacactccaacaagcatcgttcacgaagtgggatacttcgaccttgttcgttaatgtttacttcaaggggtgcaccctaagttccca

SEQ ID NO: 216920 - DNA, 485 bp, Glycine max
agttgcacactgttttatttatttatttatacatgcaaaagtagtcgggataattgacatacttgtctacatcaaaagttgacgaggaaaagtaaacctgcgtagctagctagctgtcccatgtacacttttatttaaaaattgaaacataaaaaaatcttgaaacgaagcagctaatagaatccattatttatatataacaataaactactatatacacatacaatgtattctagtttagtcccctaaaacacgagcaagttattctgggtgtcgtagcccaacttctccaaattcggctggactgcaaattgaatcataggtggtggtccacaagtcaatgccaaggtatcaggagatgcatttggaatatgctccgtcaggatacttttagtgatgaatcccacactgtattcccacccttctcttatgcttttttgtatcacgtaccacacctttaacctatcatactttttagcccactc

SEQ ID NO: 216921 - DNA, 549 bp, Glycine max
aaaacaaaagcatgtgatgtttactgcgcgaatttgaagagttgtttcttcctgggcatcgcgcttcttctcactctctccacaatcgccttgacctacgtgaaggagaaaacggtgtcgtcagagaaaacggtgaggagttcggtggaggaggatgggtcccacgggggcatgccgtgcttcgggcagttattcggtgcgttccgcgaactgaagcgtcccatgtggatccttctgttggtgacgtatctgaactggatcgcctggttcccttttttgctattcgacaccgactggatggggcgtgaggtgtacggagggacagtaggggaagggaaggcgtacgataggggtgtccgcgcgggtgcgttggggctgatgttgaactctgttgtgcttggtgcgacgtcgttgggagtggaagtgctggcgcgtggggttggaggcctcaagaggctgagggggattgttaactccttgttcgcgggttggttggccatgaccgttttggttactaagatggcccaacaatttcgacatacaccctac

SEQ ID NO: 216922 - DNA, 545 bp, Glycine max
  unsure (1)..(545): unsure at all n locations
gccaccgcatcccaccacgaatcgctggcaatgttatccacctccaaatagagcatncccatggtccagcgtatcacatgacaccaccatcntgtggtatgacaatntgcatagattgagccactcccagagacaataccttggctctgcgccctgaggttgctggagaatactttgatgctagagcaaacgggtattgctgtaagtaaatcgcgaagtgggattccgaggaagagagaatgagagccacacgcgccgtgctttgaccggcggcgggaggagggcaggggttctctggtgggccgttggggagtagaggtgtatttgtaaagaatgttgggccatcttagtaaccaaaaccgtcatggccaaacaaaccgcgagcaagaagttaacaatcccccacaggctcttgacgccctcaaccccacgcgccagcactttcactcccaacgacgttgtaccaagcacaacagagttcaacattagtcccaacgcacccgcacggacacccctattggacgccttcccttcccctactgtcc

SEQ ID NO: 216923 - DNA, 565 bp, Glycine max
  unsure (1)..(565): unsure at all n locations
attctttcacgggggaagcttctctcattcctcggccaacagtcacatctacgacaccttctgccgccgccttgtgaggatttgcaaggctgctgtggtgtctgtgaactaccggcggtcaccggagcatcggtatccttgtgcatacgacgacggctgggcggcattgcggtgggtgaagtcgagagcatggctgcaaagtgggagggaggccaaggttcatgtctacttggcaggggacagttctggagggaacattgttcatcatgtggcagtgagggctgcagaggaggaaattgaggtcctggggaatattcttctccaccctttgtttggtggggagaagagaacggaatcagaattgagattggatgggaaatactttgtgaggcttaaggatcgtgattggtattggagagcttttctacctgaaggagagaatagagaccaccctgcttgcaacccttttggaccaaggnggagaagcattgaaggactcaaattccctaanagtcttgtttgtgtggctggtttggatcttctgcaggattggcaattggcatat

SEQ ID NO: 216924 - DNA, 527 bp, Glycine max
atcacaccccccattgcaatgaccttcatcaacaactcttctgcatcttcaaactgggttgtggcttttctaagtgctgtgattctttctttcatctttttcttcaggtcctaaagcatacttgtgatttcctccattatttcctttgagatttggacagtagttggtcatacacccaattctaaattagagttgggatgtctggaggagtagtttgatacagtgatgcatctccacagatacttgagtaaagctatatgctgtggtgtagatttttactatggagttaaatgcaagttatgacgtcgagcattcacattctacacaaagaatacagcatgagctgtggcctctagatccaattgatccaaagaaggcaaagtttccatgttgtttggtttggaatccacttcctgtggtctcatggttggctcccttcattggtcatgttggcatttgcagggaggatggagttgttttagatttttcaggatcatatcttgtgaatgttgatgattttgcatttg

SEQ ID NO: 216925 - DNA, 492 bp, Glycine max
caggttgctttacagttccaccaattagtcaatacaattgcatgggtcacggtctaacgaagcatcaagtacactttcaaaagctattccattaactttccataagagataactatttcttgttccaatatcaacatttaaacctgttatttggagaagagggaacacaaatcatgaccatctttcaattcaagagaccatctagcactctaatagggttctaaataggcaagtacccaatagaaaccaccctattaagagtagagagaaggatagtaacccaagtaagaagggccatccaaccataaaaacacctaagcaaacaaccacaacaaaaggcagaaaagaccttacaattgacctgaaatcaacccagtgccccttaaatattaccaaagctcctacattcaccatgttccaattcattgatccaccataacacagccgattcagacagttggcaacaaacgagtggcatttgcaagtgaaaag

SEQ ID NO: 216926 - DNA, 531 bp, Glycine max
  unsure (1)..(531): unsure at all n locations
gttaaaagccttagccttccctacttctccaaacacaaagacatcatcatccatgggtgcctccgtctccactgtcggagctgtcaacagagctcttttgaacctgaatggttctggagctggagcttcagctcccagttcagccttctttgggaccagcttgaagaaggttattgcctcaagggtccccaacagcaaggtttccggtggaagcttcaagattgttgctgtagaagagaagaaagagattgaagagacccagcagaccgacaaggacagatggaagggtcttgcctatgatatctcagacgaccaacaagacatcacaagaggaaagggtttggttgactcccttttccaagctccacaggatgctggaactcactatgcagtcatgagctcctacgagtacctcagcactggacttcgccagtacttggacaacaaaatggatggattctacattgctccagcttttatggacaagcttgttgttcacatctncaagaacttcatgaccctgcccaacat

SEQ ID NO: 216927 - DNA, 484 bp, Glycine max
aagtggacactgtaactcaaaattatagaggaagacgggccaatatgaaaaatatagtaagatcatctcaaacttagcatcttctctttgcacctaagacattgagaatgctaagaatgttacacgcaagttccatcacaacttctagcacttggattagtacaacaaccttcacgaacagaaatatttacttgccaagtttgctttgcctccaattcaagactggaagaaagttcccctctgaatagcatcctcgttagcatttccaagagcagcctcgttcaagtacttgtcagccaattggactctcttgacattctcttgttcttggacaagcatgttaccatacagcaagagcttctccagagtcatcttgggctgctcaaaggttggaggtccatcttttgagttcacaagcttcttcccaacactgtcaacaccaacaccagaaatccacttcctcacttcatcatcatatactctg

SEQ ID NO: 216928 - DNA, 552 bp, Glycine max
gctcagtgaagatgataaattgactgttgtccgtgcccgtaagattcagcgattcgtaagccagcctttccatgttgctgaagtcttcactggtgccccaggaaaatatgttgagttgaaggagaacgttgccagcttccagggtgtgttggatggaaaatacgatgaccttccagagcagtcgttttacatggttggcggtattgaggaggtcattgcaaaggccgagaaaattgctaaggaatctgcagcgtcttaatcacacacagccctgttctcattttaatcccttttttttttgtaattgctaaatttaataatttaggaactcttggcaatgccaaacaacaaaattttccattttttgggtatgaaaatgtatcaggttattccttccttccattttaatgttgccgactgtgagatgaactacggtcaatgtctgtggccaaactgcccccctgtttttaagttgtgttatttaataaggggaaaagggcaagaggatgtacattttttactttctggttgagaaacgtggatgcaataatg

SEQ ID NO: 216929 - DNA, 509 bp, Glycine max
cgcatggggaattcaaggccccctatgcgctaatttacagaaacatggcggttggaggcgtcgaaggtttctccgcactgccccagcattgcttgcagctctgttacgggttctttgctttcgcggtggtggtgaacatggtgagagacctctcccccaacgtgtttgggaaatggatgccgttgcccatggtgatggcgattccctttctggttggtgcctactttgccattgatatgtgccttgggagtttggtggtttacgtgtggcacaagcttaacactaagaaggcagaggccatgattccagcaactgcctctggactcatttgtggagaaggcctgtgggctcttcccgcttccattcttgctcttgccaaagttaacccgcctatctgcatgaattttcttgcttcctagaacttgatcaactacatcaaaccaatgaatgccataattagttagttaattaatactactatatatgttagcaggtacacttcatacata

SEQ ID NO: 216930 - DNA, 500 bp, Glycine max
aattatgactcctgtgaagaagaaattcccttccgagagatcaatgggcaggaactgacttttcctacaaagttgtagtaagcaataatacaatgttcctaagcccaatggccagacacttggaatatttatagcattttggttatgtatgaagtgtacctgctaacatatatagtagtattaattaactaactaattatggcattcattggtttgatgtagttgatcaagttctaggaagcaagaaaattcatgcagataggcgggttaactttggcaagagcaagaatggaagcgggaagagcccacaggccttctccacaaatgagtccagaggcagttgctggaatcatggcctctgccttcttagtgttaagcttgtgccacacgtaaaccaccaaactcccaaggcacatatcaatggcaaagtaggcaccaaccagaaagggaatcgccatcaccatgggcaacggcatccatttcccaaacacgttggggag

SEQ ID NO: 216931 - DNA, 527 bp, Glycine max
ggttcccattcaaggcctttttctttttcccaacccaatgcgccttaaagggacgggatgtgacagaattctctgggcttacatccacttcatgtgtcacatatgctaacagtgctagagaatcttccttttttgatcttgtagcttcccaactcactcccaagaccaatggatcaactcctgtgaggggagagacagtggccaagttgaaggtggcaatcaatggtttcggacgcattggtagaaacttccttcgctgctggcacggccgaaaagactcaccccttgaagtcgttgttgtcaacgacagtggtggtgtcaagaatgcttcgcacctgctgaaatatgattctatgctgggaaccttttaggcagatgtgaaaatactatacaatgaaaccatcactgttgatggtaattccatcaatgttgtttcaagcagggaccctcttaagcttccattggctgagcctggaattgactttgttattgatggaacgggatttgtttgtggttggccctggggc

SEQ ID NO: 216932 - DNA, 342 bp, Glycine max
caacttccttctatattttttttttttcacacaaaacacccacggaaagggggtctcttttattaataaactttccatccctaaacagcagggtttgattcacaaaaacccaacattgggtctccatttccctctttagggccccctggccacttgtttgctcccaaactggccaaacctaccacttttgggctgaacccccatatattggaaacccaagaacccacttcaaccattttatatcccatgaccatattgaaggaggattcattattgccggaaacatcagacccccgtgagtcgtctaacccaagtggaacatcacacacgtgcaatacacct

SEQ ID NO: 216933 - DNA, 444 bp, Glycine max
ttttttttttttttttttttttttttttttttttttttttttttttttttttgtttggttttttttttttttttttttatttttttttttttttttttttttttttttttttttttggaaaaaccccccccccttgaaaaaaaatttttttcaacaaatgcctaaaatggtttaccaaataacccccccccccataaacccccttttttttttccctttaaaaaaaaaattttttttttttccccccccccttcaaaaaagaccctcccttttttcctaaataaaaaaaaaagggccccctttttttttttcacaaaaaaaaaaaaccccccttttttttttttaaaaaagggggttctttaaaaaggaacttttcccccccttaaatttttttttccattaaaaaaacaatatttttccttaaaaaaaaagaatgttttttgg

SEQ ID NO: 216934 - DNA, 635 bp, Glycine max
  unsure (1)..(635): unsure at all n locations
ggccattactccctanganccnnnnntnntnnngnnnnnnccnnnnnnnnnnnnnnnngggnnnnnnnnnnnnnnnnnnntttttttntntnntttnnnntttttttggggggtgttttttttttttttttttttttttttttttntttttnnggaggagctccagcgtgtcatggaagaccttgacaccgatcacgacggcttcattaacctctcggagttcgccgccttctgccgctccgacaccgcggacggcggcgacaccgagctccacgatgccttcaacctgtacgatcaggacaagaacggcctcatatccgccacggagctctgccaggtgctgaaccgcctcggaatgaagtgctccgtggaggaatgccacaacatgatcaaatccgtggattccgacggcgacggcaacgtcaacttccccgagttcaagcggatgatgagcaacaatcgcgaaaatgctagcaatgctgaaaaaaaaacagattaggccctttggatttgaattttatagataggctatgcactttcgctgcacaatctcttgactaataaatctnaggtctgtatgatccgctatttcttttctcctcggttcctctttttatatatatataattatatat

SEQ ID NO: 216935 - DNA, 377 bp, Glycine max
gggtaggtatatataaatatttttttataaaaagaggaaacgaggggaaaagaaattgcggatcataacagacctagatttattagtcaagagattgtgcagcgaaagtgcctagcctatttataaaattcaaatccaaagggcctaatctgttttttcttcagcattgctagcattttcgcgattggtgctcatcatccgcttgaactcggggaagttgacgttgccctccccgtcggaatccacggatttgatcatgttggggcattcctccacggagcacttcattccgaggcggttcaacacctggcaaagctccgtggcggatatgaggccgttcttgtcctgatcgtacaggttgaaggcatcgtggagct

SEQ ID NO: 216936 - DNA, 566 bp, Glycine max
  unsure (1)..(566): unsure at all n locations
aggccatctatctcctagacnccnntnnnnntnnnnnnnnnncnnnnnnnnnnnnnnnngggnnnnnnnnnnnnnnnnnnnttttttnnnnnnnnnnnnnnnnnnngggggggnnnnnnnnnnnnnnnnnnnnnnnnnnngnnntgggcnntccatttctcaatctcactgttgatggtttccttaagatcggagctgtcgcagccacgcgatcagctgctgaagatacttatcatattatccaaaaggggaatatctcaagtcatgatttcgagaaaacgttgaagaagatgtgcaaagaaggtgtatattggggaactatagctggcgtttatgttggaatggaatatggggtagagaggatccgtggcaccagagattggaagaatgccatgattgggggtgcagtaactggggcccttgtatctgcagccagcaacaacaagaaagacaaaattgcaatagatgccattactgnggcagcaattgctactgctgcagagttcataaattaccttacctgaattaatgaagtggatgtcttgcttgttttcttgcatgttttg

SEQ ID NO: 216937 - DNA, 501 bp, Glycine max
  unsure (1)..(501): unsure at all n locations
catccagaaccttcattattccaaaacccaaagactaaatcgaactgaacatgctttgacataattgcacaagtctagcttgactaaattgcaaggcaaagctactaacatgcagaaaaccgaatggccaatataatttatcaaaacatgggttttatagaaagttaaataaatagcatatcttagaagtaactgcaccaatatcaaagacggaaccggtacagagtatgactaaagagagactgagtgtgcaatccttttccaaaacatgcaagaaaaccagcaagacatccactttcattcattcaggtaaggtaatttatgaactctgcagcagtagcaattgctgccccagtaatggcatctattgcaattttgtctttcttgttgttgctggctgcagataccagggccccagttactgcacccccaatcatggcattcttccaatctctggtgccacggatcctctctaccncatattccattccaacataaacg

SEQ ID NO: 216938 - DNA, 552 bp, Glycine max
atgctctatcctctatgttcccttttctttatcccattggtcctttccctttacttttaaatcaaagtccacaaagccacttgacatctttaggttccaatctttggaatgaagatctagagtgtcttgaatggctagaatctaaggaatctcgatccgttgtttatgtgaattttggcagcatcactgttatgtctgcagaacaactcttggagtttgcttggggtttggccaatagcaagaaaccctttttgtggatcattaggcctgaccttgtcattggtggatccgtgattttgtcgtctgagtttgtcagtgaaacaagagacagaagcctaatagcaagttggtgtccacaggaacaagtgctaaaccatccttcaattggtgtattcttgactcattgtggatggaactcaactactgaaagtgtttgtgctggagtgccaatgttgtgttggccattttttgcagaacagccaacaaactgtagatacatttgcaatgagtgggaaattgggatggaaattgataccagtgcgaaagagagga

SEQ ID NO: 216939 - DNA, 626 bp, Glycine max
  unsure (1)..(626): unsure at all n locations
attagcatatattagcatatattattatatattggatattcaaaaaaaaaataatgaataaaaaaattaagagccataattagaattctgtatgatatttacgtttacggcgtgtgataaaaagatactatatagaactaaaggagattcccgtttcagttacattcaattcaacgattgaccaaaagagaattcaaaaaataacatttagatcacccaaattccaatatttctatgaaacaataattaaatctaacgaatttatttcgattgattgtatccatatggggtaataataaaagggggaggagagcttaaaaaaacaagataacaaataaagtataagtgcggggggtcaaactgggtgtatataatcggatcactataagacaactctttcttttgaggtttcaaagaatgattttcgaattcgattgaatctaaaacacaaaagaattggtttacaggatagaagacanccacgtatatgtgataggatattctatatgaactaggtatatatgaactaaccatatccatatatattatataaaataactaatattttatatctaaaattgcccgctctactgtaaattcgatagggataaaaaacaagcctttcg

SEQ ID NO: 216940 - DNA, 485 bp, Glycine max
agtcattgaatattcaattcacaattcgagatgaaacggaaagggtgtgttttttaatccctatcgaaatttacagtagtagcggggcaattttagatataaaatattagttattttatataatatatatggatatggttagttcatatataactagttcatatagaatatcctatcacatatacgtgggtttcttctatcctgtaaaccaattcttttgtgttttagattcaatcgaattcgaaaatcattctttgaaacctcaaaagaaagagttgtcttatagtgatccgattatatacacccagtttgaccccccgcacttatactttatttggtatcttgtttttttaagctctcctcccccttttattattaccccatatggatacaatcaatcgaaataaattcgttagatttaattattgtttcatagaaatattggaatttgggtgatctaaatgttattttttgaattctctttt

SEQ ID NO: 216941 - DNA, 338 bp, Glycine max
ttggagtctctcaaggatgcccgattcttttctatgttctctacttttgccgtcagaggacgcaatgctgctgttgctactgttgtccaaaactgtcctgactttactcatttccgactctgcatcatgcaccctggtcagctagattacttgacccaagaatcaatggatgaggcctttggagctgttgttaagacttgcactaaactccagaggcttgcagtatcaggttatctgactgacctaacttttgagtatataggcaagtatgcaaaaaaacttgaaaactctttccgtggcttttgcttgaagcagtgaatggggcatgcgctgtgtgc

SEQ ID NO: 216942 - DNA, 346 bp, Glycine max
cgcaaagaagccttctcttcagaaaagacgagacgagacgagcgagatcttcattcgatttgtcattttaaataaaatcgcgtcttctcctctgtattgagacatggccgaagaagaggaagaatcagagctcagcgataagcagaaagtggagatcgcgaaatggttcctcctcaactctcctcccggagaaatccaatacgttgccaaagatgtgaaatcgattctcaacaacgacgatttgtacaaggaagccgctttcgaggctttttcctattacaacaaatcgcacttgatttccattccaatgcccaaccgaagcggagacgtactggttacttcgttc

SEQ ID NO: 216943 - DNA, 542 bp, Glycine max
  unsure (1)..(542): unsure at all n locations
aagaatttcaactagctttaaggatacttcggggtaaagatgttgatatttctgatgaagctgctgaaattctggactctattgaaactcttcgaagccttcctaagattaagctgttggatttgttccaaagcaaacatgtgcgctctgtagttattggggtcgggttgatggtatgccaacaatttgttggaattaatggcataggattctacacagccgagacttttatagcagctggactttcttcaggaaaagctggtaccatagcatatgcttgtttgcaggttccatttactgtattgggagccattttgatggataagtctggaaggagacctcttatgatggtttccgcaactgggacattcttaggttgctttattgccgctattgctttctttctcaaggaccaaagcttaatgcttgagtgcgcaccgatatttgcagttgctggtgtgttgatctacatagcagcatattcaattggtgtaggaccagntccttgggtgataatgtcagagatctttcccattcatgtg

SEQ ID NO: 216944 - DNA, 440 bp, Glycine max
cgcatcttttgcttcactcgtcatttctactcagatcgcagcaaaccagactaagcgccgacgatgcctcccgtcgctcctcgatccggtgatgccatattcgccaacgtcgaacgcgtcaatgcggagctgtttactttgacgtatggcgcaattgtgcgtcaattgctcacggatctggaagaggctgaggaggttaacaagcagcttgatcaaatgggttacaatattggaatccgtttgattgatgagtttttagccaagtctaatgtctccagatgcaacgatttcagagagacgactgatgttattgcaaaggttggttttaaaatgttcctcggtgttactgcatctgtgaccaattgggatgctgatggaacatgttgtagtattgttttggaggataatcctttggtagattttgttgagctttctgacaa

SEQ ID NO: 216945 - DNA, 511 bp, Glycine max
aagagggtgaggacactactaactttgtctctcgcaggttggccctcactgttcggattggtgctgctgctgttggctctaaggttgcacctgctgatgctgcctatggagaagctgccaatgtgtttggaaagccaaagacaaacactgacttccttccatacaatggggatggattcaaactctcaattccctcaaagtggaacccaagcaaagaggttgagtacccaggtcaggttcttagatatgaggacaattttgactcaaccagcaatgttgctgtcatggtcactgcaactgacaagaagtccatcactgactatggttcacctgaggagttcctatctcaggtggattacttgcttggaaaacaagccttctttggccaaactgatgctgagggtggttttgattccaatgctgtggcaactgcaaacatcttggagagttcaacgcctgtcattgatggggaacagtactacagtttgactgtgttgacaaggacagctga

SEQ ID NO: 216946 - DNA, 482 bp, Glycine max
caacttaaaatgcttaattaaagagagaaaggggggggcaagagaggagggtaagtccttagaagacatgaaaaattaagaatcaaagtgcttactccaaccaacagcctcaaaaactgaaacttgtggacaaaaagtggccacataattcaacacatacacaccccttcaagatgattcacatgcagaatagcactccactgataagttcttaggcaacactgaaagaacttgctgggctctccacaaatcttcttgctcccttaaaccatctcttgtctccagcttgagccttgcaaatgtatagtttgccatctttcacagttgctgcaatcagctggtgcttgccaccttcatctccatcagctgtccttgtcaacacagtcaaactgtagtactgtttcccatcaatgacaggcgttgaactcttcaagatgtttgcagttgccacagcattggaatcaaaaccaccctcagcatca

SEQ ID NO: 216947 - DNA, 379 bp, Glycine max
  unsure (1)..(379): unsure at all n locations
gttggagtaaacttcaatggtgtttantatacttttcatttatttgtagcggctggaatacacccaacgtaatactggaaagtattgttgccggtattacgttgggtgtgttggagtaaacttcaatggtgatgattatacttttcatttatttgtagcaactgtaatacgaattttggggatttgcatatatttgttttttttcaatgatttggatatttgttaaaaataacaatttttagtgcaaaagatgtcactattttgtgctttaaaaaaaaaaaaaaaataaaaataataaataaaaaataaaaaaaaataaaaaaaaaaaaaaaataatataaattataatataatataaaaaaaaaaataggggcggccc

SEQ ID NO: 216948 - DNA, 594 bp, Glycine max
  unsure (1)..(594): unsure at all n locations
cttctttttaacccccttaaatgaaaaaaggggttccccgacttggatagggaactatgcgagtgacctacctaatcttattgtagaaattttcaggatcaatgattagaccatgcaaactagaaatgctttttcttgtataaaggaagggattactcgatccatttccatatcgatcatgatatatataataattcgagcacccatttcaaacgcatatccaatttttgcacagcagggttatgaaaatccccgagaagcaaccggtcgtattgtctgtgccaattgccatttagctaataagcccgtggatattgaggttccacaagcggtacttcctgatactgtatttgaagcagttgttcgaattccttatgatatgcaagtgaaacaagttcttgctaatggtaaaaagggagctttgaatgtgggggctgttcttattttaccggaaggttttgaattggcacccnccgatcgtatttcgcctgagattaaagagaagataggcaatctgtcttttcaaaactatcgtcctacaaaanaaaatattcttgtggtaggccctgttcctggtcaaaaatataaagaaat

SEQ ID NO: 216949 - DNA, 580 bp, Glycine max
  unsure (1)..(580): unsure at all n locations
aggggagctatccctcaagacnncnnnnnntnntnnnnnncnnccnnnnnnnnnnnnnnnnngggnnnnnnnnnnnnnnnnnnttttttttnnnnnnnnnnnntnnnnnnnnggggggggttttttttttttttnttttttnnttttttttttttttttttattggatgatttgaacggcgccatgacgacggagaatagcaatgcggaggtggttcgatgggagaggtttctgccgcggatggtgctcagagtgctgcttgtagaagctgatcattccacgcgccaaatcatcgccgcgcttcttcgcaaatgcagttacacagttattgcggttccggatggattaaaggcatgggaaacgttgaagaagaaggcacctgagctagatctcatattaacagaagtggagctaccagcaatatctggatttgcacttctttctttgatcatggagcatgacatttgtaaaaacattccagtcataatgatgtcttctcatgattcggttagcatggcattgaaatgcatgttaaaaggggcagttgatttttttataaaacccattccgaagaatgagc

SEQ ID NO: 216950 - DNA, 449 bp, Glycine max
aacatcataatttttcttatacataagaattaaacatggtatcaaaaggttttacaatatttatacattctgtttaatcaacagaactagaccctctttactttaagttaggtttaaagttcagtttgggcatcatcatttgctacatgcataaataaagcatgtatctaattagactaaaaaccaactgatgggatctcaagctgaatcacgagccttgcaaacaggtaaatcatcttcgaaattgggagggactccaaggattggatttctctcaaagaaattagcaggcttcaaatcaaaacttgatgatacagtaggcatgacaggatagtcctcttgacagggtatatgatggaaccctattgtgtaccacaaaacaatgtctttattctcaattggacgatccctgttggaccagacttgaagagtatcatcccctttgctct

SEQ ID NO: 216951 - DNA, 321 bp, Glycine max
caaagatggggaacacggagaagctgatgaaccagatcatggaattgaagttcacgtcgaaatcgctgcagcggcaatcgcgtaagtgcgagaaggaggagaaatcggagaagctgaaggtgaagaaggcgatcgagaaaggcaacatggacggagcgcggatctacgcggagaacgcgatccgtaagcgcacggagcagatgaactacctccggcttgcctcgcgcctggacgccgtcgtggcccgcctcgacacgcaggcgaagatgacgacgatcagcaagtcgatgggcaacatcgtcaaatcgctggagtcgtcgc

SEQ ID NO: 216952 - DNA, 545 bp, Glycine max
gccacatggataagagaaagaggattatgtaagaagaagatgatgaacaacaacaggcagcacagcaacaccaactgaaacatcttcatcatctacgaacgaccataaattttctctctttccctttccctctctctgtctgtgttttttcttaaaaaattctgtgagaggcatagaggaagatgaaggaaagcagtgatgggtttgtgagagcggatcagattgatctgaagagcatagatgaacagttggagaggcacctcagcaaggtgttgaccatagaaaagaaaaagcgctctgaaggggaagaagatgctgatcatgttcatcttcatgttcacaccaccagtgccactgcttctcccaaattctcacatgcttcttctgctgctagggttaacttcaagaagaaaaagcaggattgggagattgatccttctaaactcatcatcaaaactgttatagctcgtggtacttttggcactgtccatcgtggtgtctatgatacccaagatgttgctgtgaaatttgtggactggggggaa

SEQ ID NO: 216953 - DNA, 560 bp, Glycine max
agagtgtgaaaccaaagagtgtaatttctccagcgaaaaaggctacggctaagagggggggtaggaagtgagaatgtggtgggtaccagtggttttagggttagctctccccacgtcctttcccctctcggtcctgtccctgcccccccacctcctcctacctcttctgcccccctcccttctcccccctccgtttctccctcccctccttcagtccctctccttcctctccctcctcctctccctctttctctccctccccctcttacctctcctccacctctcccttcctccctccttcctcttcttccctccctccttctcccccctccctccctcctccctctcttgttctctcctctctcctccccttttcccctccccccttttcgtctcctctttcctcctctcaccctcctcccctcctctctccctccccctctatatatccccccccctctctccttaccctctcccccccctccttccttcctccctttccctcccccttcctcctctcccctcttctcccctttccctctccccccccttccctccct

SEQ ID NO: 216954 - DNA, 476 bp, Glycine max
attgatttcaaaaattatccggaaaaaatctgaatctatctttatatgcgaatcaatgctactacttctggtcctgaggtttctgcgctggaaaaaaaaaatctgggacgtatcgcccaaataattggtccggatctagatgtggcttttcccccaggttagatgcctaatatttacaacgctctgatagttaagggtcgagatactgatggtcaacaaattaatgagactcgagaagtacatccttcattaggaaatgatggaattacagctgaagctatgagtgcgacacaaggtctaatgagaggaatggcagtgattgacacaggagctgccctaagtgttacagctggtggagcaactctaggacgaattttcaacgtgcttggagagcccattgataatttaggtcctggagatactcgcacaacatcttccattcatagatctgcgcctgcctttatacaatgagatac

SEQ ID NO: 216955 - DNA, 459 bp, Glycine max
  unsure (1)..(459): unsure at all n locations
agttgggccgatattcggacgcatcaacttgttatgaaatcacattgatagcctctactcgtgtcctagctcgtctaagagctagatttgcctcaattgtttgtctcttgccttccgccttattcaaattagcttctgctatttcaagagtttgctgtgcttcttgtggatcaatgtcactacccttttccgcatcatttactaaaacagtgatctcattattgtttattctagcaaaaccgcccatcagagccatcgttaaccattggtctttaagaagacgtattctcaaaatacctatatctacggctgtggcaataggcgcatgatttggtaatactccaatttgtccgctattagtagataaaatgatttccttcacttccgaatcccaaacaattcgattgggggtcagtacacanagatttaaagtcatttcttcaaattgctctccatttc

SEQ ID NO: 216956 - DNA, 592 bp, Glycine max
  unsure (1)..(592): unsure at all n locations
aagcccatactacgtcatactagnacncccnnnnnnnntnnntnnnnggnnacnnncnnnnnnnnnnnnnnnntnnnnntggnnnnnnntnnnnnnnnnnnnnnnnnttttttttttntnnnnnnttnntntttnnttnttgggggggtttttttttntttattnnttnttttnntnnnnnnntttnttggtacttttactgcttccaaaacttgtcaaagttccatgaccgtccatgcctcatcgacggcgacaccggcgagaccctcacctacgccgacgtcgacctcgctgctcgccgcatcgcctccggcctccacaaaatcggcatccgccagggtgacgtcatcatgctcgtcctacgcaactgcccgcagttcgccctcgccttcctcggcgccacccaccgtggcgccgtcgtcaccacagccaaccccttctacacgccggcggagcttgcgaagcaagcgacggccacgaaaaccaggctcgtcataacgcaatccgcgtacgttgagaaaatcaagagtttcgcggacagcagcagcgatgtcatggtgatgtgcattgatgatgatttttcttatgaaaa

SEQ ID NO: 216957 - DNA, 498 bp, Glycine max
catgcaatacttgcatattatatatatggatggataacgagatataaaattggaacaaaaaccacaacaggaagggcctgtggtacggtaagtaaaacagccacgattttcctctgtcacaattatggacctaattggccaccaccaaaccttcgttaagtcttgcagttaatacctttcgcagaattttgcctgagggtgctttaggaatagagtccgtgaagaaaactctacctattctcttgtaaaaaaccacctgttgtgaaatgtatttcttgatttcatcctcggcgatctcagaaccatttgaccttacaacaaatgcaactggaatttcccctgcagcttcatctttcatgcctacaacggcagcatcagaaatgtttgggtgggcaatcaacaatgcttcaagctcagcaggagccacttggaatcctttgtatttgatcaattcctttaaccgatcaacaatgaagagttcatcatcatcatcaatga

SEQ ID NO: 216958 - DNA, 590 bp, Glycine max
gatcgtacttcctatcataatgaatctgttgacagcattatgtgtaccctacgtgttggccaaaggtgtatttccagtgcttgggtatcccttggtgataaattctgccgtctatcggtttgcatggttgggatgcctctctttcagtttcgtgtgcttctgtgccaagagattccatgtctggttcacaaatctccataattcaatacgcgatgaccgatatctgattggccggaggttgcataactttggagaacatgctgagaaagcaaatgtggcagaaactaattcaggggagaaggacactattttactaggtacaggtttaaaccaacaagatcgcgaagcagatgtcggactacggttaaggcacgtaaatcaacaggtgggctgaattgtattttcaggtaggaaggccactttgtaggttgtgatgcctcgtgatggtttatgaatcactgatgtatactctacacttgtgttggggtagttataacacattgtcatgacacacctgtgatgtagttaaccgtaacattttgtgcggtgtacttgttaaaattagctattggaagaaatataattgttgt

SEQ ID NO: 216959 - DNA, 487 bp, Glycine max
atcaacaattttattttcctcctattagctaaattttaaacaagtgacacgcacaaaatgttaacgttaactacatcacaggtgtgtcatgacaatgtgttataactaacccaacacaagtgtagagtatacatcagtgattcataaaccatcacgaggcatcacaacctacaaagtggccttcctacctgaaaatacaattcagcccacctgttgatttacgtgccttaaccgtagtccgacatctgcttcgcgatcttgttggtttaaacctgtacctagtaaaatagtgtccttctcccctgaattagtttctgccacatttgctttctcagcatgttctccaaagttatgcaacctccggccaatcagatatcggtcatcgcgtattgaattatggagatttgtgaaccagacatggaatctcttggcacagaagcacacgaaactgaaagagaggcatcccaaccatgcaaaccgtttgacg

SEQ ID NO: 216960 - DNA, 396 bp, Glycine max
aaatttttcctttgatattaaatctcgctctagattggaaaaagtttcctctacagaagcacaatttgttagtggaaaaaccttcaaatatgatataattggtgctggttcacattcttcagaagattttcctgaaaaggaagatcaagaaaaacccaaaaagattgataccagattgagacaaagaatagatcctcaatacaatgaggttcaggctcagatggaaacaaatttgtttaaattgtctcttgatgatgttgaaactcctaaaggttccatgttggatcttaaaatttctcaatctaaaattgcacttcccaaaaacacagttggaggaaccattctgcgtagtgatctattggcaaatttttgaccagagggcaatttagagcaagt

SEQ ID NO: 216961 - DNA, 503 bp, Glycine max
aaaataacacacacttcacacatcattacgacaattaaaagaggtgtggaaattttcaaatagacagagcatactcaacaagagggtcatgtctaatttcctttattgaattaaacaaacgaacaaacgaaagaaaacacaaattccagatcatgcagaggattccgcattttcagaagatctggcagtagcctgtggaacagaaaaagctggcataagagtattaccagcaatttcaaaatcttgagaaattcccaagagaatatcaaaaactgtagactgtttgggattgtcaataaggaaactcaagtgccatgaagtttgatttgcccactcagaactccacatttcaaaaccattattaggaccacatacctctattgggaagatcaattcccaggaatgtggttccgattttgtccacttacatgcatcgaaatgctctgtactgttgctgtttgttaaaaacacttgtaccaatgaggcccaatcactccttttga

SEQ ID NO: 216962 - DNA, 557 bp, Glycine max
  unsure (1)..(557): unsure at all n locations
atttcaaacgcatatccaatttttgcacattagggttatgaaaatccccgagaatgaaccggtcgtattgtctgtgccaattgccatttagctaataagcccgtggatattgaggttccacaagcggtacttcctgatactgtatttgaagcagttgttcgaattccttatgatatgcaagtgaaacaagttcttgctaatggtaaaaagggagctttgaatgtgggggctgttcttattttaccggaaggttttgaattggcaccccccgatcgtatttcgcctgagattaaagagaagataggcaatctgtcttttcaaaactatcgtcctacaaaaaaaaatattcttgtggtaagccctgttcctggtcaaaaatataaagaaataacctttcctattctttccccggatcccactactaagagagatgttcatttcttaaaatatcctatatacgtangtgggaacaaggggaggggtcagatttatcttgacgggagcaagaaaataataatgtgtataatgctacagcagcgggtatggtaaaaaaatca

SEQ ID NO: 216963 - DNA, 595 bp, Glycine max
  unsure (1)..(595): unsure at all n locations
ggaggagaaagacttggagctttccagtgctaggaaaatgctgggggatgttaacgaggaaatctatgatcttaagatgcttatgcacagtaaagaaacccagctcattgaagcaaacagtatgctaagggacaaagatgagcatgtgaaggtaatccagaacaagttgaataatacaaaccagaaggcttttgaggctgaaactgtggtagaaagaattttagatctcacaaacagacttgttgcttccattaaggatgaagatatgaactcatcaaaaccactactagatgaaatgggtaaccaactacttgatcaactattggagaaacctgctaatgaattgaaatggcaacaaaaaagccttgagaatgagcttgagttggccaaggtaaccttaaaagaaaaggagatggaagttcttgctgcacagagggctctaacgataaaagatgaggagctgaagatgacactttcaagattggactcaaaagaggaagagttgaaaaaagtaaggggaagaagtgacagaaagactccatgatcttaanaggcttgatgcttgggcacaggagagaatnggcgagaaaagctt

SEQ ID NO: 216964 - DNA, 493 bp, Glycine max
aagagtaacactttaatagtaactcctcatgtaatgattgtacgtggcgatatcttgtagtagagtaccaaaaacagatgtgatcactatctgtacattgtacatatcttgcaaactaagggaagattttatgatctaccaagggacaagttagccttgcaatggctttgggagcaaaaagatatcaaaatacaataccccccaacacacacacaactttcttcattacctctctctcttagtttgcaggaacaatacccgcctgcatcacaagctgctcagacaaagatgagaggcgagcaactcttgcttttacctcttcgaaacattcagggttattggtgtcggggatcaaatcgggggctttattaccatcagggacactgatgtagttatcagcttcaacactcatgatagctttgttcagaagttgtcgactcatttcagccagtttttgtagtgcattggtggcagcttcaacttaagctgagct

SEQ ID NO: 216965 - DNA, 589 bp, Glycine max
ttcctttctttttattcttccctttcctgagtcttccacattattttccttcttctgatcaagaaattttggtggcagaccctgtgagaaatattaaagacgggccactttcaaaatataccatggagccacaattagaatcccctttgggaagaaaagattctacaggaagtgccgattcttctaagccttcaaagcatgtcattgagacagctgcgccctttgaatctgtcaaagatgctgtgtccaagtttggaggaagaattgattggaaatctcgtcgaacccagagtctggtggaggagagaagcaagctcgtagaagactttagaaaggaagaaactgcagaggaattggaaaacactaagaagcttatagaagaactcaaaactagcttagaaaagatagaaaaagatgagcttcaagcaaaagaagaggctgaacgtgtgattctcaaaattgaagagatggagcaggacattgtaagtgaagctagtattgaagcccaggcacaacttgaggctgaaaaagccatgcttacagaagcgctttcgggagttgaattcgttaaaagagaactggactcact

SEQ ID NO: 216966 - DNA, 467 bp, Glycine max
gattccatatatgctggtgggtcagctttcaaaccatgcagtaaggaggaagctgattccaattttgatttaagaaccctggctgacaaaacttgctcattaagtctttggagctcctcttctacttgttcaagttccagcttcaaattgttcgactcttgatcaactactcctagtctttgttcttctacttccaaatgcgcggttcgcatggaattcaacgcctcttttgttgcaatcaactcagcagtcaaatcttccactgccttttcaatttgcttggatgctgcaatagtctcttctgcattattgattgctatatcccttccactcgccatagaagcatactccttacgcagtgagtccagttctcttttaacgaaatcaaactccgaaagcgcttttgtaagcatggctttttcagcctcaagttgtgccttggctttaatactagcttcacttacaat

SEQ ID NO: 216967 - DNA, 263 bp, Glycine max
cgcttcggcatcatctacaccgactccgtctctggaaccgccgaggtcggctgcgtcggcgaagtcatcaagcacgagcgcctcgtcgacgaccggttcttcctcatctgcaaggggcaagagcggttccgcgtgaatggtgttgtccgcaccaaaccctacctcgtcgcgcaggtgacgtggctcgaggaccgcccttctccctccaccgacctcgatctcgacggtctcgccaccgaagtggagacctatatgaaagacgt

SEQ ID NO: 216968 - DNA, 476 bp, Glycine max
atatccgcaaaattgtatgtgtcggattttttatttatcaagtagcggagtatataaaatgtatcacaaatgaaaaaaaaaaacaacaactagcgtttaggcacaaaaataatttacatctattttctgaatatattgagacgaggttacacttaaaagcaacaataccttaggtaaagtataagccccaatcaagaagaattggaagaagagggaaaaacgtctttaacagcagaagcagcagtgaggtaattaagcgtgttcttcaacgtttccttctccctcttcaatctggccgcagtgtcctccaattcaagcagcgcttgttgctccctaggcgcgccctcaaaggtgctcccaacgaaaaacgaaaacggcgtgggaaagaagtttcgtctcaaatccccaacctccttctccggtttccctcccaaccggttcgataaccggataacgtctttcatataggtctccac

SEQ ID NO: 216969 - DNA, 234 bp, Glycine max
cctacctctttttcttctctctcaacaacttcaccttcttcctcctcgatcatgtctgacttcaagggcaagtaccatgatgagcttatcgccaatgctgcgtacattggcactcctggaaagggtattcttgctgctgatgagtcaacagggacaattggcaagcgtttggccagcatcagtgtagagaacattgaatccaacaggcgagctcttagggagctgcttttcact

SEQ ID NO: 216970 - DNA, 560 bp, Glycine max
  unsure (1)..(560): unsure at all n locations
aaaaaactgaattgtgtgaatcgtttactaaacattgctattgtaaaagttgcaggtgcttataaacaccctaatattattgcagaatttatagctggacaattaaagaatagagtttcgtttcgtaaagcaatgaaaaaagctattgaattaactgaacaggcgggtacaaaaggagttcaagtacaaattgcaggacgtatcgacggaaaagaaattgcacgtgttgaatggatcagagaaggtagagttcctctacaaaccattcgagcgaaaatcgattattgttgctatacagttcgaactatttatggggttttagggatcaaagtttggatattttctaaataaagaaaaatatattattctttatcttaaatgtgctatattttatcttaaatgtgctatatttttttttagaaaacaaaaaatgaaaaattactcgatttttatttctccaaaatgatcaattttataagattgaatcgactaanaaatgaaatgaatcatttcatattgatagtattgctatgcttagtccccaaagaaccagatttcgt

SEQ ID NO: 216971 - DNA, 410 bp, Glycine max
attatatatatatctatctatggtctatgtatagatatattggttaggttatcaagtattaatctgaaataaataagaattgctgcttctaatacttataataattactacaaattctaataattactacaaaagggatatatgttagataaaatagattaattaatctatttcacaaaaaaataatgtatccatagcacagtttcgtcttataatacctcgggtgctaatgaaactattttagtgaaatttaactgtctcaattcccgggcgattgcacaaaagattcgagttccttttggatttccttcttgatcaatgacaactgcggcattatcatcatactgaattattataccggtgctacgtttgagttctttacaagtacgtacaattacagctctgatcac

SEQ ID NO: 216972 - DNA, 437 bp, Glycine max
ctggtcacctacaatatcatgattgccttgcaagctaaagcaaggaattatgagatggcattgaaactatatcatgacatgcagaatgcgggatttcaacctgacaaagttacttacagcatagtaatggaggcacttggccattgtggttatctcgaggaagctgaatcagtttttgttgagatgcaacagaaaaactgggtgccagatgaacctgtttatggtcttttagtagacttgtggggaaaggctggtaacgttgagaaggcttcggaatggtatcaggctatgctgaatgcaggtttacttccaaatgtacctacttgcaattcccttctcagtgcattcctcaggttgcatcgattgccagatgcttataatcttgtccaaagcatggtggctcttggccttagaccttctttggaaacttatacttt

SEQ ID NO: 216973 - DNA, 658 bp, Glycine max
  unsure (1)..(658): unsure at all n locations
aggccatgtacgtcttacttgannncnnnnnnnnnnntnnnnnnnnnnnnnncnnnnnnnnnnnnnnnnnnnnnnggnnnnnnnnnnnnnnnnnnnnnnnnntttntttttnnnnnnnnnnnnnnnnnnnnnnnngggnggggngtttntnnnnnnnttnnttttttttttnttttctctgnggaggacgacggttctgatggctccaccgccacctccgccgccaccaccaccaccaccaccaccaagcctaagaaaggcaaggccgcgttgcctcttaagagggacaggacgagatctaagaggttcttggaaattcaacaattgagggagcgtaagaaagagtatgacttgaagacagcaatatctttggttaaagaaacagctaaaaccaagtttgtagaaacagtagaagcccatttccgcctcaacattgaccctaaatataacgatcaacaattaagagcaacagtaaatcttcctaagggaaccggaaaacccgttaaagtggctgttcttactcaaggcgaaaaattcgatgaagcaaaaaatgccggagctgatttggtgggtggagaggatctgatagaacagataaaagcagggttcatggagtttgataaactaattgcttctcagatatgatgcctaaggttgc

SEQ ID NO: 216974 - DNA, 588 bp, Glycine max
  unsure (1)..(588): unsure at all n locations
gcagaggatgccgtacgacgccgtaatgcggtcgccgagtatcgaaagaaacttctccagcacaaggaattggaatccagagtccgatccgtcagggagaatttgcgagcttcaaagaaagagttcaataaaacagaagatgatttgaagtctcttcaaagtgttgggcagatcattggcgaagttctcaggcctcttgacaacgaacgccttattgttaaagcaagcagcggtcccaggtatgtggttggttgccgcagtaaagtggataaggaaaaattgacttccgggacaagggtggttctcgatatgacaacactcaccataatgcgagctcttcctcgagaagttgatccagtggtttacaatatgttgcatgaagatcctggtaatatcagctattcagctgttggtggcttatctgatcagatcagggaattgagggagtcaattgaactacctctgatgaatcctgagctctttcttcgagttggaattaaacctccaaagggtgttctcctttacgggcctnctggtactggtaaaacattggtagccagggctattgccagaatatagatgctaact

SEQ ID NO: 216975 - DNA, 511 bp, Glycine max
cacaacaggaggacgcatctggtgtcgaacaaactgcaccttcgacaacgcgggacgcgggaagtgcctcaccggcgactgcgagggtgttctggagtgcaacaaaacaggtacacccccgaacacggtcgttgatttcgcgttgaaccagtataacaacctcgacttctacgacatctccctcgtcgacggtttcaacgttcccctacagctgaccccgacctacaactgcagttccgttaaatgcgccgccgacatcatcggagagtgccccactcagctccaggttcctggcggctgcaacaacccctgcacggttttcaatacgactcagtactgttgtagcaccggagctgctgggtgcggtcccacagattattccaagttcttcaaggagaggtgccctgatgcctacagttaccctatggacgatgcaaccagcatgttcacttgcatgggatccgattatagggttgtgttttgcccttaattaattcaacatcatcaacta

SEQ ID NO: 216976 - DNA, 465 bp, Glycine max
gccaatacccatgtgcaacgaaattcaagcccaagcccaagcccaagcccaagcccaacctgggtttaagctcgtcggtttcaaaaacttcgtccgaaccaatcctaagtcggaccgctttcaagtcaaccgcttccaccacatcgagttctggtgcaccgatgccaccaacgcctctcgccgattctcttggggacttggaatgcctattgtggcaaaatctgatctctccaccggaaaccaaatccacgcctcctacctcctccgctccggcgacctctccttcctcttctccgctccttactctccctctctctccgccggctcctccgctgcctcctccgcctccattcccagtttcgacgccgccacctgccttgccttcgctgccaaacacggcttcggcgtccgcgccatcgccttggaagtcgccgacgcggaagccgctttcagcgccagcgtcgc

SEQ ID NO: 216977 - DNA, 513 bp, Glycine max
tctttttttttttttttttaatcaagtaatttttcaaagtatttaatagaaaaatactatccgggaagtttctgagatttcattttcatacaagggaggacactatcattgtaattctatgtattatagagtataaacaccctatgccacattgattcctgattaataatttccacaaaggaatatttatattattagggaaaaattgcttgaattccttccaacaaaaataattcgattaaaatccaattaaaatggcatgctctaaaatattgtttttaaaaaaatctctagaggcaagcaacttcaataatttcaacttctcattctttaccatgcaccctatcctatgaattatatgtataaaaatctctggcctgtccccaacaggcttggtgaaaatctgaagcaaagtgcccctgatcatctctgtcaacaagaataccaagcttcttacactgcttaatctggtcaacgggcaacacatcaacggcacggttgaggaggttggcg

SEQ ID NO: 216978 - DNA, 471 bp, Glycine max
gcgactcgatcgccgtgggagcgttcggtgctgccaaccacaacgttctcgtctggtgctccgccggaaactcaggacctggtccttccaccgctgttaacatagcaccgtggattttaaccgtcggagcttccaccgtcgacagagagtttccggcagacgtaattctcggagacggaagagtcttcggtggcgtgtctttgtattacggtgaaagcttacctgattttaagcttccattagtttatgctaaggattgtggaagcaggtactgttacatagggtctctagaatcttccaaagtgcaaggaaaaattgttgtttgtgatagaggagggaatgccagagttgaaaaaggtagtgcagtaaaacttgctggtgggttgggaatgattatggccaacactgaagccaacggtgaagagcttcttgcagatgcgcatcttttagcaactactatggtgggtcaaa

SEQ ID NO: 216979 - DNA, 547 bp, Glycine max
caggtgagttgcgttacccttcgttcccatagcaaaatgggacatggaaattccgaggaattggtgctttccaatgctatgacaagtatatgttgagtagcttaaaagctgctgttgaagctcacggtaagcctgaatggggaagcacaggccctactgatgctggccactataacaactggccagaagacactcaatttttccgcaaagaaggtggtggatgggatggtccatatggtgagtttttcctcacttggtactctcagatgctgttggaacatggtgacaggattctctcatcagccacgtcgatctttgacaacactggagttaagatctcagtgaaggttgccggcattcactggcactatggtacaaggtctcacgccccagaactcactgcagggtattacaacacccgattccgtgatggctacctccccattgctcaaatgctggcgcgccacggtgccatctttaacttcacctgtatcgagatgcgcgatcacgagcagccacaagaggccctttgtgcacctgagaagct

SEQ ID NO: 216980 - DNA, 554 bp, Glycine max
  unsure (1)..(554): unsure at all n locations
ataggataatggcaaaggtatctctgtttgtggtgtgtgtcgtttgcattctggcattggcctctgctcagagtgctacaaatgtgagagctacttatcatttgtaccaacctgagcagcataactgggacttactcgcagtcagtgcatattgttcaacttgggatgctgacaaatccttggcatggcgcagcaaatacggttggacagctttctgtggaccctctgggcctcagggccaacaatcttgtggcaggtgcttgagggtgacaaacactagaacaaacgctcaggaaacggtgagaattgttgatcagtgcagcaacgggggcttggacttggatattggtccgttccaaaagctggacactgacgggaatggcattgctcaaggccatcttattgttaactacgacttcgtcgactgcggtgactaaactttgactagctagcgttggttatatgcaaaaggaattgaataaagaaagccatacaagtgctntattgctgaatagtaataaaataaataaatgaaagcaagtattaatagtatt

SEQ ID NO: 216981 - DNA, 491 bp, Glycine max
aatactattaattactgctttcatttatttattttattactattcaggaataaagcacttgtatggctttctttattcaattccttttgcatataaccaacgctagctagtcaaagtttagtcaccgcagtcgacgaagtcgtagttaacaataagatggccttgagcaatgccattcccgtcagtgtccagcttttggaacggaccaatatccaagtccaagcccccgttgctgcactgatcaacaattctcaccgtttcctgagcgtttgttctagtgtttgtcaccctcaagcacctgccacaagattgttggccctgaggcccagagggtccacagaaagctgtccaaccgtatttgctgcgccatgccaaggatttgtcagcatcccaagttgaacaatatgcactgactgcgagtaagtcccagttatgctgctcaggttggtacaaatgataagtagctctcacatttgtagcactctgagcag

SEQ ID NO: 216982 - DNA, 437 bp, Glycine max
tcaatggccaccacagcagctctatccggaaccatggtgagcacctccttcatgaggaagcaacctatgacgaccaagagcctaaagacattccccaacgctctttttggtctgaaaggtggacgaggtggtcgtgtaacttgcatggcctcgtacaaggtgaagctcataaccccagaaggagaagtggagtttgaatgcccagatgatgttttcattgttgacaaggctgaggaagaaggcattgaacttccctactcgtgcagggctggttcttgcgtttcatgtgttgggaaaattgtgaaaggtgacgtggaccagtcagatggtagcttccttgatgatgaacaaatagaaagtggatgggttctcacctgtgttgctctacctaggtcagacgttgtcattgagacacacaaggatggagagatcgaatg

SEQ ID NO: 216983 - DNA, 497 bp, Glycine max
gaaaaagataaagaataactattattgtcttagacaacatgtgcataaacagtaagcattaccaaactaattaattaaagtgcaacaatttcacttgtttccacaaacatgacaaaagtaattaataaactcgcgatgatttcagctagctaactagccaatgccaaatcactctaacaaaatcaaaacacgacatagatagatggcattagaagagcaatggacaagattacattatgatatatatcgatcattcgatctctccatccttgtgtgtctcaatgacaacgtctgacctaggtagagcaacacaggtgagaacccatccactttctatttgttcatcatcaaggaagctaccatctgactggtccacgtcacctttcacaattttcccaacacatgaaacgcaagaaccagccctgcacgagtagggaagttcaatgccttcttcctcagccttgtcaacaatgaaaacatcatctgggcattcaaac

SEQ ID NO: 216984 - DNA, 368 bp, Glycine max
  unsure (1)..(368): unsure at all n locations
gaaagggaaggaaagatgcatatattcgtgaaaaccctaaccgggaagacaatcacgcttgaggtggagtcaagcgacaccattgacaatgtcaaagccaagattcaggacaaagaagggattcctccggatcagcagaggttgatcttcgccgggaaacagctggaggatggccgtaccctcgccgattacaacatccaaaaagagtcaacattgcatcttgttttgaggcttcgtggtggtattattgagccatctttgatggcactggcgaggaaatataaccaggataagatgatctgccgcaagtgctatgcccgtttacacccccgtgctgtgaactgcangaaaagaagtgtggtcacagc

SEQ ID NO: 216985 - DNA, 586 bp, Glycine max
ttttttttttttttttttttttttatatttttttttttttttattttttttttttgggtttttgtttttttttttttttttttttttcttttttttaattttttttttttttttttttgcgtggggaaagaaaaaaaaaaaaaaaaatttttttttggagggtaaaggggcgccaaaaaaaaaaaaaaaaaaatttttcccaaccaaaaaaaataaataattaaaaaaaaaagatttttttgttttaaaaaaaaaaaaattcttctcacaaataaaaaaaaacaaaccccccccaacaaaaatatttttgttaaataaatctagagggagggggggggacttaaaaaaaaaaaagattttttacaaaaaaaaaaggtttaataaatacaaaattaaaaaaaaacaaccttctttgtgttttttatagaaaaaaattgttacaaaaaaaaaaaatttttttttttgttaagggaaaaaaaaagaaacaaaaaaaaatattttataaaaaatttaaaaagaaaggagagaatttttatttaaaaaaacaaaaaaaaaaaatttttttgtcttttatgggccacccccc

SEQ ID NO: 216986 - DNA, 579 bp, Glycine max
aattaattaaaatatgtattccacttgtcaaattaatcagaattaagggtgaggacgtagtaaaatgaatatttagacatcttaaaagtaaataattacaaagtatgtttatctaattctaaagtgctataaaaattaataaacttattataaatatcaatatctactgtgaatgtattttaataaaaattctttaattatatggcactttagaattagataaacatactttgtaattaattaattaaaatatgtattccactagtcaaattaatcagaattaagggtgaggactagtaaaatgaatatttagacatcttaaaagtaaataattttgttatcatttagctataaaaccttctaagattgatttcactatttactcaatttattgacttcactgctggatatgaattcagaattgtggataagcattattatattgtggttgtggtgtgtgttgttcaaggtatttcgaggagaggcttgtgatgatcttggaggaactttctgtgagaccgagtatcagaagggtgtctactagagaaatgtgaaaacctttttattgccatgactact

SEQ ID NO: 216987 - DNA, 322 bp, Glycine max
  unsure (1)..(322): unsure at all n locations
ggggnnnaaaatganaaggaacttaaacaaatcagaagnagaatatgacgtatcaccaactcactagtcagcggccaccctttttttatttatttttattttttatattttttttataaatttttattttatttttggttatatggttttttttaataatatataatcctttctcacctatttttaattccgattctttttcttcaaaaaaaaaaaacctaaaaaaacattaaacaaaaaaaaaaaacccccacaaaaaaaaacaaaaaaaggcaccctttatattaactccaaaaaaaaaacacccccttttttttaatac

SEQ ID NO: 216988 - DNA, 579 bp, Glycine max
  unsure (1)..(579): unsure at all n locations
gtgccctccctctttctagctatttccctctcttaacacaattaacaaagatatatcatatcatatcaactccaaatgatgaaaaatattgggttgtttcttcttgtggtggtggctacttttgtggtggcagccacagctggtagcttttaccaagactttgaaataacatggggtggtgagcgtgccaaaatctatgaaaatggaaatcttctcaccctctccctagacagagcctctggctctggctttcgttccaaaaaagaatacttgttcggaaaaattgacatgcagctcaagctcgtgcctggtaactctgctggaacagtcactgcctattatttatcttctctggggcctactcatgacgaaatagacttcgagtttttgggtaacttgagtggtgatccttatactctccacacgaacgtattcagccaagggaaagggaacaagagacaacagttccatctatggttcgaccccaccaaggacttccacacatactncgtncaatggaatccctgcagcatcatattcttgtggatggggacaccaatanggagttcaagaatttgg

SEQ ID NO: 216989 - DNA, 562 bp, Glycine max
  unsure (1)..(562): unsure at all n locations
aactccaacaattttattaatgaagatagtttacaatttcagcacatatacacgggcatgaatataattttgcaggctataatcatcttttgtgatcacaaacaatggagtagtgctcaacaaattaaagcacaaaccaaccaacaataatcatagttttagttacattagtttatacaagaaagtaaatcaacgtaataggcatacacgtgtcacgtatatggggaccattttttttatatatataataatatgcaacattgaattgaataatgaacattctcaagcaatggaacattctggagggaggccttgtgggaaacgtctaatatcagtgcaatagttgtaaatcatgtaattcttttgcacccaatggatcttggccagccccgtggcgtccagtgattggccagtggaggaagaggttagggcattgaagtttctgtatgaggctgtgaatggggccttgctccaatccgttttcacaagcccaccccttgtggcccaatcctcagcngtccaaagctagagtatattctcatgggttgggtctttgggaaag

SEQ ID NO: 216990 - DNA, 402 bp, Glycine max
  unsure (1)..(402): unsure at all n locations
cagagaaggacaggcgccatttatatattcaaggagaatttggagttcattgggaagcacatcatcgaaggaaaaaagaggnacaatttaagcctaaacagttttgctgatttgactaacgaagaattcgttgcttctcacacgggagctctctataagccaccaactcaactagggtcgttcaagattaaccacagtcttggcttccataagatgagtgtcggtgacattgaggcaagcttggattggagaaagagaggagctgttaatgatattaagaaccaaagcagatgtgggagttgctgggcattttcagctgtggcagctgttgagggaatcaaccaaataaaaaatggccagttggtttcattgtctgagcaaaatttggtggattgtgccaac

SEQ ID NO: 216991 - DNA, 665 bp, Glycine max
  unsure (1)..(665): unsure at all n locations
aagggccaatcgctagtgcanttcgantgncnnnctncntnnnttnnttnnnnggnnaccnncccnnnntnnnnnnnnnnnnnnnnggnnnnnnnntnnnnnnnnnnntttttttttnnttnntntnttnttttttgggggggttttttttntttttttggtttttgcttctttnttgtgttttcccttcttaatttttcaactctaaatttgatcatcaccttcacccactttactcttactaggaggaacccttctctctgtgtgtgtgttctgagttgattctgtgcttcagctttccacaaagtaaagtagaaagatggcaatgattccttaccacctttgccgtttaccttaccaggattccctcaaagcacttgaggctgatatacagcacgccaatgctttggctgctgcaattcccagagccaagggtgagactcttcttcaaatgaaattggtttacaatcacttggctcccctcttcctgttatttctacaatggatggattgttcttgtgcaggctntctccataggtatctcgacctcttccacatacttatttacaaggtacataatgatggtagatcaatcatgcctactcatggaaggaaggctaccattgnggacttttattgctgtatattaccattctttcaacggc

SEQ ID NO: 216992 - DNA, 496 bp, Glycine max
aacttaatggatcttttatgcaaggaattccaagttaattgcaagaacggtgtctacaatggagatatatcacgggagtaagaagaatggtttttctggactaaaaaaccagaaatttctcttaccataacaactgtgattaaattaccagagtattttctttttgtaccagactctattcacatttgcagtccggaatttcctatctgtacattttttttttcttcttcttatttagtagaaaattaaatgaggtattcataatacattaggaaaagtgcatctgggtgatctttaggcagcttgctgacatagagataaaaacgcaacaagtcctctttagaaactgtttcagcatcaacaacatcattattacaagttaatacccatagatcctccgaattaactctcctcaagctaccacggcaaaaaggacaagactttgactttctgttccacttgcggtagcatttaatacacatggcatggcagcaac

SEQ ID NO: 216993 - DNA, 599 bp, Glycine max
agaaaaaataactgattagtctttctattataaaatagagtataggcattatttttttcttctaaaaaaataaaattaagaaattttcatggtaaccattcgtgcagatgaaattagtaaaattatccgtgaacgcattgagcaatataatacggaagtaaaaattgtaaatacgggtaccgtacttcaagtaggcgacggtattgctcgtatttatggttttgatgaagtaatggcgggtgaattagtggaatttgaagagggtactataggcattgctttgaatttggaatccaaaaatgttggtgttgtattaatgggtgatggtttgatgatacaagagggaagttcagtaaaagcaacaggaagaattgctcagatacctgtaagtgaggcttatttgggtcgtgttataaatgccctggctaaaccaattgatggtcgaggagaaatttcagcttcggaatctcgattaatcgaatctcctgctcccggtattatttcgagacgttccgtatatgagcctcttcaacaggacttattgctattgattcgatgatccccataggacgtggccaacgagaataattattggagac

SEQ ID NO: 216994 - DNA, 439 bp, Glycine max
atatattaatattatatggaaatgaaataaaaagatattaaaagatactaattataagaatttgaaagtgaaattataaagttattaaatgattaatcaatttttttctacctgttcctgtagtaaaaagagttccatctgttcttgaatagcttccttcaaaaggacttctgcttccccagtgaatgtcttggtagaagatatgatttctttgaattgaggtttattcgtgtttaagtaagcacgtaactcaacaagaaatttccttacctgtccaatttctaatgaatcaagataaccattcgttccagtataaatagttattatctgttcttccacggtaagaggagctgattgggattgtttaagcaactcgcgcaatcgttgacctcttgctaattgattttgagtagctttatcgagatcagaagcgaattgg

SEQ ID NO: 216995 - DNA, 442 bp, Glycine max
gtggcaacaaactcttattcccatttagtggtgaatttgccaaaccgggataagggtatccctattcaggaatacaatgttctcgttaagactccctattcctctcgttaaaacaccaccttctccctcttgttattattctcactattatcactatcgatatcgttatcgttgttatcatcctttccatcaccgttcccaaacacagagtcttatcgtctcgaagcgcggttccgccattgcgaagtgtcacgctgatagcgtgacacttcgtgatgacggagtctcgctcgcccaagagtcgttggagccacttccggcggaactcgcggcggagatgatgccgaagcatgtggcggtgataatggacgggaacgggaggtgggcgaaagtgaaggggctgtcaccatcggcggggcaccaggcgggggtgcaatcgctg

SEQ ID NO: 216996 - DNA, 492 bp, Glycine max
gcaaacaattttttatgaatgtcgaccaccatagcgtctttgggggtgttgaaatgaacttaatgcatctacaaactcatccttcccaaaatctggccagagttcccgattaaaataaagttctgtgtaggctaattgccacaacaagaagttactcactctaagctcgccactagttcgtattagtagatcaggataaggaaactcagtacaattagtttccaattcttgttcaataatgttttcgtttatgtcatccaagtgaatgtgaccatctttgactttcttggctacacttttacatgcttgcacaacatcatattttccactgtatcccactgccacaataagttggaatctcgaattttgttttgtatcctcttctgcactagctatcattctttttaaagactcaggcaccttgatgaatctccaatcacagatattctaattccttccctcttaaaagtttgaactttagagtttattgtt

SEQ ID NO: 216997 - DNA, 553 bp, Glycine max
  unsure (1)..(553): unsure at all n locations
gaaaaattgatgcgtgaaaggacattccttctgttggcttgttgttcaagaatggcgatgggtaagaaagatgtttggagagttgaatgtggaatcccttctggatttccgctcacagttatttgtaatagcatttttaatgagatgctcattagatatagctatgaaaaattactgcgccaggctaaagctccaagtatgtttttacaatccttcaaaaattttgtttctttgtgtgtgtatggtgatgataacttaattagtgttcatgaatatgtcaagccttactttagtggttctaaattgaaaagctttctagctggtcataatatcaccattactgatggtattgacaaaactagtgcaactttgcaatttagaaagttagcagattgtgattttctcaagagaaactttaagcagatgtctaatgttttgtgggtggctcctgaggataaggcgagtttatggtcacaacttcattatgtttcgtgtaataatctggaaatgcaagaagcttatctngtcaatctcgtaaatgtgttacgagaat

SEQ ID NO: 216998 - DNA, 558 bp, Glycine max
  unsure (1)..(558): unsure at all n locations
tgactagacaaatagcttcaccagttgaagtggactctggctacggagagcctattgagatgttgtcatgcccctctgatggcagtgactgtggcggagcatacatcattcgtcttccatgcggacctcgtgataggtacataccaaaagaatcactttggcctcacttgcctgaatttgtggatggtgctctaggtcacattgttaacatggcaagagttttaggggagcaagtgaatagtgggaagccaacatggccttatgttatccatggtcactatgctgatgctggggaggtagcagcacacttatctggggccttgaatgtgcctatggtgctcacagggcactcgttaggtcggaacaagtttgagcagttgttgaagcaagggaggctctctagggaggccataaatgcaacctacaagatcatgaggaggattgaggctgangagttgggtgtggatgctgctgaaatggttgtcactagcacaaggcangagattgaagagcaatggngactgtatgatgggtttgatctcaaagtggagaggaagc

SEQ ID NO: 216999 - DNA, 569 bp, Glycine max
attctctctgtgtatttccctacctctcccttcaagatgcagatcttcgtcaagaccctcaccggcaagaccatcacccttgaggtggaaagctctgacaccatcgacaacgtcaaggccaagatccaggacaaggaaggaatccccccggaccagcaacgtctcattttcgccggaaagcaacttgaggacggccgtacccttgctgactacaacattcagaaggagagtactcttcacctcgtcctccgtctccgtggtggcatgcagatcttcgttaagacactcaccggcaagaccataaccctagaggttgaaagctccgacaccatcgataacgtcaaggccaagatccaggacaaggagggtatccccccggaccagcaacgtctcatcttcgccggaaagcagctcgaggacggccgcaccctcgccgactacaacatccagaaggaatcaacccttcacctcgtcctccgtctccgtggtggcatgcagatcttcgttaagaccctcaccggcaagactattaccctagaagtcgaaagctccgacaccatcgacaacgt

SEQ ID NO: 217000 - DNA, 557 bp, Glycine max
ggggcatcttggaaggatcccgattcaattcctctcatggtcatgcaagctattttgggttcttggaataagacagcaggaggtggaaaacacatgggttcggagttagcacagcgaattggcattaatgaagttgctgagagcattatggctttcaacaccaattacaaggacacgggtctttttggtgtttatgctgttgccaagcctgatagcttggatgatttgtcttatgctataatgtatgagacaaccaagttggcttatcgcgtttcagaagatgatgttacacgtgctcgtaatcagttgaaatcttcactgctactacacatagatggaacaagcccggtggctgaagatattggccgtcagttactcacatatggtcgaagaatcccgtttgctgaattgtttgctagaattgatgctgttgatgccagtacgattaaacgtgttgccaatcgatttatctatgacaaggatgttgttattgctgccatgggtcctattcagcgtttgcctgattacaactggttcagacgtagaacctactggaa

SEQ ID NO: 217001 - DNA, 410 bp, Glycine max
aaaaaaataaaaaaataaaaataaaaaaatataaaaaaaaaaaaaaaaaaaaaaaaaaaaaaaaaaaaaaaaaaaaaaaaaaaaacaataaaataaaaaaaaaaaaaaaaaaaacaaaaaagatcaaaaaaaaacaaaaaaaaaaccctaaaaaaaaaaaaaaataaacaaaaaataataaaaaaaaaccaaaaaaaaaaaaaaaaacaaaaaaacacacccattgaaacaattaaaaaaaaaaaaacaaatataaacccatcaccaaaaaaaaaaaaaaatcataaaaaaaaaaaaataaaaaaaaaaaacaattcataaaaccaaattcaaaaaaaaaatttaaaaaaaaaaaaaaaaaaatcaaaagacaatgactaaacaacaaaaatttgttaaaaaaaataaaa

SEQ ID NO: 217002 - DNA, 527 bp, Glycine max
ggcgcagaggcacagaagccccttgacttgaccgaggagcttctgaaatggaccagcagcaccatctccatgatgatgctcggcgaggctgaggagatcagagacatcgctcgcgaggttcttaagatctttggcgaatacagcctcactgacttcatctggccattgaagcatctcaaggttggaaagtatgagaagaggatcgacgacatcttgaacaagttcgaccctgtcgttgaaagggtcatcaagaagcgccgtgagatcgtgaggaggagaaagaacggagaggttgttgagggtgaggtcagcggggttttccttgacactttgcttgaattcgctgaggatgagaccatggagatcaaaatcaccaaggaccacatcaagggtcttgttgtcgactttttctcggcaggaacagactccacagcggtggcaacagagtgggcattggcagaactcatcaacaatcctaaggtgtttgaaaaggctcgtgaggaggtctacagtgttgtgggaaagga

SEQ ID NO: 217003 - DNA, 280 bp, Glycine max
ggggaagaatgaaacctttttgaaatgatgattatcaacccacaaaaaggaaattttccatatgaggatgatgaccatgatcttaattaaaaaaggggtttaaatgcaacgcccatccttggaaggggaacaaaaacaaaattttgtgcccttggaacaaggagggcgggtttttttttcatgctaactttgggggcaccaccctttaatatttgttcttggggacccagcacttgcaagttgaagcactgaataaaagatgcaagaagtgttgccattc

SEQ ID NO: 217004 - DNA, 537 bp, Glycine max
accaggttctgtaaagataattgatggtgaaactataactctagagtctaactacagcagcagccgtggccacactggagtaatggggcttttctacctattggtggcagaacagcttccacaccaacacttcagatattcttctcgttcttcattttttatgaatataaatagtataattcattgatagataagttgtgagatgcaaatataagttgagtgtcatatcgatggtatcacagtatgtatcacggttaaaagaaatacagaaatacatatcgatggaacatatacttctcatattcggcagcaataggacaacacacgcaagaaccggcaaagagcatattttcaagtttaaggattgtagtaatgtgattatcaattatttgtattggtgagggtttgtaatgtttgtcttaaaccagtcttgcttattatggttgtgtgatatgtaatactatatatatcatgtttgctggaaataaagtggtcttatataactagaagagagaataaatcaagcttgtcgacagg

SEQ ID NO: 217005 - DNA, 560 bp, Glycine max
gcgaacgccacccacatcgcgaattagcaagcttctaagagaagccaaaaagggtgcacttttgagttcaaagccatggaaatttcctttggttttggattccataacgagtattgttgttaagaggccgaagaaatggaggagcaaggaggagaaagaacaagaggaggaggttttggtgatagaagggattgagtttggaagtgataaatatgtcaagtttgatgttcatattgatgatgatgaagacaatttgagtggtccggatgagacagagtttgtgggaagttttgtgaatgtgcagcatgggcatggccataatgtcaaaactagctttaaggtagggatatcgaaagtgctggagagtgtaaaagctgaagaagacgatgaggtgctggtttctttggtacctaaggtgggaaaaggggatgccataataagaggcatcaaaattgagtttattccaaaatactacgattattttgtgggtgtgaaaaatttacactttttacaaagtttgttgtttatgcttttaaagggagttttttatttttcttttt

SEQ ID NO: 217006 - DNA, 669 bp, Glycine max
  unsure (1)..(669): unsure at all n locations
aggggagatgatctcttagacnncnnnnnnnnntnnnnnnncnncnntnnnnnntnnnnntnnnggnnnnnnnnnnnnnnnnnnnttttttttttttntttttttttttttttttggggggggtgtttttttnntttttcgtttggaatgggaaccttcaccacgcgcgcgttggcgcagccgctccagaacgccgacgaactcatcgattccgtcgagacatttattttcgattgtgacggagttatatggaaaggtgacaaattaatagaaggggtgcctgaaacgcttgacatgcttcggtcaaagggcaaaagattagtttttgtcaccaataactcaacaaagtctaggaagcaatatggaaagaagtttgaaacacttggcctgaatgtcagcgaggaggagatttttgcatcatcctttgcagctgctgcatatctgaagtccattgatttcccaaaagataaaaaggtttatgtcattggagaagatggtatcttgaaggagcttgagcttgctggatatcagtaccttggtgggccggaagatggtgggaaaaagatagaactgaagccaggatttttgatggagcatgatgaagatgttggagcagttgtttgtggatttgatcgccacttcaactactattaaatccagtatgggaca

SEQ ID NO: 217007 - DNA, 424 bp, Glycine max
  unsure (1)..(424): unsure at all n locations
gaacaaaattcaattttcttcttaaatacatgacttttcccaccaccatggggggatactgtataaatattatagtcatacagctgcagctttcagggaaagaaaatctgaaattttgttggtatagaagtccggctgtatggagttgttagggctctgaagcatggccagtgtggtgacgcctgagagcacaagaagagttttgcaaccaccattttgtccaaacaagatatcagtgtctaatctgtccccaaccatacatatctgtgacttcgaaatgccaaatttgtttgccaagtaatccatcataaacgttgagggttttccaacaactaatggttcacgttgagtagatccactgatagcgccaaccattgagcccncacctgcccattcttgagcatctgtgagatgagtaacagca

SEQ ID NO: 217008 - DNA, 466 bp, Glycine max
gttaatccattcaagggagcgaaagatgagctatggtgaagaaatagaatcggtggtggacctagagagtattggcttggctaaacatgcagccaatgctctttccaagttatttacaacttgagacatagttggtctatctcgaccttcaagcctaacacaatcagcagccaaataaccgacgtaggccactgcctctatctcaaagggcgtgggtggggccactcttctgtccaacactctgtgaatctcatcttggaaaatgaatggcaccacaaaatcaacaacatttcgtggcaccccattctcgtttttatggatggccttgtagccggagagcaactcaagcaaaaccaccccaaagctgtagacgtcactcttgggggtcaaatgttgaagcctatagtattcagggtccatgtagccaacagtgccagcggccagaagtgaaaggtgggcatcctca

SEQ ID NO: 217009 - DNA, 584 bp, Glycine max
attaaattgaggattcacatacccttcagtagaacccagtgcggtgccaccattcttcttttctccgttactgcaccgaccgctactctctccggcggactttattcaaaaagaaaagaaaaaaaacgatataaattaaaaaagtttcaagtttttataatatccaaacagaaattccttattagttagggtctaacgtttgggatacttaatcctacgttagttgtgcttcaacctattaccgcattcaattttccagaaaaataaaaaaaaaagaaagatagaaatggcgcatattcctcagacccccaccaatgacgcggcggcttctggtgcaaatccgtcgatgacgaccatctcgttgtacgtcggggatcttgaccacgacgtcaacgatccgcagctctatgatctcttcaccaggttgccaagtcgtttccgttcgaatttgagggacgtggccacccaacaaatccttggttacggctacgtcaatttcagcaacgctcgagatgccgcaaaagcaattgatgtgctgaatttcactccgctaaatggcaaaaccattagaataatgtactcta

SEQ ID NO: 217010 - DNA, 399 bp, Glycine max
  unsure (1)..(399): unsure at all n locations
gagcatttcagacaaacatgggggattattgaaagaagattagtggagagggggggttagtgaangttnanccaaaacccatcaatcgtttcacctcaaaagtggttgatttgttagacaaattggccgtgaatctcttgtatgattcttcactgccccatcactacctcactgttaattttgctcccgtgagtgatacccctccaaccaaggaccttcctgtcaaagggtaccttcctgattgcttgaatgggtagtttgtcatagttgggcctaatccgaagtttgctcctgtatgcttgatatcacttgttttattgatatggaatgatacatggcttgcgcatcaaatatggaaaacctacatatttttcccgttttgtgaaaacttctctcctt

SEQ ID NO: 217011 - DNA, 479 bp, Glycine max
atattaaaaacttaaataatatttaatcattattgattcaatcgctggtattcaaccaatacctccattgactcaactaccaatccggttttaaaaacattggtttaatgagatactggatatatatggtacaatcgattatttgttgtatacaaagactgaggcaggacggtacagtgaggctgccaaaattatcacagtttaccctgctcttgcagttgttcctctgtcacaaagaaggcatggaaaccatatggaactctatgcggcaattcgacaactgcaacaggatctgctgacattgtttttgcattgatgacatgcacaaatgattttccggtattttcatcgcgtacaaaacaaatcaagtatccatcatcttcttcagaatcggtaccagggacacgagggacataaacagcttccgagccatacttccctggtcccaagtcatagagaccctgaacatttcctcctac

SEQ ID NO: 217012 - DNA, 563 bp, Glycine max
ataagaagctcaggtcaaagagacttgctcctgttatgatcaaggaagtcaccaggagggttcatttggagaatatttggcaggcggcttatacggcaggagttgttcttccaacgccgatcacaacttgtcagtattggcaccgatcgttgaatccgaagaagctaattgatgttggattttcaaggcttggggctaggatgacgatgagccgcactataaaactttacaaattgcctgattcaacggttactcctggattcaggaaaatggagcttcgggatgtccctgctgttactcggctgcttaggaactacttgagccagtttgttgttgcacctgattttgatgaaaatgatgttgaacattggcttcttcccaatgagaatgtggtggatagtttcttggtggagagtccaaagaatcatgagatcacagacttctgcagcttctatactctcccttcttccatccttggaaatcaaaattactcaattctgaaagctgcttattcttattataatgtctacaccaaaactccactgactcagttgatgaatgat

SEQ ID NO: 217013 - DNA, 402 bp, Glycine max
atgaagaaacaacaggggggtttacagaaacaaaattatgattcttgggatgacactctgaaagcaaaactgtgtattataaaacttaaacaccctatgccacattgattactgattaatcatttcaacaaaggagtatttgtgcacttccaatgggcttacgcggttcttttagctaacaaagacttcttatatgctacaatggatttgaaaagcttacaaaaattggctttcccaaaacccccacatgcacccttctggtacaccttcctttattaattctgcaccatgcacccgggccgctgaattatctttatgaatatcggtggtctgaacccaacaagtttggtgtacatcggaagcagaagggccagatcatatctgtcaacaagaatgccaagc

SEQ ID NO: 217014 - DNA, 372 bp, Glycine max
gatttctctctaagctttgctttctatcttctccttacaaaaaaaaatcctttccggctcttgtcccaataattagcaaaagaagccaacagaaaactattccatatagttttcaattcaaacttgttttgattttcattttaactcaatggagaacagaacaagctctgtactcccacctggcttcaggtttcatcccactgatgaagaattaattgtttactatctttgcaaccaagccacatcaagaccatgccctgcatcaatcatcccagaagtggatatctataagtttgatccatgggaattacctgaaaaaacagactttggagaaaaggagtggtacttctttagtccacgagagaggaagta

SEQ ID NO: 217015 - DNA, 513 bp, Glycine max
caacggcgagggcaacgtcgtaggttgggctgcctcgtccaacgaccccaacgccggtgtcgggggccacggctcatgctgcgccgagatggatatctgggaggccaactccatcagtacggcagtgactcctcacgcctgcagcacaatcgagcaatcgcgctgcgacggtgatacatgtggtggaacatactccgcagaccgctatgctggcgtctgcgaccccgacggctgcgacttcaacagctaccgcatgggtgtcaaggacttctacggcaaaggcaagacagtcgatacctccaagaaattcaccgtggtcactcaattcatcggcactggcgacgccatgcagatcaagcgcttctacgtccaaggcggcaagaccatcgcgcagcccaactctgctatcgctggcgtcgagggtaacaccatcaccaccaagttctgcgaccagcagaaggaagtcttcaaagacaggtacacctacaaggagaagggcggaactgccaacat

SEQ ID NO: 217016 - DNA, 328 bp, Glycine max
ggacttcacatttagattcaacgagtggggattgcgggctccaccacctactgttcaaactatgtacaccatcttcaatctatgtacaatatccattgggttgggcgagatattctagccaaaagtagagttgagaacaccaaacttaatgttcgagtacacaacagtcgcatcaggactcttgctctccacatcagccggaacacccgacgtgacctcgcactctccacgaccgctaccaagatcagtctcagggttcttgtcggtagggtaagtagagtcgagccagagcatgttggagtagtgggcatcccacagcgacataaca

SEQ ID NO: 217017 - DNA, 378 bp, Glycine max
taggagtgtgctgttccaagtcttttagctttgtgggaatcgatcttaaggcggggggtggtgagcaaaaagaccaaaagaacactaccaaaatccaatgacatctacctcaaattacttgtcaagctttatcggttccttgttcgaaggactggcagcaatttcaatgctgttatactcaagcgcttgttcatgagcaaggttaacaagcctccaatttctttgtcaaggctaattaagtatacaaaggggaaggaggataaaatagctgtaatagtggggactgtaactgatgatatcagagtatttgaagctccagcatagaaaattacaccacttaggtttactgagagagcccgttcacgaataacaaaggct

SEQ ID NO: 217018 - DNA, 509 bp, Glycine max
  unsure (1)..(509): unsure at all n locations
ctcgagccgaatcggctcgagtttatctttttttctgtatagtctttttatacgatattttaagagttacttgtaacgtaatacaaataaactcgagtatggatattgtcaggaagactatttgactttgttttttcaaccccccaataaattcgaatattatggttatgacactgtttttttcagatttcatttttctataatagagagttctattatagaaatttcgattgtaaaatacaataaaattggattcgatactaaacataaaatagatatctatatagatagataatttgaaacaaaatcaattaaaatatggaaaaggtactctagggcggattnttttgtctttttctagagtccgattcctatttctttttgtttgcgtcgaaatagaaatattctaaaaatatcaataaaataatcttttttaacccctttctgaaaaatactatatcttagtttctatttttctccaacttagaatatttctgccatataatatt

SEQ ID NO: 217019 - DNA, 416 bp, Glycine max
caaacacatgcttgaacttgaactattgtgttttataggctgtctctgcccaggatcaaggtggatattgtatcacgagctatgctatttccgtaggctatactagcgctaacattaagcacaccgtgctcaagtgcttaagtgaagagtgtaactaatgtgaaaacagttatatttctgacccccaactttgaactgggaccaacatcggctgccaataaatacgattatgacactgattttgcaagagagcatatagcactccatactttcaatgctgaatgcggcgatgaatcatagaaccctgtgcctcttcatgaaacttatctccaccactgtgttagtgtcagatactatcaagctaaatatgagaccacacacacaaactatgatggacatacgatacttaacaactc

SEQ ID NO: 217020 - DNA, 438 bp, Glycine max
ggacgatatgatttcatgaaacctatggaaattatatgcgggcaggcccaagctagtaatcttgctccgggctattttacttcctaatgagaaatttttttggtgaaagatgataccttggcgccggggaatccttatattcttgatgggctggatcacctcatgcatctaatttatttacacgaaccatctgttttattcaactcttccatatatgatacaatcataatatgatctatactaaagcttgtcctgttccgtttgctgtaaataccttaaataaagtatctctgcattgcaatgactacattgaagcctacaagtgacaatcaattgaaagccctcatgtgtatgcaattaccgacacagccattctacaaatgatacggcatgaactgaatcactctataattattagtgctgagagtggtgcaagga

SEQ ID NO: 217021 - DNA, 321 bp, Glycine max
gtgttgtgaaagcatttttgtgttttacactaagctatcctcataggggcactgtaattatttgacaagataagcgtctaaccttagtaacattgtcacatattgtgttcattttggaattgtgcctctaaaattctattcaatttatctatggctgcctcttcttatgctatgcaattaattctggcaaaccctttgatccgtattttcagcggctctagggtgaaccaatttgtcgttcctgctttgcacatgattaaggattgtaggcctgtgagataattccatggctcatgaagaacaaccaagtgagcctgcatt

SEQ ID NO: 217022 - DNA, 506 bp, Glycine max
aatgcgaattagtttggttatgattaacgaaataatttggggggggtgattataataaacacacgaagtacaaatcaacattggtctctctaatcacaaaggagattaagtccattgtggtgtgccttcatgactgaattataccaaagtactacccttaacatactcagtaaaagccagagcaatcaaacccaacatagcaaatctcccattccacagttttgcatctgaggacatgaaccctttggacttagactccacgctgacaccttggaagagtggaatcaaggaagcaagggtaaggtccacacttgttcccaagaaccatgggatgccaccattggatatttgttctaacacaccttgccctttggctacttccactggcatttgaagtcacaaacccaatcatggccaaccttcctttgatcctttcaggtgctggcccactgaatgccaacacattagaaaacttagtgctcacctttggtgatggagcagagact

SEQ ID NO: 217023 - DNA, 353 bp, Glycine max
caagcaggcaccgaatgtcatggtcacctctctgcgtcggtcatcgggattagctccatgtctggtatcatgcgtcacgcgcaagggcacttcagctacaacgccgcaaagggtggcactgttcacctgacaaagttgatgtcggccgagtttcagaagctgaaaattagagtcaactcgatcgcaccaggttacttcccctctgagatgacggcgaaggagagcaacgacgagcagaagagccatgtgcctgatgagaagatccaggagaagggccacgttcctcacggacgagctggccatgacgaggagatggcacaggcggtgctgttccttacgaagaacttctatgt

SEQ ID NO: 217024 - DNA, 481 bp, Glycine max
ctcgggtatcattgctctcattattgttcatgatgtgatctatccacgttttgtgcaagtgttcgccaggcgccgtcgttatgcatgtattcgtcacgagaagcggggtctgttaacgcccagcgacgacgttaaggacaccaccatcgacagcgatgatctcaccgttgacataggagttcttcgtaaggaacagcaccgcctgtgccatctcctcgtcatggccagctcgtccgtgaggaacgtggcccttctcctggatcttctcatcaggcacatggctcttctgctcgtcgttgctctccttcgccgtcatctcagaggggaagtaacctggtgcgatcgagttgactctaattttcagcttctgaaactcggccgacatcaactttgtcaggtgaacagtgccacccttgcggcgttgtagctgaagtgcccttgcgcgtgacgcatgataccagacatggagctaatgacgatg

SEQ ID NO: 217025 - DNA, 393 bp, Glycine max
tcttttttttttttttttttttttttttttttttttttttttttttgaaaatgaaaggggggaattaggtaagttggtagctggcagtactctttaatatgccctcggatcgataaccagtcatatccatagagaccccaattgaaatagaacaaaagaaagcccatcggtctatagtctgtacgccgaatccttttcccgtcactccatgttcgcatggtatacggatttaccggggtcgaaaagccaaattgccccatgtaacatgccgccttttgcgcattccatttctatcaatccctccaacactgtttgtccacagcgacctgtctagaacaagcagtccaagcaacaacagcacgccagaccagcgcacaatccagcgaacaagcc

SEQ ID NO: 217026 - DNA, 505 bp, Glycine max
caggcaagtgggttggcttgtgtttttttgttatatatgttgggttgtcctgtgctgggtctggtctcattctccttattaatttgtgttaagtagcaaaccaaaaccaaaccaattttgtggttgtgtgtgagtgagaaactgagaataattatcaattatgggcctctcaaatttcccaattagtgcatctgaaggggtgctacctgtgcttgtgataaacacggttttctcagtggctttgttgaagagcatgtttagatccatgctccaagtagtgtttggtggcagtgctgctagtagttcttcaaacattgaacatgatgatgaaattagttcatcatcatcatcacgggaaaggagggtgtcaataactcagtacaagtcattgtgccacagtcatgacataggaggaggaacaagtgtggctatggtggagtgctgcgtttgtttgtgtcgttttgaaaacaatcaagaggttagtgagttgccttgcaagcattac

SEQ ID NO: 217027 - DNA, 509 bp, Glycine max
aatgcaatgtcatctctcattatgttccatatataaaagctaaaacatagagaaactgagttgggttgaaggaggtgtacaaatctaaaagtaaagaaatgaaaagaggcattgattcttttcactataacaagttaacaatatatagcaacaactacaactatagctagctggctagctctaattgtaaatttgaaactaattaacctttgtatatgtctctagtcgatggaacgacacaaggggcaagtgctgtgtttgttatcaaactcaaaccatttgtctaagcaacctctgtggaagtaatgcttgcaaggcaactcactaacctcttgattgtcttcaaaacgacacaaacaaacgcagcactccaccatagccacacttgttcctcctcctatgtcatgactgtggcacaatgacttgtactgagttattgacaccctcctttcccgtgatgatgatgatgaactaatttcatcatcatgttcaatgtttgaagaactact

SEQ ID NO: 217028 - DNA, 470 bp, Glycine max
ggttgctgtataaaacaagaaagattttgttcatacccaacttaccgacatggacagatggaagggtcttgcctatgatatctcagacgaccaacaggacatcacaagaggaaagggctcggtcgactcccttttccaagctccacacgatgctggaactcactatgctgacatgagctcctaccagtaccttaccactggacttcgccagtacttggacaacaacatggatggattttacattgctccagcttttatggacaaacttgctggtcacattaccaagaacttcatgaccctgcccaacattgaggtttctctcattcttggcatccggggaggcaagggacaaggaaaacctttccaatgtgagctcggctttgcccagatcggaaccaaccccatcatgatgagtgctcgagagccggaaagtggaaatgcccgatagccagcaaaactgagcaggcaaa

SEQ ID NO: 217029 - DNA, 411 bp, Glycine max
gtaggacaaacggaaaaggccccaaatgcaatttaaggggacactttacctcaaaattatacaggaagacagtccaatatgaaaaatatagtaaaatcatctcaaacttggcatcttctctttgcacctaagacattgagaattctaagaatgttacacgcaagtcccatcacaacttctaacacttggatcagcacaaccttcaggaacagaaatatttacttgccaagtttgctttgcctccaattcaagattggaagaaagttcccctgttaatagcatcctcgttagcatttacaagtgcagcctcgttcaagtacttggcagccaattggactctcttgacattctcttgatcttggacaagcatgttaccatacgtcaagagctgctccagagtcatcttgggct

SEQ ID NO: 217030 - DNA, 533 bp, Glycine max
cagcataaacgggtggtgcctctctttctcttccccagccaaaacctctctcaggaagggggcattacgcccttccgtcttcgcaacccttaacactccttcttctccttcctcttcatcttccttcccctctctcattcaagacaggcctgtttttgctgcccctgcccccatcatcaccccaactgtgagagaggatatggctaatgaatactacaaagctattgaagaacttcatatattgctgagggagaagagtgaacttaaagcgacagctgctgaacaagtggagcaaataacagcttctctagggacattatcatttgatggcatcctatcatcagaagccttacacaggatcaaagctggtttccttcacttcaatacagagaaataccaccagaatccacctttgtatcgtgaacttgccaaaggccacagccccaagttcatggtgtttgcttgctcagactcaaaggtgtgcccatttatgtgctagatttcccaccaacaaaagcctttttggtcagaaa

SEQ ID NO: 217031 - DNA, 564 bp, Glycine max
ataactagaggatttccaactcttattaaaagaagattttccgacatgcataaacgcagttcatagtttcatatatatctttataaatatcatatggtgatgaaggtggctaggcctcttcattgcagatacacacgacctctaagcatggcccctatagcttccaatggagaatggtggccacatctttaacggagaaagaggatgcaaggccaaactgaaggccccagagctcaaaagatcctttaacaaagtcatagtatcctcctttcagtgacaatgttttgttcaccaagccatctctaacaaatgggtaagttagcaggtttccaagggaaacattcacagattccttctcacagtgtgagcacaactcagcaaaaggggcatccccatgctgtgtcttcacctttgcctttgcaggcaagccaattttgacccactcctcaataaatcagtagagtaggttccatcatatgggaaagacagaagccccttaataccaccaaagcactgtgtccaatgaccacaatcttcgacaccttaagatgcaaaacagcatac

SEQ ID NO: 217032 - DNA, 516 bp, Glycine max
aattatagcatctggtttccgtttaaatttgtatttgggtcctgtcctggtagggatctggtatggtgcacattggtccttgatgcccacaatcacttctgagatatttggtgtaaagcatatgggtaccatcttcaatactattgctgcagcaagtcctcttggatcgtatatactttctgtcagagttgttggatatatttacgacaagcaagccgataaagaagataatttgtgctttggcatcgactgtttcatgccctcattttttatcctggcaggtgtagctcttcttgcatttttggttggtttggcattgttcttccggacccgaaggttctataagcaagttgtgcttagaagattaaaacattatgcaggatgatgaagattgtatttgcctgcatttcaactctaggtaaaggctgaggaataaatataattatattaatgcagttttctagagggtgtctatgaagatgatttgatttgtgtattttacatgttataagagaa

SEQ ID NO: 217033 - DNA, 503 bp, Glycine max
gggagtttccttggcggtttaatttgtcttagggttggcgatagccccagctggatccgaggctaaaagctagaaactttatctgtttttttgtgctatggatagacaagaaaatttgttagcattctccatgcctagccagctgttatcaattgacgaggaactatggcgaatggctgaagagagggcacaagagatactatggacaattgaaccaattgtattatctgaggtgaacagaaaagatgttattgattatgttcagaggctgatcagaggttactatggagcagaggtcttgccattcggttctgttcctctaaaaacctatcttcctgatggagatattgacttgactgctctcagtcatgaagatgcagaggaggatttggcacaagcagtatgcaatatacttcaaagtggagatgaccctgaatatcaagtaaaagacatacaatatatacgtgcacaggtccggcttgtgaaatgtacagtgaaaaaca

SEQ ID NO: 217034 - DNA, 514 bp, Glycine max
gagaataatcatattaaatattttatagaataaatggcccgatcatttatcaggggccaagcttcggtagaagagaaggttcctttggaacacttatttctatttcagtataccgggtctctttctttcatttcaaaaaatttatagaatttcgattttgaaatgaaagaaaagtgtggggataaatataaatgacaaaaagatattggaacataatcttggaagagatgatggaagcaggagttcattttggccacggtactagaaaatggaatcctaaaatgtcaccttatatatctgcaaagcgtaagggtattcatattataaatcttattagaactgctcggtttttatcagaagcttgtgatttagtttttgatgcagcaagtgagggaaaacaattcttaattgttggtacaaaaaaaaaagcagcggatttagtagcacgggctgcaataagagcttcgtgtcattatgttaataaaaagtggctcggcggtatgttaacgaaatt

SEQ ID NO: 217035 - DNA, 425 bp, Glycine max
ttattttttttatttttttttttttttttattttttattcctacttctgtttctggtgcttgggagagtgctataacaaacacactgtttcctggggaacgaaaaggcttggttttgaaagcccaattcaaattgctttggattgagcgggcacatacacatgaaaaacaatggtgatgttgttgaaagtgaatggggccatggagctaatcttgatgttctggaatcaaaaattgctttaaatacttcacacggcttttaggctacttggaaccgatcacaatgaggacttgtaactggggtccacacatatgacattggtctttgtgagacaccaaaatagagagctaccatcatccagccctccttattgctgacggagtgtcccccatgcgcgcttttgattttcggatggatgaatggtg

SEQ ID NO: 217036 - DNA, 405 bp, Glycine max
ctcgagccgttttttttttgccctatctcatagggtttccaccctctgtctcatgcatttttgctctcacgagttcttctttgccgttgccctcttattctttgctgtatttggagccttcttttgtgtggaacagagcagatttcacctccctgggttttttgaaccgtgcccatgtctaaagttttcagctttaccggaaatgatgatttctaccatgggggccctatttatcctaacccgaaggaaccatgtctcttcttgtctcttggccgtcaagttgatgtttaccttcctcttcagaagaggtctcgcttcagtgttccatttgatatcagcggagaatggtttgagcagaagcagaagccacagacatttattgaatctttgccagatgaatgcctt

SEQ ID NO: 217037 - DNA, 427 bp, Glycine max
  unsure (1)..(427): unsure at all n locations
aaaaaagaaactaaccgtatctganacgagtagacgtgcacgcacgccccgaagctcgaattcgctcgagtaaggagtttggctttttcacgctaaacttgcatgaatatatgaaggatctgggctctctttgttcatggcccatcaactttctccaccgagagagaaatggaagcagcatcatggccgacaataatactactactgatcattatgatatcggcatggaagacgctgaactggatatgcctgacgccaaacaggctcgaaaggcttctgacagaacaaggcctttatggcagctcatacacgctccttgttggggacttgaaggagtttggcacgatgcgaaatgaaatcttatccaaacccatgaaacacccctctcatgacatagcgccgcgcgtgacatcctttttcaacacac

SEQ ID NO: 217038 - DNA, 492 bp, Glycine max
gttcctctactggtttttcgttttctcatgaactccctctcaaatccggaattggttagatcgatctccttccgtagctaatccttgtctctttttcaataattaattagatctgcgtctcctatttcctttttttgttttgttctgttatcaaaatcaaataaaaaatctccttctcggaaatggcgtcgtcaatccaacaacaacgctcgactgcaacaagttctggatctgaaggaggaggagatccgcaaatgatcgacgagaggaagcggtagaggatgctgtcgaaccgcgagtcggccgcggcgatcgcggattaggaagcagaaacagctggaggatttgaccgatgaagttagcagattgcaaggcgcgaacaagaagctgccggagaacataaaggcaaaggaagaagcatgcgtggagaccgaagccgcgaacagcattctgagggctcagaccatggaactggcccatcgattgcgcttt

SEQ ID NO: 217039 - DNA, 332 bp, Glycine max
gttttgctgattccgcgcatattttagtgtttgcctcaaaggattgaccgtgagagcttcctccttgcacttcagatggcagtggaagccgataatccttattttcgattgggttacaacagcttgggtgcttttgcaactatcaaccatcttcacttccaggcttattatttggctctgcccttcccaattgagaaggcccccactaagagaattgcaagtgtaaatggtggggtgaagatatctgaactgttgaagtatccggttagaggctttgtctttgagggcggcgaaatgctggaagatctatcaaacggttgttcagatgcatg

SEQ ID NO: 217040 - DNA, 507 bp, Glycine max
aaaataacacacacttcacacatcattacgacaattaaaagaggtgtggaaattttcaaatagacagagcatactcaacaagagggtcatgtctaatttcctttattgaattaaacaaacgaacaaacgaaagaaaacacaaattccagatcatgcagaggattccgcattttcagaagatctggcagtagcctgtggaacagaaaaagctggcataagagtattaccagcaatttcaaaatcttgagaaattcccaagagaatatcaaaaactgtagactgtttgggattgtcaataaggaaactcaagtgccatgaagtttgatttgcccactcagaactccacatttcaaaaccattattaggaccacatacctctattgggaaagatcaattcccaggaatggtggttccgattttgtccacttacatgcatcgaaatgctctgtactgttgctgtttgttaaaaacacttgtaccaatgaggcccaatcactccttttgact

SEQ ID NO: 217041 - DNA, 187 bp, Glycine max
tcacgatgtcaccgttttggacgttaagacccttctcttcggtgacgggccaggggctatttttggacacagaaaccctgaagagatcccatgggggtcaactggagctcacatcattgtggagtccagcggagttttcaccgattaggtcacggccgccgtacattggaagggcggtgcaaagaag

SEQ ID NO: 217042 - DNA, 332 bp, Glycine max
actataacaatcaataacaagtacattagcaagtattggagccaagtacatcagcgagtatataaaaatccaaaaactcgatccccctccacaagagaaaacatcaaaagtccaaaaaagagctaatgctcctccaacaagtaacaccactggtttcagaaaccgatttattcagacctctcattttttgctcgagcaagacactaaatcgcagctaaacataaacatacggtaataatgtgaagacaagctactttgaagtaacaccttaaagagacttcttggccacgaatacaagaagatcaatgacacgtgagctgtatccccactcg

SEQ ID NO: 217043 - DNA, 291 bp, Glycine max
gaaccaccactaccttatccatttttattcctcaccaagccacaccatggcctcaagcggcgccctctcttcagcttccattctacgctctcccaaccgccagtctctgaccagaagagcgaaccacaacggaagagtaaattaccgtcaaccgaatagccgattctccgtcaaagcctccgacaaagagattgcctttgaccagcattcccgctctgctatgcaggccggcattgacaagctcgccgacgccggcgggctcactcttgggcccagggggaggaatgttgt

SEQ ID NO: 217044 - DNA, 436 bp, Glycine max
aattcaatattataacctcttttctctcaggagggcgaacagatctaaaactgtttacaaatacatttttttttattgaacagaattctaacacttacgctctttcaattttctgcacaaaactgttctttgccgtagccctaataacctaaaaattaaacggtaaggccttgtggggcaccagctacaggtgccttgggcttaggtttttccaccacaatggcctgtgtggtcaacaccattccagcaactgaagcagcattctgcaatgcacaccttgttaccttggcagggtcgataactccagcctccactaaattctcatacctgtctaccatagcattgtaaccgaccttccattcaccactctttattttctccacaacaacttcaccttctattccagcattttgagcaatcaatgctgcaggagcta

SEQ ID NO: 217045 - DNA, 391 bp, Glycine max
gttgccattctcatcctcttctttctctctctaccattgccatggatccctacagagcaccggccatccagcgccttcaattctcccttctggactacaaattctggtgctcctatttggaacaacaactcctctttaaccgttggagctagaggtccaattctgctggaggattatcatcttgtggagaagcttgcaaattttgatagggaacgtatcccagaacgtgttgtccatgccaggggcgctagtgcaaagggtttctttgaggtcacccatgacatttctcacctgacatgtgcagatttccttcgagccctggagttcagaccgcctgtaatgttcgtttctcaactgtcattcatgagcgtggtagccctgaaacccttga

SEQ ID NO: 217046 - DNA, 471 bp, Glycine max
aaatactaactaatacaaacggcatttattgagataggtcaacgagttgcattcatggagttatgggtacacacaacataatattgcaagaaaaggattagttctttcaggtaatccaaaatcacatccttatcgtactctttgcacgtctgcaactctaacaatcattctggagttggcaacaacattaaatatttggcctcgtgctgagatgagaagctatcttttggcctagagaacggtcagcctgagaccagtatgatatccagacactgcggatctcatgggtgacccgtgggtcagataaagcatcaacccatcggcgagcaaatctatcttgcctgcaaattagtaaaaaaccagcagaaagaacccaacattagacatcaccaaacacatttcacattgatcatatcatattttataacaggaacctgtcaggtgcccaaaaccggtatctctctccgggct

SEQ ID NO: 217047 - DNA, 491 bp, Glycine max
aaaatgcccactttttttcttccatacgctcttgctccttgtcatagcctgcgccgcctctgtctccggccgccgtgacctcgtcggagactttctccggctgccctccgaaactgataacgacgacaacttcaagggcacccggtgggccgtcctcctcgccggttccaatggttactggaattacagacatcaggctgatgttcgtcacgcctatcaaatattgaggaaaggtggtctgaaagaagaaaatattattgtttgtatgtatgatgacattgcattcaatggagaaaacccaaggcctggagtcatcattaacaaaccagatggaggtgatgtttataaaggagttacaaaagattacaccggcgaagatgttactgacgataacttttatgctgctttacttggaaataagtcagcactgactggcggcagtgggagagatgtggacagaggtcctgatgatcatatatctgtatactata

SEQ ID NO: 217048 - DNA, 437 bp, Glycine max
acaaaaataaatacaagttgtcattaatattaaacaataattttggcatcataaattctttcggaataattatacaaaagtgaccagggaaaacccgatctgccagttgcccactgaataaaaacacacatcatattactatgtgttgtcatacatgcattgtaatgagtggatattccaaagcaattggtccctttatccctacttaatccttatgccgaaaatggcaccatcccttgtaaattggaattgcttcttgagaaatagaattatacaaaggtagttgcattatgtatttgccaaactataaatgtaaagacccttgttcccaatcctaggagtgtcccaattgtttttacaaaggtgggacaagatatgtatatacaagtacaaccatgtcacataatgtaacaatcatcatactttggtcgttacta

SEQ ID NO: 217049 - DNA, 368 bp, Glycine max
ggattatcatcttgttgtgaagtttgcaaattttgatagggaacgtaggccaggacgtgttgtccatgccaggggcgctagtgcaaagggtttctttgaggtcacccatgacatttctcacctgacatgtgcagatttccttcgagcccctggagttcagacgcctgtaattgttcgtttctcaactgtcattcatgagcgtggtagccctgaaaccttgagggaccctcgaggttttgccgtgaagttttacaccagagagggtaactttgaccttgttggaaacaaccttcccgtcttctttgtacgtgatggcatgaagtttccagatatggttcatgctcttaaacccaatcccaagaaccaca

SEQ ID NO: 217050 - DNA, 541 bp, Glycine max
attgagatatgtcaacgagttgcattcatggagttatgggtgcacacaacataatattgcaagaaaaggattagttctttcaggtaatccaaaatcacatccttatcgtactctttgcacgtctgcaactctaacaatcattctggagttggcaacaacattaaatatttggcctcgtgctgagatgagaagctatcttttggcctagagaacggtcagcctgagaccagtatgatatccagacactgcggatctcatgggtgacccgtgggtcagataaagcatcaacccatcggcgagcaaatctatcttgcctgtcaggtgcccaagaccggtatctctctccgggctgcttgaagttgttctccttctcaattccacacttttcacgccttccactgcagatagcaggaggtatggggaacctttctgcatgacgaacaggatcataccttgaagggaagtaattgacctcctcatccctgtgaatgaaattatgaaaccttcatgatgattattgtggtgagcacacttgggagca

SEQ ID NO: 217051 - DNA, 402 bp, Glycine max
gagaaaagatcagtcttctggttttaggtctgaaatccctgttgtccaggttgagcctgtttttgagggactggatggtggaattggcagcctggtgaagtggaacccggttgcaaatgttaatggtctagacatatggagcttccttaggaccatggatgttcctgtaaattcattgcattcccaaggatatgtttcgattggctgtgagccgtgcacaaggccagttttaccgggtcaacatgaaagagaaggaaggtggtggtggggatgccaaagccaaggagtgtggtcttcacaaaggtaatataaaacatgaagatgctgcccagcttaatggaaatggggcctcccaagcaaatggatctgccactgtcgctgacattttcaactccaagatgt

SEQ ID NO: 217052 - DNA, 455 bp, Glycine max
  unsure (1)..(455): unsure at all n locations
ccaaagcggtcgatagttgcatttgttatctngactttagaaacgggagactgggaatggaacgtggggttcttgatagtatcattaataggctgcttgaagtcagaggcagaccagggaagcaggtgcaactttctgaggctgagatcaagcagctttgtctagtctccagggatatcttcttgaggcagcccaaccttttggaacttgaggcaccaattaagatctgtggagatgttcatggtcaatattccgaccttctgcgactttttgagtatgggggattgccttctcgttctaattacttgtttctaggggactatgttgatcgggggaagcaaagtttggagaccatatgtctccttctgggcttataaaaaaaatattccaacaacttttttcttctgagggggaaacatgaatgtgcttttataaaccgatttaccgattttatg

SEQ ID NO: 217053 - DNA, 332 bp, Glycine max
gaagagagaagagcaaggttacaggttctaattttcacagatgaggcctgttgcaatagcgccttctgttgcgccccgtatgcctctctaccctcctggtgctcctggtcttggacaacaatttttgtatgggcaaggacccccagccatgatgcctccacaagctggatttggttaccagcagcaactagttccgggaatgagacctggtggtggtcccatgccaagcttctttgttcccatggttcagcagggccaacaagggcagcgcccagtgggccgccgaggaacaggtcctgtgcaacaaccccagcagccaatgccaatgatgc

SEQ ID NO: 217054 - DNA, 506 bp, Glycine max
agagaagctatggaggtgctcaaggatatgtttggacccaacatacctgatgccactgatatacttgttcccagatggtggaataacaggttccaacgtggcagctacagcaactatcccgttatctctaatctccaagtagttcgtgatgttaaggctccagtaggtcgcattttctttactggagaacacacgagtgaaagatttagtggctatgtgcatggtgcatacctcgcaggtatcaattctagcaaagaactacttgaagaaatgagaaaggacaacaaaagaaaaaacaagagccaaagtcgagtattagagcccttgtcagcattaaccgaatgcaatattcctagacaataaaatctcaggggcaagcttagaatggcactacacaatcatccaacagcaaaccgaaataatccccacatctttgtcctacaactgtattcactattcatcacctctgtttcatcagcaataatagtaaaagaaaaataatcaag

SEQ ID NO: 217055 - DNA, 559 bp, Glycine max
  unsure (1)..(559): unsure at all n locations
gagaagcccatgtatgaacaaggtttaattttacttccccatctagctactctaggttggggggtaggtcctgggggggaagttatagacacctttccatactttgtgtctggagtacttcacttaatttcctctgcagtattgggctttggcggtatttatcatgcacttttgggacctgagactcttgaagaatcttttccattcttcggttatgtatggaaagatagaaataaaatgactacaattttgggtattcacttaatcttgttaggtataggtgcgtttcttctagtattcaaggctctttattttggaggtatatatgatacgtgggctccggggggcggagatgtaagaaaaataaccaatttgacccttagtccaagtattatatttggatatttattaaaatcaccttttgggggagaagggtggattgttagtgtggacgatttggaagatataattggggggcatgtatggnttnggttccatttgtatacttggtggaatctggcatatcttaaccaaaccttttgcatgggcctcgcgtgca

SEQ ID NO: 217056 - DNA, 492 bp, Glycine max
atgtatctatataatcgaattgaaattacgattctatcaaatctttttatttactttttttttttttaagaaaaaaagaaagttctaattattaataaattatatctatatatatatatatacagatagatattctatatcttttatcttaattaatatttgacccctccttataatgggttatagttttctttatttttaggaacttatccattccttttttaatgtgcccgacaatccgaaagaattctgggggaggggtcatttcgtttttgatctagaataaatagagcttcaagaaatgagagaattaagaatacccacgagaaacactaatccaatccataatgatgtaccggaaaatacaacatttttgttattcgaccaaccttcaggagaagcaaatacaacaggtacactaatcaataaaataaatgaaatagcaattaatgcaaaaacagctaattggaaagcaatagtcatgtttctaat

SEQ ID NO: 217057 - DNA, 406 bp, Glycine max
ctagatcgcgagcggccgccctttttttttttttttttttttttttttttttttttggggaaggcaaaaatttgctacgttgtcatcaatgccaataattattacatctaaaatttcttcaatcaagggtcattaatctgtgttgtaagtcaaatcaatgacctgtacacagttatttaatttcttgagtgtcaaaaatgaaaaacacgggcataacatggacatctgacactgtcattccatacagatacttggggaaaatgagtatgaaacattaacaagcaaagtcaattcatggctcaggttgcattttctcgcattcttcccgttttgactggaaaagaatatttgacaaatatctttcaccaaagcttgggaagacaaccccaataagcttttctgcatt

SEQ ID NO: 217058 - DNA, 494 bp, Glycine max
tcgcgatctagaactaggtgtttgtgtagtagtgagtgactttgggttgggtttcgtctcaactcaacaaacgtcgtcgttctcccatttccaatctttctccaatggcttcttctgcttccttaatcaactcgttgacttgctcttcgcctgcacccactcagcactgtttcgccttcacccgcaccaccgccaccgctaccgccacgtcactgagacaattcaacagccaccgtccgcccccactcaccacgaggatctcctcgtcgccttccaccgttgtctgcaaagctgtctccgttaagccccaaaccgaaaccgaaggtctcaacattgctgacgatgtcacacagctcatagggaaaacgccgatggtttacctcaacaatatcgtgaaggggttctgtggccaatattgctgcgaagcttgagattatggagccctgttgtagtgtcaggacaggattggttttagtatgataaatgatgctgag

SEQ ID NO: 217059 - DNA, 450 bp, Glycine max
gcagtgataaatgagagtgggatttgatagactttcatcacatgtccatgaatataacatttccagtaatttgaatctgactaaagactgttttattaattttcagattattttttaatttatttttaatgaactttagaaaaaaaattagtttattataggaaattttacggtgaatttcagaataaattttcatatgatacgactttattaaataaaaagtatctctatactattttattgctaatttacaaatatctcatttttttatatttatggaaaaaaaattggtatcttattataagaataataatttatatttataatataaaatatttgagtagttaatgaacttgtttgttaagattaagatgcagttaaataaatatcttggttcacccaaaaaaatatatcatttgatgagtagcatgaaaaaaatcattcaatgag

SEQ ID NO: 217060 - DNA, 421 bp, Glycine max
tttttttttttttttttttttttttttcttttttttatccctacagttttttttatggaaacattataattttaaaaataaaaacatttccatttaaatatttaaaattcttataatttaaaatttctcaaaattttccattcaaacacacacaggcttaatatccacaaggtcaagggataaacttcttttaaaaaagtaaaaaaaaactggtccatcaaaatacccttcatttatatatttaaaaatttcattacgccctttactggaagaaattttaagacaaccactccgggtttacatttttactgacttatttgaatactgaatggtgttgccgccatttccaaattatctaatactgactatctcatttaaattaacatttaaatatatttattaattcaaaatcttctttacc

SEQ ID NO: 217061 - DNA, 397 bp, Glycine max
  unsure (1)..(397): unsure at all n locations
ggttcacatcagtattgtggtcattggccatgtcgactctgggaaatccactagcactggtcacctgatttacaagcttggaggcattgacaagcgtgttattgagaggtttgagaaggaagctgctgagatgaacaagaggtctttcaagtatgcctgggtgctggacaaacttaaggctgagcgtgaaagaggaatcaccattgatattgctttgtggaagtttgaaacaacaaagtattattgcacagttattgatgcgcctggacatagggatttcattaagaatatgattactgggacatcccaagctgactgtgctgttcttatcattgattcgaccactgggtggttntgaagctggtatttccaaggatggacagactcgtgaacatgc

SEQ ID NO: 217062 - DNA, 538 bp, Glycine max
gaacacttcaaatagaaagttgacatttaataaaccaaagcaacacaacgcagcaaagtcctgaaactcgctgcgcttaacaaaaatgtaatcaggggttccgacaaacacaacacattaaaacacagataaataaaagcaattttgccaccgtcgatcaagaacccagttctgggaacaacagttgcgagatgatggtggagacttcaaactttgtccgaaaaacaagctacctagaaaagaagacacaagagtacagaaaagaaaccaacatttattgtaaccaacatcccctgatgaaccagcccgcacgattcacttcttcttctgggcagccttggtgaccttggctccggtaggatccttcttctcaacgttcttgatgactcccacagcaacagtttgacgcatgtccctaacagcaaacctaccaagtggaggatactcggagaaagtttcaacaaccatgggtttggttggaatcatcttaacaaaaccagcatcaccgttcttcaaaaacttgggctccttctcaagc

SEQ ID NO: 217063 - DNA, 464 bp, Glycine max
ggccctttcccttcccactgggattggtattgtggttgcaggccctaaagctatggaggcctcaaaacatgctaaatcacttagagttttctttgactggaaagactacctcaaattctaccagctaggaacctattggccatacactccttccatacatttgctgtatggtctgagagctgctcttgatctgatttttgaggaaggactcgaaaatgtgatcgcaaggcacagtcgtttaggcaaagcaaccagacttgctgtagaggcatggggtttgaagaattgcacccaaaaggaagagtggtacagtgacactgtgactgctgttcttgttcctgcttacattgatagtactgaaatagttaggagggcatggaaaagatacaatttgagcttatgtcttggacttgacaaagttgctgggaaggttttcagaattggacatcttggccacttgaatg

SEQ ID NO: 217064 - DNA, 397 bp, Glycine max
gaaagtagattgtacgttcatcttcaaaggagtgtaaaagagggtaatatatattttacagaatttctgaaagagcagaaaaaggaagtaaagacaagaatgatttgtgactcaaatcctggaagggatcataggaatagtgttctgtaagtatgcactggcagcagcaactccacttccaagctttacaggataacccacatctttgagtatcatctctacaccagctagacatcccaacagttgcaactcattcaagtggccaagatgtccaattctgaaaaccttcccagcaactttgttcagtccaagacctaagctcaaattgtatctcttccatgccctcctaactattttagtactatcaatgtaagcaggaacaagaacagcagtcaca

SEQ ID NO: 217065 - DNA, 502 bp, Glycine max
  unsure (1)..(502): unsure at all n locations
aattcagcttgctttggattgattagcagcaacgcctgaagttcaatgttgatgttgttgagagtgaatggggccatggtgctaagcttgatgttctggaatcaaagattgcttcagatacttcacacactataaaggcaatttgcattgttcacaatgagactgcaactggggtcaccaatgacttggccaaagtgagacaaattcttgattcctaccagcatccagccctccttattgttgatggagtgtcttccatttgtgctcttgatttccgcatggatgaatggggagttgatgtggcaataactggctcccagaaggccctttcccttcccactgggataggtatttgtggttgcaagccctaaagctattgaggcctcaaaacatgctaaatcacttagagttttctttgactggaaagactacctcaaattctaccagctaggaacctattggccatacactncttccatacatttgctgtatggcctgagag

SEQ ID NO: 217066 - DNA, 452 bp, Glycine max
aagatgcatttatttttgatatacaggacaataaaagaagcaatgcattaaagctgaaagtagaaagtacgttcatcttcaaaggagtgtaaaagagggtaatatatattttacagaatttctgaaagagcagaaaaaggaagtaaagacaagaatgatttgtgactcaaatcctggaagggatcataggaatagtgttctgtaagtatgcactggcagcagcaactccacttccaagctttacaggataacccacatctttgagtatcatctctacaccagctagacatcccaacagttgcaactcattcaagtggccaagatgtccaattctgaaaacctttccagcaactttgttcagtccaagacctaagctcaaattgtatctcttccatgccctcctaactattttagtactttcaatgtaagcaggaacaagaacagcagtcaca

SEQ ID NO: 217067 - DNA, 445 bp, Glycine max
aaaataataaaatactatacatatatatatatacccaccatcgaaaggtcagagcagaacccaaccaaagcagctatggcggcgatgcagaggccactcaagagaaccattgcaatcgccaagcaacgcgcgtgcttttcctctctcctaccctccgccggtgccgccgccgccgccgataccgtcgcgcctccgcagctccccccgttcgatcaccagccgcacccttacaacggtccctccgacgatgaagtcttcgccaagcgcaaaacgttcctcgggccttccgtgttccactactataagaaacctctgaatatcgtggaagggaagatgcaatatctttatgatgatagtgggaggcgttaccttgatgcatttgcgggaatagttactgtttcttgcggacattgccaccctgaaattttgaatgctatcacggagc

SEQ ID NO: 217068 - DNA, 359 bp, Glycine max
gaatgcaactttttgatgtcatgaaacccaaagttatatacaataatagtcagcattcaacttataatgttcagcaaaaagggagggaaaccccctctcttctcaacggggagaacattacattattcatggggattcctatgaactaaatgacctttttgctgttggcttgcattaatttgactccattgtcgaagattttatttcatgctaccaagatgcacaatcagctcacaacttacatagagaatagtccaaggcatccacaagaaaatctgcatcatctttggagaaacacattggtggcttgatcctgaaaacattgccatgaagtcctactttcccaactagcacaccga

SEQ ID NO: 217069 - DNA, 544 bp, Glycine max
agaggatagggttgttatatttgatcttatcagaggattgctcttggtgaacttgggagcccgtttattaaatatgttgcctggtctgatgacatggaacatgttgctttactcagcaagcatgccattataattgctagcaagaaacttgtacaccaatgcactctccatgagactatccgtgtaaaaagtggagcttgggatgaaaatggtgttttcatttatacaacactaaatcacatcaaattttggcttcccaatggagataatgggataataaagacattggacattccaatttatatcacaaaggtctttggcaacacaatcttttgcttgtatagggatggaaagaaccgatcaataactattgatgctactgaatatatttttaagcttttcttttggaaaaatgatatgatcatgtcatgaacatgatcaggaacctaccgttttgtgggccagcttttattgcttatctaccgcaaaaggcttttcttgggttgacttgattttgtgaaaatgaaaaaattcgttcaatttg

SEQ ID NO: 217070 - DNA, 459 bp, Glycine max
gaatcccgactaaacacagacatatatggggttggccaataaaactgtgcaaatttaactcttgcacagcctataatcatcgtttgatctaagtacaacctttcactttcttgtgtatgaaaaactaacattgaaaatcattttcaaggaaagagaacggcaagcaaaaagacgaaaaattaattcctcgtgactaactctcacttttatcacagtaccatgagcatgttgactaattaataaggattcaactagtgctgaaaactgacccaaaacaaaatttaacattggacctgatccagtagttcaatcagcgtatctgggaaggtgaacaaaccagaccagaagcatctgctccaatcactgcaagatcgcaaacattacagagttgtccctcctggctaggcacataacgtgaagaacaatatgggcaagagacattcttttgtcctcgattga

SEQ ID NO: 217071 - DNA, 512 bp, Glycine max
gttttgtttggtttcatcgatcttcatttttcataatcagattcagcttttattatgtttacaacaacgtccttaatttgatgattctttaatcgtagatttgctctaattagagctttttcatgtcagatccctttacaacaagccttaattgttgattcattaatcgtagattagggcttttttcattgattacttcagatccgttaaacgtaaccatagatcagggctttttcatgaattacttcagatccgttaaacaacagccttattttttatacttctgtggtttttcaagaaattgttcagatccgttgacaaaaagccttattcgttgattctatatcgtttttcgagagatattgctcagatctgttagcaactgccttgtttgttgattctattgccgtggattagggtttttttttcacgagattgcttcagatccgtacttaagattacgtaatgggatttgattctgatttatctgtgattggtgactcgacagatgc

SEQ ID NO: 217072 - DNA, 420 bp, Glycine max
attgtactattattaatgggacacaatggaggggaacacaaaccgaacttattttcaagggacattattacagacccattaaacatcaaagttcttcaaatgttttgggaacacatccaacattacacaacgagcttaaaaccccccacggagacggaggacaaggtgaagggttgattccttctggatgttgtagtcagcgagggtccttccatcctcgagctgcttgccagcaaaaatcagcctctgctggtccggtgggatgccttccttgtcctgaatcttggccttcacattgtcaatggtgtcagagctctccacctcgagggtaatagtcttaccccgaagagtcttcacgaaaatttgcataccaccacgaagacgcacaccaagtggagagttgactcctttggatgttgt

SEQ ID NO: 217073 - DNA, 529 bp, Glycine max
caacgatcgtgagactggaagatcctgtggttttggatttgtgaccttcgcctcggggcagtccatgaaagacgccatcgaagggatgaacggtcaaaaccttgacggccgtaacatcactgttaacgaagctcattcccgtggtggcggcggcggcggacgccgcggaggaggtggatatggtgtatatcgtactttcacatgaaagtgtcataaaggcagataaaagcatattcattcaacacacacgaccattaggcttaagcacaaggcaatagtatgacttaaacggtgacacatttcatcaattattcttaaaacactgcagattttctgaatttgttcaaaatacaagagccttgttactgtagaaccacacattcttgtgaaccatccaccaccaccacagtagggtgttcgcttgtgctgactgcatcaactttcctttttgaccctttgaacattgacatcctccaattcaccacagccaatggctacaaacacaagatcattgacttcttgaaacctc

SEQ ID NO: 217074 - DNA, 542 bp, Glycine max
actctatatttctgattatcatttcattaaatcgagtgataggcaaccatatatattggtcaaaaacaagaaccacggtgacacaaaaccataaagatactcaaactcaaacacaactaaaattactgagcataatcataaaccctaatcaacgacatcaagccctagtttctccagccttcattaccaccgtcaccaccacgagagtaaccacggtcaccaccaccaccataaccacggtctctgccaccgccatagccaccgccaccgtcaccgtcatatccaccgccgccgccatagccttcaccgccaccgctacggttgtatcccccttcaccaccgcgaccaccaccaccatattcaccaccgtgaccaccaccatattcaccaccttcaccgtcttcgtcgtcaccgtcaccacgggactgagcttcgttacagtgatgttaccgtcgtcaaggttttggccgttcattctttgatggcgtcttttatggactgctccgaggcgaaagtcaccaatccaaaacccctggatcttc

SEQ ID NO: 217075 - DNA, 535 bp, Glycine max
  unsure (1)..(535): unsure at all n locations
agagcttcttgataaggagcttccttttaagtttgtggaggtggatgaggaacantgtagacttgtcctcagcaaccgcaaggccgtagctggcaaccaggcacagctaggaattggatcagtggtcantggctctaagcaaaggctgaagccatatggtgctttcattgacattggtggaattaatggcctccttcacgttagtcagatcagtcatgaccgtgtaactgatatttcaactgtgcttcaacctggtgacatattaaaggtgatgatcttaagccatgaccgagagagaggtcgagtaagtctttccactaagaagttagagcccacacctggagacatgattcgcaatccaaagcttgtctttgagaaggcggaggagatggctcagacattcagacagagaatagcccaagcagaagctatggctcgtgcagacatgctaaagttccagcctgagagtggattgactatcagcggtgatgggatcctgggaccatttacttcagactttgcctgaagagggact

SEQ ID NO: 217076 - DNA, 547 bp, Glycine max
  unsure (1)..(547): unsure at all n locations
gataatatgaattagttctatttatttaactcacaataatacattggcatcaagacatcgttcggcaacaattgatagttagttacaaacaatattataaaaatgtaagcaaacagaaagaaaagagcacgcaattctgaatcatgattcttcagctggtggtacctcactcaaatccagtccctcttcaggcaagtctgaagtaaatggtcccaggatcccatcaccgctgatagtcaatccactctcaggctggaaccttagcatgtctgcacgagccatagcttctgcttgggctattctctgtctgaatgtctgagccatctcctccgccttctcaaagacaagctttggattgcgaatcatgntctccaggtgtgggctctaacttcttagtggaaagacttactcgacctctctctcggtcatggcttaagatcatcacctttaatatgtcaccaggttgaagcacagttgaaatatcagttacacggtcatgactgatctgctaacgtgaggaggccattaattcaccatgtcaatgaag

SEQ ID NO: 217077 - DNA, 434 bp, Glycine max
atcatgctcggggccttgggctgcgttttccccgaactgttgtcccgcaacggggtcaagtttggagaagctgtgtggttcaaggccgggtcccagatcttcagcgagggtgggctggactacttgggcaacccaagccttgtccacgcccagagcatcctcgccatctgggccacccaagttatcctaatgggtgctgttgagggttatcgtattgctggtgggcccctcggtgaggtcactgacccaatctaccctggtggcagctttgacccattgggccttgctgatgacccagaggcttttgctgagcttaaggtgaaggaactcaagaacgggagattggccatgttctctatgtttgggttctttgttcaggccattgtcaccggtaagggtccattggagaaccttgctgatcaccttgcggaccc

SEQ ID NO: 217078 - DNA, 441 bp, Glycine max
gtaaaaagcaagtaacattaagttggattgggatacacaagataattcacattatctgaagtacattgcaataacatatacttcaccaaacacaaatctaaaaactctcaaaagtccacaagtcatccttttctttcatgctcacttgccggggacgaagttggtggcgtaggcccaggcattgttgttgactgggtccgcaaggtgatcagcaaggttctccaatggacccttaccggtgacaatggcctgaacaaagaacccaaacatagagaacatggccaatctcccgttcttgagttccttcaccttaagctcagcaaaagcctctgggtcatcagcaaggcccaatgggtcaaagctgccaccagggtagattgggtcagtgacctcaccgaggggcccaccagcaatacgataaccctcacagcacccattagg

SEQ ID NO: 217079 - DNA, 370 bp, Glycine max
ctcggctaacttacgtgtcattcctgttccctcgtctattccacgccgaataataccggggatggtgaggacatttacatgggatgggataatgacatctgaggaactttactgttctatatacaatgtattgtctgaagcatatgcctcaaatgatctatacaattactgcccttcatgggctctttcttggccatatcgcaggcaaaatttgttacggtaaattgttggttaccgaccagacattatttgtcttcaggaggttcaaagcgatcattatgacgaatttttttctcccgaattagacaaacatggatattatggcctttacaagagaaaagaggtgtacagtggcaacacacatacaatt

SEQ ID NO: 217080 - DNA, 539 bp, Glycine max
cggttctttcggaggatggatctataagaattcacctatcccaataacaaaaaaacctgacttgaatgatcctgtattaagagctaaattggctaagggaatgggtcataattattatggagaacctgcatggcccaacgatcctttatatatttttccagtagtaattctaggtactattgcctgtaacgtaggcttagcggttctagaaccatccatgattggggaacccgcggatccatttgcaactcctttggaaatattacccgaatggtatttctttcccgtatttcaaatacttcgtacagtgcccaataagttattgggcgttcttttaatggtttcggtacctacaggattattaacagtaccctttttggagaatgttaataaattccaaaacccatttcgccgtccagtagcaaccaccatctttttgattggtactgtagttgccctttgtttaggtattggagcaacattacctattgagaaatccctactttaggtcttttttaactataaatttgatccatttg

SEQ ID NO: 217081 - DNA, 527 bp, Glycine max
caaaatggaattaattttataagtttaaaaaagacctaaagttagggatttctcaataggtaatgttgctccaatacctaaccaaagggcaactacagtaccaatcaaaaagatggtggttgctactggacggcgaaatgggttttggaatttattaacattctccaaaaagggtactgttaataatcctgtaggtaccgaaaccattaaaagaacgcccaataacttattgggcactgtacgaagtatttgaaatacgggaaagaaataccattcgggtaatatttccaaaggagttgcaaatggatccgcgggttccccaatcatggatggttctagaaccgctaagcctacgttacaggcaatagtacctagaattactactggaaaaatatataaaggatcgttgggccatgcaggttctccataataattatgacccattcccttagccaatttagctcttaatcaggatcattcaagtcaggtttttttgttattgggataggtgaattcttatagatcca

SEQ ID NO: 217082 - DNA, 290 bp, Glycine max
ctttcctacttggatggcagcctttcgggtgactatggatttgaccctctgggagtttcggaccctgaaggaacaggagggttcattgagccgaaatggctagcatatggtgagataatcaatggtcgttatgcaatgttgggtgcagttggtgcaatagcacctgaaattctaggcaaggctggtctgatccctcaagagacagcactcccatgggtcaaaaacggggtgtttccacctgtgagaacctacaaatactggggagactcctacacaacattgttcgtttt

SEQ ID NO: 217083 - DNA, 419 bp, Glycine max
gtcgaatgtttttagttgttttacatgtcaattcttacaggggcacaccaaggaacaaaatgtccagatgatggtagagtcccaaagagcaaagagaggatatagaaaggtggttgagctttggtaactgcgaagcgaacaagaaccaagaccaagagggtaaagaatatgatataatacatttagtggaacttgagactggtcaagatgttgttgtgcacggggtcagccaaatgatctaggaggttttggtatgggccaacacctgtgacaagagcttgaacaaagtaacccaagattgccaacatagccaaccttccattcttcacttccttgagcttcaaatccttcaaggacttctcatccttaccaaagccaagtgggttgaagaaaggtcctcctgggtaagctggctcacc

SEQ ID NO: 217084 - DNA, 564 bp, Glycine max
ttgcaggggacaggttttgttgtttgtgaagagcgtgagcatttgcgaatgcggggccacacccgaagctgagactgcctacaagacaggggtcaatcgcaatccaaatatggggaaacttcaagctggctatctctttcccgagattgctagaagaaggtctgcgcacttgctgaagtaccctgatgctaaagtaataagccttggaattggtgatacaactgaacctattcctgaagtcataactgatgcaatgtcaaagagatcacatgcattgtcgactatagaaggatacagtgggtatggagctgaacaaggtgaaaagccattaagaagggcacttgcttcaacattttacagcgatcttggcatagaagaggatgatatatttgtctcagatggagcaaagtgtgatatatctcgtctccagattgtctttgggtcaaatgtaaaaatggctgtgcaagacccttcatatccggcctatgtagactctagtgtaattatgggccagactggcctctccagaagaatgttgagaaaagttgcaacattgaatacatg

SEQ ID NO: 217085 - DNA, 436 bp, Glycine max
  unsure (1)..(436): unsure at all n locations
ctcaattgataaaccctgtctttgcatgggataatctaaactccacggaaaatcaattgcattatttaaataagacagccctagcttcagtccaagagaacaactcttgaaaccaaatgagatattctaacttcacttgtatagctgcttgaaccttctgcatgcctccaagacattttccctgtgaccaaaggcactaaccctgataaaaccttcaccaccaggtccaaaaccactaccaggggttgtaaccacatgagtcttctcaagaatctcagcgaatacatcccatgagcttcggccgggaaaatggacccacacatatggtgcatctttccctccatagactttaaacccaagagaatcaaatgtctncattattatgtgagtattttccttgtagaatccaataacatcacgcataggcttaagacct

SEQ ID NO: 217086 - DNA, 452 bp, Glycine max
ggctgaaactgacatccaagactattttcaactcttcttcctctggttactctccatggtcgccgttagagccatactcaccaaactccgccacaagcctcgccgtccaccgggcccacggtccctccccatcatcggccacctccatctcatctccgccctgcctcaccagtctttccacgcgctctccacgcgctacggccccgccgtgcaagtcttcctcggctccgtccccgccgtggtcgtttcgtgcccggaactcgcgaaggagttcctgaaaacgcacgagcccagcttctcgaaccggttcgtgagtgcagcggttcaccacctgtcctatgggtccaaggggttcctcttcgcgccctacggaagctactggaggttcttgaagaagatttgcatgtcggagcttctcggtggccgcaccctcgaccagttccggcacttga

SEQ ID NO: 217087 - DNA, 427 bp, Glycine max
  unsure (1)..(427): unsure at all n locations
ctctcctcctcatgctcccttatcaccctgtccatcatgccatcaaacctctccaaaatacccacaagcctcttctttatcccatgcaaatccaaccccttacacaaccacacaaaatccgccaagttgaacttccccgccagctcagcagtgtccgccaccatcttcctcacgtgctccacgtcaccatcgctctcgcaacatgttcgactcaaaaccatcctcgatattacactgttggtcaaagtcatcaactccccactaacatccacggcctcatgcgcctcccctttcgccctcaacacgcgcagaaacctcaaagtttcttgctccctcaagtgccggaactggtcgagggtgcggccaccgagaagctccgacatgcaaatcttcttcaagaacctncagtagcttccgtagggcgcga

SEQ ID NO: 217088 - DNA, 507 bp, Glycine max
gagccggatcgtttaccatcactataggcgttccggaataatatgcacgcgtccgcaagcgtcgaatttgcggccggcctttttttttttttttaatagaattcttattttatatataacaataaactactatatacacatacaatgtattctagtttagtcccctaaaacacgagcaagttattctgggtgtcggagcccaacttctccaaattcggctggactgcaaattgaatcatacgtgggggcccacaccctgatgccgaggtgttctttatagattgaaagccggacgcccaattcctattcccagctcaggactacagattacccaacttggtcattgttaaggatttggcgacagcttttatccaagttcttggtaatgagaaggccagccaggaagtattcaacatctcgggagagaagtatgtcacgtttgacggattaacaagagcatgtgctatggctggtgggttcccagagtcagagatcatttactaccac

SEQ ID NO: 217089 - DNA, 407 bp, Glycine max
aaaaacactgaacgaaaagctcatgaaggggtcacatcttcctaatgtacaaaatccgaacagcttttctacatataagtgaaatactgataatcgaaatagaaaagtttatacactaacaagactctttccaagaaatatgtcatctgttgagaaatcagcctctttccggtatgttcctataccaaagtccaggttgttcgagtctgcaagaccctctacaagcccaaattcaggttcccacccaagcactctctttgttttctcaattgatgcaaagaaatgctggtcacggaatggaaatgatttcttttttccaaagtcaaaatctttagggtttgagtgaatgatccttggttctgggaacccaccaatcttagcccatgctcttgctaatccgtcaaacg

SEQ ID NO: 217090 - DNA, 275 bp, Glycine max
tccagcctaattctttttttgaacaaagtttatttttacttccccatctaccttctctaagtgggtgggtaattccttaatggcaaactataacacaccaatccatgcttatactttaaatatccccaaatcaattcctcccaagtaatgtactatgtcaatatttaaaatgcactcttcgtacctgaaacttaacaaaaaatttttccattcttcggttatgtgcttaaagatataaataaagtgactacaattttcggtattcacttaatcta

SEQ ID NO: 217091 - DNA, 509 bp, Glycine max
gccaaacagggcggcttcatctttttattggaaggctactgggactggtaaggcggtgttgacctctggtgggacccaaaaggttggggtgaagaaggctttggttttctatggagggaagcccccaagagggatcaaaaccaattggatcatgcatgaatataggctaactgataacaagcctaacaataggcctcctcctggttgtgacttgggcaacaagaaaaacactctaaggcttgatgattgggtgctgtgccgaatctacaagaagagcaacacgcataggtcacccatggagcatgacagggaagattcaatggatgacatgattggagggattcctccatccatcaacgtgggccacatgagtgcgaggtttcatcatctttcaaagatgacgacagcctacaacaacggtgcattggtggaaaatgatcaccacaacttgttggagggatgatgataggtacagcaacgggggatgaacaaactactctactacacct

SEQ ID NO: 217092 - DNA, 568 bp, Glycine max
  unsure (1)..(568): unsure at all n locations
gggtttttgagtgcggtgcggctatcctagcactctcttctgcagcggtcgccgacagcttcattcaccatggctgagcaaaccgagaaggcttttttgaaacaaccaaaagtgtttctcagctcgaagaaaactgggaagggaaagagacccggaaagggtgggaaccgcttttggaaatccattgggcttggatttaagactcccagggaagccatcgaaggaacctacattgacaagaagtgccccttcactggcaatgtttccatccgtggccgtatcttggctggaacatgtcacagtgctaagatgaacaggactattattgttaggaggaattatctccattttatcaagaagtaccagaggtacgagaaaaggcactccaacattcctgctcatatatcacctgctttcncgtgtgaaggaagggagatcacgttattattggtcaatgcaggccactttctaagactgtgaggttcaatgtgttgaaagtgatcccagctggatcttctaacgtgcaaagaaggcttttactggaatgtgagctttgatttccagtttt

SEQ ID NO: 217093 - DNA, 352 bp, Glycine max
aaaacaagatcctaagcatgaagccagaacgaaacctcaaagaaaatccaaaattgacaagggtttcatatttgttatcatccagaaaagaaatcagatataataattaataagggaacatttatcttcaataaaaactggaaatcaaagctcacattccagtaaaagccttctttgcaccgctagaagatccagctgggatcactttcaacacattgaacctcacagtcttagaaaggggcctgcattgaccaataataacgtgatctcctttcttcacacggaaagcaggtgatatatgagcaggaatgttggagtgccttttctcgtacctttgggacttcttgataaa

SEQ ID NO: 217094 - DNA, 548 bp, Glycine max
aaagaatgaacaaatggctgaggcttcagcacaagcttgtgtcagtattccttccaatccctggagttctctgcaaaggggtttcagtgcataataactccctgtaatgtgcactagtaaagaccaaagtatgattattgttacattatgttacatggttgtacttgtatatacatatcttgtcccacctttgtaaatacaattgggacactactaggattgggaagaagggtctttacatttatagtttggcaaatagatattgcaactacctttgtataattctatttctgaagaagcaattacaatttacaagggatggtgccatttacggcataaggattaaggagggataaagggaccaattgctttggaatatccactcattacaatgcatgtatgacaacacatagtaatatgatgtgtgtttttattcagtgggcaactggcagatcgggttttccctggtcacttttgtataattattccggaagaattatgatgccaaaattattgttaataattatgacaacttgatttatttttgt

SEQ ID NO: 217095 - DNA, 527 bp, Glycine max
  unsure (1)..(527): unsure at all n locations
acaaaaataaatacaagttgtcattaatattaaacaataattttggcatcataaattcttccggaataattatacaaaagtgaccagggaaaacccgatctgccagttgcccactgaataaaaacacacatcatattactatgtgttgtcatacatgcattgtaatgagtggatattccaaagcaattggtccctttatccctccttaatccttatgccgtaaatggcaccatcccttgtaaattgtaattgcttcttcagaaatagaattatacaaaggtagttgcaatatctatttgccaaactataaatgtaaagacccttcttcccaatcctagtagtgtcccaattgtatttacaaaggtgggacaagatatgtatatacaagtacaaccatgtaacataatgtaacaataatcatactttggtctttactagtgcacattacanggagtttattatgcactgaaacccctntgcagagaactccaaggattggaaggaatactgacacaagcttgtgctga

SEQ ID NO: 217096 - DNA, 507 bp, Glycine max
gctcaggaccagcagaactggtttttaatggaaaggctactgctgttaagggtcttgaacttatcttcgatagtgggagctcttacacatacttcaactcacaagcctatcaagctgttgttgatttagtaagatagaaactagagagaggctcaattttcatcatcaatctcgttgtcttatatggcctaagatatttagtcagccatcttaagttaataattccttgatccataattcaggtaactaaagatttaaagggaaaacagttgaaaagagcaactgatgacccatcacttccaatttgttggaagggtgcaaagtctttcgaatcgttaagtgatgtcaagaaatatttcaagcccctagcattgagcttcaaaaaaatcatgaatttgcagatgcacctaccaccagaatcttaccttattatcactgtgagcaccttttaagactgaacaactctgcctctagttaaggaaacaaatgaaattgtctaacatgctg

SEQ ID NO: 217097 - DNA, 556 bp, Glycine max
gttatttcactgcctaatgggaaagtttttaaggtgaaagaggagagtttggtgccagctaatcctgatattcttgatggggtggatgacctcatgcaactaagttatttaaacgaaccatcagttttattcaacctgcaatatagatacaatcataatatgatctatacgaaagctgggcctgttttggttgctgtaaatccctttaagaaagttcctctgtatggcaatgactacattgaagcctacaagtgtaaatcaattgaaagccctcatgtatatgcaattacggacacagccatccgagaaatgatacgggatgaagtgaatcagtctataattataagtggtgagagtggagcagggaagactgagacggcaaaaatagcaatgcagtacttggctgcccttggtggtggaagtggaatagagaatgagatattaaagactaatccaatactagaagcctttggtaatggaaaaacattaagaaatgacaactcaaggtcgttttggaagctcattgagattcacttcagtgaaactggaaaaatat

SEQ ID NO: 217098 - DNA, 478 bp, Glycine max
  unsure (1)..(478): unsure at all n locations
caatcgatccatcttcactcccaagtttatgtaaaatgacctttgtttcacgtagtcttgcaccataatcctttttccaagcttcaaacatttgttttaaccttctaagctctctatctgggttcaaacttgcttcaacttgaccagattttacctctaccaagaatttagaatcatcaccaaacacttgactcctttgctcaaattcttcagccaaccgacttataacactcaaaccagcactcattgattttgccccattgctttcttggcgccggtgattggttcctacatcccagctgaaatccctgtcatcacttgcattaacagaagcatctgaatttctttcagaatcatccatagcaaggcttcttctttgcaatagagaggctagattgtagggacctcatntnngttctgccatacttcttcaatggatttcatctttaattcatattcagaccatctgttctatact

SEQ ID NO: 217099 - DNA, 332 bp, Glycine max
gttttgctgattccgcgcatattttagtgtttgcctcaaaggattgaccgtgagagcttcctccttgcacttcagatggcagtggaagccgataatccttattttcgattgggttacaacagcttgggtgcttttgcaactatcaaccatcttcacttccaggcttattatttggctctgcccttcccaattgagaaggcccccactaagagaattgcaagtgtaaatggtggggtgaagatatctgaactgttgaagtatccggttagaggctttgtctttgagggcggcgaaatgctggaagatctatcaaacgttgtttcagatgcatg

SEQ ID NO: 217100 - DNA, 478 bp, Glycine max
  unsure (1)..(478): unsure at all n locations
tccaaaaccatccaactctcatgttcgaagaaaacatacacaatctcttcaaacgctaattttcttttcctttcatttaatttcctcaatggcggcttccgtcgaccagcgtccgtaccccggcctccacaatggcgtcgttcggcccctcaaaccaggcccggatatcccgcgtcccaagaagctaccccagccgccgccgccactctcggattcctcaagcgacgaagaagaagacaccaccttgaacttgaaggacctgattcgcaagggaacaacggaagttgaatcctccattttcgacccgcgcgacgatggaacctctgaccactggatccaacggaactcttcccttgtccgtttaacgggaaagcacccgtttactcggagccacccctccctcgcctcatgcaccacggcttcatcaccccggtccccctcactacgtncgaaccacgggccagtcccccgggcccgt

SEQ ID NO: 217101 - DNA, 417 bp, Glycine max
aatagaatccattatttatatataacaataaactactatatacacatacaatgtattctagtttagtcccctaaaacacgagcaagttattctgggtgtcgtagcccaacttctccaaattcggctggactgcaaattgaatcataggtggtggtccacaagtcaatgccaaggtatcaggagatgcatttggaatatgctccgtcaggatactttcagtgatgaatcccacactgtattcccacccttctcttatgctttcttgtatcacgtaccacaccttcaacctatcatacttcttagcccactcatcaagctcttccttcagcaatatatcatcctcggttcggttcgcgtaaaccacatgcatcttcgggcagtcctctggatcctttagaatggcttgaaccacttggt

SEQ ID NO: 217102 - DNA, 475 bp, Glycine max
taggagtgtgctgttttaagtcctatagcagcgatgggaatcgatcgtaaggctgggggtaagagcaaaaagaccaaaagaacagcaccaaaatccaatgacatctacctcaaattacttgtcaagctttatcggttccttgttcgaaggactggcagcaatttcaatgctgttatactcaagcgcttgttcatgagcaaggttaacaagcctccaatttctttgtcaaggttaattaagtatacaaaggggaaggaggataaaattgctgtaatagtggggactgtaactgatgatatcagagtatatgaagttccagcattgaaaattacagcactcaagtttactgagagagcacgtgcaagaatagaaaaggcttggtggtgaatgcttgacatttgatgagcttgcccttagggctcctttgggacagaatacggtccttcttagaggccccaagaatgctcgggaagct

SEQ ID NO: 217103 - DNA, 408 bp, Glycine max
ggaatcaaaaaatcaaatgctagttttttgtaatgcacgtcaatgtaaaacatgggagccacgatatgttatcagaacagaaatatcataaaaactgttaccgacgcctagagcaaaaagtttaatttcagaagtgaacaattgtaaaaaaaaaaaaatagaacaaagttatattatatttcttaaactctaaatcctctgctgttcctccttcctctagccctctcgaactttcttccctttgctcgtacatagggcttggtatggctgtgtggcacaccaggagcaggaccaaagtgtttcacagcttcccgagcattcttggggcctctaagaaggaccgtattctgtcccaaaggagccctaagggcaagctcatcaaatgtcaagcattcaccaccagccttt

SEQ ID NO: 217104 - DNA, 277 bp, Glycine max
caagaaaaagaggcgcttgatgattggtagggtttctgggaaggtggggtggttcaatgatcagaaggggtttggattcataagccctgacgatggcagcgacgatctcttcgttcaccaatctcagatcaaatctgacggtttccgaagcctcgcccgaagagagtcccgttgagtttcgccatggaatctgaacttaccggacccccgaaggctgttgatgtcactggccccgacggcgccagcgtccagggaaccagacaaggcggtgatggtg

SEQ ID NO: 217105 - DNA, 443 bp, Glycine max
  unsure (1)..(443): unsure at all n locations
gatagcaattatactattcattatagcaaaatgtaagttgaaacggattttagtttgcagattgtaacgataacacagaaacccttcatttaaataaccaaaaaagaaaaatcccacacatctactcataagaacccatagtttggacagaaaccattaaaatccctaagacatattaaagtaaaaacttaaaacaatccgcaaaacataaacaaccctaacagtaaattcaacgagcacttgatgggcaatctctggcaaaatgcccagactctccacagctgtagcagctttctccgccgncgncgccgccttcaccaccaacgtacctcccgccaccgccgccttcatatntgccaccaccaccaccttctccgtacctgtccccaccaccgccttcactgtaatccctagccagatgtcccgattaccacagttgtagc

SEQ ID NO: 217106 - DNA, 362 bp, Glycine max
caggtcttggtttttttttccttttcaccgttggtacatttacttcggcgagcgaatcttgggaagcttgctcggtgacccgaactttgccttaccgttttggaattgggatgctgtagaagggatgcaaatgccaccatatttcgcaaaccctaactcgtcgctctatcacaaactccgaaaccccaagcacttgccaccgcaagtggttgacctgaactatgatccatttgactttaatgatgatacaccttctcatcaacaagtttcgtataatctagccttcatgtacaagcaaatggtgctagcaagtaccaaagaattgttcatgggaagcccttttcgactcggcgataacccta

SEQ ID NO: 217107 - DNA, 360 bp, Glycine max
atttggacaagggcatggactgctgaataaaacagacacggtgatcttcttaacaagtatctttacttgagtggtcgagttgacatgaaacaaattgaaaagacaattcagtaccttattgggtctggaatggatcctcgaaccgagaacagcccctaccttggtttcatttacacttcatttcaagagagggcaaccttcatatcccacggaaacacagccaggcttgctaaggagcacggcgatataaagttggcccagatctgcggcatgattgcctcagatgagaaacgccatgagactgcatacacgaagatagtggaaaagctatttgaggtcgatcctgacggtacagttatg

SEQ ID NO: 217108 - DNA, 409 bp, Glycine max
ggaaccaaccacagaagaactaaattttctttatcatcaaaattgccagagaaaaaaaaacgtttacttatacttcgacagacatcactaccacagagaaaagcgaaacaaaaaaaaaaaaatcccctttttaatactacagctgcccctaactgcttaacttgcgaaccatgcaagaacaactgcttcaccttacagggacatataacaaagaccaaaaaggggggaaaaataaaagataaaaatgacaaactgaattttcaactattcaacatttctcagaacggtattgccggaagatttcaccatgctcctcccttggggcatttagagtagtacttccctgtcatgaatccaactgaatttaaagtgttgacgactccttgactcttgcttgagctctctcctc

SEQ ID NO: 217109 - DNA, 537 bp, Glycine max
gaagattttcaagaccactactggaaccccatttctcatccctacaactggtactggtgcttgggagagtgctctcacaaacacactgtctcctggggatcgaattgtatcgttcctgattggccaattcagcttgctttggattgatcagcagcaacgcctgaagttcaatgttgatgttgttgagagtgaatggggccatggtgctaagcttgatgttctggaatcaaagattgcttcagatacttcacacactataaaggcaatttgcattgttcacaatgagactgcaactggggtcaccaatgacttggccaaagtgagacaaattcttgattcctaccagcatccagcccttcttattgttgatggagtgtcttccatttgtgctcttgatttccgcatggatgaatggggagttgatgtggcaataactggctcccagaaggccctttcccttcccactgggataggtatttgtgggtgcaggccctaaagctattgaggcctcaaaacatgctaaatcacttagagttt

SEQ ID NO: 217110 - DNA, 344 bp, Glycine max
gaaagtagaaagtacgttcatcttcaaaggagtgtaaaagagggtaatatatattttacagaatttctgaaagagcagaaaaaggaagtaaagacaagaatgatttgtgactcaaatcctggaagggatcataggaatagtgttctgtaagtatgcactggcagcagcaactccacttccaagctttacaggataacccacatctttgagtatcatctctacaccagctagacatcccaacagttgcaactcattcaagtggccaagatgtccaattctgaaaaccttcccagcaactttgttcagtccaagacctaagctcaaattgtatctcttccatgccc

SEQ ID NO: 217111 - DNA, 522 bp, Glycine max
acctctttcctttcactttgttgtttgtttgtgttatcttgacttttgaaacgtgagactgagaatggaacgtggggttcttgatagtatcattaataggctgcttgaagtcagaggcagaccagggaagcaggtgcaactttctgaggctgagatcaagcagctttgtcttgtctccagggatatcttcttgaggcagcccaacctcttggaactcgaggcaccaattaagatctgtggagatgtccatggtcaatattccgaccttctgcgactttttgagtatggtggattgcctcctcgttctaattacttgtttctaggggactatgttgatcgtgggaagcaaagtttggagacaatatgtctccttctggcttataaaataaaatatcccaacaactttttccttctgaggggcaaccatgaatgtgcttttataaaccgcatctacggatttatgatgagtgtaaccaaggtacaatgtgaggctttggaaagtgtcacggaatgtttcaactg

SEQ ID NO: 217112 - DNA, 333 bp, Glycine max
cactttgtctctgttctgtgtgttttagaaatggcgatggcaatggcgcttcgcaggctttcatcttcaattgacaagcctctgcgccctctcttcaatgccggttccctctactacaagtcgtctttgcctgatgaagctgtttacgacaaggagcgacccggagttacatggccgaagcagttgaatgctccacttgaggtcgtggatcctgagattgctgatattattgagcttgagaaagctaggcaatggaaggggctagaattgataccgtcagagaatttcacctctgtgtctgagatgcaagcggttggatcggttatgaccaac

SEQ ID NO: 217113 - DNA, 506 bp, Glycine max
gagccggatcgtttaccatcactataggcgttccggaataatatgcacgcgaccgcagctcgtaatttgcggccggcctttttttttttttttaatagaattcttattttatatataacaataaactactatatacacatacaatgtattctagtttagtcccctaaaacacgagcaagttattctgggtgtcggagcccaacttctccaaattcggctggactgcaaattgaatcatacgtgggggtccacaccctgatgccaggggttatttatagaatgaaagccggacgcccaattcctattcccagctcaggactacagattacccaacttggtcattgttaaggatttggcgacagcttttatccaagttcttggtaatgagaaggccagccaggaagtattcaacatctcgggagagaagtatgtcacgtttgacggattaacaagagcattgtgctatggctggtgggttcccagagtcagagatcatttactaccac

SEQ ID NO: 217114 - DNA, 510 bp, Glycine max
  unsure (1)..(510): unsure at all n locations
tccaaaaccatccaactttcatgtttgaagaaaacatacacaatctgttcaaacggtaattttcttttcctttcatttaatttcctcaatggcggcttccgtcgaccagcgtccgtaccccggcctccacaatggcgtcgttcggcccctcaaaccaggcccggatatcccgcgtcccaagaagctaccccagccgccgccgccactctcggattcctcaagcgacgaagaagaagacaccaccttgaacttgaaggacctgattcgcaagggaacaacggaagttgaatcctccattttcgacccgcgcgacgatggaacctctgaccactggatccaacggaactcttcccttgtccgtttaacgggaaagcacccgtttaactcggagccacccctccctcgcctcatgcaccacggnttcatcaccccgggccccctgcactacgtacgcaaccacgggccaagccccccggcccgctgggaagactggaccgtggaagtcacggg

SEQ ID NO: 217115 - DNA, 410 bp, Glycine max
aatagaattctttttttatatataacaataaactactatatgggcatacaatgtattctagtttagtcccctaaaacacgagcaagttattctgggtgtcggagcccaacttctccaaattcggctggactgcaaattgaatcataggtggtggtccacaagtcaatgccaaggtatcaggagactgcatttggaatatgctccgtcaggatactttcagtgatgaatcccacactgtattcccacccttctcttatgctttcttgtatcacgtaccacaccttcaacctatcatacttcttagcccactcatcaagctcttccttcagcaatatatcatcctcggttcggttcgcgtaaaccacatgcatctcggtgcaggcctctggatcctttataatggcttgaac

SEQ ID NO: 217116 - DNA, 377 bp, Glycine max
caaccttgtaacaatgttttcctttttacttcctcttttcgcatcaggaattggaagtctgtttttgttggtgagactaataaactcagagtttcaagtgttcctggtgctcatgttgctttcaatagaaagactgtagaatgtaaggaattacgaattgggaagctgccaattcctgtgccatccaatgtcacagtcaaattggaaggacaggatctacacgcgaaaggtccttatggtgaccttgcattaacttatactcttgaagtgtaggttgagagggaaaaatccagggactctaacgcataaataggcagttcttaccagaatggccaatcatctgcatcggctttttaggacacttactgacaacctgt

SEQ ID NO: 217117 - DNA, 167 bp, Glycine max
gagcaatataatacgttagtaaattttgtaaatacgggtaccgtactggaagtgggcgacggtattgctcgtatttatggtcttgatgaagtaatggcgggtgaattagtggaatttgaagagggtactataggcattgtttttatatttggaatccaaaaatgttg

SEQ ID NO: 217118 - DNA, 577 bp, Glycine max
ggatattctcggccaaagttcaatattgctggtgccatggaatggttgtgtttccgcttggatatgttgtcttctatcacatttgccttttccttaatattcttaatatctattccacagggattcatagatccaggccttgctggtttagctgttacatatggacttaatttgaacatggtacaagcttggatgatatggaatctctgcaatatggagaacaaaattatatcagtagaaagaatacttcagtatacttgtattccttgtgagccttcccttgttgtagacgataatcggccagatccttcttggccttcatatggcgaggttgatatacaagatttgaaggttcgttatgctccacatctcccacttgtcttgcgcggtcttacatgcaaatttcgtggaggactgaaaactggcattgttgggagaacaggaagtggtaaatccactctcatacaaacacttttccgaattgttgagcctactgctggccaagttatgattgacaacatcaatatctcttcaattggacttcatgatttgaggtctagactaagcattattcctc

SEQ ID NO: 217119 - DNA, 476 bp, Glycine max
accatagaatacatcttatgagttctcacaatgtgagacaattgatatgacttctttcgaaacttattaaatcgagttgactaattagaggacattatactgcctttggtctacacatactaagaatgcatcaaaaccaactcgattttctatttgacttttgtataaatcttaccacaataatttcatccttcacccttgtaaagagaatagagtatttcacagctaaaagccctattttataaaatccatttttctataaataaaacaagaaaatccatgtaatccaccagattttcgtcattgtcaacaaacttctgtttctgtatgtttcaatcaatgatcatcagatttctcaaaactggagttggacctcatggtatactcagcaacaagttgagcaaaagatgatgacttattctccagcagccttgttggggtgtcatactcctcaataagtccttgactgagaagca

SEQ ID NO: 217120 - DNA, 400 bp, Glycine max
ggttgacgagcccgctatccgagtgtgttttcccctccgaaaggccgactgggacggggacctttagtgggccgttgcctctttcaggctttctaccgccgtcgccgagttcaagacccagatccactcccacttttgctactctgacttcaacgacatcttcgcccacatcaaggccctcgacaccgacgtcatttcgatcgaggcctccaaggccgacatgaagttgatccagaccttcaagaacgagggatacaactctggtatcggacccggtctttacgacattcactctccccgagttccctccgaggaggagatgaaggagaaggtcaagaccatgttggagattcttgtcgccaacatctttttcatcaactccgactgtggtctcaagacc

SEQ ID NO: 217121 - DNA, 583 bp, Glycine max
aacacaactttgcccccttgtaaatttttttattgtgatgtctaaaagcgaagactggaggcttttgggaggctggttcagcccatttgccctgagggtgcagattgcccttaacctcaagggtctagaatatgaggttgttgaagagaccttgaatcccaaaagtgacctgcttcttaagtccaaccctgtgcacaagaaaatcccagttttcttccatggagataaagtcatttgtgaatctgcaatcatagttgagtacattgatgaggcttggactaatgttccctccatccttccacaaaatgcttatgatcgtgctaatgctcgattttggtttgcctacattgatgagaagtggtttacgtccttgagaagtgttctagtggctgaagatgatgaggcaaagaagccacactttgagcaagcagaagaagggctcgagaggttggaagaagtgttcaacaagtacagtgaagggaaggcctatttcggaggagatagcattggattcattgacattgttttgggagcttcttgagtgcatgagagtcattaggagatgagtggaagaaattgcttg

SEQ ID NO: 217122 - DNA, 435 bp, Glycine max
caagtcaattgatttataataactcaaaatttttcagctaggttacttaaactttcttaatattttacattttaaatttaaaataacttttaaataaataaagttgcaacaacatagcctgagataaaaacaacttggacaacaattttgaaaatactctcgcaattaatttgattccatttactttgcagctgcagctgctgcagcagtccattttagctgaagaatcttggcaaactcaacaagcttatcagtctctggaagaatgcccttcacagcaggatcagcagcaaacgtttcagcccattgggtcaaaccagggtgcttcttttcatcaagcaattttcttccactcatctcctctatgactctcatccaactcaagaagctcccaaaaccaatgtcaatgaatccaatgctatctcctccgaaata

SEQ ID NO: 217123 - DNA, 327 bp, Glycine max
cttggctgtgtctatggatcgcgctttttttctgttgctgggtgtacccctcttgggggtctgctctgacctcttctcccttttcactcatcatccaccgccgtccccccaccaccaccaccaccaccactatcctcactccacgtaccaccaccaccacccaccgcaccaccattattcacccacccgaccaccaccataattatccgcctcaccatcatccccaaccactgacaatctattacccttccgagaaccccaccactactattctcatgggtgtccccgggaacacattacacatcaatccatgatctatctgctctt

SEQ ID NO: 217124 - DNA, 479 bp, Glycine max
atgataagttcatgtaatttttttattatataattaagcatcgtataaataaattaatattttatgaatgagtacatattaagcaaggaggactcacactacgaaaacaactgaagatgtcgaacaatgatgagaccacgtactccccctgcatgaccaactctattatgtacatcgaccagcttctggaaataaattaaagcaccttttgtctgtaaccatggcagttagggtacttgcagttgtcattattacagatagcgccacatctccacgtgaaagatatgttataatgttactagctgtgcctcctggactgcacccaattaatattaaacctgctgcaaaatgtggtgcaagatttaagagtgtgcttatgagaaatccagagtggcatcacctgaaatttgttaggaatttacacaaccacattggtgtctttctctgggtttacaacatgcacataaacttcttgcccc

SEQ ID NO: 217125 - DNA, 490 bp, Glycine max
cttcttcttcttcttctcctcctcctcctccttcttgtattggccatcatctttatcttcattacttttaaattcattgtgatccacatgttggttttctgcactcaatttcttcttcatcatcagcttgccttggtcatcatctttacctttgttgctttttaacctattatccttcatcattttcttgcttggttttgaaaaaaccaattcttggattccatttaatgaagaatcatctttttttcttttcttcatcttgctttcttggttgtcatccaagaactgcacttctttatcatcagcaacattaatattcattacttcatcttttctcccctttttcttggctttctcatccatgtctgagaaaagaatgaaaacaacagattaatcaactttattaacattgcttaatgtgctactgtttagataaaagtataaaagaattgcatcaagaactcacattcggaaagttcttaattttggt

SEQ ID NO: 217126 - DNA, 338 bp, Glycine max
gagcttgtccctaatggaagtgtttaatctcacttacatggaactgacaaggaaagatgatgcacttgattggaattcccggatgaagattgctcttggtgcagctcggggattggcctatctgcatgaagattcaaatccatgtgtcatacatcgagacttcaaggccagcaacatcttgttggagtacgattttacacccaaggtctcagattttggattggctagaacagcactggatgagagaaacaagcacatctccacacatgttatgggaacatttggctacttagctcctgaatatgcaatgactggccatcttctggtcaagagtgacg

SEQ ID NO: 217127 - DNA, 522 bp, Glycine max
catgaaacaagtagctggtaaattaaaattggaattagcacaattcgcagaattggaagcgtttgcccaattcgcttctgatctcgataaagctactcaaaatcaattagcaagaggtcaacgattgcgcgagttgcttaaacaatcccaatcagctcctcttaccgtggaagaacagataataactatttatactggaacgaatggttatcttgattcattagaaattggacaggtaaggaaatttcttgttgagttacgtgcttacttaaacacgaataaacctcaattcaaagaaatcatatcttctaccaagacatttactggggaagcagaagtccttttgaaggaagctattcaagaacagatggaactctttttactacaggaacaggtagaaaaaaaatgattaatcatttaataactttataatttcactttcaaattcttataataggatctttaatatctttttatttcatttgaaataatattaatatataaataaaatgaattcgaatg

SEQ ID NO: 217128 - DNA, 431 bp, Glycine max
tctttttttttttttttttttttttttttttttttttttctattttcattcgaattcatgggatttatatattaatattatattcaaatgaaataaaaagattttaaaagatactaattataagaatttgaaagggaaattataaagttattaaaggattaatcaatttttttctacctgttcctgtagaaaaaagagttccatctgttcttgaatagcttccttcaaaaggacttttgcttccccagtaaatgtcttggtagaagatatgatttctttgaattgaggtttattcgggtttaagtaagcacgtaactcaacaagaaatttccttacctgtccaatttctaatgaatcaagataaccattcgttccagtataaatagttattatctgttcttccacggtaagaggagctgattgggattgtt

SEQ ID NO: 217129 - DNA, 489 bp, Glycine max
  unsure (1)..(489): unsure at all n locations
aggagataagattgcagtagtgctttgtgcttacacctgcagtgaacaatggccggtgcaggagcatctctgctcaagtcttcacttgttcttgacaagtctgagtgggtgaagggacaaacccttcgccaaccttctgcatcagttgtgagatgcaaccccaccaccccatcaggcctcaccatcagagctggttcctatgctgatgagctcgttaagaccgcgaaaacagtggcttcaccagggaggggtattttggccatggatgagtccaatgctacctgtgggaagcgtttggcttcaattgggctagagaacactgaagctaaccgccaggcataccgtacccttctcgtgacagttccaggccttggtcagtacatctctggtgccattctcnttgaggaaacactctaccaatccacaactgatggcaggaagattgttgacctgctgcttgagcaaaacattgttcctggtattaaagtc

SEQ ID NO: 217130 - DNA, 372 bp, Glycine max
gggggggcttaaaccattttggtatatattgaaacataatcaagtacccaacttatatcaaaaggtttattaagcttgaaaggggcatttaaccataaacaaaaataggctccaagactataaaaacattacattttaaacaaattagtcttccactttattggccgtaaacacctactgtaactggtggtgttgctgcctaacaaggatcatattcactgcaaacattttaataggagtatgtttttgacgaacaactcctttttggctttcttggaatcacccctacacatgtactttccaagcttagcgagtgattttggacttggcacggaatgcaagggcattttgggctgccttaacgttttttgg

SEQ ID NO: 217131 - DNA, 487 bp, Glycine max
atcaaccccatcatgatgagtgcttgagagttggaaagtggaaatgcaggagaggcggcatttctgatcaggcagagatactgtgaagctgcagacatgatcaagaagggaaagatgtgcgctctcttcatcaacgatcttgatgcaggagctggtcgtcttggtggaaccacacaatacactgtgaacaaccagatggtgaatgccactctcatgaacattgctgataaccccaccaatgtgcagcttccaggtatgtacaacaaggaagagaacccccgtgtttcccatcattgacaccggtaacgatttctcaacactctatgcacctctcattcgtgatgggcgtatggagaagttctactgtgcacccaacagggaagaccgcattggtgtttgcaccggaattttccgcactgatggttttcctgaacaggaccatgtcaagctttgtgacacctttcctggccaatccattgatttcttt

SEQ ID NO: 217132 - DNA, 571 bp, Glycine max
agctgatgaagctcctgtcacaatcacaggagatattgtttttgtattggaagtgagggatcacccaaggttcagaagggaacaagatgacctctttattgatcaaaatctcagcttaactgaggcactctgtggctttcagtttgccgtcaaacatcttgatggtaggcaactattgatcaaatcaaatcctggggaagtcatcaagccaggtcaatataaagcattaaatgatgagggaatgccacaacacaataggccattcatgaagggtcgcctttacatccaatttaatgttgatttccccgactcagggtttctttcccctgaccaatgccagttattggaaaaggtgttgcctcagaagagcagcaagcacgtctcagatatggagctggatgattgtgaggagaccactttgcatgatgtcaactttaaggaggagatgagacgaaagcagcaacagcaacaccgcgaggcatacgacgaagatgatgatgagccatctggtcaccgagtgcaatgtgctcaaagtagtgcaatttatggtagtagaggttctataatttct

SEQ ID NO: 217133 - DNA, 531 bp, Glycine max
  unsure (1)..(531): unsure at all n locations
accaaagcatttaattttcatatacttgaaatctgccaagaactgtaaactaaataacattaccagccaaaacctaaaggtaaatttatcacgcagttataactgcattatccaaacaaaagataaaccaagcagaaattatagaacctctactaccataaattgcactactgttgagcacattgcactcggtgaccagatggctcatcatcatcttcgtcgtatgcctcgcggtgttgctgttgctgctttcgtctcatctcctccttaaagttgacatcatgcaaagtggtctcctcacaatcatccagctccatatctgagacgtgcttgctgctcttctgaggcaacaccttttccaataactggcattggtcaggggaaagaaaccctgagtcggggaaatcaacattaaattggatgtaaaggcgacccttcatgaatggcctattgtgttgnggcattccctcatcatttaatgctttatattgacctggcttgatgacttccccaggatttgatttgatcaat

SEQ ID NO: 217134 - DNA, 543 bp, Glycine max
ggtaaattgagatgtatacaactctaactgaaaagtatcacacattgtaacagttatctcctaaccattttggcaaacttctgagggcctagaagtgaaaaaccataggcagtaggtagtgataatagcttctttacttttcctacatatgccctttttgtgaagttattataatcattggcttcaatggaatctaatatttgcctatacaacaacaatgatgcccacacaggccacctgctagctgagttgaggtctgcaactcccctctctgcttcatcaaaaaacatcctcgccctctttatttgtcccttcatgaatttccgccatttgtctgtaactcttccgctgaaaatgtcttcatctgaaaggccagctagtgccaattcatcttgtgggagatatactcttcctcttctagcatcctctccaacatctctgagtatgttagtaagttgatttgcaatgcctagagccaatgcaacattataaatgctctctgttgaagcatttgcttttggtgcttatcccattactgggaca

SEQ ID NO: 217135 - DNA, 381 bp, Glycine max
tagtaacaaatactgccgtgcattttttgtattcatgcacagaagttctttacaaaggtggagaattaggcccttgtaaagggtgctccaattggacaggctcttgatataaacattccccctccacggcccaaaagaaagccaaacaatccttattctctgaagaccatgattggtaccacatcattacatagtggagcaaatgatggtaaactcaatctagttgaatcttcacatgttaatcaagcactggacttgaaaaaagaaccacttccatagaaacatgatttagacgaagggctaacaactgtaaaagaaaatatggatgagaaccacgcaaaagtttttactcttctccaggaggtaccctgttcctctgta

SEQ ID NO: 217136 - DNA, 540 bp, Glycine max
  unsure (1)..(540): unsure at all n locations
gtgaagagatgacattgattcctggaaccagtgttgaagaggcttacaacaagctaatagttgaacttgagaaaagtgttcctacattggttggcattgaatgtcccaaggatgagaaacttcctcgtcgcaaaatttttgacaaacctaagacgcgctgcttcactattctccctatggagtttaatcttgtggtccgtcaaaagtttttaaattttgtgaggttcattatgaagaaaagggacaagcttagttgtcaagttggaatcaacccatactccatggaatggactggtttggccaatagattactgagtaagggcaacgatattctgtgttgcgattatgctagttntgatggtttgattaccaagcaagttatgagaaagatgtttggagagttgaatgtggaatcccttctggatttccgctcacaagtatttgtaatagcattnttaatgagatgctcattagatatagctatgaaanattactgcgccaggctaaagctcccagtatgtttttacaatccttcaaaaa
